United States Patent Application Publication US 2025/0333767 A1 - sequence listing, part 5

SEQ ID NO: 28893 - protein, 979 aa, synthetic construct
  REGION 1..979: note = engineered CasX variant
QEIKRINKIRRRLVKDSNTKKAGKTGPMKTLLVRVMTPDLRERLENLRKKPENIPQPISNTSRANLNKLLTDYTEMKKAILHVYWEEFQKDPVGLMSRVAQPASKKIDQNKLKPEMDEKGNLTTAGFACSQCGQPLFVYKLEQVSEKGKAYTNYFGRCNVAEHEKLILLAQLKPEKDSDEAVTYSLGKFGQRALDFYSIHVTKESTHPVKPLAQIAGNRYASGPVGKALSDACMGTIASFLSKYQDIIIEHQKVVKGNQKRLESLRELAGKENLEYPSVTLPPQPHTKEGVDAYNEVIARVRMWVNLNLWQKLKLSRDDAKPLLRLKGFPSFPLVERQANEVDWWDMVCNVKKLINEKKEDGKVFWQNLAGYKRQEALRPYLSSEEDVRKKGKKFARYQLGDLLLHLEKKHGEDWGKVYDEAWERIDKKVEGLSKHIKLEEERRSEDAQSKAALTDWLRAKASFVIEGLKEADKDEFCRCELKLQKWYGDLRGKPFAIEAENSILDISGFSKQYNCAFIWQKDGVKKLNLYLIINYFKGGKLRFKKIKPEAFEANRFYTVINKKSGEIVPMEVNFNFDDPNLIILPLAFGKRQGREFIWNDLLSLETGSLKLANGRVIEKTLYNRRTRQDEPALFVALTFERREVLDSSNIKPMNLIGVDRGENIPAVIALTDPEGCPLSRFKDSLGNPTHILRIRESYKEKQRTIQAKKEVEQRRAGGYSRKYASKAKNLADDMVRNTARDLLYYAVTQDAMLIFENLSRGFGRQGKRTFMAERQYTRMEDWLTAKLAYEGLPSKTYLSKTLAQYTSKTCSNCGFTITSADYDRVLEKLKKTATGWMTTINGKELKVEGQITYYNRYKRQNVVKDLSVELDRLSEESVNNDISSWTKGRSGEALSLLKKRFSHRPVQEKFVCLNCGFETHADEQAALNIARSWLFLRSQEYKKYQTNKTTGNTDKRAFVETWQSFYRKKLKEVWKPAV

SEQ ID NO: 28894 - protein, 978 aa, synthetic construct
  REGION 1..978: note = engineered CasX variant
QEIKRINKIRRRLVKDSNTKKAGKTGPMKTLLVRVMTPDLRERLENLRKKPENIPQPISNTSRANLNKLLTDYTEMKKAILHVYWEEFQKDPVGLMSRVAQPASKKIDQNKLKPEMDEKGNLTTAGFACSQCGQPLFVYKLEQVSEKGKAYTNYFGRCNVAEHEKLILLAQLKPEKDSDEAVTYSLGKFGQRALDFYSIHVTKESTHPVKPLAQIAGNRYASGPVGKALSDACMGTIASFLSKYQDIIIEHQKVVKGNQKRLESLRELAGKENLEYPSVTLPPQPHTKEGVDAYNEVIARVRMWVNLNLWQKLKLSRDDAKPLLRLKGFPSFPLVERQANEVDWWDMVCNVKKLINEKKEDGKVFWQNLAGYKRQEALRPYLSSEEDRKKGKKFARYQLGDLLLHLEKKHGEDWGKVYDEAWERIDKKVEGLSKHIKLEEERRSEDAQSKAALTDWLRAKASFVIEGLKEADKDEFCRCELKLQKWYGDLRGKPFAIEAENSILDISGFSKQYNCAFIWQKDGVKKLNLYLIINYFKGGKLRFKKIKPEAFEANRFYTVINKKSGEIVPMEVNFNFDDPNLIILPLAFGKRQGREFIWNDLLSLETGSLKLANGRVIEKTLYNRRTRQDEPALFVALTFERREVLDSSNIKPMNLIGVDRGENIPAVIALTDPEGCPLSRFKDSLGNPTHILRIRESYKEKQRTIQAKKEVEQRRAGGYSRKYASKAKNLADDMVRNTARDLLYYAVTQDAMLIFENLSRGFGRQGKRTFMAERQYTRMEDWLTAKLAYEGLPSKTYLSKTLAQYTSKTCSNCGFTITSADYDRMLEKLKKTATGWMTTINGKELKVEGQITYYNRYKRQNVVKDLSVELDRLSEESVNNDISSWTKGRSGEALSLLKKRFSHRPVQEKFVCLNCGFETHADEQAALNIARSWLFLRSQEYKKYQTNKTTGNTDKRAFVETWQSFYRKKLKEVWKPAV

SEQ ID NO: 28895 - protein, 978 aa, synthetic construct
  REGION 1..978: note = engineered CasX variant
QEIKRINKIRRRLVKDSNTKKAGKTGPMKTLLVRVMTPDLRERLENLRKKPENIPQPISNTSRANLNKLLTDYTEMKKAILHVYWEEFQKDPVGLMSRVAQPASKKIDQNKLKPEMDEKGNLTTAGFACSQCGQPLFVYKLEQVSEKGKAYTNYFGRCNVAEHEKLILLAQLKPEKDSDEAVTYSLGKFGQRALDFYSIHVTKESTHPVKPLAQIAGNRYASGPVGKALSDACMGTIASFLSKYQDIIIEHQKVVKGNQKRLESLRELAGKENLEYPSVTLPPQPHTKEGVDAYNEVIARVRMWVNLNLWQKLKLSRDDAKPLLRLKGFPSFPLVERQANEVDWWDMVCNVKKLINEKKEDGKVFWQNLAGYKRQEALRPYLSSEEDRKKGKKFARYQLGDLLLHLEKKHGEDWGKVYDEAWERIDKKVEGLSKHIKLEEERRSEDAQSKAALTDWLRAKASFVIEGLKEADKDEFCRCELKLQKWYGDLRGKPFAIEAENSILDISGFSKQYNCAFIWQKDGVKKLNLYLIINYFKGGKLRFKKIKPEAFEANRFYTVINKKSGEIVPMEVNFNFDDPNLIILPLAFGKRQGREFIWNDLLSLETGSLKLANGRVIEKTLYNRRTRQDEPALFVALTFERREVLDSSNIKPMNLIGVDRGENIPAVIALTDPEGCPLSRFKDSLGNPTHILRIRESYKEKQRTIQAKKEVEQRRAGGYSRKYASKAKNLADDMVRNTARDLLYYAVTQDAMLIFENLSRGFGRQGKRTFMAERQYTRMEDWLTAKLAYEGLPSKTYLSKTLAQYTSKTCSNCGFTITSADYDRVLEKLKKTATGWMTTINGKELKVEGQITYYNRYKRQNVVKDLSVELDRLSEESVNNDISSWTKGRQGEALSLLKKRFSHRPVQEKFVCLNCGFETHADEQAALNIARSWLFLRSQEYKKYQTNKTTGNTDKRAFVETWQSFYRKKLKEVWKPAV

SEQ ID NO: 28896 - protein, 978 aa, synthetic construct
  REGION 1..978: note = engineered CasX variant
QEIKRINKIRRRLVKDSNTKKAGKTGPMKTLLVRVMTPDLRERLENLRKKPENIPQPISNTSRANLNKLLTDYTEMKKAILHVYWEEFQKDPVGLMSRVAQPASKKIDQNKLKPEMDEKGNLTTAGFACSQCGQPLFVYKLEQVSEKGKAYTNYFGRCNVAEHEKLILLAQLKPEKDSDEAVTYSLGKFGQRALDFYSIHVTKESTHPVKPLAQIAGNRYASGPVGKALSDACMGTIASFLSKYQDIIIEHQKVVKGNQKRLESLRELAGKENLEYPSVTLPPQPHTKEGVDAYNEVIARVRMWVNLNLWQKLKLSRDDAKPLLRLKGFPSFPLVERQANEVDWWDMVCNVKKLINEKKEDGKVFWQNLAGYKRQEALRPYLSSEEDRKKGKKFARYQLGDLLLHLEKKHGEDWGKVYDEAWERIDKKVEGLSKHIKLEEERRSEDAQSKAALTDWLRAKASFVIEGLKEADKDEFCRCELKLQKWYGDLRGKPFAIEAENSILDISGFSKQYNCAFIWQKDGVKKLNLYLIINYFKGGKLRFKKIKPEAFEANRFYTVINKKSGEIVPMEVNFNFDDPNLIILPLAFGKRQGREFIWNDLLSLETGSLKLANGRVIEKTLYNRRTRQDEPALFVALTFERREVLDSSNIKPMNLIGVDRGENIPAVIALTDPEGCPLSRFKDSLGNPTHILRIRESYKEKQRTIQAKKEVEQRRAGGYSRKYASKAKNLADDMVRNTARDLLYYAVTQDAMLIFENLSRGFGRQGKRTFMAERQYTRMEDWLTAKLAYEGLPSKTYLSKTLAQYTSKTCSNCGFTITSADYDRVLEKLKKTATGWMTTINGKELKVEGQITYYNRYKRQNVVKDLSVELDRLSEESVNNDISSWTKGRSGEALSLLKKRFSHRPVQEKFVCLNCEFETHADEQAALNIARSWLFLRSQEYKKYQTNKTTGNTDKRAFVETWQSFYRKKLKEVWKPAV

SEQ ID NO: 28897 - protein, 979 aa, synthetic construct
  REGION 1..979: note = engineered CasX variant
QEIKRINKIRRRLVKDSNTKKAGKTGPMKTLLVRVMTPDLRERLENLRKKPENIPQPISNTSRANLNKLLTDYTEMKKAILHVYWEEFQKDPVGLMSRVAQPASKKIDQNKLKPEMDEKGNLTTAGFACSQCGQPLFVYKLEQVSEKGKAYTNYFGRCNVAEHEKLILLAQLKPEKDSDEAVTYSLGKFGQRALDFYSIHVTKESTHPVKPLAQIAGNRYASGPVGKALSDACMGTIASFLSKYQDIIIEHQKVVKGNQKRLESLRELAGKENLEYPSVTLPPQPHTKEGVDAYNEVIARVRMWVNLNLWQKLKLSRDDAKPLLRLKGFPSFPLVERQANEVDWWDMVCNVKKLINEKKEDGKVFWQNLAGYKRQEALRPYLSSEEDRKKGKKFARYQLGDLLLHLEKKHGEDWGKVYDEAWERIDKKVEGLSKHIKLEEERRSEDAQSKAALTDWLRAKASFVIEGLKEADKDEFCRCELKLQKWYGDLRGKPFAIEAENSILDISGFSKQYNCAFIWQKDGVKKLNLYLIINYFKGGKLRFKKIKPEAFEANRFYTVINKKSGEIVPMEVNFNFDDPNLIILPLAFGKRQGREFIWNDLLSLETGSLKLANGRVIEKTLYNRRTRQDEPALFVALTFERREVLDSSNIKPMNLIGVDRGENIPAVIALTDPEGCPLSRFKDSLGNPTHILRIRESYKEKQRTIQAKKEVEQRRAGGYSRKYASKAKNLADDMVRNTARDLLYYAVTQDAMLIFENLSRGFGRQGKRTFMAERQYTRMEDWLTAKLAYEGLPSKTYLSKTLAQYTSKTCSNCGFTITSADYDRVLEKLKKTATGWMTTINGKELKVEGQITYYNRYKRQNVVKDLSVELDRLSEESVNNDISSWTKGRSGEALSLLKKRFSHRPVQEKFVCLNCGFETHADEQAALNIARSWLFLRSQEYKKYQTNKTSTGNTDKRAFVETWQSFYRKKLKEVWKPAV

SEQ ID NO: 28898 - protein, 979 aa, synthetic construct
  REGION 1..979: note = engineered CasX variant
QEIKRINKIRRRLVKDSNTKKAGKTGPMKTLLVRVMTPDLRERLENLRKKPENIPQPISNTSRANLNKLLTDYTEMKKAILHVYWEEFQKDPVGLMSRVAQPASKKIDQNKLKPEMDEKGNLTTAGFACSQCGQPLFVYKLEQVSEKGKAYTNYFGRCNVAEHEKLILLAQLKPEKDSDEAVTYSLGKFGQRALDFYSIHVTKESTHPVKPLAQIAGNRYASGPVGKALSDACMGTIASFLSKYQDIIIEHQKVVKGNQKRLESLRELAGKENLEYPSVTLPPQPHTKEGVDAYNEVIARVRMWVNLNLWQKLKLSRDDAKPLLRLKGFPSFPLVERQANEVDWWDMVCNVKKLINEKKEDGKVFWQNLAGYKRQEALRPYLSSEEDRKKGKKFARYQLGDLLLHLEKKHGEDWGKVYDEAWERIDKKVEGLSKHIKLEEERRSEDAQSKAALTDWLRAKASFVIEGLKEADKDEFCRCELKLQKWYGDLRGKPFAIEAENSILDISGFSKQYNCAFIWQKDGVKKLNLYLIINYFKGGKLRFKKIKPEAFEANRFYTVINKKSGEIVPMEVNFNFDDPNLIILPLAFGKRQGREFIWNDLLSLETGSLKLANGRVIEKTLYNRRTRQDEPALFVALTFERREVLDSSNIKPMNLIGVDRGENIPAVIALTDPEGCPLSRFKDSLGNPTHILRIRESYKEKQRTIQAKKEVEQRRAGGYSRKYASKAKNLADDMVRNTARDLLYYAVTQDAMLIFENLSRGFGRQGKRTFMAERQYTRMEDWLTAKLAYEGLPSKTYLSKTLAQYTSKTCSNCGFTITSADYDRVLEKLKKTATGWMTTINGKELKVEGQITYYNRYKRQNVVKDLSVELDRLSEESVNNDISSWTKGRSGEALSLLKKRFSHRPVQEKFVCLNCGFETHADEQAALNIARSWLFLRSQEYKKYQTNKTTGKNTDKRAFVETWQSFYRKKLKEVWKPAV

SEQ ID NO: 28899 - protein, 978 aa, synthetic construct
  REGION 1..978: note = engineered CasX variant
QEIKRINKIRRRLVKDSNTKKAGKTGPMKTLLVRVMTPDLRERLENLRKKPENIPQPISNTSRANLNKLLTDYTEMKKAILHVYWEEFQKDPVGLMSRVAQPASKKIDQNKLKPEMDEKGNLTTAGFACSQCGQPLFVYKLEQVSEKGKAYTNYFGRCNVAEHEKLILLAQLKPEKDSDEAVTYSLGKFGQRALDFYSIHVTKESTHPVKPLAQIAGNRYASGPVGKALSDACMGTIASFLSKYQDIIIEHQKVVKGNQKRLESLRELAGKENLEYPSVTLPPQPHTKEGVDAYNEVIARVRMWVNLNLWQKLKLSRDDAKPLLRLKKFPSFPLVERQANEVDWWDMVCNVKKLINEKKEDGKVFWQNLAGYKRQEALRPYLSSEEDRKKGKKFARYQLGDLLLHLEKKHGEDWGKVYDEAWERIDKKVEGLSKHIKLEEERRSEDAQSKAALTDWLRAKASFVIEGLKEADKDEFCRCELKLQKWYGDLRGKPFAIEAENSILDISGFSKQYNCAFIWQKDGVKKLNLYLIINYFKGGKLRFKKIKPEAFEANRFYTVINKKSGEIVPMEVNFNFDDPNLIILPLAFGKRQGREFIWNDLLSLETGSLKLANGRVIEKTLYNRRTRQDEPALFVALTFERREVLDSSNIKPMNLIGVDRGENIPAVIALTDPEGCPLSRFKDSLGNPTHILRIRESYKEKQRTIQAKKEVEQRRAGGYSRKYASKAKNLADDMVRNTARDLLYYAVTQDAMLIFENLSRGFGRQGKRTFMAERQYTRMEDWLTAKLAYEGLPSKTYLSKTLAQYTSKTCSNCGFTITSADYDRVLEKLKKTATGWMTTINGKELKVEGQITYYNRYKRQNVVKDLSVELDRLSEESVNNDISSWTKGRSGEALSLLKKRFSHRPVQEKFVCLNCGFETHADEQAALNIARSWLFLRSQEYKKYQTNKTTGNTDKRAFVETWQSFYRKKLKEVWKPAV

SEQ ID NO: 28900 - protein, 978 aa, synthetic construct
  REGION 1..978: note = engineered CasX variant
QEIKRINKIRRRLVKDSNTKKAGKTGPMKTLLVRVMTPDLRERLENLRKKPENIPQPISNTSRANLNKLLTDYTEMKKAILHVYWEEFQKDPVGLMSRVAQPASKKIDQNKLKPEMDEKGNLTTAGFACSQCGQPLFVYKLEQVSEKGKAYTNYFGRCNVAEHEKLILLAQLKPEKDSDEAVTYSLGKFGQRALDFYSIHVTKESTHPVKPLAQIAGNRYASGPVGKALSDACMGTIASFLSKYQDIIIEHQKVVKGNQKRLESLRELAGKENLEYPSVTLPPQPHTKEGVDAYNEVIARVRMWVNLNLWQKLKLSRDDAKPLLRLKGFPSFPLVERQANEVDWWDMVCNVKKLINEKKEDGKVFWQNLAGYKRQEALRPYLSSEEDRKKGKKFARYQLGDLLLHLEKKHGEDWGKVYDEAWERIDKKVEGLSKHIKLEEERRSEDAQSKAALTDWLRAKASFVIEGLKEADKDEFCRCELKLQKWYGDLRGKPFAIEAENSILDISGFSKQYNCAFIWQKDGVKKLNLYLIINYFKGGKLRFKKIKPEAFEANRFYTVINKKSGEIVPMEVNFNFDDPNLIILPLAFGKRQGREFIWNDLLSLETGSLKLANGRVIEKTLYNRRTRQDEPALFVALTFERREVLDSSNIKPMNLIGVDRGENIPAVIALTDPEGCPLSRFKDSLGNPTHILRIRERYKEKQRTIQAKKEVEQRRAGGYSRKYASKAKNLADDMVRNTARDLLYYAVTQDAMLIFENLSRGFGRQGKRTFMAERQYTRMEDWLTAKLAYEGLPSKTYLSKTLAQYTSKTCSNCGFTITSADYDRVLEKLKKTATGWMTTINGKELKVEGQITYYNRYKRQNVVKDLSVELDRLSEESVNNDISSWTKGRSGEALSLLKKRFSHRPVQEKFVCLNCGFETHADEQAALNIARSWLFLRSQEYKKYQTNKTTGNTDKRAFVETWQSFYRKKLKEVWKPAV

SEQ ID NO: 28901 - protein, 978 aa, synthetic construct
  REGION 1..978: note = engineered CasX variant
QEIKRINKIRRRLVKDSNTKKAGKTGPMKTLLVRVMTPDLRERLENLRKKPENIPQPISNTSRANLNKLLTDYTEMKKAILHVYWEEFQKDPVGLMSRVAQPASKKIDQNKLKPEMDEKGNLTTAGFACSQCGQPLFVYKLEQVSEKGKAYTNYFGRCNVAEHEKLILLAQLKPEKDSDEAVTYSLGKFGQRALDFYSIHVTKESTHPVKPLAQIAGNRYASGPVGKALSDACMGTIASFLSKYQDIIIEHQKVVKGNQKRLESLRELAGKENLEYPSVTLPPQPHTKEGVDAYNEVIARVRMWVNLNLWQKLKLSRDDAKPLLRLKGFPSFPLVERQANEVDWWDMVCNVKKLINEKKEDGKVFWQNLAGYKRQEALRPYLSSEEDRKKGKKFARYQLGDLLLHLEKKHGEDWGKVYDEAWERIDKKVEGLSKHIKLEEERRSEDAQSKAALTDWLRAKASFVIEGLKEADKDEFCRCELKLQKWYGDLRGKPFAIEAENSILDISGFSKQYNCAFIWQKDGVKKLNLYLIINYFKGGKLRFKKIKPEAFEANRFYTVINKKSGEIVPMEVNFNFDDPNLIILPLAFGKRQGREFIWNDLLSLETGSLQLANGRVIEKTLYNRRTRQDEPALFVALTFERREVLDSSNIKPMNLIGVDRGENIPAVIALTDPEGCPLSRFKDSLGNPTHILRIRESYKEKQRTIQAKKEVEQRRAGGYSRKYASKAKNLADDMVRNTARDLLYYAVTQDAMLIFENLSRGFGRQGKRTFMAERQYTRMEDWLTAKLAYEGLPSKTYLSKTLAQYTSKTCSNCGFTITSADYDRVLEKLKKTATGWMTTINGKELKVEGQITYYNRYKRQNVVKDLSVELDRLSEESVNNDISSWTKGRSGEALSLLKKRFSHRPVQEKFVCLNCGFETHADEQAALNIARSWLFLRSQEYKKYQTNKTTGNTDKRAFVETWQSFYRKKLKEVWKPAV

SEQ ID NO: 28902 - protein, 978 aa, synthetic construct
  REGION 1..978: note = engineered CasX variant
QEIKRINKIRRRLVKDSNTKKAGKTGPMKTLLVRVMTPDLRERLENLRKKPENIPQPISNTSRANLNKLLTDYTEMKKAILHVYWEEFQKDPVGLMSRVAQPASKKIDQNKLKPEMDEKGNLTTAGFACSQCGQPLFVYKLEQVSEKGKAYTNYFGRCNVAEHEKLILLAQLKPEKDSDEAVTYSLGKFGQRALDFYSIHVTKESTHPVKPLAQIAGNRYASGPVGKALSDACMGTIASFLSKYQDIIIEHQKVVKGNQKRLESLRELAGKENLEYPSVTLPPQPHTKEGVDAYNEVIARVRMWVNLNLWQKLKLSRDDAKPLLRLKGFPSFPLVERQANEVDWWDMVCNVKKLINEKKEDGKVFWQNLAGYKRQEALRPYLSSEEDRKKGKKFARYQLGDLLLHLEKKHGEDWGKVYDEAWERIDKKVEGLSKHIKLEEERRSEDAQSKAALTDWLRAKASFVIEGLKEADKDEFCRCELKLQKWYGDLRGKPFAIEAENSILDISGFSKQYNCAFIWQKDGVKKLNLYLIINYFKGGKLRFKKIKPEAFEANRFYTVINKKSGEIVPMEVNFNFDDPNLIILPLAFGKRQGREFIWNDLLSLETGSLKLANGRVIEKTLYNRRTRQDEPALFVALTFERREVLDSSNIKPMNLIGVDRGENIPAVIALTDPEGCPLSRFKDSLGNPTHILRIGESYKEKQRTIQAKKEVEQRRAGGYSRKYASKAKNLADDMVRNTARDLLYYAVTQDAMLIFENLSRGFGRQGKRTFSAERQYTRMEDWLTAKLAYEGLPSKTYLSKTLAQYTSKTCSNCGFTITSADYDRVLEKLKKTATGWMTTINGKELKVEGQITYYNRYKRQNVVKDLSVELDRLSEESVNNDISSWDKGRSGEALSLLKKRFSHRPVQEKFVCLNCGFETHADEQAALNIARSWLFLRSQEYKKYQTNKTTGNTDKRAFVETWQSFYRKKLKEVWKPAV

SEQ ID NO: 28903 - protein, 978 aa, synthetic construct
  REGION 1..978: note = engineered CasX variant
QEIKRINKIRRRLVKDSNTKKAGKTGPMKTLLVRVMTPDLRERLENLRKKPENIPQPISNTSRANLNKLLTDYTEMKKAILHVYWEEFQVDPVGLMSRVAQPASKKIDQNKLKPEMDEKGNLTTAGFACSQCGQPLFVYKLEQVSEKGKAYTNYFGRCNVAEHEKLILLAQLKPEKDSDEAVTYSLGKFGQRALDFYSIHVTKESTHPVKPLAQIAGNRYASGPVGKALSDACMGTIASFLSKYQDIIIEHQKVVKGNQKRLESLRELAGKENLEYPSVTLPPQPHTKEGVDAYNEVIARVRMWVNLNLWQKLKLSRDDAKPLLRLKGFPSFPLVERQANEVDWWDMVCNVKKLINEKKEDGKVFWQNLAGYKRQEALRPYLSSEEDRKKGKKFARYQLGDLLLHLEKKHGEDWGKVYDEAWERIDKKVEGLSKHIKLEEERRSEDAQSKAALTDWLRAKASFVIEGLKEADKDEFCRCELKLQKWYGDLRGKPFAIEAENSILDISGFSKQYNCAFIWQKDGVKKLNLYLIINYFKGGKLRFKKIKPEAFEANRFYTVINKKSGEIVPMEVNFNFDDPNLIILPLAFGKRQGREFIWNDLLSLETGSLKLANGRVIEKTLYNRRTRQDEPALFVALTFERREVLDSSNIKPMNLIGVDRGENIPAVIALTDPEGCPLSRFKDSLGNPTHILRIGESYKEKQRTIQAKKEVEQRRAGGYSRKYASKAKNLADDMVRNTARDLLYYAVTQDAMLIFENLSRGFGRQGKRTFSAERQYTRMEDWLTAKLAYEGLPSKTYLSKTLAQYTSKTCSNCGFTITSADYDRVLEKLKKTATGWMTTINGKELKVEGQITYYNRYKRQNVVKDLSVELDRLSEESVNNDISSWTKGRSGEALSLLKKRFSHRPVQEKFVCLNCGFETHADEQAALNIARSWLFLRSQEYKKYQTNKTTGNTDKRAFVETWQSFYRKKLKEVWKPAV

SEQ ID NO: 28904 - protein, 978 aa, synthetic construct
  REGION 1..978: note = engineered CasX variant
QEIKRLNKIRRRLVKDSNTKKAGKTGPMKTLLVRVMTPDLRERLENLRKKPENIPQPISNTSRANLNKLLTDYTEMKKAILHVYWEEFQKDPVGLMSRVAQPASKKIDQNKLKPEMDEKGNLTTAGFACSQCGQPLFVYKLEQVSEKGKAYTNYFGRCNVAEHEKLILLAQLKPEKDSDEAVTYSLGKFGQRALDFYSIHVTKESTHPVKPLAQIAGNRYASGPVGKALSDACMGTIASFLSKYQDIIIEHQKVVKGNQKRLESLRELAGKENLEYPSVTLPPQPHTKEGVDAYNEVIARVRMWVNLNLWQKLKLSRDDAKPLLRLKGFPSFPLVERQANEVDWWDMVCNVKKLINEKKEDGKVFWQNLAGYKRQEALRPYLSSEEDRKKGKKFARYQLGDLLLHLEKKHGEDWGKVYDEAWERIDKKVEGLSKHIKLEEERRSEDAQSKAALTDWLRAKASFVIEGLKEADKDEFCRCELKLQKWYGDLRGKPFAIEAENSILDISGFSKQYNCAFIWQKDGVKKLNLYLIINYFKGGKLRFKKIKPEAFEANRFYTVINKKSGEIVPMEVNFNFDDPNLIILPLAFGKRQGREFIWNDLLSLETGSLKLANGRVIEKTLYNRRTRQDEPALFVALTFERREVLDSSNIKPMNLIGVDRGENIPAVIALTDPEGCPLSRFKDSLGNPTHILRIGESYKEKQRTIQAKKEVEQRRAGGYSRKYASKAKNLADDMVRNTARDLLYYAVTQDAMLIFENLSRGFGRQGKRTFSAERQYTRMEDWLTAKLAYEGLPSKTYLSKTLAQYTSKTCSNCGFTITSADYDRVLEKLKKTATGWMTTINGKELKVEGQITYYNRYKRQNVVKDLSVELDRLSEESVNNDISSWTKGRSGEALSLLKKRFSHRPVQEKFVCLNCGFETHADEQAALNIARSWLFLRSQEYKKYQTNKTTGNTDKRAFVETWQSFYRKKLKEVWKPAV

SEQ ID NO: 28905 - protein, 978 aa, synthetic construct
  REGION 1..978: note = engineered CasX variant
QEIKRINKIRRRLVKDSNTKKAGKTGPMKTLLVRVMTPDLRERLENLRKKPENIPQPISNTSRANLNKLLTDYTEMKKAILHVYWEEFQKDPVGLMSRVAQPASKKIDQNKLKPEMDEKGNLTTAGFACSQCGQPLFVYKLEQVSEKGKAYTNYVGRCNVAEHEKLILLAQLKPEKDSDEAVTYSLGKFGQRALDFYSIHVTKESTHPVKPLAQIAGNRYASGPVGKALSDACMGTIASFLSKYQDIIIEHQKVVKGNQKRLESLRELAGKENLEYPSVTLPPQPHTKEGVDAYNEVIARVRMWVNLNLWQKLKLSRDDAKPLLRLKGFPSFPLVERQANEVDWWDMVCNVKKLINEKKEDGKVFWQNLAGYKRQEALRPYLSSEEDRKKGKKFARYQLGDLLLHLEKKHGEDWGKVYDEAWERIDKKVEGLSKHIKLEEERRSEDAQSKAALTDWLRAKASFVIEGLKEADKDEFCRCELKLQKWYGDLRGKPFAIEAENSILDISGFSKQYNCAFIWQKDGVKKLNLYLIINYFKGGKLRFKKIKPEAFEANRFYTVINKKSGEIVPMEVNFNFDDPNLIILPLAFGKRQGREFIWNDLLSLETGSLKLANGRVIEKTLYNRRTRQDEPALFVALTFERREVLDSSNIKPMNLIGVDRGENIPAVIALTDPEGCPLSRFKDSLGNPTHILRIGESYKEKQRTIQAKKEVEQRRAGGYSRKYASKAKNLADDMVRNTARDLLYYAVTQDAMLIFENLSRGFGRQGKRTFSAERQYTRMEDWLTAKLAYEGLPSKTYLSKTLAQYTSKTCSNCGFTITSADYDRVLEKLKKTATGWMTTINGKELKVEGQITYYNRYKRQNVVKDLSVELDRLSEESVNNDISSWTKGRSGEALSLLKKRFSHRPVQEKFVCLNCGFETHADEQAALNIARSWLFLRSQEYKKYQTNKTTGNTDKRAFVETWQSFYRKKLKEVWKPAV

SEQ ID NO: 28906 - protein, 978 aa, synthetic construct
  REGION 1..978: note = engineered CasX variant
QEIKRINKIRRRLVKDSNTKKAGKTGPMKTLLVRVMTPDLRERLENLRKKPENIPQPISNTSRANLNKLLTDYTEMKKAILHVYWEEFQKDPVGLMSRVAQPASKKIDQNKLKPEMDEKGNLTTAGFACSQCGQPLFVYKLEQVSEKGKAYTNYFGRCNVAEHEKLILLAQLKPEKDSDEAVTYSLGKFGQRALDFYSIHVTKESTHPVKPLAQIAGNRYASGPVGKALSDACMGTIASFLSKYQDIIIEHQKVVKGNQKRLESLRELAGKENLEYPSVTLPPQPHTKEGVDAYNEVIARVRMWVNLNLWQKLKLSRDDAKPLLRLKGFPSFPLVERQANEVDWWDMVCNVKKLINEKKEDGKVFWQNLAGYKRQEALRPYLSSEEDRKKGKKFARYQLGDLLLHLEKKHGEDWGKVYDEAWERIDKKVEGLSKHIKLEEERRSEDAQSKAALTDWLRAKASFVIEGLKEADKDEFCRCELKLQKWYGDLRGKPFAIEAENSILDISGFSKQYNCAFIWQKDGVKKLNLYLIINYFKGGKLRFKKIKPEAFEANRFYTVINKKSGEIVPMEVNFNFDDPNLIILPLAFGKRQGREFIWNDLLSLETGSLKLANGRVIEKTLYNRRTRQDEPALFVALTFERREVLDSSNIKPMNLIGVDRGENIPAVIALTDPEGCPLSRFKDSLGNPTHILRIGESYKEKQRTIQAKKEVEQRRAGGYSRKYASKAKNLADDMVRNTARDLLYYAVTQDAMLIFENLSRGFGRQGKRTFSAERQYTRMEDWLTAKLAYEGLASKTYLSKTLAQYTSKTCSNCGFTITSADYDRVLEKLKKTATGWMTTINGKELKVEGQITYYNRYKRQNVVKDLSVELDRLSEESVNNDISSWTKGRSGEALSLLKKRFSHRPVQEKFVCLNCGFETHADEQAALNIARSWLFLRSQEYKKYQTNKTTGNTDKRAFVETWQSFYRKKLKEVWKPAV

SEQ ID NO: 28907 - protein, 978 aa, synthetic construct
  REGION 1..978: note = engineered CasX variant
QEIKRINKIRRRLVKDSNTKKAGKTGPMKTLLVRVMTPDLRERLENLRKKPENIPQPISNTSRANLNKLLTDYTEMKKAILHVYWEEFQKDPVGLMSRVAQPASKKIDQNKLKPEMDEKGNLTTAGFACSQCGQPLFVYKLEQVSEKGKAYTNYFGRCNVAEHEKLILLAQLKPEKDSDEAVTYSLGKFGQRALDFYSIHVTKESTHPVKPLAQIAGNRYASGPVGKALSDACMGTIASFLSKYQDIIIEHQKVVKGNQKRLESLRELAGKENLEYPSVTLPPQPHTKEGVDAYNEVIARVRMWVNLNLWQKLKLSRDDAKPLLRLKGFPSFPLVERQANEVDWWDMVCNVKKLINEKKEDGKVFWQNLAGYKRQEALRPYLSSEEDRKKGKKFARYQLGDLLLHLEKKHGEDWGKVYDEAWERIDKKVEGLSKHIKLEEERRSEDAQSKAALTDWLRAKASFVIEGLKEADKDEFCRCELKLQKWYGDLRGKPFAIEAENSILDISGFSKQYNCAFIWQKDGVKKLNLYLIINYFKGGKLRFKKIKPEAFEANRFYTVINKKSGEIVPMEVNFNFDDPNLIILPLAFGKRQGREFIWNDLLSLETGSLKLANGRVIEKTLYNRRTRQDEPALFVALTFERREVLDSSNIKPMNLIGVDRGENIPAVIALTDPEGCPLSRFKDSLGNPTHILRIGESYKEKQRTIQAKKEVEQRRAGGYSRKYASKAKNLADDMVRNTARDLLYYAVTQDAMLIFENLSRGFGRQGKRTFSAERQYTRMEDWLTAKLAYEGLPSKVYLSKTLAQYTSKTCSNCGFTITSADYDRVLEKLKKTATGWMTTINGKELKVEGQITYYNRYKRQNVVKDLSVELDRLSEESVNNDISSWTKGRSGEALSLLKKRFSHRPVQEKFVCLNCGFETHADEQAALNIARSWLFLRSQEYKKYQTNKTTGNTDKRAFVETWQSFYRKKLKEVWKPAV

SEQ ID NO: 28908 - protein, 979 aa, synthetic construct
  REGION 1..979: note = engineered CasX variant
QEIKRINKIRRRLVKDSNTKKAGKTGPMKTLLVRVMTPDLRERLENLRKKPENIPQPISNTSRANLNKLLTDYTEMKKAILHVYWEEFQKDPVGLMSRVAQPASKKIDQNKLKPEMDEKGNLTTAGFACSQCGQPLFVYKLEQVSEKGKAYTNYFGRCNVAEHEKLILLAQLKPEKDSDEAVTYSLGKFGQRALDFYSIHVTKESTHPVKPLAQIAGNRYASGPVGKALSDACMGTIASFLSKYQDIIIEHQKVVKGNQKRLESLRELAGKENLEYPSVTLPPQPHTKEGVDAYNEVIARVRMWVNLNLWQKLKLSRDDAKPLLRLKGFPSFPLVERQANEVDWWDMVCNVKKLINEKKEDGKVFWQNLAGYKRQEALRPYLSSEEDRKKGKKFARYQLGDLLLHLEKKHGEDWGKVYDEAWERIDKKVEGLSKHIKLEEERRSEDAQSKAALTDWLRAKASFVIEGLKEADKDEFCRCELKLQKWYGDLRGKPFAIEAENSILDISGFSKQYNCAFIWQKDGVKKLNLYLIINYFKGGKLRFKKIKPEAFEANRFYTVINKKSGEIVPMEVNFNFDDPNLIILPLAFGKRQGREFIWNDLLSLETGSLKLANGRVIEKTLYNRRTRQDEPALFVALTFERREVLDSSNIKPMNLIGVDRGENIPAVIALTDPEGCPLSRFKDSLGNPTHILRIGESYKEKQRTIQAKKEVEQRRAGGYSRKYASKAKNLADDMVRNTARDLLYYAVTQDAMLIFENLSRGFGRQGKRTFSAERQYTRMEDWLTAKLAYEGPLPSKTYLSKTLAQYTSKTCSNCGFTITSADYDRVLEKLKKTATGWMTTINGKELKVEGQITYYNRYKRQNVVKDLSVELDRLSEESVNNDISSWTKGRSGEALSLLKKRFSHRPVQEKFVCLNCGFETHADEQAALNIARSWLFLRSQEYKKYQTNKTTGNTDKRAFVETWQSFYRKKLKEVWKPAV

SEQ ID NO: 28909 - protein, 979 aa, synthetic construct
  REGION 1..979: note = engineered CasX variant
QEIKRINKIRRRLVKDSNTKKAGKTGPMKTLLVRVMTPDLRERLENLRKKPENIPQPISNTSRANLNKLLTDYTEMKKAILHVYWEEFQKDPVGLMSRVAQPASKKIDQNKLKPEMDEKGNLTTAGFACSQCGQPLFVYKLEQVSEKGKAYTNYFGRCNVAEHEKLILLAQLKPEKDSDEAVTYSLGKFGQRALDFYSIHVTKESTHPVKPLAQIAGNRYASGPVGKALSDACMGTIASFLSKYQDIIIEHQKVVKGNQKRLESLRELAGKENLEYPSVTLPPQPHTKEGVDAYNEVIARVRMWVNLNLWQKLKLSRDDAKPLLRLKGFPSFPLVERQANEVDWWDMVCNVKKLINEKKEDGKVFWQNLAGYKRQEALRPYLSSEEDVRKKGKKFARYQLGDLLLHLEKKHGEDWGKVYDEAWERIDKKVEGLSKHIKLEEERRSEDAQSKAALTDWLRAKASFVIEGLKEADKDEFCRCELKLQKWYGDLRGKPFAIEAENSILDISGFSKQYNCAFIWQKDGVKKLNLYLIINYFKGGKLRFKKIKPEAFEANRFYTVINKKSGEIVPMEVNFNFDDPNLIILPLAFGKRQGREFIWNDLLSLETGSLKLANGRVIEKTLYNRRTRQDEPALFVALTFERREVLDSSNIKPMNLIGVDRGENIPAVIALTDPEGCPLSRFKDSLGNPTHILRIGESYKEKQRTIQAKKEVEQRRAGGYSRKYASKAKNLADDMVRNTARDLLYYAVTQDAMLIFENLSRGFGRQGKRTFSAERQYTRMEDWLTAKLAYEGLPSKTYLSKTLAQYTSKTCSNCGFTITSADYDRVLEKLKKTATGWMTTINGKELKVEGQITYYNRYKRQNVVKDLSVELDRLSEESVNNDISSWTKGRSGEALSLLKKRFSHRPVQEKFVCLNCGFETHADEQAALNIARSWLFLRSQEYKKYQTNKTTGNTDKRAFVETWQSFYRKKLKEVWKPAV

SEQ ID NO: 28910 - protein, 978 aa, synthetic construct
  REGION 1..978: note = engineered CasX variant
QEIKRINKIRRRLVKDSNTKKAGKTGPMKTLLVRVMTPDLRERLENLRKKPENIPQPISNTSRANLNKLLTDYTEMKKAILHVYWEEFQKDPVGLMSRVAQPASKKIDQNKLKPEMDEKGNLTTAGFACSQCGQPLFVYKLEQVSEKGKAYTNYFGRCNVAEHEKLILLAQLKPEKDSDEAVTYSLGKFGQRALDFYSIHVTKESTHPVKPLAQIAGNRYASGPVGKALSDACMGTIASFLSKYQDIIIEHQKVVKGNQKRLESLRELAGKENLEYPSVTLPPQPHTKEGVDAYNEVIARVRMWVNLNLWQKLKLSRDDAKPLLRLKGFPSFPLVERQANEVDWWDMVCNVKKLINEKKEDGKVFWQNLAGYKRQEALRPYLSSEEDRKKGKKFARYQLGDLLLHLEKKHGEDWGKVYDEAWERIDKKVEGLSKHIKLEEERRSEDAQSKAALTDWLRAKASFVIEGLKEADKDEFCRCELKLQKWYGDLRGKPFAIEAENSILDISGFSKQYNCAFIWQKDGVKKLNLYLIINYFKGGKLRFKKIKPEAFEANRFYTVINKKSGEIVPMEVNFNFDDPNLIILPLAFGKRQGREFIWNDLLSLETGSLKLANGRVIEKTLYNRRTRQDEPALFVALTFERREVLDSSNIKPMNLIGVDRGENIPAVIALTDPEGCPLSRFKDSLGNPTHILRIGESYKEKQRTIQAKKEVEQRRAGGYSRKYASKAKNLADDMVRNTARDLLYYAVTQDAMLIFENLSRGFGRQGKRTFSAERQYTRMEDWLTAKLAYEGLPSKTYLSKTLAQYTSKTCSNCGFTITSADYDRMLEKLKKTATGWMTTINGKELKVEGQITYYNRYKRQNVVKDLSVELDRLSEESVNNDISSWTKGRSGEALSLLKKRFSHRPVQEKFVCLNCGFETHADEQAALNIARSWLFLRSQEYKKYQTNKTTGNTDKRAFVETWQSFYRKKLKEVWKPAV

SEQ ID NO: 28911 - protein, 978 aa, synthetic construct
  REGION 1..978: note = engineered CasX variant
QEIKRINKIRRRLVKDSNTKKAGKTGPMKTLLVRVMTPDLRERLENLRKKPENIPQPISNTSRANLNKLLTDYTEMKKAILHVYWEEFQKDPVGLMSRVAQPASKKIDQNKLKPEMDEKGNLTTAGFACSQCGQPLFVYKLEQVSEKGKAYTNYFGRCNVAEHEKLILLAQLKPEKDSDEAVTYSLGKFGQRALDFYSIHVTKESTHPVKPLAQIAGNRYASGPVGKALSDACMGTIASFLSKYQDIIIEHQKVVKGNQKRLESLRELAGKENLEYPSVTLPPQPHTKEGVDAYNEVIARVRMWVNLNLWQKLKLSRDDAKPLLRLKGFPSFPLVERQANEVDWWDMVCNVKKLINEKKEDGKVFWQNLAGYKRQEALRPYLSSEEDRKKGKKFARYQLGDLLLHLEKKHGEDWGKVYDEAWERIDKKVEGLSKHIKLEEERRSEDAQSKAALTDWLRAKASFVIEGLKEADKDEFCRCELKLQKWYGDLRGKPFAIEAENSILDISGFSKQYNCAFIWQKDGVKKLNLYLIINYFKGGKLRFKKIKPEAFEANRFYTVINKKSGEIVPMEVNFNFDDPNLIILPLAFGKRQGREFIWNDLLSLETGSLKLANGRVIEKTLYNRRTRQDEPALFVALTFERREVLDSSNIKPMNLIGVDRGENIPAVIALTDPEGCPLSRFKDSLGNPTHILRIGESYKEKQRTIQAKKEVEQRRAGGYSRKYASKAKNLADDMVRNTARDLLYYAVTQDAMLIFENLSRGFGRQGKRTFSAERQYTRMEDWLTAKLAYEGLPSKTYLSKTLAQYTSKTCSNCGFTITSADYDRVLEKLKKTATGWMTTINGKELKVEGQITYYNRYKRQNVVKDLSVELDRLSEESVNNDISSWTKGRQGEALSLLKKRFSHRPVQEKFVCLNCGFETHADEQAALNIARSWLFLRSQEYKKYQTNKTTGNTDKRAFVETWQSFYRKKLKEVWKPAV

SEQ ID NO: 28912 - protein, 978 aa, synthetic construct
  REGION 1..978: note = engineered CasX variant
QEIKRINKIRRRLVKDSNTKKAGKTGPMKTLLVRVMTPDLRERLENLRKKPENIPQPISNTSRANLNKLLTDYTEMKKAILHVYWEEFQKDPVGLMSRVAQPASKKIDQNKLKPEMDEKGNLTTAGFACSQCGQPLFVYKLEQVSEKGKAYTNYFGRCNVAEHEKLILLAQLKPEKDSDEAVTYSLGKFGQRALDFYSIHVTKESTHPVKPLAQIAGNRYASGPVGKALSDACMGTIASFLSKYQDIIIEHQKVVKGNQKRLESLRELAGKENLEYPSVTLPPQPHTKEGVDAYNEVIARVRMWVNLNLWQKLKLSRDDAKPLLRLKGFPSFPLVERQANEVDWWDMVCNVKKLINEKKEDGKVFWQNLAGYKRQEALRPYLSSEEDRKKGKKFARYQLGDLLLHLEKKHGEDWGKVYDEAWERIDKKVEGLSKHIKLEEERRSEDAQSKAALTDWLRAKASFVIEGLKEADKDEFCRCELKLQKWYGDLRGKPFAIEAENSILDISGFSKQYNCAFIWQKDGVKKLNLYLIINYFKGGKLRFKKIKPEAFEANRFYTVINKKSGEIVPMEVNFNFDDPNLIILPLAFGKRQGREFIWNDLLSLETGSLKLANGRVIEKTLYNRRTRQDEPALFVALTFERREVLDSSNIKPMNLIGVDRGENIPAVIALTDPEGCPLSRFKDSLGNPTHILRIGESYKEKQRTIQAKKEVEQRRAGGYSRKYASKAKNLADDMVRNTARDLLYYAVTQDAMLIFENLSRGFGRQGKRTFSAERQYTRMEDWLTAKLAYEGLPSKTYLSKTLAQYTSKTCSNCGFTITSADYDRVLEKLKKTATGWMTTINGKELKVEGQITYYNRYKRQNVVKDLSVELDRLSEESVNNDISSWTKGRSGEALSLLKKRFSHRPVQEKFVCLNCEFETHADEQAALNIARSWLFLRSQEYKKYQTNKTTGNTDKRAFVETWQSFYRKKLKEVWKPAV

SEQ ID NO: 28913 - protein, 979 aa, synthetic construct
  REGION 1..979: note = engineered CasX variant
QEIKRINKIRRRLVKDSNTKKAGKTGPMKTLLVRVMTPDLRERLENLRKKPENIPQPISNTSRANLNKLLTDYTEMKKAILHVYWEEFQKDPVGLMSRVAQPASKKIDQNKLKPEMDEKGNLTTAGFACSQCGQPLFVYKLEQVSEKGKAYTNYFGRCNVAEHEKLILLAQLKPEKDSDEAVTYSLGKFGQRALDFYSIHVTKESTHPVKPLAQIAGNRYASGPVGKALSDACMGTIASFLSKYQDIIIEHQKVVKGNQKRLESLRELAGKENLEYPSVTLPPQPHTKEGVDAYNEVIARVRMWVNLNLWQKLKLSRDDAKPLLRLKGFPSFPLVERQANEVDWWDMVCNVKKLINEKKEDGKVFWQNLAGYKRQEALRPYLSSEEDRKKGKKFARYQLGDLLLHLEKKHGEDWGKVYDEAWERIDKKVEGLSKHIKLEEERRSEDAQSKAALTDWLRAKASFVIEGLKEADKDEFCRCELKLQKWYGDLRGKPFAIEAENSILDISGFSKQYNCAFIWQKDGVKKLNLYLIINYFKGGKLRFKKIKPEAFEANRFYTVINKKSGEIVPMEVNFNFDDPNLIILPLAFGKRQGREFIWNDLLSLETGSLKLANGRVIEKTLYNRRTRQDEPALFVALTFERREVLDSSNIKPMNLIGVDRGENIPAVIALTDPEGCPLSRFKDSLGNPTHILRIGESYKEKQRTIQAKKEVEQRRAGGYSRKYASKAKNLADDMVRNTARDLLYYAVTQDAMLIFENLSRGFGRQGKRTFSAERQYTRMEDWLTAKLAYEGLPSKTYLSKTLAQYTSKTCSNCGFTITSADYDRVLEKLKKTATGWMTTINGKELKVEGQITYYNRYKRQNVVKDLSVELDRLSEESVNNDISSWTKGRSGEALSLLKKRFSHRPVQEKFVCLNCGFETHADEQAALNIARSWLFLRSQEYKKYQTNKTSTGNTDKRAFVETWQSFYRKKLKEVWKPAV

SEQ ID NO: 28914 - protein, 979 aa, synthetic construct
  REGION 1..979: note = engineered CasX variant
QEIKRINKIRRRLVKDSNTKKAGKTGPMKTLLVRVMTPDLRERLENLRKKPENIPQPISNTSRANLNKLLTDYTEMKKAILHVYWEEFQKDPVGLMSRVAQPASKKIDQNKLKPEMDEKGNLTTAGFACSQCGQPLFVYKLEQVSEKGKAYTNYFGRCNVAEHEKLILLAQLKPEKDSDEAVTYSLGKFGQRALDFYSIHVTKESTHPVKPLAQIAGNRYASGPVGKALSDACMGTIASFLSKYQDIIIEHQKVVKGNQKRLESLRELAGKENLEYPSVTLPPQPHTKEGVDAYNEVIARVRMWVNLNLWQKLKLSRDDAKPLLRLKGFPSFPLVERQANEVDWWDMVCNVKKLINEKKEDGKVFWQNLAGYKRQEALRPYLSSEEDRKKGKKFARYQLGDLLLHLEKKHGEDWGKVYDEAWERIDKKVEGLSKHIKLEEERRSEDAQSKAALTDWLRAKASFVIEGLKEADKDEFCRCELKLQKWYGDLRGKPFAIEAENSILDISGFSKQYNCAFIWQKDGVKKLNLYLIINYFKGGKLRFKKIKPEAFEANRFYTVINKKSGEIVPMEVNFNFDDPNLIILPLAFGKRQGREFIWNDLLSLETGSLKLANGRVIEKTLYNRRTRQDEPALFVALTFERREVLDSSNIKPMNLIGVDRGENIPAVIALTDPEGCPLSRFKDSLGNPTHILRIGESYKEKQRTIQAKKEVEQRRAGGYSRKYASKAKNLADDMVRNTARDLLYYAVTQDAMLIFENLSRGFGRQGKRTFSAERQYTRMEDWLTAKLAYEGLPSKTYLSKTLAQYTSKTCSNCGFTITSADYDRVLEKLKKTATGWMTTINGKELKVEGQITYYNRYKRQNVVKDLSVELDRLSEESVNNDISSWTKGRSGEALSLLKKRFSHRPVQEKFVCLNCGFETHADEQAALNIARSWLFLRSQEYKKYQTNKTTGKNTDKRAFVETWQSFYRKKLKEVWKPAV

SEQ ID NO: 28915 - protein, 978 aa, synthetic construct
  REGION 1..978: note = engineered CasX variant
QEIKRINKIRRRLVKDSNTKKAGKTGPMKTLLVRVMTPDLRERLENLRKKPENIPQPISNTSRANLNKLLTDYTEMKKAILHVYWEEFQKDPVGLMSRVAQPASKKIDQNKLKPEMDEKGNLTTAGFACSQCGQPLFVYKLEQVSEKGKAYTNYFGRCNVAEHEKLILLAQLKPEKDSDEAVTYSLGKFGQRALDFYSIHVTKESTHPVKPLAQIAGNRYASGPVGKALSDACMGTIASFLSKYQDIIIEHQKVVKGNQKRLESLRELAGKENLEYPSVTLPPQPHTKEGVDAYNEVIARVRMWVNLNLWQKLKLSRDDAKPLLRLKKFPSFPLVERQANEVDWWDMVCNVKKLINEKKEDGKVFWQNLAGYKRQEALRPYLSSEEDRKKGKKFARYQLGDLLLHLEKKHGEDWGKVYDEAWERIDKKVEGLSKHIKLEEERRSEDAQSKAALTDWLRAKASFVIEGLKEADKDEFCRCELKLQKWYGDLRGKPFAIEAENSILDISGFSKQYNCAFIWQKDGVKKLNLYLIINYFKGGKLRFKKIKPEAFEANRFYTVINKKSGEIVPMEVNFNFDDPNLIILPLAFGKRQGREFIWNDLLSLETGSLKLANGRVIEKTLYNRRTRQDEPALFVALTFERREVLDSSNIKPMNLIGVDRGENIPAVIALTDPEGCPLSRFKDSLGNPTHILRIGESYKEKQRTIQAKKEVEQRRAGGYSRKYASKAKNLADDMVRNTARDLLYYAVTQDAMLIFENLSRGFGRQGKRTFSAERQYTRMEDWLTAKLAYEGLPSKTYLSKTLAQYTSKTCSNCGFTITSADYDRVLEKLKKTATGWMTTINGKELKVEGQITYYNRYKRQNVVKDLSVELDRLSEESVNNDISSWTKGRSGEALSLLKKRFSHRPVQEKFVCLNCGFETHADEQAALNIARSWLFLRSQEYKKYQTNKTTGNTDKRAFVETWQSFYRKKLKEVWKPAV

SEQ ID NO: 28916 - protein, 978 aa, synthetic construct
  REGION 1..978: note = engineered CasX variant
QEIKRINKIRRRLVKDSNTKKAGKTGPMKTLLVRVMTPDLRERLENLRKKPENIPQPISNTSRANLNKLLTDYTEMKKAILHVYWEEFQKDPVGLMSRVAQPASKKIDQNKLKPEMDEKGNLTTAGFACSQCGQPLFVYKLEQVSEKGKAYTNYFGRCNVAEHEKLILLAQLKPEKDSDEAVTYSLGKFGQRALDFYSIHVTKESTHPVKPLAQIAGNRYASGPVGKALSDACMGTIASFLSKYQDIIIEHQKVVKGNQKRLESLRELAGKENLEYPSVTLPPQPHTKEGVDAYNEVIARVRMWVNLNLWQKLKLSRDDAKPLLRLKGFPSFPLVERQANEVDWWDMVCNVKKLINEKKEDGKVFWQNLAGYKRQEALRPYLSSEEDRKKGKKFARYQLGDLLLHLEKKHGEDWGKVYDEAWERIDKKVEGLSKHIKLEEERRSEDAQSKAALTDWLRAKASFVIEGLKEADKDEFCRCELKLQKWYGDLRGKPFAIEAENSILDISGFSKQYNCAFIWQKDGVKKLNLYLIINYFKGGKLRFKKIKPEAFEANRFYTVINKKSGEIVPMEVNFNFDDPNLIILPLAFGKRQGREFIWNDLLSLETGSLKLANGRVIEKTLYNRRTRQDEPALFVALTFERREVLDSSNIKPMNLIGVDRGENIPAVIALTDPEGCPLSRFKDSLGNPTHILRIGERYKEKQRTIQAKKEVEQRRAGGYSRKYASKAKNLADDMVRNTARDLLYYAVTQDAMLIFENLSRGFGRQGKRTFSAERQYTRMEDWLTAKLAYEGLPSKTYLSKTLAQYTSKTCSNCGFTITSADYDRVLEKLKKTATGWMTTINGKELKVEGQITYYNRYKRQNVVKDLSVELDRLSEESVNNDISSWTKGRSGEALSLLKKRFSHRPVQEKFVCLNCGFETHADEQAALNIARSWLFLRSQEYKKYQTNKTTGNTDKRAFVETWQSFYRKKLKEVWKPAV

SEQ ID NO: 28917 - protein, 978 aa, synthetic construct
  REGION 1..978: note = engineered CasX variant
QEIKRINKIRRRLVKDSNTKKAGKTGPMKTLLVRVMTPDLRERLENLRKKPENIPQPISNTSRANLNKLLTDYTEMKKAILHVYWEEFQKDPVGLMSRVAQPASKKIDQNKLKPEMDEKGNLTTAGFACSQCGQPLFVYKLEQVSEKGKAYTNYFGRCNVAEHEKLILLAQLKPEKDSDEAVTYSLGKFGQRALDFYSIHVTKESTHPVKPLAQIAGNRYASGPVGKALSDACMGTIASFLSKYQDIIIEHQKVVKGNQKRLESLRELAGKENLEYPSVTLPPQPHTKEGVDAYNEVIARVRMWVNLNLWQKLKLSRDDAKPLLRLKGFPSFPLVERQANEVDWWDMVCNVKKLINEKKEDGKVFWQNLAGYKRQEALRPYLSSEEDRKKGKKFARYQLGDLLLHLEKKHGEDWGKVYDEAWERIDKKVEGLSKHIKLEEERRSEDAQSKAALTDWLRAKASFVIEGLKEADKDEFCRCELKLQKWYGDLRGKPFAIEAENSILDISGFSKQYNCAFIWQKDGVKKLNLYLIINYFKGGKLRFKKIKPEAFEANRFYTVINKKSGEIVPMEVNFNFDDPNLIILPLAFGKRQGREFIWNDLLSLETGSLQLANGRVIEKTLYNRRTRQDEPALFVALTFERREVLDSSNIKPMNLIGVDRGENIPAVIALTDPEGCPLSRFKDSLGNPTHILRIGESYKEKQRTIQAKKEVEQRRAGGYSRKYASKAKNLADDMVRNTARDLLYYAVTQDAMLIFENLSRGFGRQGKRTFSAERQYTRMEDWLTAKLAYEGLPSKTYLSKTLAQYTSKTCSNCGFTITSADYDRVLEKLKKTATGWMTTINGKELKVEGQITYYNRYKRQNVVKDLSVELDRLSEESVNNDISSWTKGRSGEALSLLKKRFSHRPVQEKFVCLNCGFETHADEQAALNIARSWLFLRSQEYKKYQTNKTTGNTDKRAFVETWQSFYRKKLKEVWKPAV

SEQ ID NO: 28918 - protein, 978 aa, synthetic construct
  REGION 1..978: note = engineered CasX variant
QEIKRINKIRRRLVKDSNTKKAGKTGPMKTLLVRVMTPDLRERLENLRKKPENIPQPISNTSRANLNKLLTDYTEMKKAILHVYWEEFQVDPVGLMSRVAQPASKKIDQNKLKPEMDEKGNLTTAGFACSQCGQPLFVYKLEQVSEKGKAYTNYFGRCNVAEHEKLILLAQLKPEKDSDEAVTYSLGKFGQRALDFYSIHVTKESTHPVKPLAQIAGNRYASGPVGKALSDACMGTIASFLSKYQDIIIEHQKVVKGNQKRLESLRELAGKENLEYPSVTLPPQPHTKEGVDAYNEVIARVRMWVNLNLWQKLKLSRDDAKPLLRLKGFPSFPLVERQANEVDWWDMVCNVKKLINEKKEDGKVFWQNLAGYKRQEALRPYLSSEEDRKKGKKFARYQLGDLLLHLEKKHGEDWGKVYDEAWERIDKKVEGLSKHIKLEEERRSEDAQSKAALTDWLRAKASFVIEGLKEADKDEFCRCELKLQKWYGDLRGKPFAIEAENSILDISGFSKQYNCAFIWQKDGVKKLNLYLIINYFKGGKLRFKKIKPEAFEANRFYTVINKKSGEIVPMEVNFNFDDPNLIILPLAFGKRQGREFIWNDLLSLETGSLKLANGRVIEKTLYNRRTRQDEPALFVALTFERREVLDSSNIKPMNLIGVDRGENIPAVIALTDPEGCPLSRFKDSLGNPTHILRIGESYKEKQRTIQAKKEVEQRRAGGYSRKYASKAKNLADDMVRNTARDLLYYAVTQDAMLIFENLSRGFGRQGKRTFMAERQYTRMEDWLTAKLAYEGLPSKTYLSKTLAQYTSKTCSNCGFTITSADYDRVLEKLKKTATGWMTTINGKELKVEGQITYYNRYKRQNVVKDLSVELDRLSEESVNNDISSWDKGRSGEALSLLKKRFSHRPVQEKFVCLNCGFETHADEQAALNIARSWLFLRSQEYKKYQTNKTTGNTDKRAFVETWQSFYRKKLKEVWKPAV

SEQ ID NO: 28919 - protein, 978 aa, synthetic construct
  REGION 1..978: note = engineered CasX variant
QEIKRLNKIRRRLVKDSNTKKAGKTGPMKTLLVRVMTPDLRERLENLRKKPENIPQPISNTSRANLNKLLTDYTEMKKAILHVYWEEFQKDPVGLMSRVAQPASKKIDQNKLKPEMDEKGNLTTAGFACSQCGQPLFVYKLEQVSEKGKAYTNYFGRCNVAEHEKLILLAQLKPEKDSDEAVTYSLGKFGQRALDFYSIHVTKESTHPVKPLAQIAGNRYASGPVGKALSDACMGTIASFLSKYQDIIIEHQKVVKGNQKRLESLRELAGKENLEYPSVTLPPQPHTKEGVDAYNEVIARVRMWVNLNLWQKLKLSRDDAKPLLRLKGFPSFPLVERQANEVDWWDMVCNVKKLINEKKEDGKVFWQNLAGYKRQEALRPYLSSEEDRKKGKKFARYQLGDLLLHLEKKHGEDWGKVYDEAWERIDKKVEGLSKHIKLEEERRSEDAQSKAALTDWLRAKASFVIEGLKEADKDEFCRCELKLQKWYGDLRGKPFAIEAENSILDISGFSKQYNCAFIWQKDGVKKLNLYLIINYFKGGKLRFKKIKPEAFEANRFYTVINKKSGEIVPMEVNFNFDDPNLIILPLAFGKRQGREFIWNDLLSLETGSLKLANGRVIEKTLYNRRTRQDEPALFVALTFERREVLDSSNIKPMNLIGVDRGENIPAVIALTDPEGCPLSRFKDSLGNPTHILRIGESYKEKQRTIQAKKEVEQRRAGGYSRKYASKAKNLADDMVRNTARDLLYYAVTQDAMLIFENLSRGFGRQGKRTFMAERQYTRMEDWLTAKLAYEGLPSKTYLSKTLAQYTSKTCSNCGFTITSADYDRVLEKLKKTATGWMTTINGKELKVEGQITYYNRYKRQNVVKDLSVELDRLSEESVNNDISSWDKGRSGEALSLLKKRFSHRPVQEKFVCLNCGFETHADEQAALNIARSWLFLRSQEYKKYQTNKTTGNTDKRAFVETWQSFYRKKLKEVWKPAV

SEQ ID NO: 28920 - protein, 978 aa, synthetic construct
  REGION 1..978: note = engineered CasX variant
QEIKRINKIRRRLVKDSNTKKAGKTGPMKTLLVRVMTPDLRERLENLRKKPENIPQPISNTSRANLNKLLTDYTEMKKAILHVYWEEFQKDPVGLMSRVAQPASKKIDQNKLKPEMDEKGNLTTAGFACSQCGQPLFVYKLEQVSEKGKAYTNYVGRCNVAEHEKLILLAQLKPEKDSDEAVTYSLGKFGQRALDFYSIHVTKESTHPVKPLAQIAGNRYASGPVGKALSDACMGTIASFLSKYQDIIIEHQKVVKGNQKRLESLRELAGKENLEYPSVTLPPQPHTKEGVDAYNEVIARVRMWVNLNLWQKLKLSRDDAKPLLRLKGFPSFPLVERQANEVDWWDMVCNVKKLINEKKEDGKVFWQNLAGYKRQEALRPYLSSEEDRKKGKKFARYQLGDLLLHLEKKHGEDWGKVYDEAWERIDKKVEGLSKHIKLEEERRSEDAQSKAALTDWLRAKASFVIEGLKEADKDEFCRCELKLQKWYGDLRGKPFAIEAENSILDISGFSKQYNCAFIWQKDGVKKLNLYLIINYFKGGKLRFKKIKPEAFEANRFYTVINKKSGEIVPMEVNFNFDDPNLIILPLAFGKRQGREFIWNDLLSLETGSLKLANGRVIEKTLYNRRTRQDEPALFVALTFERREVLDSSNIKPMNLIGVDRGENIPAVIALTDPEGCPLSRFKDSLGNPTHILRIGESYKEKQRTIQAKKEVEQRRAGGYSRKYASKAKNLADDMVRNTARDLLYYAVTQDAMLIFENLSRGFGRQGKRTFMAERQYTRMEDWLTAKLAYEGLPSKTYLSKTLAQYTSKTCSNCGFTITSADYDRVLEKLKKTATGWMTTINGKELKVEGQITYYNRYKRQNVVKDLSVELDRLSEESVNNDISSWDKGRSGEALSLLKKRFSHRPVQEKFVCLNCGFETHADEQAALNIARSWLFLRSQEYKKYQTNKTTGNTDKRAFVETWQSFYRKKLKEVWKPAV

SEQ ID NO: 28921 - protein, 978 aa, synthetic construct
  REGION 1..978: note = engineered CasX variant
QEIKRINKIRRRLVKDSNTKKAGKTGPMKTLLVRVMTPDLRERLENLRKKPENIPQPISNTSRANLNKLLTDYTEMKKAILHVYWEEFQKDPVGLMSRVAQPASKKIDQNKLKPEMDEKGNLTTAGFACSQCGQPLFVYKLEQVSEKGKAYTNYFGRCNVAEHEKLILLAQLKPEKDSDEAVTYSLGKFGQRALDFYSIHVTKESTHPVKPLAQIAGNRYASGPVGKALSDACMGTIASFLSKYQDIIIEHQKVVKGNQKRLESLRELAGKENLEYPSVTLPPQPHTKEGVDAYNEVIARVRMWVNLNLWQKLKLSRDDAKPLLRLKGFPSFPLVERQANEVDWWDMVCNVKKLINEKKEDGKVFWQNLAGYKRQEALRPYLSSEEDRKKGKKFARYQLGDLLLHLEKKHGEDWGKVYDEAWERIDKKVEGLSKHIKLEEERRSEDAQSKAALTDWLRAKASFVIEGLKEADKDEFCRCELKLQKWYGDLRGKPFAIEAENSILDISGFSKQYNCAFIWQKDGVKKLNLYLIINYFKGGKLRFKKIKPEAFEANRFYTVINKKSGEIVPMEVNFNFDDPNLIILPLAFGKRQGREFIWNDLLSLETGSLKLANGRVIEKTLYNRRTRQDEPALFVALTFERREVLDSSNIKPMNLIGVDRGENIPAVIALTDPEGCPLSRFKDSLGNPTHILRIGESYKEKQRTIQAKKEVEQRRAGGYSRKYASKAKNLADDMVRNTARDLLYYAVTQDAMLIFENLSRGFGRQGKRTFMAERQYTRMEDWLTAKLAYEGLASKTYLSKTLAQYTSKTCSNCGFTITSADYDRVLEKLKKTATGWMTTINGKELKVEGQITYYNRYKRQNVVKDLSVELDRLSEESVNNDISSWDKGRSGEALSLLKKRFSHRPVQEKFVCLNCGFETHADEQAALNIARSWLFLRSQEYKKYQTNKTTGNTDKRAFVETWQSFYRKKLKEVWKPAV

SEQ ID NO: 28922 - protein, 978 aa, synthetic construct
  REGION 1..978: note = engineered CasX variant
QEIKRINKIRRRLVKDSNTKKAGKTGPMKTLLVRVMTPDLRERLENLRKKPENIPQPISNTSRANLNKLLTDYTEMKKAILHVYWEEFQKDPVGLMSRVAQPASKKIDQNKLKPEMDEKGNLTTAGFACSQCGQPLFVYKLEQVSEKGKAYTNYFGRCNVAEHEKLILLAQLKPEKDSDEAVTYSLGKFGQRALDFYSIHVTKESTHPVKPLAQIAGNRYASGPVGKALSDACMGTIASFLSKYQDIIIEHQKVVKGNQKRLESLRELAGKENLEYPSVTLPPQPHTKEGVDAYNEVIARVRMWVNLNLWQKLKLSRDDAKPLLRLKGFPSFPLVERQANEVDWWDMVCNVKKLINEKKEDGKVFWQNLAGYKRQEALRPYLSSEEDRKKGKKFARYQLGDLLLHLEKKHGEDWGKVYDEAWERIDKKVEGLSKHIKLEEERRSEDAQSKAALTDWLRAKASFVIEGLKEADKDEFCRCELKLQKWYGDLRGKPFAIEAENSILDISGFSKQYNCAFIWQKDGVKKLNLYLIINYFKGGKLRFKKIKPEAFEANRFYTVINKKSGEIVPMEVNFNFDDPNLIILPLAFGKRQGREFIWNDLLSLETGSLKLANGRVIEKTLYNRRTRQDEPALFVALTFERREVLDSSNIKPMNLIGVDRGENIPAVIALTDPEGCPLSRFKDSLGNPTHILRIGESYKEKQRTIQAKKEVEQRRAGGYSRKYASKAKNLADDMVRNTARDLLYYAVTQDAMLIFENLSRGFGRQGKRTFMAERQYTRMEDWLTAKLAYEGLPSKVYLSKTLAQYTSKTCSNCGFTITSADYDRVLEKLKKTATGWMTTINGKELKVEGQITYYNRYKRQNVVKDLSVELDRLSEESVNNDISSWDKGRSGEALSLLKKRFSHRPVQEKFVCLNCGFETHADEQAALNIARSWLFLRSQEYKKYQTNKTTGNTDKRAFVETWQSFYRKKLKEVWKPAV

SEQ ID NO: 28923 - protein, 979 aa, synthetic construct
  REGION 1..979: note = engineered CasX variant
QEIKRINKIRRRLVKDSNTKKAGKTGPMKTLLVRVMTPDLRERLENLRKKPENIPQPISNTSRANLNKLLTDYTEMKKAILHVYWEEFQKDPVGLMSRVAQPASKKIDQNKLKPEMDEKGNLTTAGFACSQCGQPLFVYKLEQVSEKGKAYTNYFGRCNVAEHEKLILLAQLKPEKDSDEAVTYSLGKFGQRALDFYSIHVTKESTHPVKPLAQIAGNRYASGPVGKALSDACMGTIASFLSKYQDIIIEHQKVVKGNQKRLESLRELAGKENLEYPSVTLPPQPHTKEGVDAYNEVIARVRMWVNLNLWQKLKLSRDDAKPLLRLKGFPSFPLVERQANEVDWWDMVCNVKKLINEKKEDGKVFWQNLAGYKRQEALRPYLSSEEDRKKGKKFARYQLGDLLLHLEKKHGEDWGKVYDEAWERIDKKVEGLSKHIKLEEERRSEDAQSKAALTDWLRAKASFVIEGLKEADKDEFCRCELKLQKWYGDLRGKPFAIEAENSILDISGFSKQYNCAFIWQKDGVKKLNLYLIINYFKGGKLRFKKIKPEAFEANRFYTVINKKSGEIVPMEVNFNFDDPNLIILPLAFGKRQGREFIWNDLLSLETGSLKLANGRVIEKTLYNRRTRQDEPALFVALTFERREVLDSSNIKPMNLIGVDRGENIPAVIALTDPEGCPLSRFKDSLGNPTHILRIGESYKEKQRTIQAKKEVEQRRAGGYSRKYASKAKNLADDMVRNTARDLLYYAVTQDAMLIFENLSRGFGRQGKRTFMAERQYTRMEDWLTAKLAYEGPLPSKTYLSKTLAQYTSKTCSNCGFTITSADYDRVLEKLKKTATGWMTTINGKELKVEGQITYYNRYKRQNVVKDLSVELDRLSEESVNNDISSWDKGRSGEALSLLKKRFSHRPVQEKFVCLNCGFETHADEQAALNIARSWLFLRSQEYKKYQTNKTTGNTDKRAFVETWQSFYRKKLKEVWKPAV

SEQ ID NO: 28924 - protein, 979 aa, synthetic construct
  REGION 1..979: note = engineered CasX variant
QEIKRINKIRRRLVKDSNTKKAGKTGPMKTLLVRVMTPDLRERLENLRKKPENIPQPISNTSRANLNKLLTDYTEMKKAILHVYWEEFQKDPVGLMSRVAQPASKKIDQNKLKPEMDEKGNLTTAGFACSQCGQPLFVYKLEQVSEKGKAYTNYFGRCNVAEHEKLILLAQLKPEKDSDEAVTYSLGKFGQRALDFYSIHVTKESTHPVKPLAQIAGNRYASGPVGKALSDACMGTIASFLSKYQDIIIEHQKVVKGNQKRLESLRELAGKENLEYPSVTLPPQPHTKEGVDAYNEVIARVRMWVNLNLWQKLKLSRDDAKPLLRLKGFPSFPLVERQANEVDWWDMVCNVKKLINEKKEDGKVFWQNLAGYKRQEALRPYLSSEEDVRKKGKKFARYQLGDLLLHLEKKHGEDWGKVYDEAWERIDKKVEGLSKHIKLEEERRSEDAQSKAALTDWLRAKASFVIEGLKEADKDEFCRCELKLQKWYGDLRGKPFAIEAENSILDISGFSKQYNCAFIWQKDGVKKLNLYLIINYFKGGKLRFKKIKPEAFEANRFYTVINKKSGEIVPMEVNFNFDDPNLIILPLAFGKRQGREFIWNDLLSLETGSLKLANGRVIEKTLYNRRTRQDEPALFVALTFERREVLDSSNIKPMNLIGVDRGENIPAVIALTDPEGCPLSRFKDSLGNPTHILRIGESYKEKQRTIQAKKEVEQRRAGGYSRKYASKAKNLADDMVRNTARDLLYYAVTQDAMLIFENLSRGFGRQGKRTFMAERQYTRMEDWLTAKLAYEGLPSKTYLSKTLAQYTSKTCSNCGFTITSADYDRVLEKLKKTATGWMTTINGKELKVEGQITYYNRYKRQNVVKDLSVELDRLSEESVNNDISSWDKGRSGEALSLLKKRFSHRPVQEKFVCLNCGFETHADEQAALNIARSWLFLRSQEYKKYQTNKTTGNTDKRAFVETWQSFYRKKLKEVWKPAV

SEQ ID NO: 28925 - protein, 978 aa, synthetic construct
  REGION 1..978: note = engineered CasX variant
QEIKRINKIRRRLVKDSNTKKAGKTGPMKTLLVRVMTPDLRERLENLRKKPENIPQPISNTSRANLNKLLTDYTEMKKAILHVYWEEFQKDPVGLMSRVAQPASKKIDQNKLKPEMDEKGNLTTAGFACSQCGQPLFVYKLEQVSEKGKAYTNYFGRCNVAEHEKLILLAQLKPEKDSDEAVTYSLGKFGQRALDFYSIHVTKESTHPVKPLAQIAGNRYASGPVGKALSDACMGTIASFLSKYQDIIIEHQKVVKGNQKRLESLRELAGKENLEYPSVTLPPQPHTKEGVDAYNEVIARVRMWVNLNLWQKLKLSRDDAKPLLRLKGFPSFPLVERQANEVDWWDMVCNVKKLINEKKEDGKVFWQNLAGYKRQEALRPYLSSEEDRKKGKKFARYQLGDLLLHLEKKHGEDWGKVYDEAWERIDKKVEGLSKHIKLEEERRSEDAQSKAALTDWLRAKASFVIEGLKEADKDEFCRCELKLQKWYGDLRGKPFAIEAENSILDISGFSKQYNCAFIWQKDGVKKLNLYLIINYFKGGKLRFKKIKPEAFEANRFYTVINKKSGEIVPMEVNFNFDDPNLIILPLAFGKRQGREFIWNDLLSLETGSLKLANGRVIEKTLYNRRTRQDEPALFVALTFERREVLDSSNIKPMNLIGVDRGENIPAVIALTDPEGCPLSRFKDSLGNPTHILRIGESYKEKQRTIQAKKEVEQRRAGGYSRKYASKAKNLADDMVRNTARDLLYYAVTQDAMLIFENLSRGFGRQGKRTFMAERQYTRMEDWLTAKLAYEGLPSKTYLSKTLAQYTSKTCSNCGFTITSADYDRMLEKLKKTATGWMTTINGKELKVEGQITYYNRYKRQNVVKDLSVELDRLSEESVNNDISSWDKGRSGEALSLLKKRFSHRPVQEKFVCLNCGFETHADEQAALNIARSWLFLRSQEYKKYQTNKTTGNTDKRAFVETWQSFYRKKLKEVWKPAV

SEQ ID NO: 28926 - protein, 978 aa, synthetic construct
  REGION 1..978: note = engineered CasX variant
QEIKRINKIRRRLVKDSNTKKAGKTGPMKTLLVRVMTPDLRERLENLRKKPENIPQPISNTSRANLNKLLTDYTEMKKAILHVYWEEFQKDPVGLMSRVAQPASKKIDQNKLKPEMDEKGNLTTAGFACSQCGQPLFVYKLEQVSEKGKAYTNYFGRCNVAEHEKLILLAQLKPEKDSDEAVTYSLGKFGQRALDFYSIHVTKESTHPVKPLAQIAGNRYASGPVGKALSDACMGTIASFLSKYQDIIIEHQKVVKGNQKRLESLRELAGKENLEYPSVTLPPQPHTKEGVDAYNEVIARVRMWVNLNLWQKLKLSRDDAKPLLRLKGFPSFPLVERQANEVDWWDMVCNVKKLINEKKEDGKVFWQNLAGYKRQEALRPYLSSEEDRKKGKKFARYQLGDLLLHLEKKHGEDWGKVYDEAWERIDKKVEGLSKHIKLEEERRSEDAQSKAALTDWLRAKASFVIEGLKEADKDEFCRCELKLQKWYGDLRGKPFAIEAENSILDISGFSKQYNCAFIWQKDGVKKLNLYLIINYFKGGKLRFKKIKPEAFEANRFYTVINKKSGEIVPMEVNFNFDDPNLIILPLAFGKRQGREFIWNDLLSLETGSLKLANGRVIEKTLYNRRTRQDEPALFVALTFERREVLDSSNIKPMNLIGVDRGENIPAVIALTDPEGCPLSRFKDSLGNPTHILRIGESYKEKQRTIQAKKEVEQRRAGGYSRKYASKAKNLADDMVRNTARDLLYYAVTQDAMLIFENLSRGFGRQGKRTFMAERQYTRMEDWLTAKLAYEGLPSKTYLSKTLAQYTSKTCSNCGFTITSADYDRVLEKLKKTATGWMTTINGKELKVEGQITYYNRYKRQNVVKDLSVELDRLSEESVNNDISSWDKGRQGEALSLLKKRFSHRPVQEKFVCLNCGFETHADEQAALNIARSWLFLRSQEYKKYQTNKTTGNTDKRAFVETWQSFYRKKLKEVWKPAV

SEQ ID NO: 28927 - protein, 978 aa, synthetic construct
  REGION 1..978: note = engineered CasX variant
QEIKRINKIRRRLVKDSNTKKAGKTGPMKTLLVRVMTPDLRERLENLRKKPENIPQPISNTSRANLNKLLTDYTEMKKAILHVYWEEFQKDPVGLMSRVAQPASKKIDQNKLKPEMDEKGNLTTAGFACSQCGQPLFVYKLEQVSEKGKAYTNYFGRCNVAEHEKLILLAQLKPEKDSDEAVTYSLGKFGQRALDFYSIHVTKESTHPVKPLAQIAGNRYASGPVGKALSDACMGTIASFLSKYQDIIIEHQKVVKGNQKRLESLRELAGKENLEYPSVTLPPQPHTKEGVDAYNEVIARVRMWVNLNLWQKLKLSRDDAKPLLRLKGFPSFPLVERQANEVDWWDMVCNVKKLINEKKEDGKVFWQNLAGYKRQEALRPYLSSEEDRKKGKKFARYQLGDLLLHLEKKHGEDWGKVYDEAWERIDKKVEGLSKHIKLEEERRSEDAQSKAALTDWLRAKASFVIEGLKEADKDEFCRCELKLQKWYGDLRGKPFAIEAENSILDISGFSKQYNCAFIWQKDGVKKLNLYLIINYFKGGKLRFKKIKPEAFEANRFYTVINKKSGEIVPMEVNFNFDDPNLIILPLAFGKRQGREFIWNDLLSLETGSLKLANGRVIEKTLYNRRTRQDEPALFVALTFERREVLDSSNIKPMNLIGVDRGENIPAVIALTDPEGCPLSRFKDSLGNPTHILRIGESYKEKQRTIQAKKEVEQRRAGGYSRKYASKAKNLADDMVRNTARDLLYYAVTQDAMLIFENLSRGFGRQGKRTFMAERQYTRMEDWLTAKLAYEGLPSKTYLSKTLAQYTSKTCSNCGFTITSADYDRVLEKLKKTATGWMTTINGKELKVEGQITYYNRYKRQNVVKDLSVELDRLSEESVNNDISSWDKGRSGEALSLLKKRFSHRPVQEKFVCLNCEFETHADEQAALNIARSWLFLRSQEYKKYQTNKTTGNTDKRAFVETWQSFYRKKLKEVWKPAV

SEQ ID NO: 28928 - protein, 979 aa, synthetic construct
  REGION 1..979: note = engineered CasX variant
QEIKRINKIRRRLVKDSNTKKAGKTGPMKTLLVRVMTPDLRERLENLRKKPENIPQPISNTSRANLNKLLTDYTEMKKAILHVYWEEFQKDPVGLMSRVAQPASKKIDQNKLKPEMDEKGNLTTAGFACSQCGQPLFVYKLEQVSEKGKAYTNYFGRCNVAEHEKLILLAQLKPEKDSDEAVTYSLGKFGQRALDFYSIHVTKESTHPVKPLAQIAGNRYASGPVGKALSDACMGTIASFLSKYQDIIIEHQKVVKGNQKRLESLRELAGKENLEYPSVTLPPQPHTKEGVDAYNEVIARVRMWVNLNLWQKLKLSRDDAKPLLRLKGFPSFPLVERQANEVDWWDMVCNVKKLINEKKEDGKVFWQNLAGYKRQEALRPYLSSEEDRKKGKKFARYQLGDLLLHLEKKHGEDWGKVYDEAWERIDKKVEGLSKHIKLEEERRSEDAQSKAALTDWLRAKASFVIEGLKEADKDEFCRCELKLQKWYGDLRGKPFAIEAENSILDISGFSKQYNCAFIWQKDGVKKLNLYLIINYFKGGKLRFKKIKPEAFEANRFYTVINKKSGEIVPMEVNFNFDDPNLIILPLAFGKRQGREFIWNDLLSLETGSLKLANGRVIEKTLYNRRTRQDEPALFVALTFERREVLDSSNIKPMNLIGVDRGENIPAVIALTDPEGCPLSRFKDSLGNPTHILRIGESYKEKQRTIQAKKEVEQRRAGGYSRKYASKAKNLADDMVRNTARDLLYYAVTQDAMLIFENLSRGFGRQGKRTFMAERQYTRMEDWLTAKLAYEGLPSKTYLSKTLAQYTSKTCSNCGFTITSADYDRVLEKLKKTATGWMTTINGKELKVEGQITYYNRYKRQNVVKDLSVELDRLSEESVNNDISSWDKGRSGEALSLLKKRFSHRPVQEKFVCLNCGFETHADEQAALNIARSWLFLRSQEYKKYQTNKTSTGNTDKRAFVETWQSFYRKKLKEVWKPAV

SEQ ID NO: 28929 - protein, 979 aa, synthetic construct
  REGION 1..979: note = engineered CasX variant
QEIKRINKIRRRLVKDSNTKKAGKTGPMKTLLVRVMTPDLRERLENLRKKPENIPQPISNTSRANLNKLLTDYTEMKKAILHVYWEEFQKDPVGLMSRVAQPASKKIDQNKLKPEMDEKGNLTTAGFACSQCGQPLFVYKLEQVSEKGKAYTNYFGRCNVAEHEKLILLAQLKPEKDSDEAVTYSLGKFGQRALDFYSIHVTKESTHPVKPLAQIAGNRYASGPVGKALSDACMGTIASFLSKYQDIIIEHQKVVKGNQKRLESLRELAGKENLEYPSVTLPPQPHTKEGVDAYNEVIARVRMWVNLNLWQKLKLSRDDAKPLLRLKGFPSFPLVERQANEVDWWDMVCNVKKLINEKKEDGKVFWQNLAGYKRQEALRPYLSSEEDRKKGKKFARYQLGDLLLHLEKKHGEDWGKVYDEAWERIDKKVEGLSKHIKLEEERRSEDAQSKAALTDWLRAKASFVIEGLKEADKDEFCRCELKLQKWYGDLRGKPFAIEAENSILDISGFSKQYNCAFIWQKDGVKKLNLYLIINYFKGGKLRFKKIKPEAFEANRFYTVINKKSGEIVPMEVNFNFDDPNLIILPLAFGKRQGREFIWNDLLSLETGSLKLANGRVIEKTLYNRRTRQDEPALFVALTFERREVLDSSNIKPMNLIGVDRGENIPAVIALTDPEGCPLSRFKDSLGNPTHILRIGESYKEKQRTIQAKKEVEQRRAGGYSRKYASKAKNLADDMVRNTARDLLYYAVTQDAMLIFENLSRGFGRQGKRTFMAERQYTRMEDWLTAKLAYEGLPSKTYLSKTLAQYTSKTCSNCGFTITSADYDRVLEKLKKTATGWMTTINGKELKVEGQITYYNRYKRQNVVKDLSVELDRLSEESVNNDISSWDKGRSGEALSLLKKRFSHRPVQEKFVCLNCGFETHADEQAALNIARSWLFLRSQEYKKYQTNKTTGKNTDKRAFVETWQSFYRKKLKEVWKPAV

SEQ ID NO: 28930 - protein, 978 aa, synthetic construct
  REGION 1..978: note = engineered CasX variant
QEIKRINKIRRRLVKDSNTKKAGKTGPMKTLLVRVMTPDLRERLENLRKKPENIPQPISNTSRANLNKLLTDYTEMKKAILHVYWEEFQKDPVGLMSRVAQPASKKIDQNKLKPEMDEKGNLTTAGFACSQCGQPLFVYKLEQVSEKGKAYTNYFGRCNVAEHEKLILLAQLKPEKDSDEAVTYSLGKFGQRALDFYSIHVTKESTHPVKPLAQIAGNRYASGPVGKALSDACMGTIASFLSKYQDIIIEHQKVVKGNQKRLESLRELAGKENLEYPSVTLPPQPHTKEGVDAYNEVIARVRMWVNLNLWQKLKLSRDDAKPLLRLKKFPSFPLVERQANEVDWWDMVCNVKKLINEKKEDGKVFWQNLAGYKRQEALRPYLSSEEDRKKGKKFARYQLGDLLLHLEKKHGEDWGKVYDEAWERIDKKVEGLSKHIKLEEERRSEDAQSKAALTDWLRAKASFVIEGLKEADKDEFCRCELKLQKWYGDLRGKPFAIEAENSILDISGFSKQYNCAFIWQKDGVKKLNLYLIINYFKGGKLRFKKIKPEAFEANRFYTVINKKSGEIVPMEVNFNFDDPNLIILPLAFGKRQGREFIWNDLLSLETGSLKLANGRVIEKTLYNRRTRQDEPALFVALTFERREVLDSSNIKPMNLIGVDRGENIPAVIALTDPEGCPLSRFKDSLGNPTHILRIGESYKEKQRTIQAKKEVEQRRAGGYSRKYASKAKNLADDMVRNTARDLLYYAVTQDAMLIFENLSRGFGRQGKRTFMAERQYTRMEDWLTAKLAYEGLPSKTYLSKTLAQYTSKTCSNCGFTITSADYDRVLEKLKKTATGWMTTINGKELKVEGQITYYNRYKRQNVVKDLSVELDRLSEESVNNDISSWDKGRSGEALSLLKKRFSHRPVQEKFVCLNCGFETHADEQAALNIARSWLFLRSQEYKKYQTNKTTGNTDKRAFVETWQSFYRKKLKEVWKPAV

SEQ ID NO: 28931 - protein, 978 aa, synthetic construct
  REGION 1..978: note = engineered CasX variant
QEIKRINKIRRRLVKDSNTKKAGKTGPMKTLLVRVMTPDLRERLENLRKKPENIPQPISNTSRANLNKLLTDYTEMKKAILHVYWEEFQKDPVGLMSRVAQPASKKIDQNKLKPEMDEKGNLTTAGFACSQCGQPLFVYKLEQVSEKGKAYTNYFGRCNVAEHEKLILLAQLKPEKDSDEAVTYSLGKFGQRALDFYSIHVTKESTHPVKPLAQIAGNRYASGPVGKALSDACMGTIASFLSKYQDIIIEHQKVVKGNQKRLESLRELAGKENLEYPSVTLPPQPHTKEGVDAYNEVIARVRMWVNLNLWQKLKLSRDDAKPLLRLKGFPSFPLVERQANEVDWWDMVCNVKKLINEKKEDGKVFWQNLAGYKRQEALRPYLSSEEDRKKGKKFARYQLGDLLLHLEKKHGEDWGKVYDEAWERIDKKVEGLSKHIKLEEERRSEDAQSKAALTDWLRAKASFVIEGLKEADKDEFCRCELKLQKWYGDLRGKPFAIEAENSILDISGFSKQYNCAFIWQKDGVKKLNLYLIINYFKGGKLRFKKIKPEAFEANRFYTVINKKSGEIVPMEVNFNFDDPNLIILPLAFGKRQGREFIWNDLLSLETGSLKLANGRVIEKTLYNRRTRQDEPALFVALTFERREVLDSSNIKPMNLIGVDRGENIPAVIALTDPEGCPLSRFKDSLGNPTHILRIGERYKEKQRTIQAKKEVEQRRAGGYSRKYASKAKNLADDMVRNTARDLLYYAVTQDAMLIFENLSRGFGRQGKRTFMAERQYTRMEDWLTAKLAYEGLPSKTYLSKTLAQYTSKTCSNCGFTITSADYDRVLEKLKKTATGWMTTINGKELKVEGQITYYNRYKRQNVVKDLSVELDRLSEESVNNDISSWDKGRSGEALSLLKKRFSHRPVQEKFVCLNCGFETHADEQAALNIARSWLFLRSQEYKKYQTNKTTGNTDKRAFVETWQSFYRKKLKEVWKPAV

SEQ ID NO: 28932 - protein, 978 aa, synthetic construct
  REGION 1..978: note = engineered CasX variant
QEIKRINKIRRRLVKDSNTKKAGKTGPMKTLLVRVMTPDLRERLENLRKKPENIPQPISNTSRANLNKLLTDYTEMKKAILHVYWEEFQKDPVGLMSRVAQPASKKIDQNKLKPEMDEKGNLTTAGFACSQCGQPLFVYKLEQVSEKGKAYTNYFGRCNVAEHEKLILLAQLKPEKDSDEAVTYSLGKFGQRALDFYSIHVTKESTHPVKPLAQIAGNRYASGPVGKALSDACMGTIASFLSKYQDIIIEHQKVVKGNQKRLESLRELAGKENLEYPSVTLPPQPHTKEGVDAYNEVIARVRMWVNLNLWQKLKLSRDDAKPLLRLKGFPSFPLVERQANEVDWWDMVCNVKKLINEKKEDGKVFWQNLAGYKRQEALRPYLSSEEDRKKGKKFARYQLGDLLLHLEKKHGEDWGKVYDEAWERIDKKVEGLSKHIKLEEERRSEDAQSKAALTDWLRAKASFVIEGLKEADKDEFCRCELKLQKWYGDLRGKPFAIEAENSILDISGFSKQYNCAFIWQKDGVKKLNLYLIINYFKGGKLRFKKIKPEAFEANRFYTVINKKSGEIVPMEVNFNFDDPNLIILPLAFGKRQGREFIWNDLLSLETGSLQLANGRVIEKTLYNRRTRQDEPALFVALTFERREVLDSSNIKPMNLIGVDRGENIPAVIALTDPEGCPLSRFKDSLGNPTHILRIGESYKEKQRTIQAKKEVEQRRAGGYSRKYASKAKNLADDMVRNTARDLLYYAVTQDAMLIFENLSRGFGRQGKRTFMAERQYTRMEDWLTAKLAYEGLPSKTYLSKTLAQYTSKTCSNCGFTITSADYDRVLEKLKKTATGWMTTINGKELKVEGQITYYNRYKRQNVVKDLSVELDRLSEESVNNDISSWDKGRSGEALSLLKKRFSHRPVQEKFVCLNCGFETHADEQAALNIARSWLFLRSQEYKKYQTNKTTGNTDKRAFVETWQSFYRKKLKEVWKPAV

SEQ ID NO: 28933 - protein, 978 aa, synthetic construct
  REGION 1..978: note = engineered CasX variant
QEIKRLNKIRRRLVKDSNTKKAGKTGPMKTLLVRVMTPDLRERLENLRKKPENIPQPISNTSRANLNKLLTDYTEMKKAILHVYWEEFQVDPVGLMSRVAQPASKKIDQNKLKPEMDEKGNLTTAGFACSQCGQPLFVYKLEQVSEKGKAYTNYFGRCNVAEHEKLILLAQLKPEKDSDEAVTYSLGKFGQRALDFYSIHVTKESTHPVKPLAQIAGNRYASGPVGKALSDACMGTIASFLSKYQDIIIEHQKVVKGNQKRLESLRELAGKENLEYPSVTLPPQPHTKEGVDAYNEVIARVRMWVNLNLWQKLKLSRDDAKPLLRLKGFPSFPLVERQANEVDWWDMVCNVKKLINEKKEDGKVFWQNLAGYKRQEALRPYLSSEEDRKKGKKFARYQLGDLLLHLEKKHGEDWGKVYDEAWERIDKKVEGLSKHIKLEEERRSEDAQSKAALTDWLRAKASFVIEGLKEADKDEFCRCELKLQKWYGDLRGKPFAIEAENSILDISGFSKQYNCAFIWQKDGVKKLNLYLIINYFKGGKLRFKKIKPEAFEANRFYTVINKKSGEIVPMEVNFNFDDPNLIILPLAFGKRQGREFIWNDLLSLETGSLKLANGRVIEKTLYNRRTRQDEPALFVALTFERREVLDSSNIKPMNLIGVDRGENIPAVIALTDPEGCPLSRFKDSLGNPTHILRIGESYKEKQRTIQAKKEVEQRRAGGYSRKYASKAKNLADDMVRNTARDLLYYAVTQDAMLIFENLSRGFGRQGKRTFMAERQYTRMEDWLTAKLAYEGLPSKTYLSKTLAQYTSKTCSNCGFTITSADYDRVLEKLKKTATGWMTTINGKELKVEGQITYYNRYKRQNVVKDLSVELDRLSEESVNNDISSWTKGRSGEALSLLKKRFSHRPVQEKFVCLNCGFETHADEQAALNIARSWLFLRSQEYKKYQTNKTTGNTDKRAFVETWQSFYRKKLKEVWKPAV

SEQ ID NO: 28934 - protein, 978 aa, synthetic construct
  REGION 1..978: note = engineered CasX variant
QEIKRINKIRRRLVKDSNTKKAGKTGPMKTLLVRVMTPDLRERLENLRKKPENIPQPISNTSRANLNKLLTDYTEMKKAILHVYWEEFQVDPVGLMSRVAQPASKKIDQNKLKPEMDEKGNLTTAGFACSQCGQPLFVYKLEQVSEKGKAYTNYVGRCNVAEHEKLILLAQLKPEKDSDEAVTYSLGKFGQRALDFYSIHVTKESTHPVKPLAQIAGNRYASGPVGKALSDACMGTIASFLSKYQDIIIEHQKVVKGNQKRLESLRELAGKENLEYPSVTLPPQPHTKEGVDAYNEVIARVRMWVNLNLWQKLKLSRDDAKPLLRLKGFPSFPLVERQANEVDWWDMVCNVKKLINEKKEDGKVFWQNLAGYKRQEALRPYLSSEEDRKKGKKFARYQLGDLLLHLEKKHGEDWGKVYDEAWERIDKKVEGLSKHIKLEEERRSEDAQSKAALTDWLRAKASFVIEGLKEADKDEFCRCELKLQKWYGDLRGKPFAIEAENSILDISGFSKQYNCAFIWQKDGVKKLNLYLIINYFKGGKLRFKKIKPEAFEANRFYTVINKKSGEIVPMEVNFNFDDPNLIILPLAFGKRQGREFIWNDLLSLETGSLKLANGRVIEKTLYNRRTRQDEPALFVALTFERREVLDSSNIKPMNLIGVDRGENIPAVIALTDPEGCPLSRFKDSLGNPTHILRIGESYKEKQRTIQAKKEVEQRRAGGYSRKYASKAKNLADDMVRNTARDLLYYAVTQDAMLIFENLSRGFGRQGKRTFMAERQYTRMEDWLTAKLAYEGLPSKTYLSKTLAQYTSKTCSNCGFTITSADYDRVLEKLKKTATGWMTTINGKELKVEGQITYYNRYKRQNVVKDLSVELDRLSEESVNNDISSWTKGRSGEALSLLKKRFSHRPVQEKFVCLNCGFETHADEQAALNIARSWLFLRSQEYKKYQTNKTTGNTDKRAFVETWQSFYRKKLKEVWKPAV

SEQ ID NO: 28935 - protein, 978 aa, synthetic construct
  REGION 1..978: note = engineered CasX variant
QEIKRINKIRRRLVKDSNTKKAGKTGPMKTLLVRVMTPDLRERLENLRKKPENIPQPISNTSRANLNKLLTDYTEMKKAILHVYWEEFQVDPVGLMSRVAQPASKKIDQNKLKPEMDEKGNLTTAGFACSQCGQPLFVYKLEQVSEKGKAYTNYFGRCNVAEHEKLILLAQLKPEKDSDEAVTYSLGKFGQRALDFYSIHVTKESTHPVKPLAQIAGNRYASGPVGKALSDACMGTIASFLSKYQDIIIEHQKVVKGNQKRLESLRELAGKENLEYPSVTLPPQPHTKEGVDAYNEVIARVRMWVNLNLWQKLKLSRDDAKPLLRLKGFPSFPLVERQANEVDWWDMVCNVKKLINEKKEDGKVFWQNLAGYKRQEALRPYLSSEEDRKKGKKFARYQLGDLLLHLEKKHGEDWGKVYDEAWERIDKKVEGLSKHIKLEEERRSEDAQSKAALTDWLRAKASFVIEGLKEADKDEFCRCELKLQKWYGDLRGKPFAIEAENSILDISGFSKQYNCAFIWQKDGVKKLNLYLIINYFKGGKLRFKKIKPEAFEANRFYTVINKKSGEIVPMEVNFNFDDPNLIILPLAFGKRQGREFIWNDLLSLETGSLKLANGRVIEKTLYNRRTRQDEPALFVALTFERREVLDSSNIKPMNLIGVDRGENIPAVIALTDPEGCPLSRFKDSLGNPTHILRIGESYKEKQRTIQAKKEVEQRRAGGYSRKYASKAKNLADDMVRNTARDLLYYAVTQDAMLIFENLSRGFGRQGKRTFMAERQYTRMEDWLTAKLAYEGLASKTYLSKTLAQYTSKTCSNCGFTITSADYDRVLEKLKKTATGWMTTINGKELKVEGQITYYNRYKRQNVVKDLSVELDRLSEESVNNDISSWTKGRSGEALSLLKKRFSHRPVQEKFVCLNCGFETHADEQAALNIARSWLFLRSQEYKKYQTNKTTGNTDKRAFVETWQSFYRKKLKEVWKPAV

SEQ ID NO: 28936 - protein, 978 aa, synthetic construct
  REGION 1..978: note = engineered CasX variant
QEIKRINKIRRRLVKDSNTKKAGKTGPMKTLLVRVMTPDLRERLENLRKKPENIPQPISNTSRANLNKLLTDYTEMKKAILHVYWEEFQVDPVGLMSRVAQPASKKIDQNKLKPEMDEKGNLTTAGFACSQCGQPLFVYKLEQVSEKGKAYTNYFGRCNVAEHEKLILLAQLKPEKDSDEAVTYSLGKFGQRALDFYSIHVTKESTHPVKPLAQIAGNRYASGPVGKALSDACMGTIASFLSKYQDIIIEHQKVVKGNQKRLESLRELAGKENLEYPSVTLPPQPHTKEGVDAYNEVIARVRMWVNLNLWQKLKLSRDDAKPLLRLKGFPSFPLVERQANEVDWWDMVCNVKKLINEKKEDGKVFWQNLAGYKRQEALRPYLSSEEDRKKGKKFARYQLGDLLLHLEKKHGEDWGKVYDEAWERIDKKVEGLSKHIKLEEERRSEDAQSKAALTDWLRAKASFVIEGLKEADKDEFCRCELKLQKWYGDLRGKPFAIEAENSILDISGFSKQYNCAFIWQKDGVKKLNLYLIINYFKGGKLRFKKIKPEAFEANRFYTVINKKSGEIVPMEVNFNFDDPNLIILPLAFGKRQGREFIWNDLLSLETGSLKLANGRVIEKTLYNRRTRQDEPALFVALTFERREVLDSSNIKPMNLIGVDRGENIPAVIALTDPEGCPLSRFKDSLGNPTHILRIGESYKEKQRTIQAKKEVEQRRAGGYSRKYASKAKNLADDMVRNTARDLLYYAVTQDAMLIFENLSRGFGRQGKRTFMAERQYTRMEDWLTAKLAYEGLPSKVYLSKTLAQYTSKTCSNCGFTITSADYDRVLEKLKKTATGWMTTINGKELKVEGQITYYNRYKRQNVVKDLSVELDRLSEESVNNDISSWTKGRSGEALSLLKKRFSHRPVQEKFVCLNCGFETHADEQAALNIARSWLFLRSQEYKKYQTNKTTGNTDKRAFVETWQSFYRKKLKEVWKPAV

SEQ ID NO: 28937 - protein, 979 aa, synthetic construct
  REGION 1..979: note = engineered CasX variant
QEIKRINKIRRRLVKDSNTKKAGKTGPMKTLLVRVMTPDLRERLENLRKKPENIPQPISNTSRANLNKLLTDYTEMKKAILHVYWEEFQVDPVGLMSRVAQPASKKIDQNKLKPEMDEKGNLTTAGFACSQCGQPLFVYKLEQVSEKGKAYTNYFGRCNVAEHEKLILLAQLKPEKDSDEAVTYSLGKFGQRALDFYSIHVTKESTHPVKPLAQIAGNRYASGPVGKALSDACMGTIASFLSKYQDIIIEHQKVVKGNQKRLESLRELAGKENLEYPSVTLPPQPHTKEGVDAYNEVIARVRMWVNLNLWQKLKLSRDDAKPLLRLKGFPSFPLVERQANEVDWWDMVCNVKKLINEKKEDGKVFWQNLAGYKRQEALRPYLSSEEDRKKGKKFARYQLGDLLLHLEKKHGEDWGKVYDEAWERIDKKVEGLSKHIKLEEERRSEDAQSKAALTDWLRAKASFVIEGLKEADKDEFCRCELKLQKWYGDLRGKPFAIEAENSILDISGFSKQYNCAFIWQKDGVKKLNLYLIINYFKGGKLRFKKIKPEAFEANRFYTVINKKSGEIVPMEVNFNFDDPNLIILPLAFGKRQGREFIWNDLLSLETGSLKLANGRVIEKTLYNRRTRQDEPALFVALTFERREVLDSSNIKPMNLIGVDRGENIPAVIALTDPEGCPLSRFKDSLGNPTHILRIGESYKEKQRTIQAKKEVEQRRAGGYSRKYASKAKNLADDMVRNTARDLLYYAVTQDAMLIFENLSRGFGRQGKRTFMAERQYTRMEDWLTAKLAYEGPLPSKTYLSKTLAQYTSKTCSNCGFTITSADYDRVLEKLKKTATGWMTTINGKELKVEGQITYYNRYKRQNVVKDLSVELDRLSEESVNNDISSWTKGRSGEALSLLKKRFSHRPVQEKFVCLNCGFETHADEQAALNIARSWLFLRSQEYKKYQTNKTTGNTDKRAFVETWQSFYRKKLKEVWKPAV

SEQ ID NO: 28938 - protein, 979 aa, synthetic construct
  REGION 1..979: note = engineered CasX variant
QEIKRINKIRRRLVKDSNTKKAGKTGPMKTLLVRVMTPDLRERLENLRKKPENIPQPISNTSRANLNKLLTDYTEMKKAILHVYWEEFQVDPVGLMSRVAQPASKKIDQNKLKPEMDEKGNLTTAGFACSQCGQPLFVYKLEQVSEKGKAYTNYFGRCNVAEHEKLILLAQLKPEKDSDEAVTYSLGKFGQRALDFYSIHVTKESTHPVKPLAQIAGNRYASGPVGKALSDACMGTIASFLSKYQDIIIEHQKVVKGNQKRLESLRELAGKENLEYPSVTLPPQPHTKEGVDAYNEVIARVRMWVNLNLWQKLKLSRDDAKPLLRLKGFPSFPLVERQANEVDWWDMVCNVKKLINEKKEDGKVFWQNLAGYKRQEALRPYLSSEEDVRKKGKKFARYQLGDLLLHLEKKHGEDWGKVYDEAWERIDKKVEGLSKHIKLEEERRSEDAQSKAALTDWLRAKASFVIEGLKEADKDEFCRCELKLQKWYGDLRGKPFAIEAENSILDISGFSKQYNCAFIWQKDGVKKLNLYLIINYFKGGKLRFKKIKPEAFEANRFYTVINKKSGEIVPMEVNFNFDDPNLIILPLAFGKRQGREFIWNDLLSLETGSLKLANGRVIEKTLYNRRTRQDEPALFVALTFERREVLDSSNIKPMNLIGVDRGENIPAVIALTDPEGCPLSRFKDSLGNPTHILRIGESYKEKQRTIQAKKEVEQRRAGGYSRKYASKAKNLADDMVRNTARDLLYYAVTQDAMLIFENLSRGFGRQGKRTFMAERQYTRMEDWLTAKLAYEGLPSKTYLSKTLAQYTSKTCSNCGFTITSADYDRVLEKLKKTATGWMTTINGKELKVEGQITYYNRYKRQNVVKDLSVELDRLSEESVNNDISSWTKGRSGEALSLLKKRFSHRPVQEKFVCLNCGFETHADEQAALNIARSWLFLRSQEYKKYQTNKTTGNTDKRAFVETWQSFYRKKLKEVWKPAV

SEQ ID NO: 28939 - protein, 978 aa, synthetic construct
  REGION 1..978: note = engineered CasX variant
QEIKRINKIRRRLVKDSNTKKAGKTGPMKTLLVRVMTPDLRERLENLRKKPENIPQPISNTSRANLNKLLTDYTEMKKAILHVYWEEFQVDPVGLMSRVAQPASKKIDQNKLKPEMDEKGNLTTAGFACSQCGQPLFVYKLEQVSEKGKAYTNYFGRCNVAEHEKLILLAQLKPEKDSDEAVTYSLGKFGQRALDFYSIHVTKESTHPVKPLAQIAGNRYASGPVGKALSDACMGTIASFLSKYQDIIIEHQKVVKGNQKRLESLRELAGKENLEYPSVTLPPQPHTKEGVDAYNEVIARVRMWVNLNLWQKLKLSRDDAKPLLRLKGFPSFPLVERQANEVDWWDMVCNVKKLINEKKEDGKVFWQNLAGYKRQEALRPYLSSEEDRKKGKKFARYQLGDLLLHLEKKHGEDWGKVYDEAWERIDKKVEGLSKHIKLEEERRSEDAQSKAALTDWLRAKASFVIEGLKEADKDEFCRCELKLQKWYGDLRGKPFAIEAENSILDISGFSKQYNCAFIWQKDGVKKLNLYLIINYFKGGKLRFKKIKPEAFEANRFYTVINKKSGEIVPMEVNFNFDDPNLIILPLAFGKRQGREFIWNDLLSLETGSLKLANGRVIEKTLYNRRTRQDEPALFVALTFERREVLDSSNIKPMNLIGVDRGENIPAVIALTDPEGCPLSRFKDSLGNPTHILRIGESYKEKQRTIQAKKEVEQRRAGGYSRKYASKAKNLADDMVRNTARDLLYYAVTQDAMLIFENLSRGFGRQGKRTFMAERQYTRMEDWLTAKLAYEGLPSKTYLSKTLAQYTSKTCSNCGFTITSADYDRMLEKLKKTATGWMTTINGKELKVEGQITYYNRYKRQNVVKDLSVELDRLSEESVNNDISSWTKGRSGEALSLLKKRFSHRPVQEKFVCLNCGFETHADEQAALNIARSWLFLRSQEYKKYQTNKTTGNTDKRAFVETWQSFYRKKLKEVWKPAV

SEQ ID NO: 28940 - protein, 978 aa, synthetic construct
  REGION 1..978: note = engineered CasX variant
QEIKRINKIRRRLVKDSNTKKAGKTGPMKTLLVRVMTPDLRERLENLRKKPENIPQPISNTSRANLNKLLTDYTEMKKAILHVYWEEFQVDPVGLMSRVAQPASKKIDQNKLKPEMDEKGNLTTAGFACSQCGQPLFVYKLEQVSEKGKAYTNYFGRCNVAEHEKLILLAQLKPEKDSDEAVTYSLGKFGQRALDFYSIHVTKESTHPVKPLAQIAGNRYASGPVGKALSDACMGTIASFLSKYQDIIIEHQKVVKGNQKRLESLRELAGKENLEYPSVTLPPQPHTKEGVDAYNEVIARVRMWVNLNLWQKLKLSRDDAKPLLRLKGFPSFPLVERQANEVDWWDMVCNVKKLINEKKEDGKVFWQNLAGYKRQEALRPYLSSEEDRKKGKKFARYQLGDLLLHLEKKHGEDWGKVYDEAWERIDKKVEGLSKHIKLEEERRSEDAQSKAALTDWLRAKASFVIEGLKEADKDEFCRCELKLQKWYGDLRGKPFAIEAENSILDISGFSKQYNCAFIWQKDGVKKLNLYLIINYFKGGKLRFKKIKPEAFEANRFYTVINKKSGEIVPMEVNFNFDDPNLIILPLAFGKRQGREFIWNDLLSLETGSLKLANGRVIEKTLYNRRTRQDEPALFVALTFERREVLDSSNIKPMNLIGVDRGENIPAVIALTDPEGCPLSRFKDSLGNPTHILRIGESYKEKQRTIQAKKEVEQRRAGGYSRKYASKAKNLADDMVRNTARDLLYYAVTQDAMLIFENLSRGFGRQGKRTFMAERQYTRMEDWLTAKLAYEGLPSKTYLSKTLAQYTSKTCSNCGFTITSADYDRVLEKLKKTATGWMTTINGKELKVEGQITYYNRYKRQNVVKDLSVELDRLSEESVNNDISSWTKGRQGEALSLLKKRFSHRPVQEKFVCLNCGFETHADEQAALNIARSWLFLRSQEYKKYQTNKTTGNTDKRAFVETWQSFYRKKLKEVWKPAV

SEQ ID NO: 28941 - protein, 978 aa, synthetic construct
  REGION 1..978: note = engineered CasX variant
QEIKRINKIRRRLVKDSNTKKAGKTGPMKTLLVRVMTPDLRERLENLRKKPENIPQPISNTSRANLNKLLTDYTEMKKAILHVYWEEFQVDPVGLMSRVAQPASKKIDQNKLKPEMDEKGNLTTAGFACSQCGQPLFVYKLEQVSEKGKAYTNYFGRCNVAEHEKLILLAQLKPEKDSDEAVTYSLGKFGQRALDFYSIHVTKESTHPVKPLAQIAGNRYASGPVGKALSDACMGTIASFLSKYQDIIIEHQKVVKGNQKRLESLRELAGKENLEYPSVTLPPQPHTKEGVDAYNEVIARVRMWVNLNLWQKLKLSRDDAKPLLRLKGFPSFPLVERQANEVDWWDMVCNVKKLINEKKEDGKVFWQNLAGYKRQEALRPYLSSEEDRKKGKKFARYQLGDLLLHLEKKHGEDWGKVYDEAWERIDKKVEGLSKHIKLEEERRSEDAQSKAALTDWLRAKASFVIEGLKEADKDEFCRCELKLQKWYGDLRGKPFAIEAENSILDISGFSKQYNCAFIWQKDGVKKLNLYLIINYFKGGKLRFKKIKPEAFEANRFYTVINKKSGEIVPMEVNFNFDDPNLIILPLAFGKRQGREFIWNDLLSLETGSLKLANGRVIEKTLYNRRTRQDEPALFVALTFERREVLDSSNIKPMNLIGVDRGENIPAVIALTDPEGCPLSRFKDSLGNPTHILRIGESYKEKQRTIQAKKEVEQRRAGGYSRKYASKAKNLADDMVRNTARDLLYYAVTQDAMLIFENLSRGFGRQGKRTFMAERQYTRMEDWLTAKLAYEGLPSKTYLSKTLAQYTSKTCSNCGFTITSADYDRVLEKLKKTATGWMTTINGKELKVEGQITYYNRYKRQNVVKDLSVELDRLSEESVNNDISSWTKGRSGEALSLLKKRFSHRPVQEKFVCLNCEFETHADEQAALNIARSWLFLRSQEYKKYQTNKTTGNTDKRAFVETWQSFYRKKLKEVWKPAV

SEQ ID NO: 28942 - protein, 979 aa, synthetic construct
  REGION 1..979: note = engineered CasX variant
QEIKRINKIRRRLVKDSNTKKAGKTGPMKTLLVRVMTPDLRERLENLRKKPENIPQPISNTSRANLNKLLTDYTEMKKAILHVYWEEFQVDPVGLMSRVAQPASKKIDQNKLKPEMDEKGNLTTAGFACSQCGQPLFVYKLEQVSEKGKAYTNYFGRCNVAEHEKLILLAQLKPEKDSDEAVTYSLGKFGQRALDFYSIHVTKESTHPVKPLAQIAGNRYASGPVGKALSDACMGTIASFLSKYQDIIIEHQKVVKGNQKRLESLRELAGKENLEYPSVTLPPQPHTKEGVDAYNEVIARVRMWVNLNLWQKLKLSRDDAKPLLRLKGFPSFPLVERQANEVDWWDMVCNVKKLINEKKEDGKVFWQNLAGYKRQEALRPYLSSEEDRKKGKKFARYQLGDLLLHLEKKHGEDWGKVYDEAWERIDKKVEGLSKHIKLEEERRSEDAQSKAALTDWLRAKASFVIEGLKEADKDEFCRCELKLQKWYGDLRGKPFAIEAENSILDISGFSKQYNCAFIWQKDGVKKLNLYLIINYFKGGKLRFKKIKPEAFEANRFYTVINKKSGEIVPMEVNFNFDDPNLIILPLAFGKRQGREFIWNDLLSLETGSLKLANGRVIEKTLYNRRTRQDEPALFVALTFERREVLDSSNIKPMNLIGVDRGENIPAVIALTDPEGCPLSRFKDSLGNPTHILRIGESYKEKQRTIQAKKEVEQRRAGGYSRKYASKAKNLADDMVRNTARDLLYYAVTQDAMLIFENLSRGFGRQGKRTFMAERQYTRMEDWLTAKLAYEGLPSKTYLSKTLAQYTSKTCSNCGFTITSADYDRVLEKLKKTATGWMTTINGKELKVEGQITYYNRYKRQNVVKDLSVELDRLSEESVNNDISSWTKGRSGEALSLLKKRFSHRPVQEKFVCLNCGFETHADEQAALNIARSWLFLRSQEYKKYQTNKTSTGNTDKRAFVETWQSFYRKKLKEVWKPAV

SEQ ID NO: 28943 - protein, 979 aa, synthetic construct
  REGION 1..979: note = engineered CasX variant
QEIKRINKIRRRLVKDSNTKKAGKTGPMKTLLVRVMTPDLRERLENLRKKPENIPQPISNTSRANLNKLLTDYTEMKKAILHVYWEEFQVDPVGLMSRVAQPASKKIDQNKLKPEMDEKGNLTTAGFACSQCGQPLFVYKLEQVSEKGKAYTNYFGRCNVAEHEKLILLAQLKPEKDSDEAVTYSLGKFGQRALDFYSIHVTKESTHPVKPLAQIAGNRYASGPVGKALSDACMGTIASFLSKYQDIIIEHQKVVKGNQKRLESLRELAGKENLEYPSVTLPPQPHTKEGVDAYNEVIARVRMWVNLNLWQKLKLSRDDAKPLLRLKGFPSFPLVERQANEVDWWDMVCNVKKLINEKKEDGKVFWQNLAGYKRQEALRPYLSSEEDRKKGKKFARYQLGDLLLHLEKKHGEDWGKVYDEAWERIDKKVEGLSKHIKLEEERRSEDAQSKAALTDWLRAKASFVIEGLKEADKDEFCRCELKLQKWYGDLRGKPFAIEAENSILDISGFSKQYNCAFIWQKDGVKKLNLYLIINYFKGGKLRFKKIKPEAFEANRFYTVINKKSGEIVPMEVNFNFDDPNLIILPLAFGKRQGREFIWNDLLSLETGSLKLANGRVIEKTLYNRRTRQDEPALFVALTFERREVLDSSNIKPMNLIGVDRGENIPAVIALTDPEGCPLSRFKDSLGNPTHILRIGESYKEKQRTIQAKKEVEQRRAGGYSRKYASKAKNLADDMVRNTARDLLYYAVTQDAMLIFENLSRGFGRQGKRTFMAERQYTRMEDWLTAKLAYEGLPSKTYLSKTLAQYTSKTCSNCGFTITSADYDRVLEKLKKTATGWMTTINGKELKVEGQITYYNRYKRQNVVKDLSVELDRLSEESVNNDISSWTKGRSGEALSLLKKRFSHRPVQEKFVCLNCGFETHADEQAALNIARSWLFLRSQEYKKYQTNKTTGKNTDKRAFVETWQSFYRKKLKEVWKPAV

SEQ ID NO: 28944 - protein, 978 aa, synthetic construct
  REGION 1..978: note = engineered CasX variant
QEIKRINKIRRRLVKDSNTKKAGKTGPMKTLLVRVMTPDLRERLENLRKKPENIPQPISNTSRANLNKLLTDYTEMKKAILHVYWEEFQVDPVGLMSRVAQPASKKIDQNKLKPEMDEKGNLTTAGFACSQCGQPLFVYKLEQVSEKGKAYTNYFGRCNVAEHEKLILLAQLKPEKDSDEAVTYSLGKFGQRALDFYSIHVTKESTHPVKPLAQIAGNRYASGPVGKALSDACMGTIASFLSKYQDIIIEHQKVVKGNQKRLESLRELAGKENLEYPSVTLPPQPHTKEGVDAYNEVIARVRMWVNLNLWQKLKLSRDDAKPLLRLKKFPSFPLVERQANEVDWWDMVCNVKKLINEKKEDGKVFWQNLAGYKRQEALRPYLSSEEDRKKGKKFARYQLGDLLLHLEKKHGEDWGKVYDEAWERIDKKVEGLSKHIKLEEERRSEDAQSKAALTDWLRAKASFVIEGLKEADKDEFCRCELKLQKWYGDLRGKPFAIEAENSILDISGFSKQYNCAFIWQKDGVKKLNLYLIINYFKGGKLRFKKIKPEAFEANRFYTVINKKSGEIVPMEVNFNFDDPNLIILPLAFGKRQGREFIWNDLLSLETGSLKLANGRVIEKTLYNRRTRQDEPALFVALTFERREVLDSSNIKPMNLIGVDRGENIPAVIALTDPEGCPLSRFKDSLGNPTHILRIGESYKEKQRTIQAKKEVEQRRAGGYSRKYASKAKNLADDMVRNTARDLLYYAVTQDAMLIFENLSRGFGRQGKRTFMAERQYTRMEDWLTAKLAYEGLPSKTYLSKTLAQYTSKTCSNCGFTITSADYDRVLEKLKKTATGWMTTINGKELKVEGQITYYNRYKRQNVVKDLSVELDRLSEESVNNDISSWTKGRSGEALSLLKKRFSHRPVQEKFVCLNCGFETHADEQAALNIARSWLFLRSQEYKKYQTNKTTGNTDKRAFVETWQSFYRKKLKEVWKPAV

SEQ ID NO: 28945 - protein, 978 aa, synthetic construct
  REGION 1..978: note = engineered CasX variant
QEIKRINKIRRRLVKDSNTKKAGKTGPMKTLLVRVMTPDLRERLENLRKKPENIPQPISNTSRANLNKLLTDYTEMKKAILHVYWEEFQVDPVGLMSRVAQPASKKIDQNKLKPEMDEKGNLTTAGFACSQCGQPLFVYKLEQVSEKGKAYTNYFGRCNVAEHEKLILLAQLKPEKDSDEAVTYSLGKFGQRALDFYSIHVTKESTHPVKPLAQIAGNRYASGPVGKALSDACMGTIASFLSKYQDIIIEHQKVVKGNQKRLESLRELAGKENLEYPSVTLPPQPHTKEGVDAYNEVIARVRMWVNLNLWQKLKLSRDDAKPLLRLKGFPSFPLVERQANEVDWWDMVCNVKKLINEKKEDGKVFWQNLAGYKRQEALRPYLSSEEDRKKGKKFARYQLGDLLLHLEKKHGEDWGKVYDEAWERIDKKVEGLSKHIKLEEERRSEDAQSKAALTDWLRAKASFVIEGLKEADKDEFCRCELKLQKWYGDLRGKPFAIEAENSILDISGFSKQYNCAFIWQKDGVKKLNLYLIINYFKGGKLRFKKIKPEAFEANRFYTVINKKSGEIVPMEVNFNFDDPNLIILPLAFGKRQGREFIWNDLLSLETGSLKLANGRVIEKTLYNRRTRQDEPALFVALTFERREVLDSSNIKPMNLIGVDRGENIPAVIALTDPEGCPLSRFKDSLGNPTHILRIGERYKEKQRTIQAKKEVEQRRAGGYSRKYASKAKNLADDMVRNTARDLLYYAVTQDAMLIFENLSRGFGRQGKRTFMAERQYTRMEDWLTAKLAYEGLPSKTYLSKTLAQYTSKTCSNCGFTITSADYDRVLEKLKKTATGWMTTINGKELKVEGQITYYNRYKRQNVVKDLSVELDRLSEESVNNDISSWTKGRSGEALSLLKKRFSHRPVQEKFVCLNCGFETHADEQAALNIARSWLFLRSQEYKKYQTNKTTGNTDKRAFVETWQSFYRKKLKEVWKPAV

SEQ ID NO: 28946 - protein, 978 aa, synthetic construct
  REGION 1..978: note = engineered CasX variant
QEIKRINKIRRRLVKDSNTKKAGKTGPMKTLLVRVMTPDLRERLENLRKKPENIPQPISNTSRANLNKLLTDYTEMKKAILHVYWEEFQVDPVGLMSRVAQPASKKIDQNKLKPEMDEKGNLTTAGFACSQCGQPLFVYKLEQVSEKGKAYTNYFGRCNVAEHEKLILLAQLKPEKDSDEAVTYSLGKFGQRALDFYSIHVTKESTHPVKPLAQIAGNRYASGPVGKALSDACMGTIASFLSKYQDIIIEHQKVVKGNQKRLESLRELAGKENLEYPSVTLPPQPHTKEGVDAYNEVIARVRMWVNLNLWQKLKLSRDDAKPLLRLKGFPSFPLVERQANEVDWWDMVCNVKKLINEKKEDGKVFWQNLAGYKRQEALRPYLSSEEDRKKGKKFARYQLGDLLLHLEKKHGEDWGKVYDEAWERIDKKVEGLSKHIKLEEERRSEDAQSKAALTDWLRAKASFVIEGLKEADKDEFCRCELKLQKWYGDLRGKPFAIEAENSILDISGFSKQYNCAFIWQKDGVKKLNLYLIINYFKGGKLRFKKIKPEAFEANRFYTVINKKSGEIVPMEVNFNFDDPNLIILPLAFGKRQGREFIWNDLLSLETGSLQLANGRVIEKTLYNRRTRQDEPALFVALTFERREVLDSSNIKPMNLIGVDRGENIPAVIALTDPEGCPLSRFKDSLGNPTHILRIGESYKEKQRTIQAKKEVEQRRAGGYSRKYASKAKNLADDMVRNTARDLLYYAVTQDAMLIFENLSRGFGRQGKRTFMAERQYTRMEDWLTAKLAYEGLPSKTYLSKTLAQYTSKTCSNCGFTITSADYDRVLEKLKKTATGWMTTINGKELKVEGQITYYNRYKRQNVVKDLSVELDRLSEESVNNDISSWTKGRSGEALSLLKKRFSHRPVQEKFVCLNCGFETHADEQAALNIARSWLFLRSQEYKKYQTNKTTGNTDKRAFVETWQSFYRKKLKEVWKPAV

SEQ ID NO: 28947 - protein, 979 aa, synthetic construct
  REGION 1..979: note = engineered CasX variant
QEIKRLANKIRRRLVKDSNTKKAGKTGPMKTLLVRVMTPDLRERLENLRKKPENIPQPISNTSRANLNKLLTDYTEMKKAILHVYWEEFQKDPVGLMSRVAQPASKKIDQNKLKPEMDEKGNLTTAGFACSQCGQPLFVYKLEQVSEKGKAYTNYFGRCNVAEHEKLILLAQLKPEKDSDEAVTYSLGKFGQRALDFYSIHVTKESTHPVKPLAQIAGNRYASGPVGKALSDACMGTIASFLSKYQDIIIEHQKVVKGNQKRLESLRELAGKENLEYPSVTLPPQPHTKEGVDAYNEVIARVRMWVNLNLWQKLKLSRDDAKPLLRLKGFPSFPLVERQANEVDWWDMVCNVKKLINEKKEDGKVFWQNLAGYKRQEALRPYLSSEEDRKKGKKFARYQLGDLLLHLEKKHGEDWGKVYDEAWERIDKKVEGLSKHIKLEEERRSEDAQSKAALTDWLRAKASFVIEGLKEADKDEFCRCELKLQKWYGDLRGKPFAIEAENSILDISGFSKQYNCAFIWQKDGVKKLNLYLIINYFKGGKLRFKKIKPEAFEANRFYTVINKKSGEIVPMEVNFNFDDPNLIILPLAFGKRQGREFIWNDLLSLETGSLKLANGRVIEKTLYNRRTRQDEPALFVALTFERREVLDSSNIKPMNLIGVDRGENIPAVIALTDPEGCPLSRFKDSLGNPTHILRIGESYKEKQRTIQAKKEVEQRRAGGYSRKYASKAKNLADDMVRNTARDLLYYAVTQDAMLIFENLSRGFGRQGKRTFMAERQYTRMEDWLTAKLAYEGLPSKTYLSKTLAQYTSKTCSNCGFTITSADYDRVLEKLKKTATGWMTTINGKELKVEGQITYYNRYKRQNVVKDLSVELDRLSEESVNNDISSWTKGRSGEALSLLKKRFSHRPVQEKFVCLNCGFETHADEQAALNIARSWLFLRSQEYKKYQTNKTTGNTDKRAFVETWQSFYRKKLKEVWKPAV

SEQ ID NO: 28948 - protein, 978 aa, synthetic construct
  REGION 1..978: note = engineered CasX variant
QEIKRLNKIRRRLVKDSNTKKAGKTGPMKTLLVRVMTPDLRERLENLRKKPENIPQPISNTSRANLNKLLTDYTEMKKAILHVYWEEFQKDPVGLMSRVAQPASKKIDQNKLKPEMDEKGNLTTAGFACSQCGQPLFVYKLEQVSEKGKAYTNYVGRCNVAEHEKLILLAQLKPEKDSDEAVTYSLGKFGQRALDFYSIHVTKESTHPVKPLAQIAGNRYASGPVGKALSDACMGTIASFLSKYQDIIIEHQKVVKGNQKRLESLRELAGKENLEYPSVTLPPQPHTKEGVDAYNEVIARVRMWVNLNLWQKLKLSRDDAKPLLRLKGFPSFPLVERQANEVDWWDMVCNVKKLINEKKEDGKVFWQNLAGYKRQEALRPYLSSEEDRKKGKKFARYQLGDLLLHLEKKHGEDWGKVYDEAWERIDKKVEGLSKHIKLEEERRSEDAQSKAALTDWLRAKASFVIEGLKEADKDEFCRCELKLQKWYGDLRGKPFAIEAENSILDISGFSKQYNCAFIWQKDGVKKLNLYLIINYFKGGKLRFKKIKPEAFEANRFYTVINKKSGEIVPMEVNFNFDDPNLIILPLAFGKRQGREFIWNDLLSLETGSLKLANGRVIEKTLYNRRTRQDEPALFVALTFERREVLDSSNIKPMNLIGVDRGENIPAVIALTDPEGCPLSRFKDSLGNPTHILRIGESYKEKQRTIQAKKEVEQRRAGGYSRKYASKAKNLADDMVRNTARDLLYYAVTQDAMLIFENLSRGFGRQGKRTFMAERQYTRMEDWLTAKLAYEGLPSKTYLSKTLAQYTSKTCSNCGFTITSADYDRVLEKLKKTATGWMTTINGKELKVEGQITYYNRYKRQNVVKDLSVELDRLSEESVNNDISSWTKGRSGEALSLLKKRFSHRPVQEKFVCLNCGFETHADEQAALNIARSWLFLRSQEYKKYQTNKTTGNTDKRAFVETWQSFYRKKLKEVWKPAV

SEQ ID NO: 28949 - protein, 978 aa, synthetic construct
  REGION 1..978: note = engineered CasX variant
QEIKRLNKIRRRLVKDSNTKKAGKTGPMKTLLVRVMTPDLRERLENLRKKPENIPQPISNTSRANLNKLLTDYTEMKKAILHVYWEEFQKDPVGLMSRVAQPASKKIDQNKLKPEMDEKGNLTTAGFACSQCGQPLFVYKLEQVSEKGKAYTNYFGRCNVAEHEKLILLAQLKPEKDSDEAVTYSLGKFGQRALDFYSIHVTKESTHPVKPLAQIAGNRYASGPVGKALSDACMGTIASFLSKYQDIIIEHQKVVKGNQKRLESLRELAGKENLEYPSVTLPPQPHTKEGVDAYNEVIARVRMWVNLNLWQKLKLSRDDAKPLLRLKGFPSFPLVERQANEVDWWDMVCNVKKLINEKKEDGKVFWQNLAGYKRQEALRPYLSSEEDRKKGKKFARYQLGDLLLHLEKKHGEDWGKVYDEAWERIDKKVEGLSKHIKLEEERRSEDAQSKAALTDWLRAKASFVIEGLKEADKDEFCRCELKLQKWYGDLRGKPFAIEAENSILDISGFSKQYNCAFIWQKDGVKKLNLYLIINYFKGGKLRFKKIKPEAFEANRFYTVINKKSGEIVPMEVNFNFDDPNLIILPLAFGKRQGREFIWNDLLSLETGSLKLANGRVIEKTLYNRRTRQDEPALFVALTFERREVLDSSNIKPMNLIGVDRGENIPAVIALTDPEGCPLSRFKDSLGNPTHILRIGESYKEKQRTIQAKKEVEQRRAGGYSRKYASKAKNLADDMVRNTARDLLYYAVTQDAMLIFENLSRGFGRQGKRTFMAERQYTRMEDWLTAKLAYEGLASKTYLSKTLAQYTSKTCSNCGFTITSADYDRVLEKLKKTATGWMTTINGKELKVEGQITYYNRYKRQNVVKDLSVELDRLSEESVNNDISSWTKGRSGEALSLLKKRFSHRPVQEKFVCLNCGFETHADEQAALNIARSWLFLRSQEYKKYQTNKTTGNTDKRAFVETWQSFYRKKLKEVWKPAV

SEQ ID NO: 28950 - protein, 978 aa, synthetic construct
  REGION 1..978: note = engineered CasX variant
QEIKRLNKIRRRLVKDSNTKKAGKTGPMKTLLVRVMTPDLRERLENLRKKPENIPQPISNTSRANLNKLLTDYTEMKKAILHVYWEEFQKDPVGLMSRVAQPASKKIDQNKLKPEMDEKGNLTTAGFACSQCGQPLFVYKLEQVSEKGKAYTNYFGRCNVAEHEKLILLAQLKPEKDSDEAVTYSLGKFGQRALDFYSIHVTKESTHPVKPLAQIAGNRYASGPVGKALSDACMGTIASFLSKYQDIIIEHQKVVKGNQKRLESLRELAGKENLEYPSVTLPPQPHTKEGVDAYNEVIARVRMWVNLNLWQKLKLSRDDAKPLLRLKGFPSFPLVERQANEVDWWDMVCNVKKLINEKKEDGKVFWQNLAGYKRQEALRPYLSSEEDRKKGKKFARYQLGDLLLHLEKKHGEDWGKVYDEAWERIDKKVEGLSKHIKLEEERRSEDAQSKAALTDWLRAKASFVIEGLKEADKDEFCRCELKLQKWYGDLRGKPFAIEAENSILDISGFSKQYNCAFIWQKDGVKKLNLYLIINYFKGGKLRFKKIKPEAFEANRFYTVINKKSGEIVPMEVNFNFDDPNLIILPLAFGKRQGREFIWNDLLSLETGSLKLANGRVIEKTLYNRRTRQDEPALFVALTFERREVLDSSNIKPMNLIGVDRGENIPAVIALTDPEGCPLSRFKDSLGNPTHILRIGESYKEKQRTIQAKKEVEQRRAGGYSRKYASKAKNLADDMVRNTARDLLYYAVTQDAMLIFENLSRGFGRQGKRTFMAERQYTRMEDWLTAKLAYEGLPSKVYLSKTLAQYTSKTCSNCGFTITSADYDRVLEKLKKTATGWMTTINGKELKVEGQITYYNRYKRQNVVKDLSVELDRLSEESVNNDISSWTKGRSGEALSLLKKRFSHRPVQEKFVCLNCGFETHADEQAALNIARSWLFLRSQEYKKYQTNKTTGNTDKRAFVETWQSFYRKKLKEVWKPAV

SEQ ID NO: 28951 - protein, 979 aa, synthetic construct
  REGION 1..979: note = engineered CasX variant
QEIKRLNKIRRRLVKDSNTKKAGKTGPMKTLLVRVMTPDLRERLENLRKKPENIPQPISNTSRANLNKLLTDYTEMKKAILHVYWEEFQKDPVGLMSRVAQPASKKIDQNKLKPEMDEKGNLTTAGFACSQCGQPLFVYKLEQVSEKGKAYTNYFGRCNVAEHEKLILLAQLKPEKDSDEAVTYSLGKFGQRALDFYSIHVTKESTHPVKPLAQIAGNRYASGPVGKALSDACMGTIASFLSKYQDIIIEHQKVVKGNQKRLESLRELAGKENLEYPSVTLPPQPHTKEGVDAYNEVIARVRMWVNLNLWQKLKLSRDDAKPLLRLKGFPSFPLVERQANEVDWWDMVCNVKKLINEKKEDGKVFWQNLAGYKRQEALRPYLSSEEDRKKGKKFARYQLGDLLLHLEKKHGEDWGKVYDEAWERIDKKVEGLSKHIKLEEERRSEDAQSKAALTDWLRAKASFVIEGLKEADKDEFCRCELKLQKWYGDLRGKPFAIEAENSILDISGFSKQYNCAFIWQKDGVKKLNLYLIINYFKGGKLRFKKIKPEAFEANRFYTVINKKSGEIVPMEVNFNFDDPNLIILPLAFGKRQGREFIWNDLLSLETGSLKLANGRVIEKTLYNRRTRQDEPALFVALTFERREVLDSSNIKPMNLIGVDRGENIPAVIALTDPEGCPLSRFKDSLGNPTHILRIGESYKEKQRTIQAKKEVEQRRAGGYSRKYASKAKNLADDMVRNTARDLLYYAVTQDAMLIFENLSRGFGRQGKRTFMAERQYTRMEDWLTAKLAYEGPLPSKTYLSKTLAQYTSKTCSNCGFTITSADYDRVLEKLKKTATGWMTTINGKELKVEGQITYYNRYKRQNVVKDLSVELDRLSEESVNNDISSWTKGRSGEALSLLKKRFSHRPVQEKFVCLNCGFETHADEQAALNIARSWLFLRSQEYKKYQTNKTTGNTDKRAFVETWQSFYRKKLKEVWKPAV

SEQ ID NO: 28952 - protein, 979 aa, synthetic construct
  REGION 1..979: note = engineered CasX variant
QEIKRLNKIRRRLVKDSNTKKAGKTGPMKTLLVRVMTPDLRERLENLRKKPENIPQPISNTSRANLNKLLTDYTEMKKAILHVYWEEFQKDPVGLMSRVAQPASKKIDQNKLKPEMDEKGNLTTAGFACSQCGQPLFVYKLEQVSEKGKAYTNYFGRCNVAEHEKLILLAQLKPEKDSDEAVTYSLGKFGQRALDFYSIHVTKESTHPVKPLAQIAGNRYASGPVGKALSDACMGTIASFLSKYQDIIIEHQKVVKGNQKRLESLRELAGKENLEYPSVTLPPQPHTKEGVDAYNEVIARVRMWVNLNLWQKLKLSRDDAKPLLRLKGFPSFPLVERQANEVDWWDMVCNVKKLINEKKEDGKVFWQNLAGYKRQEALRPYLSSEEDVRKKGKKFARYQLGDLLLHLEKKHGEDWGKVYDEAWERIDKKVEGLSKHIKLEEERRSEDAQSKAALTDWLRAKASFVIEGLKEADKDEFCRCELKLQKWYGDLRGKPFAIEAENSILDISGFSKQYNCAFIWQKDGVKKLNLYLIINYFKGGKLRFKKIKPEAFEANRFYTVINKKSGEIVPMEVNFNFDDPNLIILPLAFGKRQGREFIWNDLLSLETGSLKLANGRVIEKTLYNRRTRQDEPALFVALTFERREVLDSSNIKPMNLIGVDRGENIPAVIALTDPEGCPLSRFKDSLGNPTHILRIGESYKEKQRTIQAKKEVEQRRAGGYSRKYASKAKNLADDMVRNTARDLLYYAVTQDAMLIFENLSRGFGRQGKRTFMAERQYTRMEDWLTAKLAYEGLPSKTYLSKTLAQYTSKTCSNCGFTITSADYDRVLEKLKKTATGWMTTINGKELKVEGQITYYNRYKRQNVVKDLSVELDRLSEESVNNDISSWTKGRSGEALSLLKKRFSHRPVQEKFVCLNCGFETHADEQAALNIARSWLFLRSQEYKKYQTNKTTGNTDKRAFVETWQSFYRKKLKEVWKPAV

SEQ ID NO: 28953 - protein, 978 aa, synthetic construct
  REGION 1..978: note = engineered CasX variant
QEIKRLNKIRRRLVKDSNTKKAGKTGPMKTLLVRVMTPDLRERLENLRKKPENIPQPISNTSRANLNKLLTDYTEMKKAILHVYWEEFQKDPVGLMSRVAQPASKKIDQNKLKPEMDEKGNLTTAGFACSQCGQPLFVYKLEQVSEKGKAYTNYFGRCNVAEHEKLILLAQLKPEKDSDEAVTYSLGKFGQRALDFYSIHVTKESTHPVKPLAQIAGNRYASGPVGKALSDACMGTIASFLSKYQDIIIEHQKVVKGNQKRLESLRELAGKENLEYPSVTLPPQPHTKEGVDAYNEVIARVRMWVNLNLWQKLKLSRDDAKPLLRLKGFPSFPLVERQANEVDWWDMVCNVKKLINEKKEDGKVFWQNLAGYKRQEALRPYLSSEEDRKKGKKFARYQLGDLLLHLEKKHGEDWGKVYDEAWERIDKKVEGLSKHIKLEEERRSEDAQSKAALTDWLRAKASFVIEGLKEADKDEFCRCELKLQKWYGDLRGKPFAIEAENSILDISGFSKQYNCAFIWQKDGVKKLNLYLIINYFKGGKLRFKKIKPEAFEANRFYTVINKKSGEIVPMEVNFNFDDPNLIILPLAFGKRQGREFIWNDLLSLETGSLKLANGRVIEKTLYNRRTRQDEPALFVALTFERREVLDSSNIKPMNLIGVDRGENIPAVIALTDPEGCPLSRFKDSLGNPTHILRIGESYKEKQRTIQAKKEVEQRRAGGYSRKYASKAKNLADDMVRNTARDLLYYAVTQDAMLIFENLSRGFGRQGKRTFMAERQYTRMEDWLTAKLAYEGLPSKTYLSKTLAQYTSKTCSNCGFTITSADYDRMLEKLKKTATGWMTTINGKELKVEGQITYYNRYKRQNVVKDLSVELDRLSEESVNNDISSWTKGRSGEALSLLKKRFSHRPVQEKFVCLNCGFETHADEQAALNIARSWLFLRSQEYKKYQTNKTTGNTDKRAFVETWQSFYRKKLKEVWKPAV

SEQ ID NO: 28954 - protein, 978 aa, synthetic construct
  REGION 1..978: note = engineered CasX variant
QEIKRLNKIRRRLVKDSNTKKAGKTGPMKTLLVRVMTPDLRERLENLRKKPENIPQPISNTSRANLNKLLTDYTEMKKAILHVYWEEFQKDPVGLMSRVAQPASKKIDQNKLKPEMDEKGNLTTAGFACSQCGQPLFVYKLEQVSEKGKAYTNYFGRCNVAEHEKLILLAQLKPEKDSDEAVTYSLGKFGQRALDFYSIHVTKESTHPVKPLAQIAGNRYASGPVGKALSDACMGTIASFLSKYQDIIIEHQKVVKGNQKRLESLRELAGKENLEYPSVTLPPQPHTKEGVDAYNEVIARVRMWVNLNLWQKLKLSRDDAKPLLRLKGFPSFPLVERQANEVDWWDMVCNVKKLINEKKEDGKVFWQNLAGYKRQEALRPYLSSEEDRKKGKKFARYQLGDLLLHLEKKHGEDWGKVYDEAWERIDKKVEGLSKHIKLEEERRSEDAQSKAALTDWLRAKASFVIEGLKEADKDEFCRCELKLQKWYGDLRGKPFAIEAENSILDISGFSKQYNCAFIWQKDGVKKLNLYLIINYFKGGKLRFKKIKPEAFEANRFYTVINKKSGEIVPMEVNFNFDDPNLIILPLAFGKRQGREFIWNDLLSLETGSLKLANGRVIEKTLYNRRTRQDEPALFVALTFERREVLDSSNIKPMNLIGVDRGENIPAVIALTDPEGCPLSRFKDSLGNPTHILRIGESYKEKQRTIQAKKEVEQRRAGGYSRKYASKAKNLADDMVRNTARDLLYYAVTQDAMLIFENLSRGFGRQGKRTFMAERQYTRMEDWLTAKLAYEGLPSKTYLSKTLAQYTSKTCSNCGFTITSADYDRVLEKLKKTATGWMTTINGKELKVEGQITYYNRYKRQNVVKDLSVELDRLSEESVNNDISSWTKGRQGEALSLLKKRFSHRPVQEKFVCLNCGFETHADEQAALNIARSWLFLRSQEYKKYQTNKTTGNTDKRAFVETWQSFYRKKLKEVWKPAV

SEQ ID NO: 28955 - protein, 978 aa, synthetic construct
  REGION 1..978: note = engineered CasX variant
QEIKRLNKIRRRLVKDSNTKKAGKTGPMKTLLVRVMTPDLRERLENLRKKPENIPQPISNTSRANLNKLLTDYTEMKKAILHVYWEEFQKDPVGLMSRVAQPASKKIDQNKLKPEMDEKGNLTTAGFACSQCGQPLFVYKLEQVSEKGKAYTNYFGRCNVAEHEKLILLAQLKPEKDSDEAVTYSLGKFGQRALDFYSIHVTKESTHPVKPLAQIAGNRYASGPVGKALSDACMGTIASFLSKYQDIIIEHQKVVKGNQKRLESLRELAGKENLEYPSVTLPPQPHTKEGVDAYNEVIARVRMWVNLNLWQKLKLSRDDAKPLLRLKGFPSFPLVERQANEVDWWDMVCNVKKLINEKKEDGKVFWQNLAGYKRQEALRPYLSSEEDRKKGKKFARYQLGDLLLHLEKKHGEDWGKVYDEAWERIDKKVEGLSKHIKLEEERRSEDAQSKAALTDWLRAKASFVIEGLKEADKDEFCRCELKLQKWYGDLRGKPFAIEAENSILDISGFSKQYNCAFIWQKDGVKKLNLYLIINYFKGGKLRFKKIKPEAFEANRFYTVINKKSGEIVPMEVNFNFDDPNLIILPLAFGKRQGREFIWNDLLSLETGSLKLANGRVIEKTLYNRRTRQDEPALFVALTFERREVLDSSNIKPMNLIGVDRGENIPAVIALTDPEGCPLSRFKDSLGNPTHILRIGESYKEKQRTIQAKKEVEQRRAGGYSRKYASKAKNLADDMVRNTARDLLYYAVTQDAMLIFENLSRGFGRQGKRTFMAERQYTRMEDWLTAKLAYEGLPSKTYLSKTLAQYTSKTCSNCGFTITSADYDRVLEKLKKTATGWMTTINGKELKVEGQITYYNRYKRQNVVKDLSVELDRLSEESVNNDISSWTKGRSGEALSLLKKRFSHRPVQEKFVCLNCEFETHADEQAALNIARSWLFLRSQEYKKYQTNKTTGNTDKRAFVETWQSFYRKKLKEVWKPAV

SEQ ID NO: 28956 - protein, 979 aa, synthetic construct
  REGION 1..979: note = engineered CasX variant
QEIKRLNKIRRRLVKDSNTKKAGKTGPMKTLLVRVMTPDLRERLENLRKKPENIPQPISNTSRANLNKLLTDYTEMKKAILHVYWEEFQKDPVGLMSRVAQPASKKIDQNKLKPEMDEKGNLTTAGFACSQCGQPLFVYKLEQVSEKGKAYTNYFGRCNVAEHEKLILLAQLKPEKDSDEAVTYSLGKFGQRALDFYSIHVTKESTHPVKPLAQIAGNRYASGPVGKALSDACMGTIASFLSKYQDIIIEHQKVVKGNQKRLESLRELAGKENLEYPSVTLPPQPHTKEGVDAYNEVIARVRMWVNLNLWQKLKLSRDDAKPLLRLKGFPSFPLVERQANEVDWWDMVCNVKKLINEKKEDGKVFWQNLAGYKRQEALRPYLSSEEDRKKGKKFARYQLGDLLLHLEKKHGEDWGKVYDEAWERIDKKVEGLSKHIKLEEERRSEDAQSKAALTDWLRAKASFVIEGLKEADKDEFCRCELKLQKWYGDLRGKPFAIEAENSILDISGFSKQYNCAFIWQKDGVKKLNLYLIINYFKGGKLRFKKIKPEAFEANRFYTVINKKSGEIVPMEVNFNFDDPNLIILPLAFGKRQGREFIWNDLLSLETGSLKLANGRVIEKTLYNRRTRQDEPALFVALTFERREVLDSSNIKPMNLIGVDRGENIPAVIALTDPEGCPLSRFKDSLGNPTHILRIGESYKEKQRTIQAKKEVEQRRAGGYSRKYASKAKNLADDMVRNTARDLLYYAVTQDAMLIFENLSRGFGRQGKRTFMAERQYTRMEDWLTAKLAYEGLPSKTYLSKTLAQYTSKTCSNCGFTITSADYDRVLEKLKKTATGWMTTINGKELKVEGQITYYNRYKRQNVVKDLSVELDRLSEESVNNDISSWTKGRSGEALSLLKKRFSHRPVQEKFVCLNCGFETHADEQAALNIARSWLFLRSQEYKKYQTNKTSTGNTDKRAFVETWQSFYRKKLKEVWKPAV

SEQ ID NO: 28957 - protein, 979 aa, synthetic construct
  REGION 1..979: note = engineered CasX variant
QEIKRLNKIRRRLVKDSNTKKAGKTGPMKTLLVRVMTPDLRERLENLRKKPENIPQPISNTSRANLNKLLTDYTEMKKAILHVYWEEFQKDPVGLMSRVAQPASKKIDQNKLKPEMDEKGNLTTAGFACSQCGQPLFVYKLEQVSEKGKAYTNYFGRCNVAEHEKLILLAQLKPEKDSDEAVTYSLGKFGQRALDFYSIHVTKESTHPVKPLAQIAGNRYASGPVGKALSDACMGTIASFLSKYQDIIIEHQKVVKGNQKRLESLRELAGKENLEYPSVTLPPQPHTKEGVDAYNEVIARVRMWVNLNLWQKLKLSRDDAKPLLRLKGFPSFPLVERQANEVDWWDMVCNVKKLINEKKEDGKVFWQNLAGYKRQEALRPYLSSEEDRKKGKKFARYQLGDLLLHLEKKHGEDWGKVYDEAWERIDKKVEGLSKHIKLEEERRSEDAQSKAALTDWLRAKASFVIEGLKEADKDEFCRCELKLQKWYGDLRGKPFAIEAENSILDISGFSKQYNCAFIWQKDGVKKLNLYLIINYFKGGKLRFKKIKPEAFEANRFYTVINKKSGEIVPMEVNFNFDDPNLIILPLAFGKRQGREFIWNDLLSLETGSLKLANGRVIEKTLYNRRTRQDEPALFVALTFERREVLDSSNIKPMNLIGVDRGENIPAVIALTDPEGCPLSRFKDSLGNPTHILRIGESYKEKQRTIQAKKEVEQRRAGGYSRKYASKAKNLADDMVRNTARDLLYYAVTQDAMLIFENLSRGFGRQGKRTFMAERQYTRMEDWLTAKLAYEGLPSKTYLSKTLAQYTSKTCSNCGFTITSADYDRVLEKLKKTATGWMTTINGKELKVEGQITYYNRYKRQNVVKDLSVELDRLSEESVNNDISSWTKGRSGEALSLLKKRFSHRPVQEKFVCLNCGFETHADEQAALNIARSWLFLRSQEYKKYQTNKTTGKNTDKRAFVETWQSFYRKKLKEVWKPAV

SEQ ID NO: 28958 - protein, 978 aa, synthetic construct
  REGION 1..978: note = engineered CasX variant
QEIKRLNKIRRRLVKDSNTKKAGKTGPMKTLLVRVMTPDLRERLENLRKKPENIPQPISNTSRANLNKLLTDYTEMKKAILHVYWEEFQKDPVGLMSRVAQPASKKIDQNKLKPEMDEKGNLTTAGFACSQCGQPLFVYKLEQVSEKGKAYTNYFGRCNVAEHEKLILLAQLKPEKDSDEAVTYSLGKFGQRALDFYSIHVTKESTHPVKPLAQIAGNRYASGPVGKALSDACMGTIASFLSKYQDIIIEHQKVVKGNQKRLESLRELAGKENLEYPSVTLPPQPHTKEGVDAYNEVIARVRMWVNLNLWQKLKLSRDDAKPLLRLKKFPSFPLVERQANEVDWWDMVCNVKKLINEKKEDGKVFWQNLAGYKRQEALRPYLSSEEDRKKGKKFARYQLGDLLLHLEKKHGEDWGKVYDEAWERIDKKVEGLSKHIKLEEERRSEDAQSKAALTDWLRAKASFVIEGLKEADKDEFCRCELKLQKWYGDLRGKPFAIEAENSILDISGFSKQYNCAFIWQKDGVKKLNLYLIINYFKGGKLRFKKIKPEAFEANRFYTVINKKSGEIVPMEVNFNFDDPNLIILPLAFGKRQGREFIWNDLLSLETGSLKLANGRVIEKTLYNRRTRQDEPALFVALTFERREVLDSSNIKPMNLIGVDRGENIPAVIALTDPEGCPLSRFKDSLGNPTHILRIGESYKEKQRTIQAKKEVEQRRAGGYSRKYASKAKNLADDMVRNTARDLLYYAVTQDAMLIFENLSRGFGRQGKRTFMAERQYTRMEDWLTAKLAYEGLPSKTYLSKTLAQYTSKTCSNCGFTITSADYDRVLEKLKKTATGWMTTINGKELKVEGQITYYNRYKRQNVVKDLSVELDRLSEESVNNDISSWTKGRSGEALSLLKKRFSHRPVQEKFVCLNCGFETHADEQAALNIARSWLFLRSQEYKKYQTNKTTGNTDKRAFVETWQSFYRKKLKEVWKPAV

SEQ ID NO: 28959 - protein, 978 aa, synthetic construct
  REGION 1..978: note = engineered CasX variant
QEIKRLNKIRRRLVKDSNTKKAGKTGPMKTLLVRVMTPDLRERLENLRKKPENIPQPISNTSRANLNKLLTDYTEMKKAILHVYWEEFQKDPVGLMSRVAQPASKKIDQNKLKPEMDEKGNLTTAGFACSQCGQPLFVYKLEQVSEKGKAYTNYFGRCNVAEHEKLILLAQLKPEKDSDEAVTYSLGKFGQRALDFYSIHVTKESTHPVKPLAQIAGNRYASGPVGKALSDACMGTIASFLSKYQDIIIEHQKVVKGNQKRLESLRELAGKENLEYPSVTLPPQPHTKEGVDAYNEVIARVRMWVNLNLWQKLKLSRDDAKPLLRLKGFPSFPLVERQANEVDWWDMVCNVKKLINEKKEDGKVFWQNLAGYKRQEALRPYLSSEEDRKKGKKFARYQLGDLLLHLEKKHGEDWGKVYDEAWERIDKKVEGLSKHIKLEEERRSEDAQSKAALTDWLRAKASFVIEGLKEADKDEFCRCELKLQKWYGDLRGKPFAIEAENSILDISGFSKQYNCAFIWQKDGVKKLNLYLIINYFKGGKLRFKKIKPEAFEANRFYTVINKKSGEIVPMEVNFNFDDPNLIILPLAFGKRQGREFIWNDLLSLETGSLKLANGRVIEKTLYNRRTRQDEPALFVALTFERREVLDSSNIKPMNLIGVDRGENIPAVIALTDPEGCPLSRFKDSLGNPTHILRIGERYKEKQRTIQAKKEVEQRRAGGYSRKYASKAKNLADDMVRNTARDLLYYAVTQDAMLIFENLSRGFGRQGKRTFMAERQYTRMEDWLTAKLAYEGLPSKTYLSKTLAQYTSKTCSNCGFTITSADYDRVLEKLKKTATGWMTTINGKELKVEGQITYYNRYKRQNVVKDLSVELDRLSEESVNNDISSWTKGRSGEALSLLKKRFSHRPVQEKFVCLNCGFETHADEQAALNIARSWLFLRSQEYKKYQTNKTTGNTDKRAFVETWQSFYRKKLKEVWKPAV

SEQ ID NO: 28960 - protein, 978 aa, synthetic construct
  REGION 1..978: note = engineered CasX variant
QEIKRLNKIRRRLVKDSNTKKAGKTGPMKTLLVRVMTPDLRERLENLRKKPENIPQPISNTSRANLNKLLTDYTEMKKAILHVYWEEFQKDPVGLMSRVAQPASKKIDQNKLKPEMDEKGNLTTAGFACSQCGQPLFVYKLEQVSEKGKAYTNYFGRCNVAEHEKLILLAQLKPEKDSDEAVTYSLGKFGQRALDFYSIHVTKESTHPVKPLAQIAGNRYASGPVGKALSDACMGTIASFLSKYQDIIIEHQKVVKGNQKRLESLRELAGKENLEYPSVTLPPQPHTKEGVDAYNEVIARVRMWVNLNLWQKLKLSRDDAKPLLRLKGFPSFPLVERQANEVDWWDMVCNVKKLINEKKEDGKVFWQNLAGYKRQEALRPYLSSEEDRKKGKKFARYQLGDLLLHLEKKHGEDWGKVYDEAWERIDKKVEGLSKHIKLEEERRSEDAQSKAALTDWLRAKASFVIEGLKEADKDEFCRCELKLQKWYGDLRGKPFAIEAENSILDISGFSKQYNCAFIWQKDGVKKLNLYLIINYFKGGKLRFKKIKPEAFEANRFYTVINKKSGEIVPMEVNFNFDDPNLIILPLAFGKRQGREFIWNDLLSLETGSLQLANGRVIEKTLYNRRTRQDEPALFVALTFERREVLDSSNIKPMNLIGVDRGENIPAVIALTDPEGCPLSRFKDSLGNPTHILRIGESYKEKQRTIQAKKEVEQRRAGGYSRKYASKAKNLADDMVRNTARDLLYYAVTQDAMLIFENLSRGFGRQGKRTFMAERQYTRMEDWLTAKLAYEGLPSKTYLSKTLAQYTSKTCSNCGFTITSADYDRVLEKLKKTATGWMTTINGKELKVEGQITYYNRYKRQNVVKDLSVELDRLSEESVNNDISSWTKGRSGEALSLLKKRFSHRPVQEKFVCLNCGFETHADEQAALNIARSWLFLRSQEYKKYQTNKTTGNTDKRAFVETWQSFYRKKLKEVWKPAV

SEQ ID NO: 28961 - protein, 978 aa, synthetic construct
  REGION 1..978: note = engineered CasX variant
QEIKRINKIRRRLVKDSNTKKAGKTGPMKTLLVRVMTPDLRERLENLRKKPENIPQPISNTSRANLNKLLTDYTEMKKAILHVYWEEFQKDPVGLMSRVAQPASKKIDQNKLKPEMDEKGNLTTAGFACSQCGQPLFVYKLEQVSEKGKAYTNYVGRCNVAEHEKLILLAQLKPEKDSDEAVTYSLGKFGQRALDFYSIHVTKESTHPVKPLAQIAGNRYASGPVGKALSDACMGTIASFLSKYQDIIIEHQKVVKGNQKRLESLRELAGKENLEYPSVTLPPQPHTKEGVDAYNEVIARVRMWVNLNLWQKLKLSRDDAKPLLRLKGFPSFPLVERQANEVDWWDMVCNVKKLINEKKEDGKVFWQNLAGYKRQEALRPYLSSEEDRKKGKKFARYQLGDLLLHLEKKHGEDWGKVYDEAWERIDKKVEGLSKHIKLEEERRSEDAQSKAALTDWLRAKASFVIEGLKEADKDEFCRCELKLQKWYGDLRGKPFAIEAENSILDISGFSKQYNCAFIWQKDGVKKLNLYLIINYFKGGKLRFKKIKPEAFEANRFYTVINKKSGEIVPMEVNFNFDDPNLIILPLAFGKRQGREFIWNDLLSLETGSLKLANGRVIEKTLYNRRTRQDEPALFVALTFERREVLDSSNIKPMNLIGVDRGENIPAVIALTDPEGCPLSRFKDSLGNPTHILRIGESYKEKQRTIQAKKEVEQRRAGGYSRKYASKAKNLADDMVRNTARDLLYYAVTQDAMLIFENLSRGFGRQGKRTFMAERQYTRMEDWLTAKLAYEGLASKTYLSKTLAQYTSKTCSNCGFTITSADYDRVLEKLKKTATGWMTTINGKELKVEGQITYYNRYKRQNVVKDLSVELDRLSEESVNNDISSWTKGRSGEALSLLKKRFSHRPVQEKFVCLNCGFETHADEQAALNIARSWLFLRSQEYKKYQTNKTTGNTDKRAFVETWQSFYRKKLKEVWKPAV

SEQ ID NO: 28962 - protein, 978 aa, synthetic construct
  REGION 1..978: note = engineered CasX variant
QEIKRINKIRRRLVKDSNTKKAGKTGPMKTLLVRVMTPDLRERLENLRKKPENIPQPISNTSRANLNKLLTDYTEMKKAILHVYWEEFQKDPVGLMSRVAQPASKKIDQNKLKPEMDEKGNLTTAGFACSQCGQPLFVYKLEQVSEKGKAYTNYVGRCNVAEHEKLILLAQLKPEKDSDEAVTYSLGKFGQRALDFYSIHVTKESTHPVKPLAQIAGNRYASGPVGKALSDACMGTIASFLSKYQDIIIEHQKVVKGNQKRLESLRELAGKENLEYPSVTLPPQPHTKEGVDAYNEVIARVRMWVNLNLWQKLKLSRDDAKPLLRLKGFPSFPLVERQANEVDWWDMVCNVKKLINEKKEDGKVFWQNLAGYKRQEALRPYLSSEEDRKKGKKFARYQLGDLLLHLEKKHGEDWGKVYDEAWERIDKKVEGLSKHIKLEEERRSEDAQSKAALTDWLRAKASFVIEGLKEADKDEFCRCELKLQKWYGDLRGKPFAIEAENSILDISGFSKQYNCAFIWQKDGVKKLNLYLIINYFKGGKLRFKKIKPEAFEANRFYTVINKKSGEIVPMEVNFNFDDPNLIILPLAFGKRQGREFIWNDLLSLETGSLKLANGRVIEKTLYNRRTRQDEPALFVALTFERREVLDSSNIKPMNLIGVDRGENIPAVIALTDPEGCPLSRFKDSLGNPTHILRIGESYKEKQRTIQAKKEVEQRRAGGYSRKYASKAKNLADDMVRNTARDLLYYAVTQDAMLIFENLSRGFGRQGKRTFMAERQYTRMEDWLTAKLAYEGLPSKVYLSKTLAQYTSKTCSNCGFTITSADYDRVLEKLKKTATGWMTTINGKELKVEGQITYYNRYKRQNVVKDLSVELDRLSEESVNNDISSWTKGRSGEALSLLKKRFSHRPVQEKFVCLNCGFETHADEQAALNIARSWLFLRSQEYKKYQTNKTTGNTDKRAFVETWQSFYRKKLKEVWKPAV

SEQ ID NO: 28963 - protein, 979 aa, synthetic construct
  REGION 1..979: note = engineered CasX variant
QEIKRINKIRRRLVKDSNTKKAGKTGPMKTLLVRVMTPDLRERLENLRKKPENIPQPISNTSRANLNKLLTDYTEMKKAILHVYWEEFQKDPVGLMSRVAQPASKKIDQNKLKPEMDEKGNLTTAGFACSQCGQPLFVYKLEQVSEKGKAYTNYVGRCNVAEHEKLILLAQLKPEKDSDEAVTYSLGKFGQRALDFYSIHVTKESTHPVKPLAQIAGNRYASGPVGKALSDACMGTIASFLSKYQDIIIEHQKVVKGNQKRLESLRELAGKENLEYPSVTLPPQPHTKEGVDAYNEVIARVRMWVNLNLWQKLKLSRDDAKPLLRLKGFPSFPLVERQANEVDWWDMVCNVKKLINEKKEDGKVFWQNLAGYKRQEALRPYLSSEEDRKKGKKFARYQLGDLLLHLEKKHGEDWGKVYDEAWERIDKKVEGLSKHIKLEEERRSEDAQSKAALTDWLRAKASFVIEGLKEADKDEFCRCELKLQKWYGDLRGKPFAIEAENSILDISGFSKQYNCAFIWQKDGVKKLNLYLIINYFKGGKLRFKKIKPEAFEANRFYTVINKKSGEIVPMEVNFNFDDPNLIILPLAFGKRQGREFIWNDLLSLETGSLKLANGRVIEKTLYNRRTRQDEPALFVALTFERREVLDSSNIKPMNLIGVDRGENIPAVIALTDPEGCPLSRFKDSLGNPTHILRIGESYKEKQRTIQAKKEVEQRRAGGYSRKYASKAKNLADDMVRNTARDLLYYAVTQDAMLIFENLSRGFGRQGKRTFMAERQYTRMEDWLTAKLAYEGPLPSKTYLSKTLAQYTSKTCSNCGFTITSADYDRVLEKLKKTATGWMTTINGKELKVEGQITYYNRYKRQNVVKDLSVELDRLSEESVNNDISSWTKGRSGEALSLLKKRFSHRPVQEKFVCLNCGFETHADEQAALNIARSWLFLRSQEYKKYQTNKTTGNTDKRAFVETWQSFYRKKLKEVWKPAV

SEQ ID NO: 28964 - protein, 979 aa, synthetic construct
  REGION 1..979: note = engineered CasX variant
QEIKRINKIRRRLVKDSNTKKAGKTGPMKTLLVRVMTPDLRERLENLRKKPENIPQPISNTSRANLNKLLTDYTEMKKAILHVYWEEFQKDPVGLMSRVAQPASKKIDQNKLKPEMDEKGNLTTAGFACSQCGQPLFVYKLEQVSEKGKAYTNYVGRCNVAEHEKLILLAQLKPEKDSDEAVTYSLGKFGQRALDFYSIHVTKESTHPVKPLAQIAGNRYASGPVGKALSDACMGTIASFLSKYQDIIIEHQKVVKGNQKRLESLRELAGKENLEYPSVTLPPQPHTKEGVDAYNEVIARVRMWVNLNLWQKLKLSRDDAKPLLRLKGFPSFPLVERQANEVDWWDMVCNVKKLINEKKEDGKVFWQNLAGYKRQEALRPYLSSEEDVRKKGKKFARYQLGDLLLHLEKKHGEDWGKVYDEAWERIDKKVEGLSKHIKLEEERRSEDAQSKAALTDWLRAKASFVIEGLKEADKDEFCRCELKLQKWYGDLRGKPFAIEAENSILDISGFSKQYNCAFIWQKDGVKKLNLYLIINYFKGGKLRFKKIKPEAFEANRFYTVINKKSGEIVPMEVNFNFDDPNLIILPLAFGKRQGREFIWNDLLSLETGSLKLANGRVIEKTLYNRRTRQDEPALFVALTFERREVLDSSNIKPMNLIGVDRGENIPAVIALTDPEGCPLSRFKDSLGNPTHILRIGESYKEKQRTIQAKKEVEQRRAGGYSRKYASKAKNLADDMVRNTARDLLYYAVTQDAMLIFENLSRGFGRQGKRTFMAERQYTRMEDWLTAKLAYEGLPSKTYLSKTLAQYTSKTCSNCGFTITSADYDRVLEKLKKTATGWMTTINGKELKVEGQITYYNRYKRQNVVKDLSVELDRLSEESVNNDISSWTKGRSGEALSLLKKRFSHRPVQEKFVCLNCGFETHADEQAALNIARSWLFLRSQEYKKYQTNKTTGNTDKRAFVETWQSFYRKKLKEVWKPAV

SEQ ID NO: 28965 - protein, 978 aa, synthetic construct
  REGION 1..978: note = engineered CasX variant
QEIKRINKIRRRLVKDSNTKKAGKTGPMKTLLVRVMTPDLRERLENLRKKPENIPQPISNTSRANLNKLLTDYTEMKKAILHVYWEEFQKDPVGLMSRVAQPASKKIDQNKLKPEMDEKGNLTTAGFACSQCGQPLFVYKLEQVSEKGKAYTNYVGRCNVAEHEKLILLAQLKPEKDSDEAVTYSLGKFGQRALDFYSIHVTKESTHPVKPLAQIAGNRYASGPVGKALSDACMGTIASFLSKYQDIIIEHQKVVKGNQKRLESLRELAGKENLEYPSVTLPPQPHTKEGVDAYNEVIARVRMWVNLNLWQKLKLSRDDAKPLLRLKGFPSFPLVERQANEVDWWDMVCNVKKLINEKKEDGKVFWQNLAGYKRQEALRPYLSSEEDRKKGKKFARYQLGDLLLHLEKKHGEDWGKVYDEAWERIDKKVEGLSKHIKLEEERRSEDAQSKAALTDWLRAKASFVIEGLKEADKDEFCRCELKLQKWYGDLRGKPFAIEAENSILDISGFSKQYNCAFIWQKDGVKKLNLYLIINYFKGGKLRFKKIKPEAFEANRFYTVINKKSGEIVPMEVNFNFDDPNLIILPLAFGKRQGREFIWNDLLSLETGSLKLANGRVIEKTLYNRRTRQDEPALFVALTFERREVLDSSNIKPMNLIGVDRGENIPAVIALTDPEGCPLSRFKDSLGNPTHILRIGESYKEKQRTIQAKKEVEQRRAGGYSRKYASKAKNLADDMVRNTARDLLYYAVTQDAMLIFENLSRGFGRQGKRTFMAERQYTRMEDWLTAKLAYEGLPSKTYLSKTLAQYTSKTCSNCGFTITSADYDRMLEKLKKTATGWMTTINGKELKVEGQITYYNRYKRQNVVKDLSVELDRLSEESVNNDISSWTKGRSGEALSLLKKRFSHRPVQEKFVCLNCGFETHADEQAALNIARSWLFLRSQEYKKYQTNKTTGNTDKRAFVETWQSFYRKKLKEVWKPAV

SEQ ID NO: 28966 - protein, 978 aa, synthetic construct
  REGION 1..978: note = engineered CasX variant
QEIKRINKIRRRLVKDSNTKKAGKTGPMKTLLVRVMTPDLRERLENLRKKPENIPQPISNTSRANLNKLLTDYTEMKKAILHVYWEEFQKDPVGLMSRVAQPASKKIDQNKLKPEMDEKGNLTTAGFACSQCGQPLFVYKLEQVSEKGKAYTNYVGRCNVAEHEKLILLAQLKPEKDSDEAVTYSLGKFGQRALDFYSIHVTKESTHPVKPLAQIAGNRYASGPVGKALSDACMGTIASFLSKYQDIIIEHQKVVKGNQKRLESLRELAGKENLEYPSVTLPPQPHTKEGVDAYNEVIARVRMWVNLNLWQKLKLSRDDAKPLLRLKGFPSFPLVERQANEVDWWDMVCNVKKLINEKKEDGKVFWQNLAGYKRQEALRPYLSSEEDRKKGKKFARYQLGDLLLHLEKKHGEDWGKVYDEAWERIDKKVEGLSKHIKLEEERRSEDAQSKAALTDWLRAKASFVIEGLKEADKDEFCRCELKLQKWYGDLRGKPFAIEAENSILDISGFSKQYNCAFIWQKDGVKKLNLYLIINYFKGGKLRFKKIKPEAFEANRFYTVINKKSGEIVPMEVNFNFDDPNLIILPLAFGKRQGREFIWNDLLSLETGSLKLANGRVIEKTLYNRRTRQDEPALFVALTFERREVLDSSNIKPMNLIGVDRGENIPAVIALTDPEGCPLSRFKDSLGNPTHILRIGESYKEKQRTIQAKKEVEQRRAGGYSRKYASKAKNLADDMVRNTARDLLYYAVTQDAMLIFENLSRGFGRQGKRTFMAERQYTRMEDWLTAKLAYEGLPSKTYLSKTLAQYTSKTCSNCGFTITSADYDRVLEKLKKTATGWMTTINGKELKVEGQITYYNRYKRQNVVKDLSVELDRLSEESVNNDISSWTKGRQGEALSLLKKRFSHRPVQEKFVCLNCGFETHADEQAALNIARSWLFLRSQEYKKYQTNKTTGNTDKRAFVETWQSFYRKKLKEVWKPAV

SEQ ID NO: 28967 - protein, 978 aa, synthetic construct
  REGION 1..978: note = engineered CasX variant
QEIKRINKIRRRLVKDSNTKKAGKTGPMKTLLVRVMTPDLRERLENLRKKPENIPQPISNTSRANLNKLLTDYTEMKKAILHVYWEEFQKDPVGLMSRVAQPASKKIDQNKLKPEMDEKGNLTTAGFACSQCGQPLFVYKLEQVSEKGKAYTNYVGRCNVAEHEKLILLAQLKPEKDSDEAVTYSLGKFGQRALDFYSIHVTKESTHPVKPLAQIAGNRYASGPVGKALSDACMGTIASFLSKYQDIIIEHQKVVKGNQKRLESLRELAGKENLEYPSVTLPPQPHTKEGVDAYNEVIARVRMWVNLNLWQKLKLSRDDAKPLLRLKGFPSFPLVERQANEVDWWDMVCNVKKLINEKKEDGKVFWQNLAGYKRQEALRPYLSSEEDRKKGKKFARYQLGDLLLHLEKKHGEDWGKVYDEAWERIDKKVEGLSKHIKLEEERRSEDAQSKAALTDWLRAKASFVIEGLKEADKDEFCRCELKLQKWYGDLRGKPFAIEAENSILDISGFSKQYNCAFIWQKDGVKKLNLYLIINYFKGGKLRFKKIKPEAFEANRFYTVINKKSGEIVPMEVNFNFDDPNLIILPLAFGKRQGREFIWNDLLSLETGSLKLANGRVIEKTLYNRRTRQDEPALFVALTFERREVLDSSNIKPMNLIGVDRGENIPAVIALTDPEGCPLSRFKDSLGNPTHILRIGESYKEKQRTIQAKKEVEQRRAGGYSRKYASKAKNLADDMVRNTARDLLYYAVTQDAMLIFENLSRGFGRQGKRTFMAERQYTRMEDWLTAKLAYEGLPSKTYLSKTLAQYTSKTCSNCGFTITSADYDRVLEKLKKTATGWMTTINGKELKVEGQITYYNRYKRQNVVKDLSVELDRLSEESVNNDISSWTKGRSGEALSLLKKRFSHRPVQEKFVCLNCEFETHADEQAALNIARSWLFLRSQEYKKYQTNKTTGNTDKRAFVETWQSFYRKKLKEVWKPAV

SEQ ID NO: 28968 - protein, 979 aa, synthetic construct
  REGION 1..979: note = engineered CasX variant
QEIKRINKIRRRLVKDSNTKKAGKTGPMKTLLVRVMTPDLRERLENLRKKPENIPQPISNTSRANLNKLLTDYTEMKKAILHVYWEEFQKDPVGLMSRVAQPASKKIDQNKLKPEMDEKGNLTTAGFACSQCGQPLFVYKLEQVSEKGKAYTNYVGRCNVAEHEKLILLAQLKPEKDSDEAVTYSLGKFGQRALDFYSIHVTKESTHPVKPLAQIAGNRYASGPVGKALSDACMGTIASFLSKYQDIIIEHQKVVKGNQKRLESLRELAGKENLEYPSVTLPPQPHTKEGVDAYNEVIARVRMWVNLNLWQKLKLSRDDAKPLLRLKGFPSFPLVERQANEVDWWDMVCNVKKLINEKKEDGKVFWQNLAGYKRQEALRPYLSSEEDRKKGKKFARYQLGDLLLHLEKKHGEDWGKVYDEAWERIDKKVEGLSKHIKLEEERRSEDAQSKAALTDWLRAKASFVIEGLKEADKDEFCRCELKLQKWYGDLRGKPFAIEAENSILDISGFSKQYNCAFIWQKDGVKKLNLYLIINYFKGGKLRFKKIKPEAFEANRFYTVINKKSGEIVPMEVNFNFDDPNLIILPLAFGKRQGREFIWNDLLSLETGSLKLANGRVIEKTLYNRRTRQDEPALFVALTFERREVLDSSNIKPMNLIGVDRGENIPAVIALTDPEGCPLSRFKDSLGNPTHILRIGESYKEKQRTIQAKKEVEQRRAGGYSRKYASKAKNLADDMVRNTARDLLYYAVTQDAMLIFENLSRGFGRQGKRTFMAERQYTRMEDWLTAKLAYEGLPSKTYLSKTLAQYTSKTCSNCGFTITSADYDRVLEKLKKTATGWMTTINGKELKVEGQITYYNRYKRQNVVKDLSVELDRLSEESVNNDISSWTKGRSGEALSLLKKRFSHRPVQEKFVCLNCGFETHADEQAALNIARSWLFLRSQEYKKYQTNKTSTGNTDKRAFVETWQSFYRKKLKEVWKPAV

SEQ ID NO: 28969 - protein, 979 aa, synthetic construct
  REGION 1..979: note = engineered CasX variant
QEIKRINKIRRRLVKDSNTKKAGKTGPMKTLLVRVMTPDLRERLENLRKKPENIPQPISNTSRANLNKLLTDYTEMKKAILHVYWEEFQKDPVGLMSRVAQPASKKIDQNKLKPEMDEKGNLTTAGFACSQCGQPLFVYKLEQVSEKGKAYTNYVGRCNVAEHEKLILLAQLKPEKDSDEAVTYSLGKFGQRALDFYSIHVTKESTHPVKPLAQIAGNRYASGPVGKALSDACMGTIASFLSKYQDIIIEHQKVVKGNQKRLESLRELAGKENLEYPSVTLPPQPHTKEGVDAYNEVIARVRMWVNLNLWQKLKLSRDDAKPLLRLKGFPSFPLVERQANEVDWWDMVCNVKKLINEKKEDGKVFWQNLAGYKRQEALRPYLSSEEDRKKGKKFARYQLGDLLLHLEKKHGEDWGKVYDEAWERIDKKVEGLSKHIKLEEERRSEDAQSKAALTDWLRAKASFVIEGLKEADKDEFCRCELKLQKWYGDLRGKPFAIEAENSILDISGFSKQYNCAFIWQKDGVKKLNLYLIINYFKGGKLRFKKIKPEAFEANRFYTVINKKSGEIVPMEVNFNFDDPNLIILPLAFGKRQGREFIWNDLLSLETGSLKLANGRVIEKTLYNRRTRQDEPALFVALTFERREVLDSSNIKPMNLIGVDRGENIPAVIALTDPEGCPLSRFKDSLGNPTHILRIGESYKEKQRTIQAKKEVEQRRAGGYSRKYASKAKNLADDMVRNTARDLLYYAVTQDAMLIFENLSRGFGRQGKRTFMAERQYTRMEDWLTAKLAYEGLPSKTYLSKTLAQYTSKTCSNCGFTITSADYDRVLEKLKKTATGWMTTINGKELKVEGQITYYNRYKRQNVVKDLSVELDRLSEESVNNDISSWTKGRSGEALSLLKKRFSHRPVQEKFVCLNCGFETHADEQAALNIARSWLFLRSQEYKKYQTNKTTGKNTDKRAFVETWQSFYRKKLKEVWKPAV

SEQ ID NO: 28970 - protein, 978 aa, synthetic construct
  REGION 1..978: note = engineered CasX variant
QEIKRINKIRRRLVKDSNTKKAGKTGPMKTLLVRVMTPDLRERLENLRKKPENIPQPISNTSRANLNKLLTDYTEMKKAILHVYWEEFQKDPVGLMSRVAQPASKKIDQNKLKPEMDEKGNLTTAGFACSQCGQPLFVYKLEQVSEKGKAYTNYVGRCNVAEHEKLILLAQLKPEKDSDEAVTYSLGKFGQRALDFYSIHVTKESTHPVKPLAQIAGNRYASGPVGKALSDACMGTIASFLSKYQDIIIEHQKVVKGNQKRLESLRELAGKENLEYPSVTLPPQPHTKEGVDAYNEVIARVRMWVNLNLWQKLKLSRDDAKPLLRLKKFPSFPLVERQANEVDWWDMVCNVKKLINEKKEDGKVFWQNLAGYKRQEALRPYLSSEEDRKKGKKFARYQLGDLLLHLEKKHGEDWGKVYDEAWERIDKKVEGLSKHIKLEEERRSEDAQSKAALTDWLRAKASFVIEGLKEADKDEFCRCELKLQKWYGDLRGKPFAIEAENSILDISGFSKQYNCAFIWQKDGVKKLNLYLIINYFKGGKLRFKKIKPEAFEANRFYTVINKKSGEIVPMEVNFNFDDPNLIILPLAFGKRQGREFIWNDLLSLETGSLKLANGRVIEKTLYNRRTRQDEPALFVALTFERREVLDSSNIKPMNLIGVDRGENIPAVIALTDPEGCPLSRFKDSLGNPTHILRIGESYKEKQRTIQAKKEVEQRRAGGYSRKYASKAKNLADDMVRNTARDLLYYAVTQDAMLIFENLSRGFGRQGKRTFMAERQYTRMEDWLTAKLAYEGLPSKTYLSKTLAQYTSKTCSNCGFTITSADYDRVLEKLKKTATGWMTTINGKELKVEGQITYYNRYKRQNVVKDLSVELDRLSEESVNNDISSWTKGRSGEALSLLKKRFSHRPVQEKFVCLNCGFETHADEQAALNIARSWLFLRSQEYKKYQTNKTTGNTDKRAFVETWQSFYRKKLKEVWKPAV

SEQ ID NO: 28971 - protein, 978 aa, synthetic construct
  REGION 1..978: note = engineered CasX variant
QEIKRINKIRRRLVKDSNTKKAGKTGPMKTLLVRVMTPDLRERLENLRKKPENIPQPISNTSRANLNKLLTDYTEMKKAILHVYWEEFQKDPVGLMSRVAQPASKKIDQNKLKPEMDEKGNLTTAGFACSQCGQPLFVYKLEQVSEKGKAYTNYVGRCNVAEHEKLILLAQLKPEKDSDEAVTYSLGKFGQRALDFYSIHVTKESTHPVKPLAQIAGNRYASGPVGKALSDACMGTIASFLSKYQDIIIEHQKVVKGNQKRLESLRELAGKENLEYPSVTLPPQPHTKEGVDAYNEVIARVRMWVNLNLWQKLKLSRDDAKPLLRLKGFPSFPLVERQANEVDWWDMVCNVKKLINEKKEDGKVFWQNLAGYKRQEALRPYLSSEEDRKKGKKFARYQLGDLLLHLEKKHGEDWGKVYDEAWERIDKKVEGLSKHIKLEEERRSEDAQSKAALTDWLRAKASFVIEGLKEADKDEFCRCELKLQKWYGDLRGKPFAIEAENSILDISGFSKQYNCAFIWQKDGVKKLNLYLIINYFKGGKLRFKKIKPEAFEANRFYTVINKKSGEIVPMEVNFNFDDPNLIILPLAFGKRQGREFIWNDLLSLETGSLKLANGRVIEKTLYNRRTRQDEPALFVALTFERREVLDSSNIKPMNLIGVDRGENIPAVIALTDPEGCPLSRFKDSLGNPTHILRIGERYKEKQRTIQAKKEVEQRRAGGYSRKYASKAKNLADDMVRNTARDLLYYAVTQDAMLIFENLSRGFGRQGKRTFMAERQYTRMEDWLTAKLAYEGLPSKTYLSKTLAQYTSKTCSNCGFTITSADYDRVLEKLKKTATGWMTTINGKELKVEGQITYYNRYKRQNVVKDLSVELDRLSEESVNNDISSWTKGRSGEALSLLKKRFSHRPVQEKFVCLNCGFETHADEQAALNIARSWLFLRSQEYKKYQTNKTTGNTDKRAFVETWQSFYRKKLKEVWKPAV

SEQ ID NO: 28972 - protein, 978 aa, synthetic construct
  REGION 1..978: note = engineered CasX variant
QEIKRINKIRRRLVKDSNTKKAGKTGPMKTLLVRVMTPDLRERLENLRKKPENIPQPISNTSRANLNKLLTDYTEMKKAILHVYWEEFQKDPVGLMSRVAQPASKKIDQNKLKPEMDEKGNLTTAGFACSQCGQPLFVYKLEQVSEKGKAYTNYVGRCNVAEHEKLILLAQLKPEKDSDEAVTYSLGKFGQRALDFYSIHVTKESTHPVKPLAQIAGNRYASGPVGKALSDACMGTIASFLSKYQDIIIEHQKVVKGNQKRLESLRELAGKENLEYPSVTLPPQPHTKEGVDAYNEVIARVRMWVNLNLWQKLKLSRDDAKPLLRLKGFPSFPLVERQANEVDWWDMVCNVKKLINEKKEDGKVFWQNLAGYKRQEALRPYLSSEEDRKKGKKFARYQLGDLLLHLEKKHGEDWGKVYDEAWERIDKKVEGLSKHIKLEEERRSEDAQSKAALTDWLRAKASFVIEGLKEADKDEFCRCELKLQKWYGDLRGKPFAIEAENSILDISGFSKQYNCAFIWQKDGVKKLNLYLIINYFKGGKLRFKKIKPEAFEANRFYTVINKKSGEIVPMEVNFNFDDPNLIILPLAFGKRQGREFIWNDLLSLETGSLQLANGRVIEKTLYNRRTRQDEPALFVALTFERREVLDSSNIKPMNLIGVDRGENIPAVIALTDPEGCPLSRFKDSLGNPTHILRIGESYKEKQRTIQAKKEVEQRRAGGYSRKYASKAKNLADDMVRNTARDLLYYAVTQDAMLIFENLSRGFGRQGKRTFMAERQYTRMEDWLTAKLAYEGLPSKTYLSKTLAQYTSKTCSNCGFTITSADYDRVLEKLKKTATGWMTTINGKELKVEGQITYYNRYKRQNVVKDLSVELDRLSEESVNNDISSWTKGRSGEALSLLKKRFSHRPVQEKFVCLNCGFETHADEQAALNIARSWLFLRSQEYKKYQTNKTTGNTDKRAFVETWQSFYRKKLKEVWKPAV

SEQ ID NO: 28973 - protein, 978 aa, synthetic construct
  REGION 1..978: note = engineered CasX variant
QEIKRINKIRRRLVKDSNTKKAGKTGPMKTLLVRVMTPDLRERLENLRKKPENIPQPISNTSRANLNKLLTDYTEMKKAILHVYWEEFQKDPVGLMSRVAQPASKKIDQNKLKPEMDEKGNLTTAGFACSQCGQPLFVYKLEQVSEKGKAYTNYFGRCNVAEHEKLILLAQLKPEKDSDEAVTYSLGKFGQRALDFYSIHVTKESTHPVKPLAQIAGNRYASGPVGKALSDACMGTIASFLSKYQDIIIEHQKVVKGNQKRLESLRELAGKENLEYPSVTLPPQPHTKEGVDAYNEVIARVRMWVNLNLWQKLKLSRDDAKPLLRLKGFPSFPLVERQANEVDWWDMVCNVKKLINEKKEDGKVFWQNLAGYKRQEALRPYLSSEEDRKKGKKFARYQLGDLLLHLEKKHGEDWGKVYDEAWERIDKKVEGLSKHIKLEEERRSEDAQSKAALTDWLRAKASFVIEGLKEADKDEFCRCELKLQKWYGDLRGKPFAIEAENSILDISGFSKQYNCAFIWQKDGVKKLNLYLIINYFKGGKLRFKKIKPEAFEANRFYTVINKKSGEIVPMEVNFNFDDPNLIILPLAFGKRQGREFIWNDLLSLETGSLKLANGRVIEKTLYNRRTRQDEPALFVALTFERREVLDSSNIKPMNLIGVDRGENIPAVIALTDPEGCPLSRFKDSLGNPTHILRIGESYKEKQRTIQAKKEVEQRRAGGYSRKYASKAKNLADDMVRNTARDLLYYAVTQDAMLIFENLSRGFGRQGKRTFMAERQYTRMEDWLTAKLAYEGLASKVYLSKTLAQYTSKTCSNCGFTITSADYDRVLEKLKKTATGWMTTINGKELKVEGQITYYNRYKRQNVVKDLSVELDRLSEESVNNDISSWTKGRSGEALSLLKKRFSHRPVQEKFVCLNCGFETHADEQAALNIARSWLFLRSQEYKKYQTNKTTGNTDKRAFVETWQSFYRKKLKEVWKPAV

SEQ ID NO: 28974 - protein, 979 aa, synthetic construct
  REGION 1..979: note = engineered CasX variant
QEIKRINKIRRRLVKDSNTKKAGKTGPMKTLLVRVMTPDLRERLENLRKKPENIPQPISNTSRANLNKLLTDYTEMKKAILHVYWEEFQKDPVGLMSRVAQPASKKIDQNKLKPEMDEKGNLTTAGFACSQCGQPLFVYKLEQVSEKGKAYTNYFGRCNVAEHEKLILLAQLKPEKDSDEAVTYSLGKFGQRALDFYSIHVTKESTHPVKPLAQIAGNRYASGPVGKALSDACMGTIASFLSKYQDIIIEHQKVVKGNQKRLESLRELAGKENLEYPSVTLPPQPHTKEGVDAYNEVIARVRMWVNLNLWQKLKLSRDDAKPLLRLKGFPSFPLVERQANEVDWWDMVCNVKKLINEKKEDGKVFWQNLAGYKRQEALRPYLSSEEDRKKGKKFARYQLGDLLLHLEKKHGEDWGKVYDEAWERIDKKVEGLSKHIKLEEERRSEDAQSKAALTDWLRAKASFVIEGLKEADKDEFCRCELKLQKWYGDLRGKPFAIEAENSILDISGFSKQYNCAFIWQKDGVKKLNLYLIINYFKGGKLRFKKIKPEAFEANRFYTVINKKSGEIVPMEVNFNFDDPNLIILPLAFGKRQGREFIWNDLLSLETGSLKLANGRVIEKTLYNRRTRQDEPALFVALTFERREVLDSSNIKPMNLIGVDRGENIPAVIALTDPEGCPLSRFKDSLGNPTHILRIGESYKEKQRTIQAKKEVEQRRAGGYSRKYASKAKNLADDMVRNTARDLLYYAVTQDAMLIFENLSRGFGRQGKRTFMAERQYTRMEDWLTAKLAYEGPLASKTYLSKTLAQYTSKTCSNCGFTITSADYDRVLEKLKKTATGWMTTINGKELKVEGQITYYNRYKRQNVVKDLSVELDRLSEESVNNDISSWTKGRSGEALSLLKKRFSHRPVQEKFVCLNCGFETHADEQAALNIARSWLFLRSQEYKKYQTNKTTGNTDKRAFVETWQSFYRKKLKEVWKPAV

SEQ ID NO: 28975 - protein, 979 aa, synthetic construct
  REGION 1..979: note = engineered CasX variant
QEIKRINKIRRRLVKDSNTKKAGKTGPMKTLLVRVMTPDLRERLENLRKKPENIPQPISNTSRANLNKLLTDYTEMKKAILHVYWEEFQKDPVGLMSRVAQPASKKIDQNKLKPEMDEKGNLTTAGFACSQCGQPLFVYKLEQVSEKGKAYTNYFGRCNVAEHEKLILLAQLKPEKDSDEAVTYSLGKFGQRALDFYSIHVTKESTHPVKPLAQIAGNRYASGPVGKALSDACMGTIASFLSKYQDIIIEHQKVVKGNQKRLESLRELAGKENLEYPSVTLPPQPHTKEGVDAYNEVIARVRMWVNLNLWQKLKLSRDDAKPLLRLKGFPSFPLVERQANEVDWWDMVCNVKKLINEKKEDGKVFWQNLAGYKRQEALRPYLSSEEDVRKKGKKFARYQLGDLLLHLEKKHGEDWGKVYDEAWERIDKKVEGLSKHIKLEEERRSEDAQSKAALTDWLRAKASFVIEGLKEADKDEFCRCELKLQKWYGDLRGKPFAIEAENSILDISGFSKQYNCAFIWQKDGVKKLNLYLIINYFKGGKLRFKKIKPEAFEANRFYTVINKKSGEIVPMEVNFNFDDPNLIILPLAFGKRQGREFIWNDLLSLETGSLKLANGRVIEKTLYNRRTRQDEPALFVALTFERREVLDSSNIKPMNLIGVDRGENIPAVIALTDPEGCPLSRFKDSLGNPTHILRIGESYKEKQRTIQAKKEVEQRRAGGYSRKYASKAKNLADDMVRNTARDLLYYAVTQDAMLIFENLSRGFGRQGKRTFMAERQYTRMEDWLTAKLAYEGLASKTYLSKTLAQYTSKTCSNCGFTITSADYDRVLEKLKKTATGWMTTINGKELKVEGQITYYNRYKRQNVVKDLSVELDRLSEESVNNDISSWTKGRSGEALSLLKKRFSHRPVQEKFVCLNCGFETHADEQAALNIARSWLFLRSQEYKKYQTNKTTGNTDKRAFVETWQSFYRKKLKEVWKPAV

SEQ ID NO: 28976 - protein, 978 aa, synthetic construct
  REGION 1..978: note = engineered CasX variant
QEIKRINKIRRRLVKDSNTKKAGKTGPMKTLLVRVMTPDLRERLENLRKKPENIPQPISNTSRANLNKLLTDYTEMKKAILHVYWEEFQKDPVGLMSRVAQPASKKIDQNKLKPEMDEKGNLTTAGFACSQCGQPLFVYKLEQVSEKGKAYTNYFGRCNVAEHEKLILLAQLKPEKDSDEAVTYSLGKFGQRALDFYSIHVTKESTHPVKPLAQIAGNRYASGPVGKALSDACMGTIASFLSKYQDIIIEHQKVVKGNQKRLESLRELAGKENLEYPSVTLPPQPHTKEGVDAYNEVIARVRMWVNLNLWQKLKLSRDDAKPLLRLKGFPSFPLVERQANEVDWWDMVCNVKKLINEKKEDGKVFWQNLAGYKRQEALRPYLSSEEDRKKGKKFARYQLGDLLLHLEKKHGEDWGKVYDEAWERIDKKVEGLSKHIKLEEERRSEDAQSKAALTDWLRAKASFVIEGLKEADKDEFCRCELKLQKWYGDLRGKPFAIEAENSILDISGFSKQYNCAFIWQKDGVKKLNLYLIINYFKGGKLRFKKIKPEAFEANRFYTVINKKSGEIVPMEVNFNFDDPNLIILPLAFGKRQGREFIWNDLLSLETGSLKLANGRVIEKTLYNRRTRQDEPALFVALTFERREVLDSSNIKPMNLIGVDRGENIPAVIALTDPEGCPLSRFKDSLGNPTHILRIGESYKEKQRTIQAKKEVEQRRAGGYSRKYASKAKNLADDMVRNTARDLLYYAVTQDAMLIFENLSRGFGRQGKRTFMAERQYTRMEDWLTAKLAYEGLASKTYLSKTLAQYTSKTCSNCGFTITSADYDRMLEKLKKTATGWMTTINGKELKVEGQITYYNRYKRQNVVKDLSVELDRLSEESVNNDISSWTKGRSGEALSLLKKRFSHRPVQEKFVCLNCGFETHADEQAALNIARSWLFLRSQEYKKYQTNKTTGNTDKRAFVETWQSFYRKKLKEVWKPAV

SEQ ID NO: 28977 - protein, 978 aa, synthetic construct
  REGION 1..978: note = engineered CasX variant
QEIKRINKIRRRLVKDSNTKKAGKTGPMKTLLVRVMTPDLRERLENLRKKPENIPQPISNTSRANLNKLLTDYTEMKKAILHVYWEEFQKDPVGLMSRVAQPASKKIDQNKLKPEMDEKGNLTTAGFACSQCGQPLFVYKLEQVSEKGKAYTNYFGRCNVAEHEKLILLAQLKPEKDSDEAVTYSLGKFGQRALDFYSIHVTKESTHPVKPLAQIAGNRYASGPVGKALSDACMGTIASFLSKYQDIIIEHQKVVKGNQKRLESLRELAGKENLEYPSVTLPPQPHTKEGVDAYNEVIARVRMWVNLNLWQKLKLSRDDAKPLLRLKGFPSFPLVERQANEVDWWDMVCNVKKLINEKKEDGKVFWQNLAGYKRQEALRPYLSSEEDRKKGKKFARYQLGDLLLHLEKKHGEDWGKVYDEAWERIDKKVEGLSKHIKLEEERRSEDAQSKAALTDWLRAKASFVIEGLKEADKDEFCRCELKLQKWYGDLRGKPFAIEAENSILDISGFSKQYNCAFIWQKDGVKKLNLYLIINYFKGGKLRFKKIKPEAFEANRFYTVINKKSGEIVPMEVNFNFDDPNLIILPLAFGKRQGREFIWNDLLSLETGSLKLANGRVIEKTLYNRRTRQDEPALFVALTFERREVLDSSNIKPMNLIGVDRGENIPAVIALTDPEGCPLSRFKDSLGNPTHILRIGESYKEKQRTIQAKKEVEQRRAGGYSRKYASKAKNLADDMVRNTARDLLYYAVTQDAMLIFENLSRGFGRQGKRTFMAERQYTRMEDWLTAKLAYEGLASKTYLSKTLAQYTSKTCSNCGFTITSADYDRVLEKLKKTATGWMTTINGKELKVEGQITYYNRYKRQNVVKDLSVELDRLSEESVNNDISSWTKGRQGEALSLLKKRFSHRPVQEKFVCLNCGFETHADEQAALNIARSWLFLRSQEYKKYQTNKTTGNTDKRAFVETWQSFYRKKLKEVWKPAV

SEQ ID NO: 28978 - protein, 978 aa, synthetic construct
  REGION 1..978: note = engineered CasX variant
QEIKRINKIRRRLVKDSNTKKAGKTGPMKTLLVRVMTPDLRERLENLRKKPENIPQPISNTSRANLNKLLTDYTEMKKAILHVYWEEFQKDPVGLMSRVAQPASKKIDQNKLKPEMDEKGNLTTAGFACSQCGQPLFVYKLEQVSEKGKAYTNYFGRCNVAEHEKLILLAQLKPEKDSDEAVTYSLGKFGQRALDFYSIHVTKESTHPVKPLAQIAGNRYASGPVGKALSDACMGTIASFLSKYQDIIIEHQKVVKGNQKRLESLRELAGKENLEYPSVTLPPQPHTKEGVDAYNEVIARVRMWVNLNLWQKLKLSRDDAKPLLRLKGFPSFPLVERQANEVDWWDMVCNVKKLINEKKEDGKVFWQNLAGYKRQEALRPYLSSEEDRKKGKKFARYQLGDLLLHLEKKHGEDWGKVYDEAWERIDKKVEGLSKHIKLEEERRSEDAQSKAALTDWLRAKASFVIEGLKEADKDEFCRCELKLQKWYGDLRGKPFAIEAENSILDISGFSKQYNCAFIWQKDGVKKLNLYLIINYFKGGKLRFKKIKPEAFEANRFYTVINKKSGEIVPMEVNFNFDDPNLIILPLAFGKRQGREFIWNDLLSLETGSLKLANGRVIEKTLYNRRTRQDEPALFVALTFERREVLDSSNIKPMNLIGVDRGENIPAVIALTDPEGCPLSRFKDSLGNPTHILRIGESYKEKQRTIQAKKEVEQRRAGGYSRKYASKAKNLADDMVRNTARDLLYYAVTQDAMLIFENLSRGFGRQGKRTFMAERQYTRMEDWLTAKLAYEGLASKTYLSKTLAQYTSKTCSNCGFTITSADYDRVLEKLKKTATGWMTTINGKELKVEGQITYYNRYKRQNVVKDLSVELDRLSEESVNNDISSWTKGRSGEALSLLKKRFSHRPVQEKFVCLNCEFETHADEQAALNIARSWLFLRSQEYKKYQTNKTTGNTDKRAFVETWQSFYRKKLKEVWKPAV

SEQ ID NO: 28979 - protein, 979 aa, synthetic construct
  REGION 1..979: note = engineered CasX variant
QEIKRINKIRRRLVKDSNTKKAGKTGPMKTLLVRVMTPDLRERLENLRKKPENIPQPISNTSRANLNKLLTDYTEMKKAILHVYWEEFQKDPVGLMSRVAQPASKKIDQNKLKPEMDEKGNLTTAGFACSQCGQPLFVYKLEQVSEKGKAYTNYFGRCNVAEHEKLILLAQLKPEKDSDEAVTYSLGKFGQRALDFYSIHVTKESTHPVKPLAQIAGNRYASGPVGKALSDACMGTIASFLSKYQDIIIEHQKVVKGNQKRLESLRELAGKENLEYPSVTLPPQPHTKEGVDAYNEVIARVRMWVNLNLWQKLKLSRDDAKPLLRLKGFPSFPLVERQANEVDWWDMVCNVKKLINEKKEDGKVFWQNLAGYKRQEALRPYLSSEEDRKKGKKFARYQLGDLLLHLEKKHGEDWGKVYDEAWERIDKKVEGLSKHIKLEEERRSEDAQSKAALTDWLRAKASFVIEGLKEADKDEFCRCELKLQKWYGDLRGKPFAIEAENSILDISGFSKQYNCAFIWQKDGVKKLNLYLIINYFKGGKLRFKKIKPEAFEANRFYTVINKKSGEIVPMEVNFNFDDPNLIILPLAFGKRQGREFIWNDLLSLETGSLKLANGRVIEKTLYNRRTRQDEPALFVALTFERREVLDSSNIKPMNLIGVDRGENIPAVIALTDPEGCPLSRFKDSLGNPTHILRIGESYKEKQRTIQAKKEVEQRRAGGYSRKYASKAKNLADDMVRNTARDLLYYAVTQDAMLIFENLSRGFGRQGKRTFMAERQYTRMEDWLTAKLAYEGLASKTYLSKTLAQYTSKTCSNCGFTITSADYDRVLEKLKKTATGWMTTINGKELKVEGQITYYNRYKRQNVVKDLSVELDRLSEESVNNDISSWTKGRSGEALSLLKKRFSHRPVQEKFVCLNCGFETHADEQAALNIARSWLFLRSQEYKKYQTNKTSTGNTDKRAFVETWQSFYRKKLKEVWKPAV

SEQ ID NO: 28980 - protein, 979 aa, synthetic construct
  REGION 1..979: note = engineered CasX variant
QEIKRINKIRRRLVKDSNTKKAGKTGPMKTLLVRVMTPDLRERLENLRKKPENIPQPISNTSRANLNKLLTDYTEMKKAILHVYWEEFQKDPVGLMSRVAQPASKKIDQNKLKPEMDEKGNLTTAGFACSQCGQPLFVYKLEQVSEKGKAYTNYFGRCNVAEHEKLILLAQLKPEKDSDEAVTYSLGKFGQRALDFYSIHVTKESTHPVKPLAQIAGNRYASGPVGKALSDACMGTIASFLSKYQDIIIEHQKVVKGNQKRLESLRELAGKENLEYPSVTLPPQPHTKEGVDAYNEVIARVRMWVNLNLWQKLKLSRDDAKPLLRLKGFPSFPLVERQANEVDWWDMVCNVKKLINEKKEDGKVFWQNLAGYKRQEALRPYLSSEEDRKKGKKFARYQLGDLLLHLEKKHGEDWGKVYDEAWERIDKKVEGLSKHIKLEEERRSEDAQSKAALTDWLRAKASFVIEGLKEADKDEFCRCELKLQKWYGDLRGKPFAIEAENSILDISGFSKQYNCAFIWQKDGVKKLNLYLIINYFKGGKLRFKKIKPEAFEANRFYTVINKKSGEIVPMEVNFNFDDPNLIILPLAFGKRQGREFIWNDLLSLETGSLKLANGRVIEKTLYNRRTRQDEPALFVALTFERREVLDSSNIKPMNLIGVDRGENIPAVIALTDPEGCPLSRFKDSLGNPTHILRIGESYKEKQRTIQAKKEVEQRRAGGYSRKYASKAKNLADDMVRNTARDLLYYAVTQDAMLIFENLSRGFGRQGKRTFMAERQYTRMEDWLTAKLAYEGLASKTYLSKTLAQYTSKTCSNCGFTITSADYDRVLEKLKKTATGWMTTINGKELKVEGQITYYNRYKRQNVVKDLSVELDRLSEESVNNDISSWTKGRSGEALSLLKKRFSHRPVQEKFVCLNCGFETHADEQAALNIARSWLFLRSQEYKKYQTNKTTGKNTDKRAFVETWQSFYRKKLKEVWKPAV

SEQ ID NO: 28981 - protein, 978 aa, synthetic construct
  REGION 1..978: note = engineered CasX variant
QEIKRINKIRRRLVKDSNTKKAGKTGPMKTLLVRVMTPDLRERLENLRKKPENIPQPISNTSRANLNKLLTDYTEMKKAILHVYWEEFQKDPVGLMSRVAQPASKKIDQNKLKPEMDEKGNLTTAGFACSQCGQPLFVYKLEQVSEKGKAYTNYFGRCNVAEHEKLILLAQLKPEKDSDEAVTYSLGKFGQRALDFYSIHVTKESTHPVKPLAQIAGNRYASGPVGKALSDACMGTIASFLSKYQDIIIEHQKVVKGNQKRLESLRELAGKENLEYPSVTLPPQPHTKEGVDAYNEVIARVRMWVNLNLWQKLKLSRDDAKPLLRLKKFPSFPLVERQANEVDWWDMVCNVKKLINEKKEDGKVFWQNLAGYKRQEALRPYLSSEEDRKKGKKFARYQLGDLLLHLEKKHGEDWGKVYDEAWERIDKKVEGLSKHIKLEEERRSEDAQSKAALTDWLRAKASFVIEGLKEADKDEFCRCELKLQKWYGDLRGKPFAIEAENSILDISGFSKQYNCAFIWQKDGVKKLNLYLIINYFKGGKLRFKKIKPEAFEANRFYTVINKKSGEIVPMEVNFNFDDPNLIILPLAFGKRQGREFIWNDLLSLETGSLKLANGRVIEKTLYNRRTRQDEPALFVALTFERREVLDSSNIKPMNLIGVDRGENIPAVIALTDPEGCPLSRFKDSLGNPTHILRIGESYKEKQRTIQAKKEVEQRRAGGYSRKYASKAKNLADDMVRNTARDLLYYAVTQDAMLIFENLSRGFGRQGKRTFMAERQYTRMEDWLTAKLAYEGLASKTYLSKTLAQYTSKTCSNCGFTITSADYDRVLEKLKKTATGWMTTINGKELKVEGQITYYNRYKRQNVVKDLSVELDRLSEESVNNDISSWTKGRSGEALSLLKKRFSHRPVQEKFVCLNCGFETHADEQAALNIARSWLFLRSQEYKKYQTNKTTGNTDKRAFVETWQSFYRKKLKEVWKPAV

SEQ ID NO: 28982 - protein, 978 aa, synthetic construct
  REGION 1..978: note = engineered CasX variant
QEIKRINKIRRRLVKDSNTKKAGKTGPMKTLLVRVMTPDLRERLENLRKKPENIPQPISNTSRANLNKLLTDYTEMKKAILHVYWEEFQKDPVGLMSRVAQPASKKIDQNKLKPEMDEKGNLTTAGFACSQCGQPLFVYKLEQVSEKGKAYTNYFGRCNVAEHEKLILLAQLKPEKDSDEAVTYSLGKFGQRALDFYSIHVTKESTHPVKPLAQIAGNRYASGPVGKALSDACMGTIASFLSKYQDIIIEHQKVVKGNQKRLESLRELAGKENLEYPSVTLPPQPHTKEGVDAYNEVIARVRMWVNLNLWQKLKLSRDDAKPLLRLKGFPSFPLVERQANEVDWWDMVCNVKKLINEKKEDGKVFWQNLAGYKRQEALRPYLSSEEDRKKGKKFARYQLGDLLLHLEKKHGEDWGKVYDEAWERIDKKVEGLSKHIKLEEERRSEDAQSKAALTDWLRAKASFVIEGLKEADKDEFCRCELKLQKWYGDLRGKPFAIEAENSILDISGFSKQYNCAFIWQKDGVKKLNLYLIINYFKGGKLRFKKIKPEAFEANRFYTVINKKSGEIVPMEVNFNFDDPNLIILPLAFGKRQGREFIWNDLLSLETGSLKLANGRVIEKTLYNRRTRQDEPALFVALTFERREVLDSSNIKPMNLIGVDRGENIPAVIALTDPEGCPLSRFKDSLGNPTHILRIGERYKEKQRTIQAKKEVEQRRAGGYSRKYASKAKNLADDMVRNTARDLLYYAVTQDAMLIFENLSRGFGRQGKRTFMAERQYTRMEDWLTAKLAYEGLASKTYLSKTLAQYTSKTCSNCGFTITSADYDRVLEKLKKTATGWMTTINGKELKVEGQITYYNRYKRQNVVKDLSVELDRLSEESVNNDISSWTKGRSGEALSLLKKRFSHRPVQEKFVCLNCGFETHADEQAALNIARSWLFLRSQEYKKYQTNKTTGNTDKRAFVETWQSFYRKKLKEVWKPAV

SEQ ID NO: 28983 - protein, 978 aa, synthetic construct
  REGION 1..978: note = engineered CasX variant
QEIKRINKIRRRLVKDSNTKKAGKTGPMKTLLVRVMTPDLRERLENLRKKPENIPQPISNTSRANLNKLLTDYTEMKKAILHVYWEEFQKDPVGLMSRVAQPASKKIDQNKLKPEMDEKGNLTTAGFACSQCGQPLFVYKLEQVSEKGKAYTNYFGRCNVAEHEKLILLAQLKPEKDSDEAVTYSLGKFGQRALDFYSIHVTKESTHPVKPLAQIAGNRYASGPVGKALSDACMGTIASFLSKYQDIIIEHQKVVKGNQKRLESLRELAGKENLEYPSVTLPPQPHTKEGVDAYNEVIARVRMWVNLNLWQKLKLSRDDAKPLLRLKGFPSFPLVERQANEVDWWDMVCNVKKLINEKKEDGKVFWQNLAGYKRQEALRPYLSSEEDRKKGKKFARYQLGDLLLHLEKKHGEDWGKVYDEAWERIDKKVEGLSKHIKLEEERRSEDAQSKAALTDWLRAKASFVIEGLKEADKDEFCRCELKLQKWYGDLRGKPFAIEAENSILDISGFSKQYNCAFIWQKDGVKKLNLYLIINYFKGGKLRFKKIKPEAFEANRFYTVINKKSGEIVPMEVNFNFDDPNLIILPLAFGKRQGREFIWNDLLSLETGSLQLANGRVIEKTLYNRRTRQDEPALFVALTFERREVLDSSNIKPMNLIGVDRGENIPAVIALTDPEGCPLSRFKDSLGNPTHILRIGESYKEKQRTIQAKKEVEQRRAGGYSRKYASKAKNLADDMVRNTARDLLYYAVTQDAMLIFENLSRGFGRQGKRTFMAERQYTRMEDWLTAKLAYEGLASKTYLSKTLAQYTSKTCSNCGFTITSADYDRVLEKLKKTATGWMTTINGKELKVEGQITYYNRYKRQNVVKDLSVELDRLSEESVNNDISSWTKGRSGEALSLLKKRFSHRPVQEKFVCLNCGFETHADEQAALNIARSWLFLRSQEYKKYQTNKTTGNTDKRAFVETWQSFYRKKLKEVWKPAV

SEQ ID NO: 28984 - protein, 979 aa, synthetic construct
  REGION 1..979: note = engineered CasX variant
QEIKRINKIRRRLVKDSNTKKAGKTGPMKTLLVRVMTPDLRERLENLRKKPENIPQPISNTSRANLNKLLTDYTEMKKAILHVYWEEFQKDPVGLMSRVAQPASKKIDQNKLKPEMDEKGNLTTAGFACSQCGQPLFVYKLEQVSEKGKAYTNYFGRCNVAEHEKLILLAQLKPEKDSDEAVTYSLGKFGQRALDFYSIHVTKESTHPVKPLAQIAGNRYASGPVGKALSDACMGTIASFLSKYQDIIIEHQKVVKGNQKRLESLRELAGKENLEYPSVTLPPQPHTKEGVDAYNEVIARVRMWVNLNLWQKLKLSRDDAKPLLRLKGFPSFPLVERQANEVDWWDMVCNVKKLINEKKEDGKVFWQNLAGYKRQEALRPYLSSEEDRKKGKKFARYQLGDLLLHLEKKHGEDWGKVYDEAWERIDKKVEGLSKHIKLEEERRSEDAQSKAALTDWLRAKASFVIEGLKEADKDEFCRCELKLQKWYGDLRGKPFAIEAENSILDISGFSKQYNCAFIWQKDGVKKLNLYLIINYFKGGKLRFKKIKPEAFEANRFYTVINKKSGEIVPMEVNFNFDDPNLIILPLAFGKRQGREFIWNDLLSLETGSLKLANGRVIEKTLYNRRTRQDEPALFVALTFERREVLDSSNIKPMNLIGVDRGENIPAVIALTDPEGCPLSRFKDSLGNPTHILRIGESYKEKQRTIQAKKEVEQRRAGGYSRKYASKAKNLADDMVRNTARDLLYYAVTQDAMLIFENLSRGFGRQGKRTFMAERQYTRMEDWLTAKLAYEGPLPSKVYLSKTLAQYTSKTCSNCGFTITSADYDRVLEKLKKTATGWMTTINGKELKVEGQITYYNRYKRQNVVKDLSVELDRLSEESVNNDISSWTKGRSGEALSLLKKRFSHRPVQEKFVCLNCGFETHADEQAALNIARSWLFLRSQEYKKYQTNKTTGNTDKRAFVETWQSFYRKKLKEVWKPAV

SEQ ID NO: 28985 - protein, 979 aa, synthetic construct
  REGION 1..979: note = engineered CasX variant
QEIKRINKIRRRLVKDSNTKKAGKTGPMKTLLVRVMTPDLRERLENLRKKPENIPQPISNTSRANLNKLLTDYTEMKKAILHVYWEEFQKDPVGLMSRVAQPASKKIDQNKLKPEMDEKGNLTTAGFACSQCGQPLFVYKLEQVSEKGKAYTNYFGRCNVAEHEKLILLAQLKPEKDSDEAVTYSLGKFGQRALDFYSIHVTKESTHPVKPLAQIAGNRYASGPVGKALSDACMGTIASFLSKYQDIIIEHQKVVKGNQKRLESLRELAGKENLEYPSVTLPPQPHTKEGVDAYNEVIARVRMWVNLNLWQKLKLSRDDAKPLLRLKGFPSFPLVERQANEVDWWDMVCNVKKLINEKKEDGKVFWQNLAGYKRQEALRPYLSSEEDVRKKGKKFARYQLGDLLLHLEKKHGEDWGKVYDEAWERIDKKVEGLSKHIKLEEERRSEDAQSKAALTDWLRAKASFVIEGLKEADKDEFCRCELKLQKWYGDLRGKPFAIEAENSILDISGFSKQYNCAFIWQKDGVKKLNLYLIINYFKGGKLRFKKIKPEAFEANRFYTVINKKSGEIVPMEVNFNFDDPNLIILPLAFGKRQGREFIWNDLLSLETGSLKLANGRVIEKTLYNRRTRQDEPALFVALTFERREVLDSSNIKPMNLIGVDRGENIPAVIALTDPEGCPLSRFKDSLGNPTHILRIGESYKEKQRTIQAKKEVEQRRAGGYSRKYASKAKNLADDMVRNTARDLLYYAVTQDAMLIFENLSRGFGRQGKRTFMAERQYTRMEDWLTAKLAYEGLPSKVYLSKTLAQYTSKTCSNCGFTITSADYDRVLEKLKKTATGWMTTINGKELKVEGQITYYNRYKRQNVVKDLSVELDRLSEESVNNDISSWTKGRSGEALSLLKKRFSHRPVQEKFVCLNCGFETHADEQAALNIARSWLFLRSQEYKKYQTNKTTGNTDKRAFVETWQSFYRKKLKEVWKPAV

SEQ ID NO: 28986 - protein, 978 aa, synthetic construct
  REGION 1..978: note = engineered CasX variant
QEIKRINKIRRRLVKDSNTKKAGKTGPMKTLLVRVMTPDLRERLENLRKKPENIPQPISNTSRANLNKLLTDYTEMKKAILHVYWEEFQKDPVGLMSRVAQPASKKIDQNKLKPEMDEKGNLTTAGFACSQCGQPLFVYKLEQVSEKGKAYTNYFGRCNVAEHEKLILLAQLKPEKDSDEAVTYSLGKFGQRALDFYSIHVTKESTHPVKPLAQIAGNRYASGPVGKALSDACMGTIASFLSKYQDIIIEHQKVVKGNQKRLESLRELAGKENLEYPSVTLPPQPHTKEGVDAYNEVIARVRMWVNLNLWQKLKLSRDDAKPLLRLKGFPSFPLVERQANEVDWWDMVCNVKKLINEKKEDGKVFWQNLAGYKRQEALRPYLSSEEDRKKGKKFARYQLGDLLLHLEKKHGEDWGKVYDEAWERIDKKVEGLSKHIKLEEERRSEDAQSKAALTDWLRAKASFVIEGLKEADKDEFCRCELKLQKWYGDLRGKPFAIEAENSILDISGFSKQYNCAFIWQKDGVKKLNLYLIINYFKGGKLRFKKIKPEAFEANRFYTVINKKSGEIVPMEVNFNFDDPNLIILPLAFGKRQGREFIWNDLLSLETGSLKLANGRVIEKTLYNRRTRQDEPALFVALTFERREVLDSSNIKPMNLIGVDRGENIPAVIALTDPEGCPLSRFKDSLGNPTHILRIGESYKEKQRTIQAKKEVEQRRAGGYSRKYASKAKNLADDMVRNTARDLLYYAVTQDAMLIFENLSRGFGRQGKRTFMAERQYTRMEDWLTAKLAYEGLPSKVYLSKTLAQYTSKTCSNCGFTITSADYDRMLEKLKKTATGWMTTINGKELKVEGQITYYNRYKRQNVVKDLSVELDRLSEESVNNDISSWTKGRSGEALSLLKKRFSHRPVQEKFVCLNCGFETHADEQAALNIARSWLFLRSQEYKKYQTNKTTGNTDKRAFVETWQSFYRKKLKEVWKPAV

SEQ ID NO: 28987 - protein, 978 aa, synthetic construct
  REGION 1..978: note = engineered CasX variant
QEIKRINKIRRRLVKDSNTKKAGKTGPMKTLLVRVMTPDLRERLENLRKKPENIPQPISNTSRANLNKLLTDYTEMKKAILHVYWEEFQKDPVGLMSRVAQPASKKIDQNKLKPEMDEKGNLTTAGFACSQCGQPLFVYKLEQVSEKGKAYTNYFGRCNVAEHEKLILLAQLKPEKDSDEAVTYSLGKFGQRALDFYSIHVTKESTHPVKPLAQIAGNRYASGPVGKALSDACMGTIASFLSKYQDIIIEHQKVVKGNQKRLESLRELAGKENLEYPSVTLPPQPHTKEGVDAYNEVIARVRMWVNLNLWQKLKLSRDDAKPLLRLKGFPSFPLVERQANEVDWWDMVCNVKKLINEKKEDGKVFWQNLAGYKRQEALRPYLSSEEDRKKGKKFARYQLGDLLLHLEKKHGEDWGKVYDEAWERIDKKVEGLSKHIKLEEERRSEDAQSKAALTDWLRAKASFVIEGLKEADKDEFCRCELKLQKWYGDLRGKPFAIEAENSILDISGFSKQYNCAFIWQKDGVKKLNLYLIINYFKGGKLRFKKIKPEAFEANRFYTVINKKSGEIVPMEVNFNFDDPNLIILPLAFGKRQGREFIWNDLLSLETGSLKLANGRVIEKTLYNRRTRQDEPALFVALTFERREVLDSSNIKPMNLIGVDRGENIPAVIALTDPEGCPLSRFKDSLGNPTHILRIGESYKEKQRTIQAKKEVEQRRAGGYSRKYASKAKNLADDMVRNTARDLLYYAVTQDAMLIFENLSRGFGRQGKRTFMAERQYTRMEDWLTAKLAYEGLPSKVYLSKTLAQYTSKTCSNCGFTITSADYDRVLEKLKKTATGWMTTINGKELKVEGQITYYNRYKRQNVVKDLSVELDRLSEESVNNDISSWTKGRQGEALSLLKKRFSHRPVQEKFVCLNCGFETHADEQAALNIARSWLFLRSQEYKKYQTNKTTGNTDKRAFVETWQSFYRKKLKEVWKPAV

SEQ ID NO: 28988 - protein, 978 aa, synthetic construct
  REGION 1..978: note = engineered CasX variant
QEIKRINKIRRRLVKDSNTKKAGKTGPMKTLLVRVMTPDLRERLENLRKKPENIPQPISNTSRANLNKLLTDYTEMKKAILHVYWEEFQKDPVGLMSRVAQPASKKIDQNKLKPEMDEKGNLTTAGFACSQCGQPLFVYKLEQVSEKGKAYTNYFGRCNVAEHEKLILLAQLKPEKDSDEAVTYSLGKFGQRALDFYSIHVTKESTHPVKPLAQIAGNRYASGPVGKALSDACMGTIASFLSKYQDIIIEHQKVVKGNQKRLESLRELAGKENLEYPSVTLPPQPHTKEGVDAYNEVIARVRMWVNLNLWQKLKLSRDDAKPLLRLKGFPSFPLVERQANEVDWWDMVCNVKKLINEKKEDGKVFWQNLAGYKRQEALRPYLSSEEDRKKGKKFARYQLGDLLLHLEKKHGEDWGKVYDEAWERIDKKVEGLSKHIKLEEERRSEDAQSKAALTDWLRAKASFVIEGLKEADKDEFCRCELKLQKWYGDLRGKPFAIEAENSILDISGFSKQYNCAFIWQKDGVKKLNLYLIINYFKGGKLRFKKIKPEAFEANRFYTVINKKSGEIVPMEVNFNFDDPNLIILPLAFGKRQGREFIWNDLLSLETGSLKLANGRVIEKTLYNRRTRQDEPALFVALTFERREVLDSSNIKPMNLIGVDRGENIPAVIALTDPEGCPLSRFKDSLGNPTHILRIGESYKEKQRTIQAKKEVEQRRAGGYSRKYASKAKNLADDMVRNTARDLLYYAVTQDAMLIFENLSRGFGRQGKRTFMAERQYTRMEDWLTAKLAYEGLPSKVYLSKTLAQYTSKTCSNCGFTITSADYDRVLEKLKKTATGWMTTINGKELKVEGQITYYNRYKRQNVVKDLSVELDRLSEESVNNDISSWTKGRSGEALSLLKKRFSHRPVQEKFVCLNCEFETHADEQAALNIARSWLFLRSQEYKKYQTNKTTGNTDKRAFVETWQSFYRKKLKEVWKPAV

SEQ ID NO: 28989 - protein, 979 aa, synthetic construct
  REGION 1..979: note = engineered CasX variant
QEIKRINKIRRRLVKDSNTKKAGKTGPMKTLLVRVMTPDLRERLENLRKKPENIPQPISNTSRANLNKLLTDYTEMKKAILHVYWEEFQKDPVGLMSRVAQPASKKIDQNKLKPEMDEKGNLTTAGFACSQCGQPLFVYKLEQVSEKGKAYTNYFGRCNVAEHEKLILLAQLKPEKDSDEAVTYSLGKFGQRALDFYSIHVTKESTHPVKPLAQIAGNRYASGPVGKALSDACMGTIASFLSKYQDIIIEHQKVVKGNQKRLESLRELAGKENLEYPSVTLPPQPHTKEGVDAYNEVIARVRMWVNLNLWQKLKLSRDDAKPLLRLKGFPSFPLVERQANEVDWWDMVCNVKKLINEKKEDGKVFWQNLAGYKRQEALRPYLSSEEDRKKGKKFARYQLGDLLLHLEKKHGEDWGKVYDEAWERIDKKVEGLSKHIKLEEERRSEDAQSKAALTDWLRAKASFVIEGLKEADKDEFCRCELKLQKWYGDLRGKPFAIEAENSILDISGFSKQYNCAFIWQKDGVKKLNLYLIINYFKGGKLRFKKIKPEAFEANRFYTVINKKSGEIVPMEVNFNFDDPNLIILPLAFGKRQGREFIWNDLLSLETGSLKLANGRVIEKTLYNRRTRQDEPALFVALTFERREVLDSSNIKPMNLIGVDRGENIPAVIALTDPEGCPLSRFKDSLGNPTHILRIGESYKEKQRTIQAKKEVEQRRAGGYSRKYASKAKNLADDMVRNTARDLLYYAVTQDAMLIFENLSRGFGRQGKRTFMAERQYTRMEDWLTAKLAYEGLPSKVYLSKTLAQYTSKTCSNCGFTITSADYDRVLEKLKKTATGWMTTINGKELKVEGQITYYNRYKRQNVVKDLSVELDRLSEESVNNDISSWTKGRSGEALSLLKKRFSHRPVQEKFVCLNCGFETHADEQAALNIARSWLFLRSQEYKKYQTNKTSTGNTDKRAFVETWQSFYRKKLKEVWKPAV

SEQ ID NO: 28990 - protein, 979 aa, synthetic construct
  REGION 1..979: note = engineered CasX variant
QEIKRINKIRRRLVKDSNTKKAGKTGPMKTLLVRVMTPDLRERLENLRKKPENIPQPISNTSRANLNKLLTDYTEMKKAILHVYWEEFQKDPVGLMSRVAQPASKKIDQNKLKPEMDEKGNLTTAGFACSQCGQPLFVYKLEQVSEKGKAYTNYFGRCNVAEHEKLILLAQLKPEKDSDEAVTYSLGKFGQRALDFYSIHVTKESTHPVKPLAQIAGNRYASGPVGKALSDACMGTIASFLSKYQDIIIEHQKVVKGNQKRLESLRELAGKENLEYPSVTLPPQPHTKEGVDAYNEVIARVRMWVNLNLWQKLKLSRDDAKPLLRLKGFPSFPLVERQANEVDWWDMVCNVKKLINEKKEDGKVFWQNLAGYKRQEALRPYLSSEEDRKKGKKFARYQLGDLLLHLEKKHGEDWGKVYDEAWERIDKKVEGLSKHIKLEEERRSEDAQSKAALTDWLRAKASFVIEGLKEADKDEFCRCELKLQKWYGDLRGKPFAIEAENSILDISGFSKQYNCAFIWQKDGVKKLNLYLIINYFKGGKLRFKKIKPEAFEANRFYTVINKKSGEIVPMEVNFNFDDPNLIILPLAFGKRQGREFIWNDLLSLETGSLKLANGRVIEKTLYNRRTRQDEPALFVALTFERREVLDSSNIKPMNLIGVDRGENIPAVIALTDPEGCPLSRFKDSLGNPTHILRIGESYKEKQRTIQAKKEVEQRRAGGYSRKYASKAKNLADDMVRNTARDLLYYAVTQDAMLIFENLSRGFGRQGKRTFMAERQYTRMEDWLTAKLAYEGLPSKVYLSKTLAQYTSKTCSNCGFTITSADYDRVLEKLKKTATGWMTTINGKELKVEGQITYYNRYKRQNVVKDLSVELDRLSEESVNNDISSWTKGRSGEALSLLKKRFSHRPVQEKFVCLNCGFETHADEQAALNIARSWLFLRSQEYKKYQTNKTTGKNTDKRAFVETWQSFYRKKLKEVWKPAV

SEQ ID NO: 28991 - protein, 978 aa, synthetic construct
  REGION 1..978: note = engineered CasX variant
QEIKRINKIRRRLVKDSNTKKAGKTGPMKTLLVRVMTPDLRERLENLRKKPENIPQPISNTSRANLNKLLTDYTEMKKAILHVYWEEFQKDPVGLMSRVAQPASKKIDQNKLKPEMDEKGNLTTAGFACSQCGQPLFVYKLEQVSEKGKAYTNYFGRCNVAEHEKLILLAQLKPEKDSDEAVTYSLGKFGQRALDFYSIHVTKESTHPVKPLAQIAGNRYASGPVGKALSDACMGTIASFLSKYQDIIIEHQKVVKGNQKRLESLRELAGKENLEYPSVTLPPQPHTKEGVDAYNEVIARVRMWVNLNLWQKLKLSRDDAKPLLRLKKFPSFPLVERQANEVDWWDMVCNVKKLINEKKEDGKVFWQNLAGYKRQEALRPYLSSEEDRKKGKKFARYQLGDLLLHLEKKHGEDWGKVYDEAWERIDKKVEGLSKHIKLEEERRSEDAQSKAALTDWLRAKASFVIEGLKEADKDEFCRCELKLQKWYGDLRGKPFAIEAENSILDISGFSKQYNCAFIWQKDGVKKLNLYLIINYFKGGKLRFKKIKPEAFEANRFYTVINKKSGEIVPMEVNFNFDDPNLIILPLAFGKRQGREFIWNDLLSLETGSLKLANGRVIEKTLYNRRTRQDEPALFVALTFERREVLDSSNIKPMNLIGVDRGENIPAVIALTDPEGCPLSRFKDSLGNPTHILRIGESYKEKQRTIQAKKEVEQRRAGGYSRKYASKAKNLADDMVRNTARDLLYYAVTQDAMLIFENLSRGFGRQGKRTFMAERQYTRMEDWLTAKLAYEGLPSKVYLSKTLAQYTSKTCSNCGFTITSADYDRVLEKLKKTATGWMTTINGKELKVEGQITYYNRYKRQNVVKDLSVELDRLSEESVNNDISSWTKGRSGEALSLLKKRFSHRPVQEKFVCLNCGFETHADEQAALNIARSWLFLRSQEYKKYQTNKTTGNTDKRAFVETWQSFYRKKLKEVWKPAV

SEQ ID NO: 28992 - protein, 978 aa, synthetic construct
  REGION 1..978: note = engineered CasX variant
QEIKRINKIRRRLVKDSNTKKAGKTGPMKTLLVRVMTPDLRERLENLRKKPENIPQPISNTSRANLNKLLTDYTEMKKAILHVYWEEFQKDPVGLMSRVAQPASKKIDQNKLKPEMDEKGNLTTAGFACSQCGQPLFVYKLEQVSEKGKAYTNYFGRCNVAEHEKLILLAQLKPEKDSDEAVTYSLGKFGQRALDFYSIHVTKESTHPVKPLAQIAGNRYASGPVGKALSDACMGTIASFLSKYQDIIIEHQKVVKGNQKRLESLRELAGKENLEYPSVTLPPQPHTKEGVDAYNEVIARVRMWVNLNLWQKLKLSRDDAKPLLRLKGFPSFPLVERQANEVDWWDMVCNVKKLINEKKEDGKVFWQNLAGYKRQEALRPYLSSEEDRKKGKKFARYQLGDLLLHLEKKHGEDWGKVYDEAWERIDKKVEGLSKHIKLEEERRSEDAQSKAALTDWLRAKASFVIEGLKEADKDEFCRCELKLQKWYGDLRGKPFAIEAENSILDISGFSKQYNCAFIWQKDGVKKLNLYLIINYFKGGKLRFKKIKPEAFEANRFYTVINKKSGEIVPMEVNFNFDDPNLIILPLAFGKRQGREFIWNDLLSLETGSLKLANGRVIEKTLYNRRTRQDEPALFVALTFERREVLDSSNIKPMNLIGVDRGENIPAVIALTDPEGCPLSRFKDSLGNPTHILRIGERYKEKQRTIQAKKEVEQRRAGGYSRKYASKAKNLADDMVRNTARDLLYYAVTQDAMLIFENLSRGFGRQGKRTFMAERQYTRMEDWLTAKLAYEGLPSKVYLSKTLAQYTSKTCSNCGFTITSADYDRVLEKLKKTATGWMTTINGKELKVEGQITYYNRYKRQNVVKDLSVELDRLSEESVNNDISSWTKGRSGEALSLLKKRFSHRPVQEKFVCLNCGFETHADEQAALNIARSWLFLRSQEYKKYQTNKTTGNTDKRAFVETWQSFYRKKLKEVWKPAV

SEQ ID NO: 28993 - protein, 978 aa, synthetic construct
  REGION 1..978: note = engineered CasX variant
QEIKRINKIRRRLVKDSNTKKAGKTGPMKTLLVRVMTPDLRERLENLRKKPENIPQPISNTSRANLNKLLTDYTEMKKAILHVYWEEFQKDPVGLMSRVAQPASKKIDQNKLKPEMDEKGNLTTAGFACSQCGQPLFVYKLEQVSEKGKAYTNYFGRCNVAEHEKLILLAQLKPEKDSDEAVTYSLGKFGQRALDFYSIHVTKESTHPVKPLAQIAGNRYASGPVGKALSDACMGTIASFLSKYQDIIIEHQKVVKGNQKRLESLRELAGKENLEYPSVTLPPQPHTKEGVDAYNEVIARVRMWVNLNLWQKLKLSRDDAKPLLRLKGFPSFPLVERQANEVDWWDMVCNVKKLINEKKEDGKVFWQNLAGYKRQEALRPYLSSEEDRKKGKKFARYQLGDLLLHLEKKHGEDWGKVYDEAWERIDKKVEGLSKHIKLEEERRSEDAQSKAALTDWLRAKASFVIEGLKEADKDEFCRCELKLQKWYGDLRGKPFAIEAENSILDISGFSKQYNCAFIWQKDGVKKLNLYLIINYFKGGKLRFKKIKPEAFEANRFYTVINKKSGEIVPMEVNFNFDDPNLIILPLAFGKRQGREFIWNDLLSLETGSLQLANGRVIEKTLYNRRTRQDEPALFVALTFERREVLDSSNIKPMNLIGVDRGENIPAVIALTDPEGCPLSRFKDSLGNPTHILRIGESYKEKQRTIQAKKEVEQRRAGGYSRKYASKAKNLADDMVRNTARDLLYYAVTQDAMLIFENLSRGFGRQGKRTFMAERQYTRMEDWLTAKLAYEGLPSKVYLSKTLAQYTSKTCSNCGFTITSADYDRVLEKLKKTATGWMTTINGKELKVEGQITYYNRYKRQNVVKDLSVELDRLSEESVNNDISSWTKGRSGEALSLLKKRFSHRPVQEKFVCLNCGFETHADEQAALNIARSWLFLRSQEYKKYQTNKTTGNTDKRAFVETWQSFYRKKLKEVWKPAV

SEQ ID NO: 28994 - protein, 980 aa, synthetic construct
  REGION 1..980: note = engineered CasX variant
QEIKRINKIRRRLVKDSNTKKAGKTGPMKTLLVRVMTPDLRERLENLRKKPENIPQPISNTSRANLNKLLTDYTEMKKAILHVYWEEFQKDPVGLMSRVAQPASKKIDQNKLKPEMDEKGNLTTAGFACSQCGQPLFVYKLEQVSEKGKAYTNYFGRCNVAEHEKLILLAQLKPEKDSDEAVTYSLGKFGQRALDFYSIHVTKESTHPVKPLAQIAGNRYASGPVGKALSDACMGTIASFLSKYQDIIIEHQKVVKGNQKRLESLRELAGKENLEYPSVTLPPQPHTKEGVDAYNEVIARVRMWVNLNLWQKLKLSRDDAKPLLRLKGFPSFPLVERQANEVDWWDMVCNVKKLINEKKEDGKVFWQNLAGYKRQEALRPYLSSEEDVRKKGKKFARYQLGDLLLHLEKKHGEDWGKVYDEAWERIDKKVEGLSKHIKLEEERRSEDAQSKAALTDWLRAKASFVIEGLKEADKDEFCRCELKLQKWYGDLRGKPFAIEAENSILDISGFSKQYNCAFIWQKDGVKKLNLYLIINYFKGGKLRFKKIKPEAFEANRFYTVINKKSGEIVPMEVNFNFDDPNLIILPLAFGKRQGREFIWNDLLSLETGSLKLANGRVIEKTLYNRRTRQDEPALFVALTFERREVLDSSNIKPMNLIGVDRGENIPAVIALTDPEGCPLSRFKDSLGNPTHILRIGESYKEKQRTIQAKKEVEQRRAGGYSRKYASKAKNLADDMVRNTARDLLYYAVTQDAMLIFENLSRGFGRQGKRTFMAERQYTRMEDWLTAKLAYEGPLPSKTYLSKTLAQYTSKTCSNCGFTITSADYDRVLEKLKKTATGWMTTINGKELKVEGQITYYNRYKRQNVVKDLSVELDRLSEESVNNDISSWTKGRSGEALSLLKKRFSHRPVQEKFVCLNCGFETHADEQAALNIARSWLFLRSQEYKKYQTNKTTGNTDKRAFVETWQSFYRKKLKEVWKPAV

SEQ ID NO: 28995 - protein, 979 aa, synthetic construct
  REGION 1..979: note = engineered CasX variant
QEIKRINKIRRRLVKDSNTKKAGKTGPMKTLLVRVMTPDLRERLENLRKKPENIPQPISNTSRANLNKLLTDYTEMKKAILHVYWEEFQKDPVGLMSRVAQPASKKIDQNKLKPEMDEKGNLTTAGFACSQCGQPLFVYKLEQVSEKGKAYTNYFGRCNVAEHEKLILLAQLKPEKDSDEAVTYSLGKFGQRALDFYSIHVTKESTHPVKPLAQIAGNRYASGPVGKALSDACMGTIASFLSKYQDIIIEHQKVVKGNQKRLESLRELAGKENLEYPSVTLPPQPHTKEGVDAYNEVIARVRMWVNLNLWQKLKLSRDDAKPLLRLKGFPSFPLVERQANEVDWWDMVCNVKKLINEKKEDGKVFWQNLAGYKRQEALRPYLSSEEDRKKGKKFARYQLGDLLLHLEKKHGEDWGKVYDEAWERIDKKVEGLSKHIKLEEERRSEDAQSKAALTDWLRAKASFVIEGLKEADKDEFCRCELKLQKWYGDLRGKPFAIEAENSILDISGFSKQYNCAFIWQKDGVKKLNLYLIINYFKGGKLRFKKIKPEAFEANRFYTVINKKSGEIVPMEVNFNFDDPNLIILPLAFGKRQGREFIWNDLLSLETGSLKLANGRVIEKTLYNRRTRQDEPALFVALTFERREVLDSSNIKPMNLIGVDRGENIPAVIALTDPEGCPLSRFKDSLGNPTHILRIGESYKEKQRTIQAKKEVEQRRAGGYSRKYASKAKNLADDMVRNTARDLLYYAVTQDAMLIFENLSRGFGRQGKRTFMAERQYTRMEDWLTAKLAYEGPLPSKTYLSKTLAQYTSKTCSNCGFTITSADYDRMLEKLKKTATGWMTTINGKELKVEGQITYYNRYKRQNVVKDLSVELDRLSEESVNNDISSWTKGRSGEALSLLKKRFSHRPVQEKFVCLNCGFETHADEQAALNIARSWLFLRSQEYKKYQTNKTTGNTDKRAFVETWQSFYRKKLKEVWKPAV

SEQ ID NO: 28996 - protein, 979 aa, synthetic construct
  REGION 1..979: note = engineered CasX variant
QEIKRINKIRRRLVKDSNTKKAGKTGPMKTLLVRVMTPDLRERLENLRKKPENIPQPISNTSRANLNKLLTDYTEMKKAILHVYWEEFQKDPVGLMSRVAQPASKKIDQNKLKPEMDEKGNLTTAGFACSQCGQPLFVYKLEQVSEKGKAYTNYFGRCNVAEHEKLILLAQLKPEKDSDEAVTYSLGKFGQRALDFYSIHVTKESTHPVKPLAQIAGNRYASGPVGKALSDACMGTIASFLSKYQDIIIEHQKVVKGNQKRLESLRELAGKENLEYPSVTLPPQPHTKEGVDAYNEVIARVRMWVNLNLWQKLKLSRDDAKPLLRLKGFPSFPLVERQANEVDWWDMVCNVKKLINEKKEDGKVFWQNLAGYKRQEALRPYLSSEEDRKKGKKFARYQLGDLLLHLEKKHGEDWGKVYDEAWERIDKKVEGLSKHIKLEEERRSEDAQSKAALTDWLRAKASFVIEGLKEADKDEFCRCELKLQKWYGDLRGKPFAIEAENSILDISGFSKQYNCAFIWQKDGVKKLNLYLIINYFKGGKLRFKKIKPEAFEANRFYTVINKKSGEIVPMEVNFNFDDPNLIILPLAFGKRQGREFIWNDLLSLETGSLKLANGRVIEKTLYNRRTRQDEPALFVALTFERREVLDSSNIKPMNLIGVDRGENIPAVIALTDPEGCPLSRFKDSLGNPTHILRIGESYKEKQRTIQAKKEVEQRRAGGYSRKYASKAKNLADDMVRNTARDLLYYAVTQDAMLIFENLSRGFGRQGKRTFMAERQYTRMEDWLTAKLAYEGPLPSKTYLSKTLAQYTSKTCSNCGFTITSADYDRVLEKLKKTATGWMTTINGKELKVEGQITYYNRYKRQNVVKDLSVELDRLSEESVNNDISSWTKGRQGEALSLLKKRFSHRPVQEKFVCLNCGFETHADEQAALNIARSWLFLRSQEYKKYQTNKTTGNTDKRAFVETWQSFYRKKLKEVWKPAV

SEQ ID NO: 28997 - protein, 979 aa, synthetic construct
  REGION 1..979: note = engineered CasX variant
QEIKRINKIRRRLVKDSNTKKAGKTGPMKTLLVRVMTPDLRERLENLRKKPENIPQPISNTSRANLNKLLTDYTEMKKAILHVYWEEFQKDPVGLMSRVAQPASKKIDQNKLKPEMDEKGNLTTAGFACSQCGQPLFVYKLEQVSEKGKAYTNYFGRCNVAEHEKLILLAQLKPEKDSDEAVTYSLGKFGQRALDFYSIHVTKESTHPVKPLAQIAGNRYASGPVGKALSDACMGTIASFLSKYQDIIIEHQKVVKGNQKRLESLRELAGKENLEYPSVTLPPQPHTKEGVDAYNEVIARVRMWVNLNLWQKLKLSRDDAKPLLRLKGFPSFPLVERQANEVDWWDMVCNVKKLINEKKEDGKVFWQNLAGYKRQEALRPYLSSEEDRKKGKKFARYQLGDLLLHLEKKHGEDWGKVYDEAWERIDKKVEGLSKHIKLEEERRSEDAQSKAALTDWLRAKASFVIEGLKEADKDEFCRCELKLQKWYGDLRGKPFAIEAENSILDISGFSKQYNCAFIWQKDGVKKLNLYLIINYFKGGKLRFKKIKPEAFEANRFYTVINKKSGEIVPMEVNFNFDDPNLIILPLAFGKRQGREFIWNDLLSLETGSLKLANGRVIEKTLYNRRTRQDEPALFVALTFERREVLDSSNIKPMNLIGVDRGENIPAVIALTDPEGCPLSRFKDSLGNPTHILRIGESYKEKQRTIQAKKEVEQRRAGGYSRKYASKAKNLADDMVRNTARDLLYYAVTQDAMLIFENLSRGFGRQGKRTFMAERQYTRMEDWLTAKLAYEGPLPSKTYLSKTLAQYTSKTCSNCGFTITSADYDRVLEKLKKTATGWMTTINGKELKVEGQITYYNRYKRQNVVKDLSVELDRLSEESVNNDISSWTKGRSGEALSLLKKRFSHRPVQEKFVCLNCEFETHADEQAALNIARSWLFLRSQEYKKYQTNKTTGNTDKRAFVETWQSFYRKKLKEVWKPAV

SEQ ID NO: 28998 - protein, 980 aa, synthetic construct
  REGION 1..980: note = engineered CasX variant
QEIKRINKIRRRLVKDSNTKKAGKTGPMKTLLVRVMTPDLRERLENLRKKPENIPQPISNTSRANLNKLLTDYTEMKKAILHVYWEEFQKDPVGLMSRVAQPASKKIDQNKLKPEMDEKGNLTTAGFACSQCGQPLFVYKLEQVSEKGKAYTNYFGRCNVAEHEKLILLAQLKPEKDSDEAVTYSLGKFGQRALDFYSIHVTKESTHPVKPLAQIAGNRYASGPVGKALSDACMGTIASFLSKYQDIIIEHQKVVKGNQKRLESLRELAGKENLEYPSVTLPPQPHTKEGVDAYNEVIARVRMWVNLNLWQKLKLSRDDAKPLLRLKGFPSFPLVERQANEVDWWDMVCNVKKLINEKKEDGKVFWQNLAGYKRQEALRPYLSSEEDRKKGKKFARYQLGDLLLHLEKKHGEDWGKVYDEAWERIDKKVEGLSKHIKLEEERRSEDAQSKAALTDWLRAKASFVIEGLKEADKDEFCRCELKLQKWYGDLRGKPFAIEAENSILDISGFSKQYNCAFIWQKDGVKKLNLYLIINYFKGGKLRFKKIKPEAFEANRFYTVINKKSGEIVPMEVNFNFDDPNLIILPLAFGKRQGREFIWNDLLSLETGSLKLANGRVIEKTLYNRRTRQDEPALFVALTFERREVLDSSNIKPMNLIGVDRGENIPAVIALTDPEGCPLSRFKDSLGNPTHILRIGESYKEKQRTIQAKKEVEQRRAGGYSRKYASKAKNLADDMVRNTARDLLYYAVTQDAMLIFENLSRGFGRQGKRTFMAERQYTRMEDWLTAKLAYEGPLPSKTYLSKTLAQYTSKTCSNCGFTITSADYDRVLEKLKKTATGWMTTINGKELKVEGQITYYNRYKRQNVVKDLSVELDRLSEESVNNDISSWTKGRSGEALSLLKKRFSHRPVQEKFVCLNCGFETHADEQAALNIARSWLFLRSQEYKKYQTNKTSTGNTDKRAFVETWQSFYRKKLKEVWKPAV

SEQ ID NO: 28999 - protein, 980 aa, synthetic construct
  REGION 1..980: note = engineered CasX variant
QEIKRINKIRRRLVKDSNTKKAGKTGPMKTLLVRVMTPDLRERLENLRKKPENIPQPISNTSRANLNKLLTDYTEMKKAILHVYWEEFQKDPVGLMSRVAQPASKKIDQNKLKPEMDEKGNLTTAGFACSQCGQPLFVYKLEQVSEKGKAYTNYFGRCNVAEHEKLILLAQLKPEKDSDEAVTYSLGKFGQRALDFYSIHVTKESTHPVKPLAQIAGNRYASGPVGKALSDACMGTIASFLSKYQDIIIEHQKVVKGNQKRLESLRELAGKENLEYPSVTLPPQPHTKEGVDAYNEVIARVRMWVNLNLWQKLKLSRDDAKPLLRLKGFPSFPLVERQANEVDWWDMVCNVKKLINEKKEDGKVFWQNLAGYKRQEALRPYLSSEEDRKKGKKFARYQLGDLLLHLEKKHGEDWGKVYDEAWERIDKKVEGLSKHIKLEEERRSEDAQSKAALTDWLRAKASFVIEGLKEADKDEFCRCELKLQKWYGDLRGKPFAIEAENSILDISGFSKQYNCAFIWQKDGVKKLNLYLIINYFKGGKLRFKKIKPEAFEANRFYTVINKKSGEIVPMEVNFNFDDPNLIILPLAFGKRQGREFIWNDLLSLETGSLKLANGRVIEKTLYNRRTRQDEPALFVALTFERREVLDSSNIKPMNLIGVDRGENIPAVIALTDPEGCPLSRFKDSLGNPTHILRIGESYKEKQRTIQAKKEVEQRRAGGYSRKYASKAKNLADDMVRNTARDLLYYAVTQDAMLIFENLSRGFGRQGKRTFMAERQYTRMEDWLTAKLAYEGPLPSKTYLSKTLAQYTSKTCSNCGFTITSADYDRVLEKLKKTATGWMTTINGKELKVEGQITYYNRYKRQNVVKDLSVELDRLSEESVNNDISSWTKGRSGEALSLLKKRFSHRPVQEKFVCLNCGFETHADEQAALNIARSWLFLRSQEYKKYQTNKTTGKNTDKRAFVETWQSFYRKKLKEVWKPAV

SEQ ID NO: 29000 - protein, 979 aa, synthetic construct
  REGION 1..979: note = engineered CasX variant
QEIKRINKIRRRLVKDSNTKKAGKTGPMKTLLVRVMTPDLRERLENLRKKPENIPQPISNTSRANLNKLLTDYTEMKKAILHVYWEEFQKDPVGLMSRVAQPASKKIDQNKLKPEMDEKGNLTTAGFACSQCGQPLFVYKLEQVSEKGKAYTNYFGRCNVAEHEKLILLAQLKPEKDSDEAVTYSLGKFGQRALDFYSIHVTKESTHPVKPLAQIAGNRYASGPVGKALSDACMGTIASFLSKYQDIIIEHQKVVKGNQKRLESLRELAGKENLEYPSVTLPPQPHTKEGVDAYNEVIARVRMWVNLNLWQKLKLSRDDAKPLLRLKKFPSFPLVERQANEVDWWDMVCNVKKLINEKKEDGKVFWQNLAGYKRQEALRPYLSSEEDRKKGKKFARYQLGDLLLHLEKKHGEDWGKVYDEAWERIDKKVEGLSKHIKLEEERRSEDAQSKAALTDWLRAKASFVIEGLKEADKDEFCRCELKLQKWYGDLRGKPFAIEAENSILDISGFSKQYNCAFIWQKDGVKKLNLYLIINYFKGGKLRFKKIKPEAFEANRFYTVINKKSGEIVPMEVNFNFDDPNLIILPLAFGKRQGREFIWNDLLSLETGSLKLANGRVIEKTLYNRRTRQDEPALFVALTFERREVLDSSNIKPMNLIGVDRGENIPAVIALTDPEGCPLSRFKDSLGNPTHILRIGESYKEKQRTIQAKKEVEQRRAGGYSRKYASKAKNLADDMVRNTARDLLYYAVTQDAMLIFENLSRGFGRQGKRTFMAERQYTRMEDWLTAKLAYEGPLPSKTYLSKTLAQYTSKTCSNCGFTITSADYDRVLEKLKKTATGWMTTINGKELKVEGQITYYNRYKRQNVVKDLSVELDRLSEESVNNDISSWTKGRSGEALSLLKKRFSHRPVQEKFVCLNCGFETHADEQAALNIARSWLFLRSQEYKKYQTNKTTGNTDKRAFVETWQSFYRKKLKEVWKPAV

SEQ ID NO: 29001 - protein, 979 aa, synthetic construct
  REGION 1..979: note = engineered CasX variant
QEIKRINKIRRRLVKDSNTKKAGKTGPMKTLLVRVMTPDLRERLENLRKKPENIPQPISNTSRANLNKLLTDYTEMKKAILHVYWEEFQKDPVGLMSRVAQPASKKIDQNKLKPEMDEKGNLTTAGFACSQCGQPLFVYKLEQVSEKGKAYTNYFGRCNVAEHEKLILLAQLKPEKDSDEAVTYSLGKFGQRALDFYSIHVTKESTHPVKPLAQIAGNRYASGPVGKALSDACMGTIASFLSKYQDIIIEHQKVVKGNQKRLESLRELAGKENLEYPSVTLPPQPHTKEGVDAYNEVIARVRMWVNLNLWQKLKLSRDDAKPLLRLKGFPSFPLVERQANEVDWWDMVCNVKKLINEKKEDGKVFWQNLAGYKRQEALRPYLSSEEDRKKGKKFARYQLGDLLLHLEKKHGEDWGKVYDEAWERIDKKVEGLSKHIKLEEERRSEDAQSKAALTDWLRAKASFVIEGLKEADKDEFCRCELKLQKWYGDLRGKPFAIEAENSILDISGFSKQYNCAFIWQKDGVKKLNLYLIINYFKGGKLRFKKIKPEAFEANRFYTVINKKSGEIVPMEVNFNFDDPNLIILPLAFGKRQGREFIWNDLLSLETGSLKLANGRVIEKTLYNRRTRQDEPALFVALTFERREVLDSSNIKPMNLIGVDRGENIPAVIALTDPEGCPLSRFKDSLGNPTHILRIGERYKEKQRTIQAKKEVEQRRAGGYSRKYASKAKNLADDMVRNTARDLLYYAVTQDAMLIFENLSRGFGRQGKRTFMAERQYTRMEDWLTAKLAYEGPLPSKTYLSKTLAQYTSKTCSNCGFTITSADYDRVLEKLKKTATGWMTTINGKELKVEGQITYYNRYKRQNVVKDLSVELDRLSEESVNNDISSWTKGRSGEALSLLKKRFSHRPVQEKFVCLNCGFETHADEQAALNIARSWLFLRSQEYKKYQTNKTTGNTDKRAFVETWQSFYRKKLKEVWKPAV

SEQ ID NO: 29002 - protein, 979 aa, synthetic construct
  REGION 1..979: note = engineered CasX variant
QEIKRINKIRRRLVKDSNTKKAGKTGPMKTLLVRVMTPDLRERLENLRKKPENIPQPISNTSRANLNKLLTDYTEMKKAILHVYWEEFQKDPVGLMSRVAQPASKKIDQNKLKPEMDEKGNLTTAGFACSQCGQPLFVYKLEQVSEKGKAYTNYFGRCNVAEHEKLILLAQLKPEKDSDEAVTYSLGKFGQRALDFYSIHVTKESTHPVKPLAQIAGNRYASGPVGKALSDACMGTIASFLSKYQDIIIEHQKVVKGNQKRLESLRELAGKENLEYPSVTLPPQPHTKEGVDAYNEVIARVRMWVNLNLWQKLKLSRDDAKPLLRLKGFPSFPLVERQANEVDWWDMVCNVKKLINEKKEDGKVFWQNLAGYKRQEALRPYLSSEEDRKKGKKFARYQLGDLLLHLEKKHGEDWGKVYDEAWERIDKKVEGLSKHIKLEEERRSEDAQSKAALTDWLRAKASFVIEGLKEADKDEFCRCELKLQKWYGDLRGKPFAIEAENSILDISGFSKQYNCAFIWQKDGVKKLNLYLIINYFKGGKLRFKKIKPEAFEANRFYTVINKKSGEIVPMEVNFNFDDPNLIILPLAFGKRQGREFIWNDLLSLETGSLQLANGRVIEKTLYNRRTRQDEPALFVALTFERREVLDSSNIKPMNLIGVDRGENIPAVIALTDPEGCPLSRFKDSLGNPTHILRIGESYKEKQRTIQAKKEVEQRRAGGYSRKYASKAKNLADDMVRNTARDLLYYAVTQDAMLIFENLSRGFGRQGKRTFMAERQYTRMEDWLTAKLAYEGPLPSKTYLSKTLAQYTSKTCSNCGFTITSADYDRVLEKLKKTATGWMTTINGKELKVEGQITYYNRYKRQNVVKDLSVELDRLSEESVNNDISSWTKGRSGEALSLLKKRFSHRPVQEKFVCLNCGFETHADEQAALNIARSWLFLRSQEYKKYQTNKTTGNTDKRAFVETWQSFYRKKLKEVWKPAV

SEQ ID NO: 29003 - protein, 979 aa, synthetic construct
  REGION 1..979: note = engineered CasX variant
QEIKRINKIRRRLVKDSNTKKAGKTGPMKTLLVRVMTPDLRERLENLRKKPENIPQPISNTSRANLNKLLTDYTEMKKAILHVYWEEFQKDPVGLMSRVAQPASKKIDQNKLKPEMDEKGNLTTAGFACSQCGQPLFVYKLEQVSEKGKAYTNYFGRCNVAEHEKLILLAQLKPEKDSDEAVTYSLGKFGQRALDFYSIHVTKESTHPVKPLAQIAGNRYASGPVGKALSDACMGTIASFLSKYQDIIIEHQKVVKGNQKRLESLRELAGKENLEYPSVTLPPQPHTKEGVDAYNEVIARVRMWVNLNLWQKLKLSRDDAKPLLRLKGFPSFPLVERQANEVDWWDMVCNVKKLINEKKEDGKVFWQNLAGYKRQEALRPYLSSEEDVRKKGKKFARYQLGDLLLHLEKKHGEDWGKVYDEAWERIDKKVEGLSKHIKLEEERRSEDAQSKAALTDWLRAKASFVIEGLKEADKDEFCRCELKLQKWYGDLRGKPFAIEAENSILDISGFSKQYNCAFIWQKDGVKKLNLYLIINYFKGGKLRFKKIKPEAFEANRFYTVINKKSGEIVPMEVNFNFDDPNLIILPLAFGKRQGREFIWNDLLSLETGSLKLANGRVIEKTLYNRRTRQDEPALFVALTFERREVLDSSNIKPMNLIGVDRGENIPAVIALTDPEGCPLSRFKDSLGNPTHILRIGESYKEKQRTIQAKKEVEQRRAGGYSRKYASKAKNLADDMVRNTARDLLYYAVTQDAMLIFENLSRGFGRQGKRTFMAERQYTRMEDWLTAKLAYEGLPSKTYLSKTLAQYTSKTCSNCGFTITSADYDRMLEKLKKTATGWMTTINGKELKVEGQITYYNRYKRQNVVKDLSVELDRLSEESVNNDISSWTKGRSGEALSLLKKRFSHRPVQEKFVCLNCGFETHADEQAALNIARSWLFLRSQEYKKYQTNKTTGNTDKRAFVETWQSFYRKKLKEVWKPAV

SEQ ID NO: 29004 - protein, 979 aa, synthetic construct
  REGION 1..979: note = engineered CasX variant
QEIKRINKIRRRLVKDSNTKKAGKTGPMKTLLVRVMTPDLRERLENLRKKPENIPQPISNTSRANLNKLLTDYTEMKKAILHVYWEEFQKDPVGLMSRVAQPASKKIDQNKLKPEMDEKGNLTTAGFACSQCGQPLFVYKLEQVSEKGKAYTNYFGRCNVAEHEKLILLAQLKPEKDSDEAVTYSLGKFGQRALDFYSIHVTKESTHPVKPLAQIAGNRYASGPVGKALSDACMGTIASFLSKYQDIIIEHQKVVKGNQKRLESLRELAGKENLEYPSVTLPPQPHTKEGVDAYNEVIARVRMWVNLNLWQKLKLSRDDAKPLLRLKGFPSFPLVERQANEVDWWDMVCNVKKLINEKKEDGKVFWQNLAGYKRQEALRPYLSSEEDVRKKGKKFARYQLGDLLLHLEKKHGEDWGKVYDEAWERIDKKVEGLSKHIKLEEERRSEDAQSKAALTDWLRAKASFVIEGLKEADKDEFCRCELKLQKWYGDLRGKPFAIEAENSILDISGFSKQYNCAFIWQKDGVKKLNLYLIINYFKGGKLRFKKIKPEAFEANRFYTVINKKSGEIVPMEVNFNFDDPNLIILPLAFGKRQGREFIWNDLLSLETGSLKLANGRVIEKTLYNRRTRQDEPALFVALTFERREVLDSSNIKPMNLIGVDRGENIPAVIALTDPEGCPLSRFKDSLGNPTHILRIGESYKEKQRTIQAKKEVEQRRAGGYSRKYASKAKNLADDMVRNTARDLLYYAVTQDAMLIFENLSRGFGRQGKRTFMAERQYTRMEDWLTAKLAYEGLPSKTYLSKTLAQYTSKTCSNCGFTITSADYDRVLEKLKKTATGWMTTINGKELKVEGQITYYNRYKRQNVVKDLSVELDRLSEESVNNDISSWTKGRQGEALSLLKKRFSHRPVQEKFVCLNCGFETHADEQAALNIARSWLFLRSQEYKKYQTNKTTGNTDKRAFVETWQSFYRKKLKEVWKPAV

SEQ ID NO: 29005 - protein, 979 aa, synthetic construct
  REGION 1..979: note = engineered CasX variant
QEIKRINKIRRRLVKDSNTKKAGKTGPMKTLLVRVMTPDLRERLENLRKKPENIPQPISNTSRANLNKLLTDYTEMKKAILHVYWEEFQKDPVGLMSRVAQPASKKIDQNKLKPEMDEKGNLTTAGFACSQCGQPLFVYKLEQVSEKGKAYTNYFGRCNVAEHEKLILLAQLKPEKDSDEAVTYSLGKFGQRALDFYSIHVTKESTHPVKPLAQIAGNRYASGPVGKALSDACMGTIASFLSKYQDIIIEHQKVVKGNQKRLESLRELAGKENLEYPSVTLPPQPHTKEGVDAYNEVIARVRMWVNLNLWQKLKLSRDDAKPLLRLKGFPSFPLVERQANEVDWWDMVCNVKKLINEKKEDGKVFWQNLAGYKRQEALRPYLSSEEDVRKKGKKFARYQLGDLLLHLEKKHGEDWGKVYDEAWERIDKKVEGLSKHIKLEEERRSEDAQSKAALTDWLRAKASFVIEGLKEADKDEFCRCELKLQKWYGDLRGKPFAIEAENSILDISGFSKQYNCAFIWQKDGVKKLNLYLIINYFKGGKLRFKKIKPEAFEANRFYTVINKKSGEIVPMEVNFNFDDPNLIILPLAFGKRQGREFIWNDLLSLETGSLKLANGRVIEKTLYNRRTRQDEPALFVALTFERREVLDSSNIKPMNLIGVDRGENIPAVIALTDPEGCPLSRFKDSLGNPTHILRIGESYKEKQRTIQAKKEVEQRRAGGYSRKYASKAKNLADDMVRNTARDLLYYAVTQDAMLIFENLSRGFGRQGKRTFMAERQYTRMEDWLTAKLAYEGLPSKTYLSKTLAQYTSKTCSNCGFTITSADYDRVLEKLKKTATGWMTTINGKELKVEGQITYYNRYKRQNVVKDLSVELDRLSEESVNNDISSWTKGRSGEALSLLKKRFSHRPVQEKFVCLNCEFETHADEQAALNIARSWLFLRSQEYKKYQTNKTTGNTDKRAFVETWQSFYRKKLKEVWKPAV

SEQ ID NO: 29006 - protein, 980 aa, synthetic construct
  REGION 1..980: note = engineered CasX variant
QEIKRINKIRRRLVKDSNTKKAGKTGPMKTLLVRVMTPDLRERLENLRKKPENIPQPISNTSRANLNKLLTDYTEMKKAILHVYWEEFQKDPVGLMSRVAQPASKKIDQNKLKPEMDEKGNLTTAGFACSQCGQPLFVYKLEQVSEKGKAYTNYFGRCNVAEHEKLILLAQLKPEKDSDEAVTYSLGKFGQRALDFYSIHVTKESTHPVKPLAQIAGNRYASGPVGKALSDACMGTIASFLSKYQDIIIEHQKVVKGNQKRLESLRELAGKENLEYPSVTLPPQPHTKEGVDAYNEVIARVRMWVNLNLWQKLKLSRDDAKPLLRLKGFPSFPLVERQANEVDWWDMVCNVKKLINEKKEDGKVFWQNLAGYKRQEALRPYLSSEEDVRKKGKKFARYQLGDLLLHLEKKHGEDWGKVYDEAWERIDKKVEGLSKHIKLEEERRSEDAQSKAALTDWLRAKASFVIEGLKEADKDEFCRCELKLQKWYGDLRGKPFAIEAENSILDISGFSKQYNCAFIWQKDGVKKLNLYLIINYFKGGKLRFKKIKPEAFEANRFYTVINKKSGEIVPMEVNFNFDDPNLIILPLAFGKRQGREFIWNDLLSLETGSLKLANGRVIEKTLYNRRTRQDEPALFVALTFERREVLDSSNIKPMNLIGVDRGENIPAVIALTDPEGCPLSRFKDSLGNPTHILRIGESYKEKQRTIQAKKEVEQRRAGGYSRKYASKAKNLADDMVRNTARDLLYYAVTQDAMLIFENLSRGFGRQGKRTFMAERQYTRMEDWLTAKLAYEGLPSKTYLSKTLAQYTSKTCSNCGFTITSADYDRVLEKLKKTATGWMTTINGKELKVEGQITYYNRYKRQNVVKDLSVELDRLSEESVNNDISSWTKGRSGEALSLLKKRFSHRPVQEKFVCLNCGFETHADEQAALNIARSWLFLRSQEYKKYQTNKTSTGNTDKRAFVETWQSFYRKKLKEVWKPAV

SEQ ID NO: 29007 - protein, 980 aa, synthetic construct
  REGION 1..980: note = engineered CasX variant
QEIKRINKIRRRLVKDSNTKKAGKTGPMKTLLVRVMTPDLRERLENLRKKPENIPQPISNTSRANLNKLLTDYTEMKKAILHVYWEEFQKDPVGLMSRVAQPASKKIDQNKLKPEMDEKGNLTTAGFACSQCGQPLFVYKLEQVSEKGKAYTNYFGRCNVAEHEKLILLAQLKPEKDSDEAVTYSLGKFGQRALDFYSIHVTKESTHPVKPLAQIAGNRYASGPVGKALSDACMGTIASFLSKYQDIIIEHQKVVKGNQKRLESLRELAGKENLEYPSVTLPPQPHTKEGVDAYNEVIARVRMWVNLNLWQKLKLSRDDAKPLLRLKGFPSFPLVERQANEVDWWDMVCNVKKLINEKKEDGKVFWQNLAGYKRQEALRPYLSSEEDVRKKGKKFARYQLGDLLLHLEKKHGEDWGKVYDEAWERIDKKVEGLSKHIKLEEERRSEDAQSKAALTDWLRAKASFVIEGLKEADKDEFCRCELKLQKWYGDLRGKPFAIEAENSILDISGFSKQYNCAFIWQKDGVKKLNLYLIINYFKGGKLRFKKIKPEAFEANRFYTVINKKSGEIVPMEVNFNFDDPNLIILPLAFGKRQGREFIWNDLLSLETGSLKLANGRVIEKTLYNRRTRQDEPALFVALTFERREVLDSSNIKPMNLIGVDRGENIPAVIALTDPEGCPLSRFKDSLGNPTHILRIGESYKEKQRTIQAKKEVEQRRAGGYSRKYASKAKNLADDMVRNTARDLLYYAVTQDAMLIFENLSRGFGRQGKRTFMAERQYTRMEDWLTAKLAYEGLPSKTYLSKTLAQYTSKTCSNCGFTITSADYDRVLEKLKKTATGWMTTINGKELKVEGQITYYNRYKRQNVVKDLSVELDRLSEESVNNDISSWTKGRSGEALSLLKKRFSHRPVQEKFVCLNCGFETHADEQAALNIARSWLFLRSQEYKKYQTNKTTGKNTDKRAFVETWQSFYRKKLKEVWKPAV

SEQ ID NO: 29008 - protein, 979 aa, synthetic construct
  REGION 1..979: note = engineered CasX variant
QEIKRINKIRRRLVKDSNTKKAGKTGPMKTLLVRVMTPDLRERLENLRKKPENIPQPISNTSRANLNKLLTDYTEMKKAILHVYWEEFQKDPVGLMSRVAQPASKKIDQNKLKPEMDEKGNLTTAGFACSQCGQPLFVYKLEQVSEKGKAYTNYFGRCNVAEHEKLILLAQLKPEKDSDEAVTYSLGKFGQRALDFYSIHVTKESTHPVKPLAQIAGNRYASGPVGKALSDACMGTIASFLSKYQDIIIEHQKVVKGNQKRLESLRELAGKENLEYPSVTLPPQPHTKEGVDAYNEVIARVRMWVNLNLWQKLKLSRDDAKPLLRLKKFPSFPLVERQANEVDWWDMVCNVKKLINEKKEDGKVFWQNLAGYKRQEALRPYLSSEEDVRKKGKKFARYQLGDLLLHLEKKHGEDWGKVYDEAWERIDKKVEGLSKHIKLEEERRSEDAQSKAALTDWLRAKASFVIEGLKEADKDEFCRCELKLQKWYGDLRGKPFAIEAENSILDISGFSKQYNCAFIWQKDGVKKLNLYLIINYFKGGKLRFKKIKPEAFEANRFYTVINKKSGEIVPMEVNFNFDDPNLIILPLAFGKRQGREFIWNDLLSLETGSLKLANGRVIEKTLYNRRTRQDEPALFVALTFERREVLDSSNIKPMNLIGVDRGENIPAVIALTDPEGCPLSRFKDSLGNPTHILRIGESYKEKQRTIQAKKEVEQRRAGGYSRKYASKAKNLADDMVRNTARDLLYYAVTQDAMLIFENLSRGFGRQGKRTFMAERQYTRMEDWLTAKLAYEGLPSKTYLSKTLAQYTSKTCSNCGFTITSADYDRVLEKLKKTATGWMTTINGKELKVEGQITYYNRYKRQNVVKDLSVELDRLSEESVNNDISSWTKGRSGEALSLLKKRFSHRPVQEKFVCLNCGFETHADEQAALNIARSWLFLRSQEYKKYQTNKTTGNTDKRAFVETWQSFYRKKLKEVWKPAV

SEQ ID NO: 29009 - protein, 979 aa, synthetic construct
  REGION 1..979: note = engineered CasX variant
QEIKRINKIRRRLVKDSNTKKAGKTGPMKTLLVRVMTPDLRERLENLRKKPENIPQPISNTSRANLNKLLTDYTEMKKAILHVYWEEFQKDPVGLMSRVAQPASKKIDQNKLKPEMDEKGNLTTAGFACSQCGQPLFVYKLEQVSEKGKAYTNYFGRCNVAEHEKLILLAQLKPEKDSDEAVTYSLGKFGQRALDFYSIHVTKESTHPVKPLAQIAGNRYASGPVGKALSDACMGTIASFLSKYQDIIIEHQKVVKGNQKRLESLRELAGKENLEYPSVTLPPQPHTKEGVDAYNEVIARVRMWVNLNLWQKLKLSRDDAKPLLRLKGFPSFPLVERQANEVDWWDMVCNVKKLINEKKEDGKVFWQNLAGYKRQEALRPYLSSEEDVRKKGKKFARYQLGDLLLHLEKKHGEDWGKVYDEAWERIDKKVEGLSKHIKLEEERRSEDAQSKAALTDWLRAKASFVIEGLKEADKDEFCRCELKLQKWYGDLRGKPFAIEAENSILDISGFSKQYNCAFIWQKDGVKKLNLYLIINYFKGGKLRFKKIKPEAFEANRFYTVINKKSGEIVPMEVNFNFDDPNLIILPLAFGKRQGREFIWNDLLSLETGSLKLANGRVIEKTLYNRRTRQDEPALFVALTFERREVLDSSNIKPMNLIGVDRGENIPAVIALTDPEGCPLSRFKDSLGNPTHILRIGERYKEKQRTIQAKKEVEQRRAGGYSRKYASKAKNLADDMVRNTARDLLYYAVTQDAMLIFENLSRGFGRQGKRTFMAERQYTRMEDWLTAKLAYEGLPSKTYLSKTLAQYTSKTCSNCGFTITSADYDRVLEKLKKTATGWMTTINGKELKVEGQITYYNRYKRQNVVKDLSVELDRLSEESVNNDISSWTKGRSGEALSLLKKRFSHRPVQEKFVCLNCGFETHADEQAALNIARSWLFLRSQEYKKYQTNKTTGNTDKRAFVETWQSFYRKKLKEVWKPAV

SEQ ID NO: 29010 - protein, 979 aa, synthetic construct
  REGION 1..979: note = engineered CasX variant
QEIKRINKIRRRLVKDSNTKKAGKTGPMKTLLVRVMTPDLRERLENLRKKPENIPQPISNTSRANLNKLLTDYTEMKKAILHVYWEEFQKDPVGLMSRVAQPASKKIDQNKLKPEMDEKGNLTTAGFACSQCGQPLFVYKLEQVSEKGKAYTNYFGRCNVAEHEKLILLAQLKPEKDSDEAVTYSLGKFGQRALDFYSIHVTKESTHPVKPLAQIAGNRYASGPVGKALSDACMGTIASFLSKYQDIIIEHQKVVKGNQKRLESLRELAGKENLEYPSVTLPPQPHTKEGVDAYNEVIARVRMWVNLNLWQKLKLSRDDAKPLLRLKGFPSFPLVERQANEVDWWDMVCNVKKLINEKKEDGKVFWQNLAGYKRQEALRPYLSSEEDVRKKGKKFARYQLGDLLLHLEKKHGEDWGKVYDEAWERIDKKVEGLSKHIKLEEERRSEDAQSKAALTDWLRAKASFVIEGLKEADKDEFCRCELKLQKWYGDLRGKPFAIEAENSILDISGFSKQYNCAFIWQKDGVKKLNLYLIINYFKGGKLRFKKIKPEAFEANRFYTVINKKSGEIVPMEVNFNFDDPNLIILPLAFGKRQGREFIWNDLLSLETGSLQLANGRVIEKTLYNRRTRQDEPALFVALTFERREVLDSSNIKPMNLIGVDRGENIPAVIALTDPEGCPLSRFKDSLGNPTHILRIGESYKEKQRTIQAKKEVEQRRAGGYSRKYASKAKNLADDMVRNTARDLLYYAVTQDAMLIFENLSRGFGRQGKRTFMAERQYTRMEDWLTAKLAYEGLPSKTYLSKTLAQYTSKTCSNCGFTITSADYDRVLEKLKKTATGWMTTINGKELKVEGQITYYNRYKRQNVVKDLSVELDRLSEESVNNDISSWTKGRSGEALSLLKKRFSHRPVQEKFVCLNCGFETHADEQAALNIARSWLFLRSQEYKKYQTNKTTGNTDKRAFVETWQSFYRKKLKEVWKPAV

SEQ ID NO: 29011 - protein, 978 aa, synthetic construct
  REGION 1..978: note = engineered CasX variant
QEIKRINKIRRRLVKDSNTKKAGKTGPMKTLLVRVMTPDLRERLENLRKKPENIPQPISNTSRANLNKLLTDYTEMKKAILHVYWEEFQKDPVGLMSRVAQPASKKIDQNKLKPEMDEKGNLTTAGFACSQCGQPLFVYKLEQVSEKGKAYTNYFGRCNVAEHEKLILLAQLKPEKDSDEAVTYSLGKFGQRALDFYSIHVTKESTHPVKPLAQIAGNRYASGPVGKALSDACMGTIASFLSKYQDIIIEHQKVVKGNQKRLESLRELAGKENLEYPSVTLPPQPHTKEGVDAYNEVIARVRMWVNLNLWQKLKLSRDDAKPLLRLKGFPSFPLVERQANEVDWWDMVCNVKKLINEKKEDGKVFWQNLAGYKRQEALRPYLSSEEDRKKGKKFARYQLGDLLLHLEKKHGEDWGKVYDEAWERIDKKVEGLSKHIKLEEERRSEDAQSKAALTDWLRAKASFVIEGLKEADKDEFCRCELKLQKWYGDLRGKPFAIEAENSILDISGFSKQYNCAFIWQKDGVKKLNLYLIINYFKGGKLRFKKIKPEAFEANRFYTVINKKSGEIVPMEVNFNFDDPNLIILPLAFGKRQGREFIWNDLLSLETGSLKLANGRVIEKTLYNRRTRQDEPALFVALTFERREVLDSSNIKPMNLIGVDRGENIPAVIALTDPEGCPLSRFKDSLGNPTHILRIGESYKEKQRTIQAKKEVEQRRAGGYSRKYASKAKNLADDMVRNTARDLLYYAVTQDAMLIFENLSRGFGRQGKRTFMAERQYTRMEDWLTAKLAYEGLPSKTYLSKTLAQYTSKTCSNCGFTITSADYDRMLEKLKKTATGWMTTINGKELKVEGQITYYNRYKRQNVVKDLSVELDRLSEESVNNDISSWTKGRQGEALSLLKKRFSHRPVQEKFVCLNCGFETHADEQAALNIARSWLFLRSQEYKKYQTNKTTGNTDKRAFVETWQSFYRKKLKEVWKPAV

SEQ ID NO: 29012 - protein, 978 aa, synthetic construct
  REGION 1..978: note = engineered CasX variant
QEIKRINKIRRRLVKDSNTKKAGKTGPMKTLLVRVMTPDLRERLENLRKKPENIPQPISNTSRANLNKLLTDYTEMKKAILHVYWEEFQKDPVGLMSRVAQPASKKIDQNKLKPEMDEKGNLTTAGFACSQCGQPLFVYKLEQVSEKGKAYTNYFGRCNVAEHEKLILLAQLKPEKDSDEAVTYSLGKFGQRALDFYSIHVTKESTHPVKPLAQIAGNRYASGPVGKALSDACMGTIASFLSKYQDIIIEHQKVVKGNQKRLESLRELAGKENLEYPSVTLPPQPHTKEGVDAYNEVIARVRMWVNLNLWQKLKLSRDDAKPLLRLKGFPSFPLVERQANEVDWWDMVCNVKKLINEKKEDGKVFWQNLAGYKRQEALRPYLSSEEDRKKGKKFARYQLGDLLLHLEKKHGEDWGKVYDEAWERIDKKVEGLSKHIKLEEERRSEDAQSKAALTDWLRAKASFVIEGLKEADKDEFCRCELKLQKWYGDLRGKPFAIEAENSILDISGFSKQYNCAFIWQKDGVKKLNLYLIINYFKGGKLRFKKIKPEAFEANRFYTVINKKSGEIVPMEVNFNFDDPNLIILPLAFGKRQGREFIWNDLLSLETGSLKLANGRVIEKTLYNRRTRQDEPALFVALTFERREVLDSSNIKPMNLIGVDRGENIPAVIALTDPEGCPLSRFKDSLGNPTHILRIGESYKEKQRTIQAKKEVEQRRAGGYSRKYASKAKNLADDMVRNTARDLLYYAVTQDAMLIFENLSRGFGRQGKRTFMAERQYTRMEDWLTAKLAYEGLPSKTYLSKTLAQYTSKTCSNCGFTITSADYDRMLEKLKKTATGWMTTINGKELKVEGQITYYNRYKRQNVVKDLSVELDRLSEESVNNDISSWTKGRSGEALSLLKKRFSHRPVQEKFVCLNCEFETHADEQAALNIARSWLFLRSQEYKKYQTNKTTGNTDKRAFVETWQSFYRKKLKEVWKPAV

SEQ ID NO: 29013 - protein, 979 aa, synthetic construct
  REGION 1..979: note = engineered CasX variant
QEIKRINKIRRRLVKDSNTKKAGKTGPMKTLLVRVMTPDLRERLENLRKKPENIPQPISNTSRANLNKLLTDYTEMKKAILHVYWEEFQKDPVGLMSRVAQPASKKIDQNKLKPEMDEKGNLTTAGFACSQCGQPLFVYKLEQVSEKGKAYTNYFGRCNVAEHEKLILLAQLKPEKDSDEAVTYSLGKFGQRALDFYSIHVTKESTHPVKPLAQIAGNRYASGPVGKALSDACMGTIASFLSKYQDIIIEHQKVVKGNQKRLESLRELAGKENLEYPSVTLPPQPHTKEGVDAYNEVIARVRMWVNLNLWQKLKLSRDDAKPLLRLKGFPSFPLVERQANEVDWWDMVCNVKKLINEKKEDGKVFWQNLAGYKRQEALRPYLSSEEDRKKGKKFARYQLGDLLLHLEKKHGEDWGKVYDEAWERIDKKVEGLSKHIKLEEERRSEDAQSKAALTDWLRAKASFVIEGLKEADKDEFCRCELKLQKWYGDLRGKPFAIEAENSILDISGFSKQYNCAFIWQKDGVKKLNLYLIINYFKGGKLRFKKIKPEAFEANRFYTVINKKSGEIVPMEVNFNFDDPNLIILPLAFGKRQGREFIWNDLLSLETGSLKLANGRVIEKTLYNRRTRQDEPALFVALTFERREVLDSSNIKPMNLIGVDRGENIPAVIALTDPEGCPLSRFKDSLGNPTHILRIGESYKEKQRTIQAKKEVEQRRAGGYSRKYASKAKNLADDMVRNTARDLLYYAVTQDAMLIFENLSRGFGRQGKRTFMAERQYTRMEDWLTAKLAYEGLPSKTYLSKTLAQYTSKTCSNCGFTITSADYDRMLEKLKKTATGWMTTINGKELKVEGQITYYNRYKRQNVVKDLSVELDRLSEESVNNDISSWTKGRSGEALSLLKKRFSHRPVQEKFVCLNCGFETHADEQAALNIARSWLFLRSQEYKKYQTNKTSTGNTDKRAFVETWQSFYRKKLKEVWKPAV

SEQ ID NO: 29014 - protein, 979 aa, synthetic construct
  REGION 1..979: note = engineered CasX variant
QEIKRINKIRRRLVKDSNTKKAGKTGPMKTLLVRVMTPDLRERLENLRKKPENIPQPISNTSRANLNKLLTDYTEMKKAILHVYWEEFQKDPVGLMSRVAQPASKKIDQNKLKPEMDEKGNLTTAGFACSQCGQPLFVYKLEQVSEKGKAYTNYFGRCNVAEHEKLILLAQLKPEKDSDEAVTYSLGKFGQRALDFYSIHVTKESTHPVKPLAQIAGNRYASGPVGKALSDACMGTIASFLSKYQDIIIEHQKVVKGNQKRLESLRELAGKENLEYPSVTLPPQPHTKEGVDAYNEVIARVRMWVNLNLWQKLKLSRDDAKPLLRLKGFPSFPLVERQANEVDWWDMVCNVKKLINEKKEDGKVFWQNLAGYKRQEALRPYLSSEEDRKKGKKFARYQLGDLLLHLEKKHGEDWGKVYDEAWERIDKKVEGLSKHIKLEEERRSEDAQSKAALTDWLRAKASFVIEGLKEADKDEFCRCELKLQKWYGDLRGKPFAIEAENSILDISGFSKQYNCAFIWQKDGVKKLNLYLIINYFKGGKLRFKKIKPEAFEANRFYTVINKKSGEIVPMEVNFNFDDPNLIILPLAFGKRQGREFIWNDLLSLETGSLKLANGRVIEKTLYNRRTRQDEPALFVALTFERREVLDSSNIKPMNLIGVDRGENIPAVIALTDPEGCPLSRFKDSLGNPTHILRIGESYKEKQRTIQAKKEVEQRRAGGYSRKYASKAKNLADDMVRNTARDLLYYAVTQDAMLIFENLSRGFGRQGKRTFMAERQYTRMEDWLTAKLAYEGLPSKTYLSKTLAQYTSKTCSNCGFTITSADYDRMLEKLKKTATGWMTTINGKELKVEGQITYYNRYKRQNVVKDLSVELDRLSEESVNNDISSWTKGRSGEALSLLKKRFSHRPVQEKFVCLNCGFETHADEQAALNIARSWLFLRSQEYKKYQTNKTTGKNTDKRAFVETWQSFYRKKLKEVWKPAV

SEQ ID NO: 29015 - protein, 978 aa, synthetic construct
  REGION 1..978: note = engineered CasX variant
QEIKRINKIRRRLVKDSNTKKAGKTGPMKTLLVRVMTPDLRERLENLRKKPENIPQPISNTSRANLNKLLTDYTEMKKAILHVYWEEFQKDPVGLMSRVAQPASKKIDQNKLKPEMDEKGNLTTAGFACSQCGQPLFVYKLEQVSEKGKAYTNYFGRCNVAEHEKLILLAQLKPEKDSDEAVTYSLGKFGQRALDFYSIHVTKESTHPVKPLAQIAGNRYASGPVGKALSDACMGTIASFLSKYQDIIIEHQKVVKGNQKRLESLRELAGKENLEYPSVTLPPQPHTKEGVDAYNEVIARVRMWVNLNLWQKLKLSRDDAKPLLRLKKFPSFPLVERQANEVDWWDMVCNVKKLINEKKEDGKVFWQNLAGYKRQEALRPYLSSEEDRKKGKKFARYQLGDLLLHLEKKHGEDWGKVYDEAWERIDKKVEGLSKHIKLEEERRSEDAQSKAALTDWLRAKASFVIEGLKEADKDEFCRCELKLQKWYGDLRGKPFAIEAENSILDISGFSKQYNCAFIWQKDGVKKLNLYLIINYFKGGKLRFKKIKPEAFEANRFYTVINKKSGEIVPMEVNFNFDDPNLIILPLAFGKRQGREFIWNDLLSLETGSLKLANGRVIEKTLYNRRTRQDEPALFVALTFERREVLDSSNIKPMNLIGVDRGENIPAVIALTDPEGCPLSRFKDSLGNPTHILRIGESYKEKQRTIQAKKEVEQRRAGGYSRKYASKAKNLADDMVRNTARDLLYYAVTQDAMLIFENLSRGFGRQGKRTFMAERQYTRMEDWLTAKLAYEGLPSKTYLSKTLAQYTSKTCSNCGFTITSADYDRMLEKLKKTATGWMTTINGKELKVEGQITYYNRYKRQNVVKDLSVELDRLSEESVNNDISSWTKGRSGEALSLLKKRFSHRPVQEKFVCLNCGFETHADEQAALNIARSWLFLRSQEYKKYQTNKTTGNTDKRAFVETWQSFYRKKLKEVWKPAV

SEQ ID NO: 29016 - protein, 978 aa, synthetic construct
  REGION 1..978: note = engineered CasX variant
QEIKRINKIRRRLVKDSNTKKAGKTGPMKTLLVRVMTPDLRERLENLRKKPENIPQPISNTSRANLNKLLTDYTEMKKAILHVYWEEFQKDPVGLMSRVAQPASKKIDQNKLKPEMDEKGNLTTAGFACSQCGQPLFVYKLEQVSEKGKAYTNYFGRCNVAEHEKLILLAQLKPEKDSDEAVTYSLGKFGQRALDFYSIHVTKESTHPVKPLAQIAGNRYASGPVGKALSDACMGTIASFLSKYQDIIIEHQKVVKGNQKRLESLRELAGKENLEYPSVTLPPQPHTKEGVDAYNEVIARVRMWVNLNLWQKLKLSRDDAKPLLRLKGFPSFPLVERQANEVDWWDMVCNVKKLINEKKEDGKVFWQNLAGYKRQEALRPYLSSEEDRKKGKKFARYQLGDLLLHLEKKHGEDWGKVYDEAWERIDKKVEGLSKHIKLEEERRSEDAQSKAALTDWLRAKASFVIEGLKEADKDEFCRCELKLQKWYGDLRGKPFAIEAENSILDISGFSKQYNCAFIWQKDGVKKLNLYLIINYFKGGKLRFKKIKPEAFEANRFYTVINKKSGEIVPMEVNFNFDDPNLIILPLAFGKRQGREFIWNDLLSLETGSLKLANGRVIEKTLYNRRTRQDEPALFVALTFERREVLDSSNIKPMNLIGVDRGENIPAVIALTDPEGCPLSRFKDSLGNPTHILRIGERYKEKQRTIQAKKEVEQRRAGGYSRKYASKAKNLADDMVRNTARDLLYYAVTQDAMLIFENLSRGFGRQGKRTFMAERQYTRMEDWLTAKLAYEGLPSKTYLSKTLAQYTSKTCSNCGFTITSADYDRMLEKLKKTATGWMTTINGKELKVEGQITYYNRYKRQNVVKDLSVELDRLSEESVNNDISSWTKGRSGEALSLLKKRFSHRPVQEKFVCLNCGFETHADEQAALNIARSWLFLRSQEYKKYQTNKTTGNTDKRAFVETWQSFYRKKLKEVWKPAV

SEQ ID NO: 29017 - protein, 978 aa, synthetic construct
  REGION 1..978: note = engineered CasX variant
QEIKRINKIRRRLVKDSNTKKAGKTGPMKTLLVRVMTPDLRERLENLRKKPENIPQPISNTSRANLNKLLTDYTEMKKAILHVYWEEFQKDPVGLMSRVAQPASKKIDQNKLKPEMDEKGNLTTAGFACSQCGQPLFVYKLEQVSEKGKAYTNYFGRCNVAEHEKLILLAQLKPEKDSDEAVTYSLGKFGQRALDFYSIHVTKESTHPVKPLAQIAGNRYASGPVGKALSDACMGTIASFLSKYQDIIIEHQKVVKGNQKRLESLRELAGKENLEYPSVTLPPQPHTKEGVDAYNEVIARVRMWVNLNLWQKLKLSRDDAKPLLRLKGFPSFPLVERQANEVDWWDMVCNVKKLINEKKEDGKVFWQNLAGYKRQEALRPYLSSEEDRKKGKKFARYQLGDLLLHLEKKHGEDWGKVYDEAWERIDKKVEGLSKHIKLEEERRSEDAQSKAALTDWLRAKASFVIEGLKEADKDEFCRCELKLQKWYGDLRGKPFAIEAENSILDISGFSKQYNCAFIWQKDGVKKLNLYLIINYFKGGKLRFKKIKPEAFEANRFYTVINKKSGEIVPMEVNFNFDDPNLIILPLAFGKRQGREFIWNDLLSLETGSLQLANGRVIEKTLYNRRTRQDEPALFVALTFERREVLDSSNIKPMNLIGVDRGENIPAVIALTDPEGCPLSRFKDSLGNPTHILRIGESYKEKQRTIQAKKEVEQRRAGGYSRKYASKAKNLADDMVRNTARDLLYYAVTQDAMLIFENLSRGFGRQGKRTFMAERQYTRMEDWLTAKLAYEGLPSKTYLSKTLAQYTSKTCSNCGFTITSADYDRMLEKLKKTATGWMTTINGKELKVEGQITYYNRYKRQNVVKDLSVELDRLSEESVNNDISSWTKGRSGEALSLLKKRFSHRPVQEKFVCLNCGFETHADEQAALNIARSWLFLRSQEYKKYQTNKTTGNTDKRAFVETWQSFYRKKLKEVWKPAV

SEQ ID NO: 29018 - protein, 978 aa, synthetic construct
  REGION 1..978: note = engineered CasX variant
QEIKRINKIRRRLVKDSNTKKAGKTGPMKTLLVRVMTPDLRERLENLRKKPENIPQPISNTSRANLNKLLTDYTEMKKAILHVYWEEFQKDPVGLMSRVAQPASKKIDQNKLKPEMDEKGNLTTAGFACSQCGQPLFVYKLEQVSEKGKAYTNYFGRCNVAEHEKLILLAQLKPEKDSDEAVTYSLGKFGQRALDFYSIHVTKESTHPVKPLAQIAGNRYASGPVGKALSDACMGTIASFLSKYQDIIIEHQKVVKGNQKRLESLRELAGKENLEYPSVTLPPQPHTKEGVDAYNEVIARVRMWVNLNLWQKLKLSRDDAKPLLRLKGFPSFPLVERQANEVDWWDMVCNVKKLINEKKEDGKVFWQNLAGYKRQEALRPYLSSEEDRKKGKKFARYQLGDLLLHLEKKHGEDWGKVYDEAWERIDKKVEGLSKHIKLEEERRSEDAQSKAALTDWLRAKASFVIEGLKEADKDEFCRCELKLQKWYGDLRGKPFAIEAENSILDISGFSKQYNCAFIWQKDGVKKLNLYLIINYFKGGKLRFKKIKPEAFEANRFYTVINKKSGEIVPMEVNFNFDDPNLIILPLAFGKRQGREFIWNDLLSLETGSLKLANGRVIEKTLYNRRTRQDEPALFVALTFERREVLDSSNIKPMNLIGVDRGENIPAVIALTDPEGCPLSRFKDSLGNPTHILRIGESYKEKQRTIQAKKEVEQRRAGGYSRKYASKAKNLADDMVRNTARDLLYYAVTQDAMLIFENLSRGFGRQGKRTFMAERQYTRMEDWLTAKLAYEGLPSKTYLSKTLAQYTSKTCSNCGFTITSADYDRVLEKLKKTATGWMTTINGKELKVEGQITYYNRYKRQNVVKDLSVELDRLSEESVNNDISSWTKGRQGEALSLLKKRFSHRPVQEKFVCLNCEFETHADEQAALNIARSWLFLRSQEYKKYQTNKTTGNTDKRAFVETWQSFYRKKLKEVWKPAV

SEQ ID NO: 29019 - protein, 979 aa, synthetic construct
  REGION 1..979: note = engineered CasX variant
QEIKRINKIRRRLVKDSNTKKAGKTGPMKTLLVRVMTPDLRERLENLRKKPENIPQPISNTSRANLNKLLTDYTEMKKAILHVYWEEFQKDPVGLMSRVAQPASKKIDQNKLKPEMDEKGNLTTAGFACSQCGQPLFVYKLEQVSEKGKAYTNYFGRCNVAEHEKLILLAQLKPEKDSDEAVTYSLGKFGQRALDFYSIHVTKESTHPVKPLAQIAGNRYASGPVGKALSDACMGTIASFLSKYQDIIIEHQKVVKGNQKRLESLRELAGKENLEYPSVTLPPQPHTKEGVDAYNEVIARVRMWVNLNLWQKLKLSRDDAKPLLRLKGFPSFPLVERQANEVDWWDMVCNVKKLINEKKEDGKVFWQNLAGYKRQEALRPYLSSEEDRKKGKKFARYQLGDLLLHLEKKHGEDWGKVYDEAWERIDKKVEGLSKHIKLEEERRSEDAQSKAALTDWLRAKASFVIEGLKEADKDEFCRCELKLQKWYGDLRGKPFAIEAENSILDISGFSKQYNCAFIWQKDGVKKLNLYLIINYFKGGKLRFKKIKPEAFEANRFYTVINKKSGEIVPMEVNFNFDDPNLIILPLAFGKRQGREFIWNDLLSLETGSLKLANGRVIEKTLYNRRTRQDEPALFVALTFERREVLDSSNIKPMNLIGVDRGENIPAVIALTDPEGCPLSRFKDSLGNPTHILRIGESYKEKQRTIQAKKEVEQRRAGGYSRKYASKAKNLADDMVRNTARDLLYYAVTQDAMLIFENLSRGFGRQGKRTFMAERQYTRMEDWLTAKLAYEGLPSKTYLSKTLAQYTSKTCSNCGFTITSADYDRVLEKLKKTATGWMTTINGKELKVEGQITYYNRYKRQNVVKDLSVELDRLSEESVNNDISSWTKGRQGEALSLLKKRFSHRPVQEKFVCLNCGFETHADEQAALNIARSWLFLRSQEYKKYQTNKTSTGNTDKRAFVETWQSFYRKKLKEVWKPAV

SEQ ID NO: 29020 - protein, 979 aa, synthetic construct
  REGION 1..979: note = engineered CasX variant
QEIKRINKIRRRLVKDSNTKKAGKTGPMKTLLVRVMTPDLRERLENLRKKPENIPQPISNTSRANLNKLLTDYTEMKKAILHVYWEEFQKDPVGLMSRVAQPASKKIDQNKLKPEMDEKGNLTTAGFACSQCGQPLFVYKLEQVSEKGKAYTNYFGRCNVAEHEKLILLAQLKPEKDSDEAVTYSLGKFGQRALDFYSIHVTKESTHPVKPLAQIAGNRYASGPVGKALSDACMGTIASFLSKYQDIIIEHQKVVKGNQKRLESLRELAGKENLEYPSVTLPPQPHTKEGVDAYNEVIARVRMWVNLNLWQKLKLSRDDAKPLLRLKGFPSFPLVERQANEVDWWDMVCNVKKLINEKKEDGKVFWQNLAGYKRQEALRPYLSSEEDRKKGKKFARYQLGDLLLHLEKKHGEDWGKVYDEAWERIDKKVEGLSKHIKLEEERRSEDAQSKAALTDWLRAKASFVIEGLKEADKDEFCRCELKLQKWYGDLRGKPFAIEAENSILDISGFSKQYNCAFIWQKDGVKKLNLYLIINYFKGGKLRFKKIKPEAFEANRFYTVINKKSGEIVPMEVNFNFDDPNLIILPLAFGKRQGREFIWNDLLSLETGSLKLANGRVIEKTLYNRRTRQDEPALFVALTFERREVLDSSNIKPMNLIGVDRGENIPAVIALTDPEGCPLSRFKDSLGNPTHILRIGESYKEKQRTIQAKKEVEQRRAGGYSRKYASKAKNLADDMVRNTARDLLYYAVTQDAMLIFENLSRGFGRQGKRTFMAERQYTRMEDWLTAKLAYEGLPSKTYLSKTLAQYTSKTCSNCGFTITSADYDRVLEKLKKTATGWMTTINGKELKVEGQITYYNRYKRQNVVKDLSVELDRLSEESVNNDISSWTKGRQGEALSLLKKRFSHRPVQEKFVCLNCGFETHADEQAALNIARSWLFLRSQEYKKYQTNKTTGKNTDKRAFVETWQSFYRKKLKEVWKPAV

SEQ ID NO: 29021 - protein, 978 aa, synthetic construct
  REGION 1..978: note = engineered CasX variant
QEIKRINKIRRRLVKDSNTKKAGKTGPMKTLLVRVMTPDLRERLENLRKKPENIPQPISNTSRANLNKLLTDYTEMKKAILHVYWEEFQKDPVGLMSRVAQPASKKIDQNKLKPEMDEKGNLTTAGFACSQCGQPLFVYKLEQVSEKGKAYTNYFGRCNVAEHEKLILLAQLKPEKDSDEAVTYSLGKFGQRALDFYSIHVTKESTHPVKPLAQIAGNRYASGPVGKALSDACMGTIASFLSKYQDIIIEHQKVVKGNQKRLESLRELAGKENLEYPSVTLPPQPHTKEGVDAYNEVIARVRMWVNLNLWQKLKLSRDDAKPLLRLKKFPSFPLVERQANEVDWWDMVCNVKKLINEKKEDGKVFWQNLAGYKRQEALRPYLSSEEDRKKGKKFARYQLGDLLLHLEKKHGEDWGKVYDEAWERIDKKVEGLSKHIKLEEERRSEDAQSKAALTDWLRAKASFVIEGLKEADKDEFCRCELKLQKWYGDLRGKPFAIEAENSILDISGFSKQYNCAFIWQKDGVKKLNLYLIINYFKGGKLRFKKIKPEAFEANRFYTVINKKSGEIVPMEVNFNFDDPNLIILPLAFGKRQGREFIWNDLLSLETGSLKLANGRVIEKTLYNRRTRQDEPALFVALTFERREVLDSSNIKPMNLIGVDRGENIPAVIALTDPEGCPLSRFKDSLGNPTHILRIGESYKEKQRTIQAKKEVEQRRAGGYSRKYASKAKNLADDMVRNTARDLLYYAVTQDAMLIFENLSRGFGRQGKRTFMAERQYTRMEDWLTAKLAYEGLPSKTYLSKTLAQYTSKTCSNCGFTITSADYDRVLEKLKKTATGWMTTINGKELKVEGQITYYNRYKRQNVVKDLSVELDRLSEESVNNDISSWTKGRQGEALSLLKKRFSHRPVQEKFVCLNCGFETHADEQAALNIARSWLFLRSQEYKKYQTNKTTGNTDKRAFVETWQSFYRKKLKEVWKPAV

SEQ ID NO: 29022 - protein, 978 aa, synthetic construct
  REGION 1..978: note = engineered CasX variant
QEIKRINKIRRRLVKDSNTKKAGKTGPMKTLLVRVMTPDLRERLENLRKKPENIPQPISNTSRANLNKLLTDYTEMKKAILHVYWEEFQKDPVGLMSRVAQPASKKIDQNKLKPEMDEKGNLTTAGFACSQCGQPLFVYKLEQVSEKGKAYTNYFGRCNVAEHEKLILLAQLKPEKDSDEAVTYSLGKFGQRALDFYSIHVTKESTHPVKPLAQIAGNRYASGPVGKALSDACMGTIASFLSKYQDIIIEHQKVVKGNQKRLESLRELAGKENLEYPSVTLPPQPHTKEGVDAYNEVIARVRMWVNLNLWQKLKLSRDDAKPLLRLKGFPSFPLVERQANEVDWWDMVCNVKKLINEKKEDGKVFWQNLAGYKRQEALRPYLSSEEDRKKGKKFARYQLGDLLLHLEKKHGEDWGKVYDEAWERIDKKVEGLSKHIKLEEERRSEDAQSKAALTDWLRAKASFVIEGLKEADKDEFCRCELKLQKWYGDLRGKPFAIEAENSILDISGFSKQYNCAFIWQKDGVKKLNLYLIINYFKGGKLRFKKIKPEAFEANRFYTVINKKSGEIVPMEVNFNFDDPNLIILPLAFGKRQGREFIWNDLLSLETGSLKLANGRVIEKTLYNRRTRQDEPALFVALTFERREVLDSSNIKPMNLIGVDRGENIPAVIALTDPEGCPLSRFKDSLGNPTHILRIGERYKEKQRTIQAKKEVEQRRAGGYSRKYASKAKNLADDMVRNTARDLLYYAVTQDAMLIFENLSRGFGRQGKRTFMAERQYTRMEDWLTAKLAYEGLPSKTYLSKTLAQYTSKTCSNCGFTITSADYDRVLEKLKKTATGWMTTINGKELKVEGQITYYNRYKRQNVVKDLSVELDRLSEESVNNDISSWTKGRQGEALSLLKKRFSHRPVQEKFVCLNCGFETHADEQAALNIARSWLFLRSQEYKKYQTNKTTGNTDKRAFVETWQSFYRKKLKEVWKPAV

SEQ ID NO: 29023 - protein, 978 aa, synthetic construct
  REGION 1..978: note = engineered CasX variant
QEIKRINKIRRRLVKDSNTKKAGKTGPMKTLLVRVMTPDLRERLENLRKKPENIPQPISNTSRANLNKLLTDYTEMKKAILHVYWEEFQKDPVGLMSRVAQPASKKIDQNKLKPEMDEKGNLTTAGFACSQCGQPLFVYKLEQVSEKGKAYTNYFGRCNVAEHEKLILLAQLKPEKDSDEAVTYSLGKFGQRALDFYSIHVTKESTHPVKPLAQIAGNRYASGPVGKALSDACMGTIASFLSKYQDIIIEHQKVVKGNQKRLESLRELAGKENLEYPSVTLPPQPHTKEGVDAYNEVIARVRMWVNLNLWQKLKLSRDDAKPLLRLKGFPSFPLVERQANEVDWWDMVCNVKKLINEKKEDGKVFWQNLAGYKRQEALRPYLSSEEDRKKGKKFARYQLGDLLLHLEKKHGEDWGKVYDEAWERIDKKVEGLSKHIKLEEERRSEDAQSKAALTDWLRAKASFVIEGLKEADKDEFCRCELKLQKWYGDLRGKPFAIEAENSILDISGFSKQYNCAFIWQKDGVKKLNLYLIINYFKGGKLRFKKIKPEAFEANRFYTVINKKSGEIVPMEVNFNFDDPNLIILPLAFGKRQGREFIWNDLLSLETGSLQLANGRVIEKTLYNRRTRQDEPALFVALTFERREVLDSSNIKPMNLIGVDRGENIPAVIALTDPEGCPLSRFKDSLGNPTHILRIGESYKEKQRTIQAKKEVEQRRAGGYSRKYASKAKNLADDMVRNTARDLLYYAVTQDAMLIFENLSRGFGRQGKRTFMAERQYTRMEDWLTAKLAYEGLPSKTYLSKTLAQYTSKTCSNCGFTITSADYDRVLEKLKKTATGWMTTINGKELKVEGQITYYNRYKRQNVVKDLSVELDRLSEESVNNDISSWTKGRQGEALSLLKKRFSHRPVQEKFVCLNCGFETHADEQAALNIARSWLFLRSQEYKKYQTNKTTGNTDKRAFVETWQSFYRKKLKEVWKPAV

SEQ ID NO: 29024 - protein, 979 aa, synthetic construct
  REGION 1..979: note = engineered CasX variant
QEIKRINKIRRRLVKDSNTKKAGKTGPMKTLLVRVMTPDLRERLENLRKKPENIPQPISNTSRANLNKLLTDYTEMKKAILHVYWEEFQKDPVGLMSRVAQPASKKIDQNKLKPEMDEKGNLTTAGFACSQCGQPLFVYKLEQVSEKGKAYTNYFGRCNVAEHEKLILLAQLKPEKDSDEAVTYSLGKFGQRALDFYSIHVTKESTHPVKPLAQIAGNRYASGPVGKALSDACMGTIASFLSKYQDIIIEHQKVVKGNQKRLESLRELAGKENLEYPSVTLPPQPHTKEGVDAYNEVIARVRMWVNLNLWQKLKLSRDDAKPLLRLKGFPSFPLVERQANEVDWWDMVCNVKKLINEKKEDGKVFWQNLAGYKRQEALRPYLSSEEDRKKGKKFARYQLGDLLLHLEKKHGEDWGKVYDEAWERIDKKVEGLSKHIKLEEERRSEDAQSKAALTDWLRAKASFVIEGLKEADKDEFCRCELKLQKWYGDLRGKPFAIEAENSILDISGFSKQYNCAFIWQKDGVKKLNLYLIINYFKGGKLRFKKIKPEAFEANRFYTVINKKSGEIVPMEVNFNFDDPNLIILPLAFGKRQGREFIWNDLLSLETGSLKLANGRVIEKTLYNRRTRQDEPALFVALTFERREVLDSSNIKPMNLIGVDRGENIPAVIALTDPEGCPLSRFKDSLGNPTHILRIGESYKEKQRTIQAKKEVEQRRAGGYSRKYASKAKNLADDMVRNTARDLLYYAVTQDAMLIFENLSRGFGRQGKRTFMAERQYTRMEDWLTAKLAYEGLPSKTYLSKTLAQYTSKTCSNCGFTITSADYDRVLEKLKKTATGWMTTINGKELKVEGQITYYNRYKRQNVVKDLSVELDRLSEESVNNDISSWTKGRSGEALSLLKKRFSHRPVQEKFVCLNCEFETHADEQAALNIARSWLFLRSQEYKKYQTNKTSTGNTDKRAFVETWQSFYRKKLKEVWKPAV

SEQ ID NO: 29025 - protein, 979 aa, synthetic construct
  REGION 1..979: note = engineered CasX variant
QEIKRINKIRRRLVKDSNTKKAGKTGPMKTLLVRVMTPDLRERLENLRKKPENIPQPISNTSRANLNKLLTDYTEMKKAILHVYWEEFQKDPVGLMSRVAQPASKKIDQNKLKPEMDEKGNLTTAGFACSQCGQPLFVYKLEQVSEKGKAYTNYFGRCNVAEHEKLILLAQLKPEKDSDEAVTYSLGKFGQRALDFYSIHVTKESTHPVKPLAQIAGNRYASGPVGKALSDACMGTIASFLSKYQDIIIEHQKVVKGNQKRLESLRELAGKENLEYPSVTLPPQPHTKEGVDAYNEVIARVRMWVNLNLWQKLKLSRDDAKPLLRLKGFPSFPLVERQANEVDWWDMVCNVKKLINEKKEDGKVFWQNLAGYKRQEALRPYLSSEEDRKKGKKFARYQLGDLLLHLEKKHGEDWGKVYDEAWERIDKKVEGLSKHIKLEEERRSEDAQSKAALTDWLRAKASFVIEGLKEADKDEFCRCELKLQKWYGDLRGKPFAIEAENSILDISGFSKQYNCAFIWQKDGVKKLNLYLIINYFKGGKLRFKKIKPEAFEANRFYTVINKKSGEIVPMEVNFNFDDPNLIILPLAFGKRQGREFIWNDLLSLETGSLKLANGRVIEKTLYNRRTRQDEPALFVALTFERREVLDSSNIKPMNLIGVDRGENIPAVIALTDPEGCPLSRFKDSLGNPTHILRIGESYKEKQRTIQAKKEVEQRRAGGYSRKYASKAKNLADDMVRNTARDLLYYAVTQDAMLIFENLSRGFGRQGKRTFMAERQYTRMEDWLTAKLAYEGLPSKTYLSKTLAQYTSKTCSNCGFTITSADYDRVLEKLKKTATGWMTTINGKELKVEGQITYYNRYKRQNVVKDLSVELDRLSEESVNNDISSWTKGRSGEALSLLKKRFSHRPVQEKFVCLNCEFETHADEQAALNIARSWLFLRSQEYKKYQTNKTTGKNTDKRAFVETWQSFYRKKLKEVWKPAV

SEQ ID NO: 29026 - protein, 978 aa, synthetic construct
  REGION 1..978: note = engineered CasX variant
QEIKRINKIRRRLVKDSNTKKAGKTGPMKTLLVRVMTPDLRERLENLRKKPENIPQPISNTSRANLNKLLTDYTEMKKAILHVYWEEFQKDPVGLMSRVAQPASKKIDQNKLKPEMDEKGNLTTAGFACSQCGQPLFVYKLEQVSEKGKAYTNYFGRCNVAEHEKLILLAQLKPEKDSDEAVTYSLGKFGQRALDFYSIHVTKESTHPVKPLAQIAGNRYASGPVGKALSDACMGTIASFLSKYQDIIIEHQKVVKGNQKRLESLRELAGKENLEYPSVTLPPQPHTKEGVDAYNEVIARVRMWVNLNLWQKLKLSRDDAKPLLRLKKFPSFPLVERQANEVDWWDMVCNVKKLINEKKEDGKVFWQNLAGYKRQEALRPYLSSEEDRKKGKKFARYQLGDLLLHLEKKHGEDWGKVYDEAWERIDKKVEGLSKHIKLEEERRSEDAQSKAALTDWLRAKASFVIEGLKEADKDEFCRCELKLQKWYGDLRGKPFAIEAENSILDISGFSKQYNCAFIWQKDGVKKLNLYLIINYFKGGKLRFKKIKPEAFEANRFYTVINKKSGEIVPMEVNFNFDDPNLIILPLAFGKRQGREFIWNDLLSLETGSLKLANGRVIEKTLYNRRTRQDEPALFVALTFERREVLDSSNIKPMNLIGVDRGENIPAVIALTDPEGCPLSRFKDSLGNPTHILRIGESYKEKQRTIQAKKEVEQRRAGGYSRKYASKAKNLADDMVRNTARDLLYYAVTQDAMLIFENLSRGFGRQGKRTFMAERQYTRMEDWLTAKLAYEGLPSKTYLSKTLAQYTSKTCSNCGFTITSADYDRVLEKLKKTATGWMTTINGKELKVEGQITYYNRYKRQNVVKDLSVELDRLSEESVNNDISSWTKGRSGEALSLLKKRFSHRPVQEKFVCLNCEFETHADEQAALNIARSWLFLRSQEYKKYQTNKTTGNTDKRAFVETWQSFYRKKLKEVWKPAV

SEQ ID NO: 29027 - protein, 978 aa, synthetic construct
  REGION 1..978: note = engineered CasX variant
QEIKRINKIRRRLVKDSNTKKAGKTGPMKTLLVRVMTPDLRERLENLRKKPENIPQPISNTSRANLNKLLTDYTEMKKAILHVYWEEFQKDPVGLMSRVAQPASKKIDQNKLKPEMDEKGNLTTAGFACSQCGQPLFVYKLEQVSEKGKAYTNYFGRCNVAEHEKLILLAQLKPEKDSDEAVTYSLGKFGQRALDFYSIHVTKESTHPVKPLAQIAGNRYASGPVGKALSDACMGTIASFLSKYQDIIIEHQKVVKGNQKRLESLRELAGKENLEYPSVTLPPQPHTKEGVDAYNEVIARVRMWVNLNLWQKLKLSRDDAKPLLRLKGFPSFPLVERQANEVDWWDMVCNVKKLINEKKEDGKVFWQNLAGYKRQEALRPYLSSEEDRKKGKKFARYQLGDLLLHLEKKHGEDWGKVYDEAWERIDKKVEGLSKHIKLEEERRSEDAQSKAALTDWLRAKASFVIEGLKEADKDEFCRCELKLQKWYGDLRGKPFAIEAENSILDISGFSKQYNCAFIWQKDGVKKLNLYLIINYFKGGKLRFKKIKPEAFEANRFYTVINKKSGEIVPMEVNFNFDDPNLIILPLAFGKRQGREFIWNDLLSLETGSLKLANGRVIEKTLYNRRTRQDEPALFVALTFERREVLDSSNIKPMNLIGVDRGENIPAVIALTDPEGCPLSRFKDSLGNPTHILRIGERYKEKQRTIQAKKEVEQRRAGGYSRKYASKAKNLADDMVRNTARDLLYYAVTQDAMLIFENLSRGFGRQGKRTFMAERQYTRMEDWLTAKLAYEGLPSKTYLSKTLAQYTSKTCSNCGFTITSADYDRVLEKLKKTATGWMTTINGKELKVEGQITYYNRYKRQNVVKDLSVELDRLSEESVNNDISSWTKGRSGEALSLLKKRFSHRPVQEKFVCLNCEFETHADEQAALNIARSWLFLRSQEYKKYQTNKTTGNTDKRAFVETWQSFYRKKLKEVWKPAV

SEQ ID NO: 29028 - protein, 978 aa, synthetic construct
  REGION 1..978: note = engineered CasX variant
QEIKRINKIRRRLVKDSNTKKAGKTGPMKTLLVRVMTPDLRERLENLRKKPENIPQPISNTSRANLNKLLTDYTEMKKAILHVYWEEFQKDPVGLMSRVAQPASKKIDQNKLKPEMDEKGNLTTAGFACSQCGQPLFVYKLEQVSEKGKAYTNYFGRCNVAEHEKLILLAQLKPEKDSDEAVTYSLGKFGQRALDFYSIHVTKESTHPVKPLAQIAGNRYASGPVGKALSDACMGTIASFLSKYQDIIIEHQKVVKGNQKRLESLRELAGKENLEYPSVTLPPQPHTKEGVDAYNEVIARVRMWVNLNLWQKLKLSRDDAKPLLRLKGFPSFPLVERQANEVDWWDMVCNVKKLINEKKEDGKVFWQNLAGYKRQEALRPYLSSEEDRKKGKKFARYQLGDLLLHLEKKHGEDWGKVYDEAWERIDKKVEGLSKHIKLEEERRSEDAQSKAALTDWLRAKASFVIEGLKEADKDEFCRCELKLQKWYGDLRGKPFAIEAENSILDISGFSKQYNCAFIWQKDGVKKLNLYLIINYFKGGKLRFKKIKPEAFEANRFYTVINKKSGEIVPMEVNFNFDDPNLIILPLAFGKRQGREFIWNDLLSLETGSLQLANGRVIEKTLYNRRTRQDEPALFVALTFERREVLDSSNIKPMNLIGVDRGENIPAVIALTDPEGCPLSRFKDSLGNPTHILRIGESYKEKQRTIQAKKEVEQRRAGGYSRKYASKAKNLADDMVRNTARDLLYYAVTQDAMLIFENLSRGFGRQGKRTFMAERQYTRMEDWLTAKLAYEGLPSKTYLSKTLAQYTSKTCSNCGFTITSADYDRVLEKLKKTATGWMTTINGKELKVEGQITYYNRYKRQNVVKDLSVELDRLSEESVNNDISSWTKGRSGEALSLLKKRFSHRPVQEKFVCLNCEFETHADEQAALNIARSWLFLRSQEYKKYQTNKTTGNTDKRAFVETWQSFYRKKLKEVWKPAV

SEQ ID NO: 29029 - protein, 980 aa, synthetic construct
  REGION 1..980: note = engineered CasX variant
QEIKRINKIRRRLVKDSNTKKAGKTGPMKTLLVRVMTPDLRERLENLRKKPENIPQPISNTSRANLNKLLTDYTEMKKAILHVYWEEFQKDPVGLMSRVAQPASKKIDQNKLKPEMDEKGNLTTAGFACSQCGQPLFVYKLEQVSEKGKAYTNYFGRCNVAEHEKLILLAQLKPEKDSDEAVTYSLGKFGQRALDFYSIHVTKESTHPVKPLAQIAGNRYASGPVGKALSDACMGTIASFLSKYQDIIIEHQKVVKGNQKRLESLRELAGKENLEYPSVTLPPQPHTKEGVDAYNEVIARVRMWVNLNLWQKLKLSRDDAKPLLRLKGFPSFPLVERQANEVDWWDMVCNVKKLINEKKEDGKVFWQNLAGYKRQEALRPYLSSEEDRKKGKKFARYQLGDLLLHLEKKHGEDWGKVYDEAWERIDKKVEGLSKHIKLEEERRSEDAQSKAALTDWLRAKASFVIEGLKEADKDEFCRCELKLQKWYGDLRGKPFAIEAENSILDISGFSKQYNCAFIWQKDGVKKLNLYLIINYFKGGKLRFKKIKPEAFEANRFYTVINKKSGEIVPMEVNFNFDDPNLIILPLAFGKRQGREFIWNDLLSLETGSLKLANGRVIEKTLYNRRTRQDEPALFVALTFERREVLDSSNIKPMNLIGVDRGENIPAVIALTDPEGCPLSRFKDSLGNPTHILRIGESYKEKQRTIQAKKEVEQRRAGGYSRKYASKAKNLADDMVRNTARDLLYYAVTQDAMLIFENLSRGFGRQGKRTFMAERQYTRMEDWLTAKLAYEGLPSKTYLSKTLAQYTSKTCSNCGFTITSADYDRVLEKLKKTATGWMTTINGKELKVEGQITYYNRYKRQNVVKDLSVELDRLSEESVNNDISSWTKGRSGEALSLLKKRFSHRPVQEKFVCLNCGFETHADEQAALNIARSWLFLRSQEYKKYQTNKTSTGKNTDKRAFVETWQSFYRKKLKEVWKPAV

SEQ ID NO: 29030 - protein, 979 aa, synthetic construct
  REGION 1..979: note = engineered CasX variant
QEIKRINKIRRRLVKDSNTKKAGKTGPMKTLLVRVMTPDLRERLENLRKKPENIPQPISNTSRANLNKLLTDYTEMKKAILHVYWEEFQKDPVGLMSRVAQPASKKIDQNKLKPEMDEKGNLTTAGFACSQCGQPLFVYKLEQVSEKGKAYTNYFGRCNVAEHEKLILLAQLKPEKDSDEAVTYSLGKFGQRALDFYSIHVTKESTHPVKPLAQIAGNRYASGPVGKALSDACMGTIASFLSKYQDIIIEHQKVVKGNQKRLESLRELAGKENLEYPSVTLPPQPHTKEGVDAYNEVIARVRMWVNLNLWQKLKLSRDDAKPLLRLKKFPSFPLVERQANEVDWWDMVCNVKKLINEKKEDGKVFWQNLAGYKRQEALRPYLSSEEDRKKGKKFARYQLGDLLLHLEKKHGEDWGKVYDEAWERIDKKVEGLSKHIKLEEERRSEDAQSKAALTDWLRAKASFVIEGLKEADKDEFCRCELKLQKWYGDLRGKPFAIEAENSILDISGFSKQYNCAFIWQKDGVKKLNLYLIINYFKGGKLRFKKIKPEAFEANRFYTVINKKSGEIVPMEVNFNFDDPNLIILPLAFGKRQGREFIWNDLLSLETGSLKLANGRVIEKTLYNRRTRQDEPALFVALTFERREVLDSSNIKPMNLIGVDRGENIPAVIALTDPEGCPLSRFKDSLGNPTHILRIGESYKEKQRTIQAKKEVEQRRAGGYSRKYASKAKNLADDMVRNTARDLLYYAVTQDAMLIFENLSRGFGRQGKRTFMAERQYTRMEDWLTAKLAYEGLPSKTYLSKTLAQYTSKTCSNCGFTITSADYDRVLEKLKKTATGWMTTINGKELKVEGQITYYNRYKRQNVVKDLSVELDRLSEESVNNDISSWTKGRSGEALSLLKKRFSHRPVQEKFVCLNCGFETHADEQAALNIARSWLFLRSQEYKKYQTNKTSTGNTDKRAFVETWQSFYRKKLKEVWKPAV

SEQ ID NO: 29031 - protein, 979 aa, synthetic construct
  REGION 1..979: note = engineered CasX variant
QEIKRINKIRRRLVKDSNTKKAGKTGPMKTLLVRVMTPDLRERLENLRKKPENIPQPISNTSRANLNKLLTDYTEMKKAILHVYWEEFQKDPVGLMSRVAQPASKKIDQNKLKPEMDEKGNLTTAGFACSQCGQPLFVYKLEQVSEKGKAYTNYFGRCNVAEHEKLILLAQLKPEKDSDEAVTYSLGKFGQRALDFYSIHVTKESTHPVKPLAQIAGNRYASGPVGKALSDACMGTIASFLSKYQDIIIEHQKVVKGNQKRLESLRELAGKENLEYPSVTLPPQPHTKEGVDAYNEVIARVRMWVNLNLWQKLKLSRDDAKPLLRLKGFPSFPLVERQANEVDWWDMVCNVKKLINEKKEDGKVFWQNLAGYKRQEALRPYLSSEEDRKKGKKFARYQLGDLLLHLEKKHGEDWGKVYDEAWERIDKKVEGLSKHIKLEEERRSEDAQSKAALTDWLRAKASFVIEGLKEADKDEFCRCELKLQKWYGDLRGKPFAIEAENSILDISGFSKQYNCAFIWQKDGVKKLNLYLIINYFKGGKLRFKKIKPEAFEANRFYTVINKKSGEIVPMEVNFNFDDPNLIILPLAFGKRQGREFIWNDLLSLETGSLKLANGRVIEKTLYNRRTRQDEPALFVALTFERREVLDSSNIKPMNLIGVDRGENIPAVIALTDPEGCPLSRFKDSLGNPTHILRIGERYKEKQRTIQAKKEVEQRRAGGYSRKYASKAKNLADDMVRNTARDLLYYAVTQDAMLIFENLSRGFGRQGKRTFMAERQYTRMEDWLTAKLAYEGLPSKTYLSKTLAQYTSKTCSNCGFTITSADYDRVLEKLKKTATGWMTTINGKELKVEGQITYYNRYKRQNVVKDLSVELDRLSEESVNNDISSWTKGRSGEALSLLKKRFSHRPVQEKFVCLNCGFETHADEQAALNIARSWLFLRSQEYKKYQTNKTSTGNTDKRAFVETWQSFYRKKLKEVWKPAV

SEQ ID NO: 29032 - protein, 979 aa, synthetic construct
  REGION 1..979: note = engineered CasX variant
QEIKRINKIRRRLVKDSNTKKAGKTGPMKTLLVRVMTPDLRERLENLRKKPENIPQPISNTSRANLNKLLTDYTEMKKAILHVYWEEFQKDPVGLMSRVAQPASKKIDQNKLKPEMDEKGNLTTAGFACSQCGQPLFVYKLEQVSEKGKAYTNYFGRCNVAEHEKLILLAQLKPEKDSDEAVTYSLGKFGQRALDFYSIHVTKESTHPVKPLAQIAGNRYASGPVGKALSDACMGTIASFLSKYQDIIIEHQKVVKGNQKRLESLRELAGKENLEYPSVTLPPQPHTKEGVDAYNEVIARVRMWVNLNLWQKLKLSRDDAKPLLRLKGFPSFPLVERQANEVDWWDMVCNVKKLINEKKEDGKVFWQNLAGYKRQEALRPYLSSEEDRKKGKKFARYQLGDLLLHLEKKHGEDWGKVYDEAWERIDKKVEGLSKHIKLEEERRSEDAQSKAALTDWLRAKASFVIEGLKEADKDEFCRCELKLQKWYGDLRGKPFAIEAENSILDISGFSKQYNCAFIWQKDGVKKLNLYLIINYFKGGKLRFKKIKPEAFEANRFYTVINKKSGEIVPMEVNFNFDDPNLIILPLAFGKRQGREFIWNDLLSLETGSLQLANGRVIEKTLYNRRTRQDEPALFVALTFERREVLDSSNIKPMNLIGVDRGENIPAVIALTDPEGCPLSRFKDSLGNPTHILRIGESYKEKQRTIQAKKEVEQRRAGGYSRKYASKAKNLADDMVRNTARDLLYYAVTQDAMLIFENLSRGFGRQGKRTFMAERQYTRMEDWLTAKLAYEGLPSKTYLSKTLAQYTSKTCSNCGFTITSADYDRVLEKLKKTATGWMTTINGKELKVEGQITYYNRYKRQNVVKDLSVELDRLSEESVNNDISSWTKGRSGEALSLLKKRFSHRPVQEKFVCLNCGFETHADEQAALNIARSWLFLRSQEYKKYQTNKTSTGNTDKRAFVETWQSFYRKKLKEVWKPAV

SEQ ID NO: 29033 - protein, 979 aa, synthetic construct
  REGION 1..979: note = engineered CasX variant
QEIKRINKIRRRLVKDSNTKKAGKTGPMKTLLVRVMTPDLRERLENLRKKPENIPQPISNTSRANLNKLLTDYTEMKKAILHVYWEEFQKDPVGLMSRVAQPASKKIDQNKLKPEMDEKGNLTTAGFACSQCGQPLFVYKLEQVSEKGKAYTNYFGRCNVAEHEKLILLAQLKPEKDSDEAVTYSLGKFGQRALDFYSIHVTKESTHPVKPLAQIAGNRYASGPVGKALSDACMGTIASFLSKYQDIIIEHQKVVKGNQKRLESLRELAGKENLEYPSVTLPPQPHTKEGVDAYNEVIARVRMWVNLNLWQKLKLSRDDAKPLLRLKKFPSFPLVERQANEVDWWDMVCNVKKLINEKKEDGKVFWQNLAGYKRQEALRPYLSSEEDRKKGKKFARYQLGDLLLHLEKKHGEDWGKVYDEAWERIDKKVEGLSKHIKLEEERRSEDAQSKAALTDWLRAKASFVIEGLKEADKDEFCRCELKLQKWYGDLRGKPFAIEAENSILDISGFSKQYNCAFIWQKDGVKKLNLYLIINYFKGGKLRFKKIKPEAFEANRFYTVINKKSGEIVPMEVNFNFDDPNLIILPLAFGKRQGREFIWNDLLSLETGSLKLANGRVIEKTLYNRRTRQDEPALFVALTFERREVLDSSNIKPMNLIGVDRGENIPAVIALTDPEGCPLSRFKDSLGNPTHILRIGESYKEKQRTIQAKKEVEQRRAGGYSRKYASKAKNLADDMVRNTARDLLYYAVTQDAMLIFENLSRGFGRQGKRTFMAERQYTRMEDWLTAKLAYEGLPSKTYLSKTLAQYTSKTCSNCGFTITSADYDRVLEKLKKTATGWMTTINGKELKVEGQITYYNRYKRQNVVKDLSVELDRLSEESVNNDISSWTKGRSGEALSLLKKRFSHRPVQEKFVCLNCGFETHADEQAALNIARSWLFLRSQEYKKYQTNKTTGKNTDKRAFVETWQSFYRKKLKEVWKPAV

SEQ ID NO: 29034 - protein, 979 aa, synthetic construct
  REGION 1..979: note = engineered CasX variant
QEIKRINKIRRRLVKDSNTKKAGKTGPMKTLLVRVMTPDLRERLENLRKKPENIPQPISNTSRANLNKLLTDYTEMKKAILHVYWEEFQKDPVGLMSRVAQPASKKIDQNKLKPEMDEKGNLTTAGFACSQCGQPLFVYKLEQVSEKGKAYTNYFGRCNVAEHEKLILLAQLKPEKDSDEAVTYSLGKFGQRALDFYSIHVTKESTHPVKPLAQIAGNRYASGPVGKALSDACMGTIASFLSKYQDIIIEHQKVVKGNQKRLESLRELAGKENLEYPSVTLPPQPHTKEGVDAYNEVIARVRMWVNLNLWQKLKLSRDDAKPLLRLKGFPSFPLVERQANEVDWWDMVCNVKKLINEKKEDGKVFWQNLAGYKRQEALRPYLSSEEDRKKGKKFARYQLGDLLLHLEKKHGEDWGKVYDEAWERIDKKVEGLSKHIKLEEERRSEDAQSKAALTDWLRAKASFVIEGLKEADKDEFCRCELKLQKWYGDLRGKPFAIEAENSILDISGFSKQYNCAFIWQKDGVKKLNLYLIINYFKGGKLRFKKIKPEAFEANRFYTVINKKSGEIVPMEVNFNFDDPNLIILPLAFGKRQGREFIWNDLLSLETGSLKLANGRVIEKTLYNRRTRQDEPALFVALTFERREVLDSSNIKPMNLIGVDRGENIPAVIALTDPEGCPLSRFKDSLGNPTHILRIGERYKEKQRTIQAKKEVEQRRAGGYSRKYASKAKNLADDMVRNTARDLLYYAVTQDAMLIFENLSRGFGRQGKRTFMAERQYTRMEDWLTAKLAYEGLPSKTYLSKTLAQYTSKTCSNCGFTITSADYDRVLEKLKKTATGWMTTINGKELKVEGQITYYNRYKRQNVVKDLSVELDRLSEESVNNDISSWTKGRSGEALSLLKKRFSHRPVQEKFVCLNCGFETHADEQAALNIARSWLFLRSQEYKKYQTNKTTGKNTDKRAFVETWQSFYRKKLKEVWKPAV

SEQ ID NO: 29035 - protein, 979 aa, synthetic construct
  REGION 1..979: note = engineered CasX variant
QEIKRINKIRRRLVKDSNTKKAGKTGPMKTLLVRVMTPDLRERLENLRKKPENIPQPISNTSRANLNKLLTDYTEMKKAILHVYWEEFQKDPVGLMSRVAQPASKKIDQNKLKPEMDEKGNLTTAGFACSQCGQPLFVYKLEQVSEKGKAYTNYFGRCNVAEHEKLILLAQLKPEKDSDEAVTYSLGKFGQRALDFYSIHVTKESTHPVKPLAQIAGNRYASGPVGKALSDACMGTIASFLSKYQDIIIEHQKVVKGNQKRLESLRELAGKENLEYPSVTLPPQPHTKEGVDAYNEVIARVRMWVNLNLWQKLKLSRDDAKPLLRLKGFPSFPLVERQANEVDWWDMVCNVKKLINEKKEDGKVFWQNLAGYKRQEALRPYLSSEEDRKKGKKFARYQLGDLLLHLEKKHGEDWGKVYDEAWERIDKKVEGLSKHIKLEEERRSEDAQSKAALTDWLRAKASFVIEGLKEADKDEFCRCELKLQKWYGDLRGKPFAIEAENSILDISGFSKQYNCAFIWQKDGVKKLNLYLIINYFKGGKLRFKKIKPEAFEANRFYTVINKKSGEIVPMEVNFNFDDPNLIILPLAFGKRQGREFIWNDLLSLETGSLQLANGRVIEKTLYNRRTRQDEPALFVALTFERREVLDSSNIKPMNLIGVDRGENIPAVIALTDPEGCPLSRFKDSLGNPTHILRIGESYKEKQRTIQAKKEVEQRRAGGYSRKYASKAKNLADDMVRNTARDLLYYAVTQDAMLIFENLSRGFGRQGKRTFMAERQYTRMEDWLTAKLAYEGLPSKTYLSKTLAQYTSKTCSNCGFTITSADYDRVLEKLKKTATGWMTTINGKELKVEGQITYYNRYKRQNVVKDLSVELDRLSEESVNNDISSWTKGRSGEALSLLKKRFSHRPVQEKFVCLNCGFETHADEQAALNIARSWLFLRSQEYKKYQTNKTTGKNTDKRAFVETWQSFYRKKLKEVWKPAV

SEQ ID NO: 29036 - protein, 978 aa, synthetic construct
  REGION 1..978: note = engineered CasX variant
QEIKRINKIRRRLVKDSNTKKAGKTGPMKTLLVRVMTPDLRERLENLRKKPENIPQPISNTSRANLNKLLTDYTEMKKAILHVYWEEFQKDPVGLMSRVAQPASKKIDQNKLKPEMDEKGNLTTAGFACSQCGQPLFVYKLEQVSEKGKAYTNYFGRCNVAEHEKLILLAQLKPEKDSDEAVTYSLGKFGQRALDFYSIHVTKESTHPVKPLAQIAGNRYASGPVGKALSDACMGTIASFLSKYQDIIIEHQKVVKGNQKRLESLRELAGKENLEYPSVTLPPQPHTKEGVDAYNEVIARVRMWVNLNLWQKLKLSRDDAKPLLRLKKFPSFPLVERQANEVDWWDMVCNVKKLINEKKEDGKVFWQNLAGYKRQEALRPYLSSEEDRKKGKKFARYQLGDLLLHLEKKHGEDWGKVYDEAWERIDKKVEGLSKHIKLEEERRSEDAQSKAALTDWLRAKASFVIEGLKEADKDEFCRCELKLQKWYGDLRGKPFAIEAENSILDISGFSKQYNCAFIWQKDGVKKLNLYLIINYFKGGKLRFKKIKPEAFEANRFYTVINKKSGEIVPMEVNFNFDDPNLIILPLAFGKRQGREFIWNDLLSLETGSLKLANGRVIEKTLYNRRTRQDEPALFVALTFERREVLDSSNIKPMNLIGVDRGENIPAVIALTDPEGCPLSRFKDSLGNPTHILRIGERYKEKQRTIQAKKEVEQRRAGGYSRKYASKAKNLADDMVRNTARDLLYYAVTQDAMLIFENLSRGFGRQGKRTFMAERQYTRMEDWLTAKLAYEGLPSKTYLSKTLAQYTSKTCSNCGFTITSADYDRVLEKLKKTATGWMTTINGKELKVEGQITYYNRYKRQNVVKDLSVELDRLSEESVNNDISSWTKGRSGEALSLLKKRFSHRPVQEKFVCLNCGFETHADEQAALNIARSWLFLRSQEYKKYQTNKTTGNTDKRAFVETWQSFYRKKLKEVWKPAV

SEQ ID NO: 29037 - protein, 978 aa, synthetic construct
  REGION 1..978: note = engineered CasX variant
QEIKRINKIRRRLVKDSNTKKAGKTGPMKTLLVRVMTPDLRERLENLRKKPENIPQPISNTSRANLNKLLTDYTEMKKAILHVYWEEFQKDPVGLMSRVAQPASKKIDQNKLKPEMDEKGNLTTAGFACSQCGQPLFVYKLEQVSEKGKAYTNYFGRCNVAEHEKLILLAQLKPEKDSDEAVTYSLGKFGQRALDFYSIHVTKESTHPVKPLAQIAGNRYASGPVGKALSDACMGTIASFLSKYQDIIIEHQKVVKGNQKRLESLRELAGKENLEYPSVTLPPQPHTKEGVDAYNEVIARVRMWVNLNLWQKLKLSRDDAKPLLRLKKFPSFPLVERQANEVDWWDMVCNVKKLINEKKEDGKVFWQNLAGYKRQEALRPYLSSEEDRKKGKKFARYQLGDLLLHLEKKHGEDWGKVYDEAWERIDKKVEGLSKHIKLEEERRSEDAQSKAALTDWLRAKASFVIEGLKEADKDEFCRCELKLQKWYGDLRGKPFAIEAENSILDISGFSKQYNCAFIWQKDGVKKLNLYLIINYFKGGKLRFKKIKPEAFEANRFYTVINKKSGEIVPMEVNFNFDDPNLIILPLAFGKRQGREFIWNDLLSLETGSLQLANGRVIEKTLYNRRTRQDEPALFVALTFERREVLDSSNIKPMNLIGVDRGENIPAVIALTDPEGCPLSRFKDSLGNPTHILRIGESYKEKQRTIQAKKEVEQRRAGGYSRKYASKAKNLADDMVRNTARDLLYYAVTQDAMLIFENLSRGFGRQGKRTFMAERQYTRMEDWLTAKLAYEGLPSKTYLSKTLAQYTSKTCSNCGFTITSADYDRVLEKLKKTATGWMTTINGKELKVEGQITYYNRYKRQNVVKDLSVELDRLSEESVNNDISSWTKGRSGEALSLLKKRFSHRPVQEKFVCLNCGFETHADEQAALNIARSWLFLRSQEYKKYQTNKTTGNTDKRAFVETWQSFYRKKLKEVWKPAV

SEQ ID NO: 29038 - protein, 978 aa, synthetic construct
  REGION 1..978: note = engineered CasX variant
QEIKRINKIRRRLVKDSNTKKAGKTGPMKTLLVRVMTPDLRERLENLRKKPENIPQPISNTSRANLNKLLTDYTEMKKAILHVYWEEFQKDPVGLMSRVAQPASKKIDQNKLKPEMDEKGNLTTAGFACSQCGQPLFVYKLEQVSEKGKAYTNYFGRCNVAEHEKLILLAQLKPEKDSDEAVTYSLGKFGQRALDFYSIHVTKESTHPVKPLAQIAGNRYASGPVGKALSDACMGTIASFLSKYQDIIIEHQKVVKGNQKRLESLRELAGKENLEYPSVTLPPQPHTKEGVDAYNEVIARVRMWVNLNLWQKLKLSRDDAKPLLRLKGFPSFPLVERQANEVDWWDMVCNVKKLINEKKEDGKVFWQNLAGYKRQEALRPYLSSEEDRKKGKKFARYQLGDLLLHLEKKHGEDWGKVYDEAWERIDKKVEGLSKHIKLEEERRSEDAQSKAALTDWLRAKASFVIEGLKEADKDEFCRCELKLQKWYGDLRGKPFAIEAENSILDISGFSKQYNCAFIWQKDGVKKLNLYLIINYFKGGKLRFKKIKPEAFEANRFYTVINKKSGEIVPMEVNFNFDDPNLIILPLAFGKRQGREFIWNDLLSLETGSLQLANGRVIEKTLYNRRTRQDEPALFVALTFERREVLDSSNIKPMNLIGVDRGENIPAVIALTDPEGCPLSRFKDSLGNPTHILRIGERYKEKQRTIQAKKEVEQRRAGGYSRKYASKAKNLADDMVRNTARDLLYYAVTQDAMLIFENLSRGFGRQGKRTFMAERQYTRMEDWLTAKLAYEGLPSKTYLSKTLAQYTSKTCSNCGFTITSADYDRVLEKLKKTATGWMTTINGKELKVEGQITYYNRYKRQNVVKDLSVELDRLSEESVNNDISSWTKGRSGEALSLLKKRFSHRPVQEKFVCLNCGFETHADEQAALNIARSWLFLRSQEYKKYQTNKTTGNTDKRAFVETWQSFYRKKLKEVWKPAV

SEQ ID NO: 29039 - protein, 979 aa, synthetic construct
  REGION 1..979: note = engineered CasX variant
QEIKRINKIRRRLVKDSNTKKAGKTRGPMKTLLVRVMTPDLRERLENLRKKPENIPQPISNTSRANLNKLLTDYTEMKKAILHVYWEEFQKDPVGLMSRVAQPASKKIDQNKLKPEMDEKGNLTTAGFACSQCGQPLFVYKLEQVSEKGKAYTNYFGRCNVAEHEKLILLAQLKPEKDSDEAVTYSLGKFGQRALDFYSIHVTKESTHPVKPLAQIAGNRYASGPVGKALSGACMGTIASFLSKYQDIIIEHQKVVKGNQKRLESLRELAGKENLEYPSVTLPPQPHTKEGVDAYNEVIARVRMWVNLNLWQKLKLSRDDAKPLLRLKGFPSFPLVERQANEVDWWDMVCNVKKLINEKKEDGKVFWQNLAGYKRQEALRPYLSSEEDRKKGKKFARYQLGDLLLHLEKKHGEDWGKVYDEAWERIDKKVEGLSKHIKLEEERRSEDAQSKAALTDWLRAKASFVIEGLKEADKDEFCRCELKLQKWYGDLRGKPFAIEAENSILDISGFSKQYNCAFIWQKDGVKKLNLYLIINYFKGGKLRFKKIKPEAFEANRFYTVINKKSGEIVPMEVNFNFDDPNLIILPLAFGKRQGREFIWNDLLSLETGSLKLANGRVIEKTLYNRRTRQDEPALFVALTFERREVLDSSNIKPMNLIGVDRGENIPAVIALTDPEGCPLSRFKDSLGNPTHILRIGESYKEKQRTIQAKKEVEQRRAGGYSRKYASKAKNLADDMVRNTARDLLYYAVTQDAMLIFENLSRGFGRQGKRTFMAERQYTRMEDWLTAKLAYEGLPSKTYLSKTLAQYTSKTCSNCGFTITSADYDRVLEKLKKTATGWMTTINGKELKVEGQITYYNRYKRQNVVKDLSVELDRLSEESVNNDISSWTKGRSGEALSLLKKRFSHRPVQEKFVCLNCGFETHADEQAALNIARSWLFLRSQEYKKYQTNKTTGNTDKRAFVETWQSFYRKKLKEVWKPAV

SEQ ID NO: 29040 - protein, 979 aa, synthetic construct
  REGION 1..979: note = engineered CasX variant
QEIKRINKIRRRLVKDSNTKKAGKTRGPMKTLLVRVMTPDLRERLENLRKKPENIPQPISNTSRANLNKLLTDYTEMKKAILHVYWEEFQKDPVGLMSRVAQPASKKIDQNKLKPEMDEKGNLTTAGFACSQCGQPLFVYKLEQVSEKGKAYTNYFGRCNVAEHEKLILLAQLKPEKDSDEAVTYSLGKFGQRALDFYSIHVTKESTHPVKPLAQIAGNRYASGPVGKALSDACMGTIASFLSKYQDIIIEHQKVVKGNQKRLESLRELAGKENLEYPSVTLPPQPHTKEGVDAYNEVIARVRMWVNLNLWQKLKLSRDDAKPLLRLKNFPSFPLVERQANEVDWWDMVCNVKKLINEKKEDGKVFWQNLAGYKRQEALRPYLSSEEDRKKGKKFARYQLGDLLLHLEKKHGEDWGKVYDEAWERIDKKVEGLSKHIKLEEERRSEDAQSKAALTDWLRAKASFVIEGLKEADKDEFCRCELKLQKWYGDLRGKPFAIEAENSILDISGFSKQYNCAFIWQKDGVKKLNLYLIINYFKGGKLRFKKIKPEAFEANRFYTVINKKSGEIVPMEVNFNFDDPNLIILPLAFGKRQGREFIWNDLLSLETGSLKLANGRVIEKTLYNRRTRQDEPALFVALTFERREVLDSSNIKPMNLIGVDRGENIPAVIALTDPEGCPLSRFKDSLGNPTHILRIGESYKEKQRTIQAKKEVEQRRAGGYSRKYASKAKNLADDMVRNTARDLLYYAVTQDAMLIFENLSRGFGRQGKRTFMAERQYTRMEDWLTAKLAYEGLPSKTYLSKTLAQYTSKTCSNCGFTITSADYDRVLEKLKKTATGWMTTINGKELKVEGQITYYNRYKRQNVVKDLSVELDRLSEESVNNDISSWTKGRSGEALSLLKKRFSHRPVQEKFVCLNCGFETHADEQAALNIARSWLFLRSQEYKKYQTNKTTGNTDKRAFVETWQSFYRKKLKEVWKPAV

SEQ ID NO: 29041 - protein, 979 aa, synthetic construct
  REGION 1..979: note = engineered CasX variant
QEIKRINKIRRRLVKDSNTKKAGKTRGPMKTLLVRVMTPDLRERLENLRKKPENIPQPISNTSRANLNKLLTDYTEMKKAILHVYWEEFQKDPVGLMSRVAQPASKKIDQNKLKPEMDEKGNLTTAGFACSQCGQPLFVYKLEQVSEKGKAYTNYFGRCNVAEHEKLILLAQLKPEKDSDEAVTYSLGKFGQRALDFYSIHVTKESTHPVKPLAQIAGNRYASGPVGKALSDACMGTIASFLSKYQDIIIEHQKVVKGNQKRLESLRELAGKENLEYPSVTLPPQPHTKEGVDAYNEVIARVRMWVNLNLWQKLKLSRDDAKPLLRLKGFPSFPLVERQANEVDWWDMVCNVKKLINEKKEDGKVFWQNLAGYKRQEALRPYLSSEEDRKKGKKFARYQLGDLLNHLEKKHGEDWGKVYDEAWERIDKKVEGLSKHIKLEEERRSEDAQSKAALTDWLRAKASFVIEGLKEADKDEFCRCELKLQKWYGDLRGKPFAIEAENSILDISGFSKQYNCAFIWQKDGVKKLNLYLIINYFKGGKLRFKKIKPEAFEANRFYTVINKKSGEIVPMEVNFNFDDPNLIILPLAFGKRQGREFIWNDLLSLETGSLKLANGRVIEKTLYNRRTRQDEPALFVALTFERREVLDSSNIKPMNLIGVDRGENIPAVIALTDPEGCPLSRFKDSLGNPTHILRIGESYKEKQRTIQAKKEVEQRRAGGYSRKYASKAKNLADDMVRNTARDLLYYAVTQDAMLIFENLSRGFGRQGKRTFMAERQYTRMEDWLTAKLAYEGLPSKTYLSKTLAQYTSKTCSNCGFTITSADYDRVLEKLKKTATGWMTTINGKELKVEGQITYYNRYKRQNVVKDLSVELDRLSEESVNNDISSWTKGRSGEALSLLKKRFSHRPVQEKFVCLNCGFETHADEQAALNIARSWLFLRSQEYKKYQTNKTTGNTDKRAFVETWQSFYRKKLKEVWKPAV

SEQ ID NO: 29042 - protein, 979 aa, synthetic construct
  REGION 1..979: note = engineered CasX variant
QEIKRINKIRRRLVKDSNTKKAGKTRGPMKTLLVRVMTPDLRERLENLRKKPENIPQPISNTSRANLNKLLTDYTEMKKAILHVYWEEFQKDPVGLMSRVAQPASKKIDQNKLKPEMDEKGNLTTAGFACSQCGQPLFVYKLEQVSEKGKAYTNYFGRCNVAEHEKLILLAQLKPEKDSDEAVTYSLGKFGQRALDFYSIHVTKESTHPVKPLAQIAGNRYASGPVGKALSDACMGTIASFLSKYQDIIIEHQKVVKGNQKRLESLRELAGKENLEYPSVTLPPQPHTKEGVDAYNEVIARVRMWVNLNLWQKLKLSRDDAKPLLRLKGFPSFPLVERQANEVDWWDMVCNVKKLINEKKEDGKVFWQNLAGYKRQEALRPYLSSEEDRKKGKKFARYQLGDLLWHLEKKHGEDWGKVYDEAWERIDKKVEGLSKHIKLEEERRSEDAQSKAALTDWLRAKASFVIEGLKEADKDEFCRCELKLQKWYGDLRGKPFAIEAENSILDISGFSKQYNCAFIWQKDGVKKLNLYLIINYFKGGKLRFKKIKPEAFEANRFYTVINKKSGEIVPMEVNFNFDDPNLIILPLAFGKRQGREFIWNDLLSLETGSLKLANGRVIEKTLYNRRTRQDEPALFVALTFERREVLDSSNIKPMNLIGVDRGENIPAVIALTDPEGCPLSRFKDSLGNPTHILRIGESYKEKQRTIQAKKEVEQRRAGGYSRKYASKAKNLADDMVRNTARDLLYYAVTQDAMLIFENLSRGFGRQGKRTFMAERQYTRMEDWLTAKLAYEGLPSKTYLSKTLAQYTSKTCSNCGFTITSADYDRVLEKLKKTATGWMTTINGKELKVEGQITYYNRYKRQNVVKDLSVELDRLSEESVNNDISSWTKGRSGEALSLLKKRFSHRPVQEKFVCLNCGFETHADEQAALNIARSWLFLRSQEYKKYQTNKTTGNTDKRAFVETWQSFYRKKLKEVWKPAV

SEQ ID NO: 29043 - protein, 979 aa, synthetic construct
  REGION 1..979: note = engineered CasX variant
QEIKRINKIRRRLVKDSNTKKAGKTRGPMKTLLVRVMTPDLRERLENLRKKPENIPQPISNTSRANLNKLLTDYTEMKKAILHVYWEEFQKDPVGLMSRVAQPASKKIDQNKLKPEMDEKGNLTTAGFACSQCGQPLFVYKLEQVSEKGKAYTNYFGRCNVAEHEKLILLAQLKPEKDSDEAVTYSLGKFGQRALDFYSIHVTKESTHPVKPLAQIAGNRYASGPVGKALSDACMGTIASFLSKYQDIIIEHQKVVKGNQKRLESLRELAGKENLEYPSVTLPPQPHTKEGVDAYNEVIARVRMWVNLNLWQKLKLSRDDAKPLLRLKGFPSFPLVERQANEVDWWDMVCNVKKLINEKKEDGKVFWQNLAGYKRQEALRPYLSSEEDRKKGKKFARYQLGDLLLHLYKKHGEDWGKVYDEAWERIDKKVEGLSKHIKLEEERRSEDAQSKAALTDWLRAKASFVIEGLKEADKDEFCRCELKLQKWYGDLRGKPFAIEAENSILDISGFSKQYNCAFIWQKDGVKKLNLYLIINYFKGGKLRFKKIKPEAFEANRFYTVINKKSGEIVPMEVNFNFDDPNLIILPLAFGKRQGREFIWNDLLSLETGSLKLANGRVIEKTLYNRRTRQDEPALFVALTFERREVLDSSNIKPMNLIGVDRGENIPAVIALTDPEGCPLSRFKDSLGNPTHILRIGESYKEKQRTIQAKKEVEQRRAGGYSRKYASKAKNLADDMVRNTARDLLYYAVTQDAMLIFENLSRGFGRQGKRTFMAERQYTRMEDWLTAKLAYEGLPSKTYLSKTLAQYTSKTCSNCGFTITSADYDRVLEKLKKTATGWMTTINGKELKVEGQITYYNRYKRQNVVKDLSVELDRLSEESVNNDISSWTKGRSGEALSLLKKRFSHRPVQEKFVCLNCGFETHADEQAALNIARSWLFLRSQEYKKYQTNKTTGNTDKRAFVETWQSFYRKKLKEVWKPAV

SEQ ID NO: 29044 - protein, 979 aa, synthetic construct
  REGION 1..979: note = engineered CasX variant
QEIKRINKIRRRLVKDSNTKKAGKTRGPMKTLLVRVMTPDLRERLENLRKKPENIPQPISNTSRANLNKLLTDYTEMKKAILHVYWEEFQKDPVGLMSRVAQPASKKIDQNKLKPEMDEKGNLTTAGFACSQCGQPLFVYKLEQVSEKGKAYTNYFGRCNVAEHEKLILLAQLKPEKDSDEAVTYSLGKFGQRALDFYSIHVTKESTHPVKPLAQIAGNRYASGPVGKALSDACMGTIASFLSKYQDIIIEHQKVVKGNQKRLESLRELAGKENLEYPSVTLPPQPHTKEGVDAYNEVIARVRMWVNLNLWQKLKLSRDDAKPLLRLKGFPSFPLVERQANEVDWWDMVCNVKKLINEKKEDGKVFWQNLAGYKRQEALRPYLSSEEDRKKGKKFARYQLGDLLLHLEKKHPEDWGKVYDEAWERIDKKVEGLSKHIKLEEERRSEDAQSKAALTDWLRAKASFVIEGLKEADKDEFCRCELKLQKWYGDLRGKPFAIEAENSILDISGFSKQYNCAFIWQKDGVKKLNLYLIINYFKGGKLRFKKIKPEAFEANRFYTVINKKSGEIVPMEVNFNFDDPNLIILPLAFGKRQGREFIWNDLLSLETGSLKLANGRVIEKTLYNRRTRQDEPALFVALTFERREVLDSSNIKPMNLIGVDRGENIPAVIALTDPEGCPLSRFKDSLGNPTHILRIGESYKEKQRTIQAKKEVEQRRAGGYSRKYASKAKNLADDMVRNTARDLLYYAVTQDAMLIFENLSRGFGRQGKRTFMAERQYTRMEDWLTAKLAYEGLPSKTYLSKTLAQYTSKTCSNCGFTITSADYDRVLEKLKKTATGWMTTINGKELKVEGQITYYNRYKRQNVVKDLSVELDRLSEESVNNDISSWTKGRSGEALSLLKKRFSHRPVQEKFVCLNCGFETHADEQAALNIARSWLFLRSQEYKKYQTNKTTGNTDKRAFVETWQSFYRKKLKEVWKPAV

SEQ ID NO: 29045 - protein, 980 aa, synthetic construct
  REGION 1..980: note = engineered CasX variant
QEIKRINKIRRRLVKDSNTKKAGKTRGPMKTLLVRVMTPDLRERLENLRKKPENIPQPISNTSRANLNKLLTDYTEMKKAILHVYWEEFQKDPVGLMSRVAQPASKKIDQNKLKPEMDEKGNLTTAGFACSQCGQPLFVYKLEQVSEKGKAYTNYFGRCNVAEHEKLILLAQLKPEKDSDEAVTYSLGKFGQRALDFYSIHVTKESTHPVKPLAQIAGNRYASGPVGKALSDACMGTIASFLSKYQDIIIEHQKVVKGNQKRLESLRELAGKENLEYPSVTLPPQPHTKEGVDAYNEVIARVRMWVNLNLWQKLKLSRDDAKPLLRLKGFPSFPLVERQANEVDWWDMVCNVKKLINEKKEDGKVFWQNLAGYKRQEALRPYLSSEEDRKKGKKFARYQLGDLLLHLEKKHGERDWGKVYDEAWERIDKKVEGLSKHIKLEEERRSEDAQSKAALTDWLRAKASFVIEGLKEADKDEFCRCELKLQKWYGDLRGKPFAIEAENSILDISGFSKQYNCAFIWQKDGVKKLNLYLIINYFKGGKLRFKKIKPEAFEANRFYTVINKKSGEIVPMEVNFNFDDPNLIILPLAFGKRQGREFIWNDLLSLETGSLKLANGRVIEKTLYNRRTRQDEPALFVALTFERREVLDSSNIKPMNLIGVDRGENIPAVIALTDPEGCPLSRFKDSLGNPTHILRIGESYKEKQRTIQAKKEVEQRRAGGYSRKYASKAKNLADDMVRNTARDLLYYAVTQDAMLIFENLSRGFGRQGKRTFMAERQYTRMEDWLTAKLAYEGLPSKTYLSKTLAQYTSKTCSNCGFTITSADYDRVLEKLKKTATGWMTTINGKELKVEGQITYYNRYKRQNVVKDLSVELDRLSEESVNNDISSWTKGRSGEALSLLKKRFSHRPVQEKFVCLNCGFETHADEQAALNIARSWLFLRSQEYKKYQTNKTTGNTDKRAFVETWQSFYRKKLKEVWKPAV

SEQ ID NO: 29046 - protein, 980 aa, synthetic construct
  REGION 1..980: note = engineered CasX variant
QEIKRINKIRRRLVKDSNTKKAGKTRGPMKTLLVRVMTPDLRERLENLRKKPENIPQPISNTSRANLNKLLTDYTEMKKAILHVYWEEFQKDPVGLMSRVAQPASKKIDQNKLKPEMDEKGNLTTAGFACSQCGQPLFVYKLEQVSEKGKAYTNYFGRCNVAEHEKLILLAQLKPEKDSDEAVTYSLGKFGQRALDFYSIHVTKESTHPVKPLAQIAGNRYASGPVGKALSDACMGTIASFLSKYQDIIIEHQKVVKGNQKRLESLRELAGKENLEYPSVTLPPQPHTKEGVDAYNEVIARVRMWVNLNLWQKLKLSRDDAKPLLRLKGFPSFPLVERQANEVDWWDMVCNVKKLINEKKEDGKVFWQNLAGYKRQEALRPYLSSEEDRKKGKKFARYQLGDLLLHLEKKHGEYDWGKVYDEAWERIDKKVEGLSKHIKLEEERRSEDAQSKAALTDWLRAKASFVIEGLKEADKDEFCRCELKLQKWYGDLRGKPFAIEAENSILDISGFSKQYNCAFIWQKDGVKKLNLYLIINYFKGGKLRFKKIKPEAFEANRFYTVINKKSGEIVPMEVNFNFDDPNLIILPLAFGKRQGREFIWNDLLSLETGSLKLANGRVIEKTLYNRRTRQDEPALFVALTFERREVLDSSNIKPMNLIGVDRGENIPAVIALTDPEGCPLSRFKDSLGNPTHILRIGESYKEKQRTIQAKKEVEQRRAGGYSRKYASKAKNLADDMVRNTARDLLYYAVTQDAMLIFENLSRGFGRQGKRTFMAERQYTRMEDWLTAKLAYEGLPSKTYLSKTLAQYTSKTCSNCGFTITSADYDRVLEKLKKTATGWMTTINGKELKVEGQITYYNRYKRQNVVKDLSVELDRLSEESVNNDISSWTKGRSGEALSLLKKRFSHRPVQEKFVCLNCGFETHADEQAALNIARSWLFLRSQEYKKYQTNKTTGNTDKRAFVETWQSFYRKKLKEVWKPAV

SEQ ID NO: 29047 - protein, 979 aa, synthetic construct
  REGION 1..979: note = engineered CasX variant
QEIKRINKIRRRLVKDSNTKKAGKTRGPMKTLLVRVMTPDLRERLENLRKKPENIPQPISNTSRANLNKLLTDYTEMKKAILHVYWEEFQKDPVGLMSRVAQPASKKIDQNKLKPEMDEKGNLTTAGFACSQCGQPLFVYKLEQVSEKGKAYTNYFGRCNVAEHEKLILLAQLKPEKDSDEAVTYSLGKFGQRALDFYSIHVTKESTHPVKPLAQIAGNRYASGPVGKALSDACMGTIASFLSKYQDIIIEHQKVVKGNQKRLESLRELAGKENLEYPSVTLPPQPHTKEGVDAYNEVIARVRMWVNLNLWQKLKLSRDDAKPLLRLKGFPSFPLVERQANEVDWWDMVCNVKKLINEKKEDGKVFWQNLAGYKRQEALRPYLSSEEDRKKGKKFARYQLGDLLLHLEKKHGEDWGDVYDEAWERIDKKVEGLSKHIKLEEERRSEDAQSKAALTDWLRAKASFVIEGLKEADKDEFCRCELKLQKWYGDLRGKPFAIEAENSILDISGFSKQYNCAFIWQKDGVKKLNLYLIINYFKGGKLRFKKIKPEAFEANRFYTVINKKSGEIVPMEVNFNFDDPNLIILPLAFGKRQGREFIWNDLLSLETGSLKLANGRVIEKTLYNRRTRQDEPALFVALTFERREVLDSSNIKPMNLIGVDRGENIPAVIALTDPEGCPLSRFKDSLGNPTHILRIGESYKEKQRTIQAKKEVEQRRAGGYSRKYASKAKNLADDMVRNTARDLLYYAVTQDAMLIFENLSRGFGRQGKRTFMAERQYTRMEDWLTAKLAYEGLPSKTYLSKTLAQYTSKTCSNCGFTITSADYDRVLEKLKKTATGWMTTINGKELKVEGQITYYNRYKRQNVVKDLSVELDRLSEESVNNDISSWTKGRSGEALSLLKKRFSHRPVQEKFVCLNCGFETHADEQAALNIARSWLFLRSQEYKKYQTNKTTGNTDKRAFVETWQSFYRKKLKEVWKPAV

SEQ ID NO: 29048 - protein, 979 aa, synthetic construct
  REGION 1..979: note = engineered CasX variant
QEIKRINKIRRRLVKDSNTKKAGKTRGPMKTLLVRVMTPDLRERLENLRKKPENIPQPISNTSRANLNKLLTDYTEMKKAILHVYWEEFQKDPVGLMSRVAQPASKKIDQNKLKPEMDEKGNLTTAGFACSQCGQPLFVYKLEQVSEKGKAYTNYFGRCNVAEHEKLILLAQLKPEKDSDEAVTYSLGKFGQRALDFYSIHVTKESTHPVKPLAQIAGNRYASGPVGKALSDACMGTIASFLSKYQDIIIEHQKVVKGNQKRLESLRELAGKENLEYPSVTLPPQPHTKEGVDAYNEVIARVRMWVNLNLWQKLKLSRDDAKPLLRLKGFPSFPLVERQANEVDWWDMVCNVKKLINEKKEDGKVFWQNLAGYKRQEALRPYLSSEEDRKKGKKFARYQLGDLLLHLEKKHGEDWGKVYGEAWERIDKKVEGLSKHIKLEEERRSEDAQSKAALTDWLRAKASFVIEGLKEADKDEFCRCELKLQKWYGDLRGKPFAIEAENSILDISGFSKQYNCAFIWQKDGVKKLNLYLIINYFKGGKLRFKKIKPEAFEANRFYTVINKKSGEIVPMEVNFNFDDPNLIILPLAFGKRQGREFIWNDLLSLETGSLKLANGRVIEKTLYNRRTRQDEPALFVALTFERREVLDSSNIKPMNLIGVDRGENIPAVIALTDPEGCPLSRFKDSLGNPTHILRIGESYKEKQRTIQAKKEVEQRRAGGYSRKYASKAKNLADDMVRNTARDLLYYAVTQDAMLIFENLSRGFGRQGKRTFMAERQYTRMEDWLTAKLAYEGLPSKTYLSKTLAQYTSKTCSNCGFTITSADYDRVLEKLKKTATGWMTTINGKELKVEGQITYYNRYKRQNVVKDLSVELDRLSEESVNNDISSWTKGRSGEALSLLKKRFSHRPVQEKFVCLNCGFETHADEQAALNIARSWLFLRSQEYKKYQTNKTTGNTDKRAFVETWQSFYRKKLKEVWKPAV

SEQ ID NO: 29049 - protein, 979 aa, synthetic construct
  REGION 1..979: note = engineered CasX variant
QEIKRINKIRRRLVKDSNTKKAGKTRGPMKTLLVRVMTPDLRERLENLRKKPENIPQPISNTSRANLNKLLTDYTEMKKAILHVYWEEFQKDPVGLMSRVAQPASKKIDQNKLKPEMDEKGNLTTAGFACSQCGQPLFVYKLEQVSEKGKAYTNYFGRCNVAEHEKLILLAQLKPEKDSDEAVTYSLGKFGQRALDFYSIHVTKESTHPVKPLAQIAGNRYASGPVGKALSDACMGTIASFLSKYQDIIIEHQKVVKGNQKRLESLRELAGKENLEYPSVTLPPQPHTKEGVDAYNEVIARVRMWVNLNLWQKLKLSRDDAKPLLRLKGFPSFPLVERQANEVDWWDMVCNVKKLINEKKEDGKVFWQNLAGYKRQEALRPYLSSEEDRKKGKKFARYQLGDLLLHLEKKHGEDWGKVYDEAWERIDKKVEGLSKHIKLEEERRSEDAQSKAALTDWLRAKASFVIEGKKEADKDEFCRCELKLQKWYGDLRGKPFAIEAENSILDISGFSKQYNCAFIWQKDGVKKLNLYLIINYFKGGKLRFKKIKPEAFEANRFYTVINKKSGEIVPMEVNFNFDDPNLIILPLAFGKRQGREFIWNDLLSLETGSLKLANGRVIEKTLYNRRTRQDEPALFVALTFERREVLDSSNIKPMNLIGVDRGENIPAVIALTDPEGCPLSRFKDSLGNPTHILRIGESYKEKQRTIQAKKEVEQRRAGGYSRKYASKAKNLADDMVRNTARDLLYYAVTQDAMLIFENLSRGFGRQGKRTFMAERQYTRMEDWLTAKLAYEGLPSKTYLSKTLAQYTSKTCSNCGFTITSADYDRVLEKLKKTATGWMTTINGKELKVEGQITYYNRYKRQNVVKDLSVELDRLSEESVNNDISSWTKGRSGEALSLLKKRFSHRPVQEKFVCLNCGFETHADEQAALNIARSWLFLRSQEYKKYQTNKTTGNTDKRAFVETWQSFYRKKLKEVWKPAV

SEQ ID NO: 29050 - protein, 979 aa, synthetic construct
  REGION 1..979: note = engineered CasX variant
QEIKRINKIRRRLVKDSNTKKAGKTRGPMKTLLVRVMTPDLRERLENLRKKPENIPQPISNTSRANLNKLLTDYTEMKKAILHVYWEEFQKDPVGLMSRVAQPASKKIDQNKLKPEMDEKGNLTTAGFACSQCGQPLFVYKLEQVSEKGKAYTNYFGRCNVAEHEKLILLAQLKPEKDSDEAVTYSLGKFGQRALDFYSIHVTKESTHPVKPLAQIAGNRYASGPVGKALSDACMGTIASFLSKYQDIIIEHQKVVKGNQKRLESLRELAGKENLEYPSVTLPPQPHTKEGVDAYNEVIARVRMWVNLNLWQKLKLSRDDAKPLLRLKGFPSFPLVERQANEVDWWDMVCNVKKLINEKKEDGKVFWQNLAGYKRQEALRPYLSSEEDRKKGKKFARYQLGDLLLHLEKKHGEDWGKVYDEAWERIDKKVEGLSKHIKLEEERRSEDAQSKAALTDWLRAKASFVIEGSKEADKDEFCRCELKLQKWYGDLRGKPFAIEAENSILDISGFSKQYNCAFIWQKDGVKKLNLYLIINYFKGGKLRFKKIKPEAFEANRFYTVINKKSGEIVPMEVNFNFDDPNLIILPLAFGKRQGREFIWNDLLSLETGSLKLANGRVIEKTLYNRRTRQDEPALFVALTFERREVLDSSNIKPMNLIGVDRGENIPAVIALTDPEGCPLSRFKDSLGNPTHILRIGESYKEKQRTIQAKKEVEQRRAGGYSRKYASKAKNLADDMVRNTARDLLYYAVTQDAMLIFENLSRGFGRQGKRTFMAERQYTRMEDWLTAKLAYEGLPSKTYLSKTLAQYTSKTCSNCGFTITSADYDRVLEKLKKTATGWMTTINGKELKVEGQITYYNRYKRQNVVKDLSVELDRLSEESVNNDISSWTKGRSGEALSLLKKRFSHRPVQEKFVCLNCGFETHADEQAALNIARSWLFLRSQEYKKYQTNKTTGNTDKRAFVETWQSFYRKKLKEVWKPAV

SEQ ID NO: 29051 - protein, 980 aa, synthetic construct
  REGION 1..980: note = engineered CasX variant
QEIKRINKIRRRLVKDSNTKKAGKTRGPMKTLLVRVMTPDLRERLENLRKKPENIPQPISNTSRANLNKLLTDYTEMKKAILHVYWEEFQKDPVGLMSRVAQPASKKIDQNKLKPEMDEKGNLTTAGFACSQCGQPLFVYKLEQVSEKGKAYTNYFGRCNVAEHEKLILLAQLKPEKDSDEAVTYSLGKFGQRALDFYSIHVTKESTHPVKPLAQIAGNRYASGPVGKALSDACMGTIASFLSKYQDIIIEHQKVVKGNQKRLESLRELAGKENLEYPSVTLPPQPHTKEGVDAYNEVIARVRMWVNLNLWQKLKLSRDDAKPLLRLKGFPSFPLVERQANEVDWWDMVCNVKKLINEKKEDGKVFWQNLAGYKRQEALRPYLSSEEDRKKGKKFARYQLGDLLLHLEKKHGEDWGKVYDEAWERIDKKVEGLSKHIKLEEERRSEDAQSKAALTDWLRAKASFVIEGLKEADDKDEFCRCELKLQKWYGDLRGKPFAIEAENSILDISGFSKQYNCAFIWQKDGVKKLNLYLIINYFKGGKLRFKKIKPEAFEANRFYTVINKKSGEIVPMEVNFNFDDPNLIILPLAFGKRQGREFIWNDLLSLETGSLKLANGRVIEKTLYNRRTRQDEPALFVALTFERREVLDSSNIKPMNLIGVDRGENIPAVIALTDPEGCPLSRFKDSLGNPTHILRIGESYKEKQRTIQAKKEVEQRRAGGYSRKYASKAKNLADDMVRNTARDLLYYAVTQDAMLIFENLSRGFGRQGKRTFMAERQYTRMEDWLTAKLAYEGLPSKTYLSKTLAQYTSKTCSNCGFTITSADYDRVLEKLKKTATGWMTTINGKELKVEGQITYYNRYKRQNVVKDLSVELDRLSEESVNNDISSWTKGRSGEALSLLKKRFSHRPVQEKFVCLNCGFETHADEQAALNIARSWLFLRSQEYKKYQTNKTTGNTDKRAFVETWQSFYRKKLKEVWKPAV

SEQ ID NO: 29052 - protein, 980 aa, synthetic construct
  REGION 1..980: note = engineered CasX variant
QEIKRINKIRRRLVKDSNTKKAGKTRGPMKTLLVRVMTPDLRERLENLRKKPENIPQPISNTSRANLNKLLTDYTEMKKAILHVYWEEFQKDPVGLMSRVAQPASKKIDQNKLKPEMDEKGNLTTAGFACSQCGQPLFVYKLEQVSEKGKAYTNYFGRCNVAEHEKLILLAQLKPEKDSDEAVTYSLGKFGQRALDFYSIHVTKESTHPVKPLAQIAGNRYASGPVGKALSDACMGTIASFLSKYQDIIIEHQKVVKGNQKRLESLRELAGKENLEYPSVTLPPQPHTKEGVDAYNEVIARVRMWVNLNLWQKLKLSRDDAKPLLRLKGFPSFPLVERQANEVDWWDMVCNVKKLINEKKEDGKVFWQNLAGYKRQEALRPYLSSEEDRKKGKKFARYQLGDLLLHLEKKHGEDWGKVYDEAWERIDKKVEGLSKHIKLEEERRSEDAQSKAALTDWLRAKASFVIEGLKEADKDEFCRCELKLQKWYGDLRGKPFAIEAENSILDISGFSKQYNCAFIWQKDGVKKLNLYLIINYFKGGKLRFKKIKPEAFEANRFYTVINKKSGEIVPMEVNFNFDDPNLIILPLAFGKRQGREFIWNDLLSLETGSLKLANGRVIEKTLYNRRTRQDEPALFVALTFERREVLDSSNIKPMNLIGVDRGENIPAVIALTDPEGCPLSRFKDSLGNPTHILRIGESYKEKQRTIQAKKEVEQRRAGGYSRKYASKAKNLADDMVRNTARDLLYYAVTQDAMLIFENLSRGFGRQGKRTFMAERQYTRMEDWLTAKLAYEGLPSKTYLSKTLAQYTSKTCSNCGFTITSADYDRVLEKLKKTATGWMTTINGKELKVEGQITYYNRYKRQNVVKDLSVELDRLSEESVNNDISSWTKGRSGNEALSLLKKRFSHRPVQEKFVCLNCGFETHADEQAALNIARSWLFLRSQEYKKYQTNKTTGNTDKRAFVETWQSFYRKKLKEVWKPAV

SEQ ID NO: 29053 - protein, 979 aa, synthetic construct
  REGION 1..979: note = engineered CasX variant
QEIKRINKIRRRLVKDSNTKKAGKTRGPMKTLLVRVMTPDLRERLENLRKKPENIPQPISNTSRANLNKLLTDYTEMKKAILHVYWEEFQKDPVGLMSRVAQPASKKIDQNKLKPEMDEKGNLTTAGFACSQCGQPLFVYKLEQVSEKGKAYTNYFGRCNVAEHEKLILLAQLKPEKDSDEAVTYSLGKFGQRALDFYSIHVTKESTHPVKPLAQIAGNRYASGPVGKALSDACMGTIASFLSKYQDIIIEHQKVVKGNQKRLESLRELAGKENLEYPSVTLPPQPHTKEGVDAYNEVIARVRMWVNLNLWQKLKLSRDDAKPLLRLKGFPSFPLVERQANEVDWWDMVCNVKKLINEKKEDGKVFWQNLAGYKRQEALRPYLSSEEDRQKGKKFARYQLGDLLLHLEKKHGEDWGKVYDEAWERIDKKVEGLSKHIKLEEERRSEDAQSKAALTDWLRAKASFVIEGLKEADKDEFCRCELKLQKWYGDLRGKPFAIEAENSILDISGFSKQYNCAFIWQKDGVKKLNLYLIINYFKGGKLRFKKIKPEAFEANRFYTVINKKSGEIVPMEVNFNFDDPNLIILPLAFGKRQGREFIWNDLLSLETGSLKLANGRVIEKTLYNRRTRQDEPALFVALTFERREVLDSSNIKPMNLIGVDRGENIPAVIALTDPEGCPLSRFKDSLGNPTHILRIGESYKEKQRTIQAKKEVEQRRAGGYSRKYASKAKNLADDMVRNTARDLLYYAVTQDAMLIFENLSRGFGRQGKRTFMAERQYTRMEDWLTAKLAYEGLPSKTYLSKTLAQYTSKTCSNCGFTITSADYDRVLEKLKKTATGWMTTINGKELKVEGQITYYNRYKRQNVVKDLSVELDRLSEESVNNDISSWTKGRSGEALSLLKKRFSHRPVQEKFVCLNCGFETHADEQAALNIARSWLFLRSQEYKKYQTNKTTGNTDKRAFVETWQSFYRKKLKEVWKPAV

SEQ ID NO: 29054 - protein, 979 aa, synthetic construct
  REGION 1..979: note = engineered CasX variant
QEIKRINKIRRRLVKDSNTKKAGKTRGPMKTLLVRVMTPDLRERLENLRKKPENIPQPISNTSRANLNKLLTDYTEMKKAILHVYWEEFQKDPVGLMSRVAQPASKKIDQNKLKPEMDEKGNLTTAGFACSQCGQPLFVYKLEQVSEKGKAYTNYFGRCNVAEHEKLILLAQLKPEKDSDEAVTYSLGKFGQRALDFYSIHVTKESTHPVKPLAQIAGNRYASGPVGKALSDACMGTIASFLSKYQDIIIEHQKVVKGNQKRLESLRELAGKENLEYPSVTLPPQPHTKEGVDAYNEVIARVRMWVNLNLWQKLKLSRDDAKPLLRLKGFPSFPLVERQANEVDWWDMVCNVKKLINEKKEDGKVFWQNLAGYKRQEALRPYLSSEEDRKKGKKFARYQLGDLLLHLEKKHGEDWGKVYDEAWERIDKKVEGLSKHIKLEEERRSEDAQSKAALTDWLRAKASFVIEGLKEADKDEFCRCELKLQKWYGDLRGKPFAIEAENSILDISGFSKQYNCAFIWQKDGVKKLNLYLIINYFKGGKLRFKKIKPEAFEANRFYTVINKKSGEIVPMEVNFNFDDPNLIILPLAFGKRQGREFIWNDLLSLETGSLKLANGRVIEKTLYNRRTRQDEPALFVALTFERREVLDSSNIKPMNLIGVDRGENIPAVIALTDPEGCPLSRFKDSLGNPTHILRIGESYKEKQRTIQAKKEVEQRRAGGYSRKYASKAKNLADDMVRNTARDLLYYAVTQDAMLIFENLSRGFGRQGKRTFMAERQYTRMEDWLTAKLAYEGLPSQTYLSKTLAQYTSKTCSNCGFTITSADYDRVLEKLKKTATGWMTTINGKELKVEGQITYYNRYKRQNVVKDLSVELDRLSEESVNNDISSWTKGRSGEALSLLKKRFSHRPVQEKFVCLNCGFETHADEQAALNIARSWLFLRSQEYKKYQTNKTTGNTDKRAFVETWQSFYRKKLKEVWKPAV

SEQ ID NO: 29055 - protein, 979 aa, synthetic construct
  REGION 1..979: note = engineered CasX variant
QEIKRINKIRRRLVKDSNTKKAGKTRGPMKTLLVRVMTPDLRERLENLRKKPENIPQPISNTSRANLNKLLTDYTEMKKAILHVYWEEFQKDPVGLMSRVAQPASKKIDQNKLKPEMDEKGNLTTAGFACSQCGQPLFVYKLEQVSEKGKAYTNYFGRCNVAEHEKLILLAQLKPEKDSDEAVTYSLGKFGQRALDFYSIHVTKESTHPVKPLAQIAGNRYASGPVGKALSDACMGTIASFLSKYQDIIIEHQKVVKGNQKRLESLRELAGKENLEYPSVTLPPQPHTKEGVDAYNEVIARVRMWVNLNLWQKLKLSRDDAKPLLRLKGFPSFPLVERQANEVDWWDMVCNVKKLINEKKEDGKVFWQNLAGYKRQEALRPYLSSEEDRKKGKKFARYQLGDLLLHLEKKHGEDWGKVYDEAWERIDKKVEGLSKHIKLEEERRSEDAQSKAALTDWLRAKASFVIEGLKEADKDEFCRCELKLQKWYGDLRGKPFAIEAENSILDISGFSKQYNCAFIWQKDGVKKLNLYLIINYFKGGKLRFKKIKPEAFEANRFYTVINKKSGEIVPMEVNFNFDDPNLIILPLAFGKRQGREFIWNDLLSLETGSLKLANGRVIEKTLYNRRTRQDEPALFVALTFERREVLDSSNIKPMNLIGVDRGENIPAVIALTDPEGCPLSRFKDSLGNPTHILRIGESYKEKQRTIQAKKEVEQRRAGGYSRKYASKAKNLADDMVRNTARDLLYYAVTQDAMLIFENLSRGFGRQGKRTFMAERQYTRMEDWLTAKLAYNGLPSKTYLSKTLAQYTSKTCSNCGFTITSADYDRVLEKLKKTATGWMTTINGKELKVEGQITYYNRYKRQNVVKDLSVELDRLSEESVNNDISSWTKGRSGEALSLLKKRFSHRPVQEKFVCLNCGFETHADEQAALNIARSWLFLRSQEYKKYQTNKTTGNTDKRAFVETWQSFYRKKLKEVWKPAV

SEQ ID NO: 29056 - protein, 979 aa, synthetic construct
  REGION 1..979: note = engineered CasX variant
QEIKRINKIRRRLVKDSNTKKAGKTRGPMKTLLVRVMTPDLRERLENLRKKPENIPQPISNTSRANLNKLLTDYTEMKKAILHVYWEEFQKDPVGLMSRVAQPASKKIDQNKLKPEMDEKGNLTTAGFACSQCGQPLFVYKLEQVSEKGKAYTNYFGRCNVAEHEKLIQLAQLKPEKDSDEAVTYSLGKFGQRALDFYSIHVTKESTHPVKPLAQIAGNRYASGPVGKALSDACMGTIASFLSKYQDIIIEHQKVVKGNQKRLESLRELAGKENLEYPSVTLPPQPHTKEGVDAYNEVIARVRMWVNLNLWQKLKLSRDDAKPLLRLKGFPSFPLVERQANEVDWWDMVCNVKKLINEKKEDGKVFWQNLAGYKRQEALRPYLSSEEDRKKGKKFARYQLGDLLLHLEKKHGEDWGKVYDEAWERIDKKVEGLSKHIKLEEERRSEDAQSKAALTDWLRAKASFVIEGLKEADKDEFCRCELKLQKWYGDLRGKPFAIEAENSILDISGFSKQYNCAFIWQKDGVKKLNLYLIINYFKGGKLRFKKIKPEAFEANRFYTVINKKSGEIVPMEVNFNFDDPNLIILPLAFGKRQGREFIWNDLLSLETGSLKLANGRVIEKTLYNRRTRQDEPALFVALTFERREVLDSSNIKPMNLIGVDRGENIPAVIALTDPEGCPLSRFKDSLGNPTHILRIGESYKEKQRTIQAKKEVEQRRAGGYSRKYASKAKNLADDMVRNTARDLLYYAVTQDAMLIFENLSRGFGRQGKRTFMAERQYTRMEDWLTAKLAYEGLPSKTYLSKTLAQYTSKTCSNCGFTITSADYDRVLEKLKKTATGWMTTINGKELKVEGQITYYNRYKRQNVVKDLSVELDRLSEESVNNDISSWTKGRSGEALSLLKKRFSHRPVQEKFVCLNCGFETHADEQAALNIARSWLFLRSQEYKKYQTNKTTGNTDKRAFVETWQSFYRKKLKEVWKPAV

SEQ ID NO: 29057 - protein, 979 aa, synthetic construct
  REGION 1..979: note = engineered CasX variant
QEIKRINKIRRRLVKDSNTKKAGKTRGPMKTLLVRVMTPDLRERLENLRKKPENIPQPISNTSRANLNKLLTDYTEMKKAILHVYWEEFQKDPVGLMSRVAQPASKKIDQNKLKPEMDEKGNLTTAGFACSQCGQPLFVYKLEQVSEKGKAYTNYFGRCNVAEHEKLILLAQLKPEKDSDEAVTYSLGKFGQRALDFYSIHVTKESTHPVKPLAQIAGNRYASGPVGKALSDACMGTIASFLSKYQDIIIEHQKVVKGNQKRLESLRELAGKENLEYPSVTLPPQPHTKEGVDAYNEVIARVRMWVNLNLWQKLKLSRDDAKPLLRLKGFPSFPLVERQANEVDWWDMVCNVKKLINEKKEDGKVFWQNLAIYKRQEALRPYLSSEEDRKKGKKFARYQLGDLLLHLEKKHGEDWGKVYDEAWERIDKKVEGLSKHIKLEEERRSEDAQSKAALTDWLRAKASFVIEGLKEADKDEFCRCELKLQKWYGDLRGKPFAIEAENSILDISGFSKQYNCAFIWQKDGVKKLNLYLIINYFKGGKLRFKKIKPEAFEANRFYTVINKKSGEIVPMEVNFNFDDPNLIILPLAFGKRQGREFIWNDLLSLETGSLKLANGRVIEKTLYNRRTRQDEPALFVALTFERREVLDSSNIKPMNLIGVDRGENIPAVIALTDPEGCPLSRFKDSLGNPTHILRIGESYKEKQRTIQAKKEVEQRRAGGYSRKYASKAKNLADDMVRNTARDLLYYAVTQDAMLIFENLSRGFGRQGKRTFMAERQYTRMEDWLTAKLAYEGLPSKTYLSKTLAQYTSKTCSNCGFTITSADYDRVLEKLKKTATGWMTTINGKELKVEGQITYYNRYKRQNVVKDLSVELDRLSEESVNNDISSWTKGRSGEALSLLKKRFSHRPVQEKFVCLNCGFETHADEQAALNIARSWLFLRSQEYKKYQTNKTTGNTDKRAFVETWQSFYRKKLKEVWKPAV

SEQ ID NO: 29058 - protein, 979 aa, synthetic construct
  REGION 1..979: note = engineered CasX variant
QEIKRINKIRRRLVKDSNTKKAGKTRGPMKTLLVRVMTPDLRERLENLRKKPENIPQPISNTSRANLNKLLTDYTEMKKAILHVYWEEFQKDPVGLMSRVAQPASKKIDQNKLKPEMDEKGNLTTAGFACSQCGQPLFVYKLEQVSEKGKAYTNYFGRCNVAEHEKLILLAQLKPEKDSDEAVTYSLGKFGQRALDFYSIHVTKESTHPVKPLAQIAGNRYASGPVGKALSDACMGTIASFLSKYQDIIIEHQKVVKGNQKRLESLRELAGKENLEYPSVTLPPQPHTKEGVDAYNEVIARVRMWVNLNLWQKLKLSRDDAKPLLRLKGFPSFPLVERQANEVDWWDMVCNVKKLINEKKEDGKVFWQNLAGYKRQEALRPYLSSEEDREKGKKFARYQLGDLLLHLEKKHGEDWGKVYDEAWERIDKKVEGLSKHIKLEEERRSEDAQSKAALTDWLRAKASFVIEGLKEADKDEFCRCELKLQKWYGDLRGKPFAIEAENSILDISGFSKQYNCAFIWQKDGVKKLNLYLIINYFKGGKLRFKKIKPEAFEANRFYTVINKKSGEIVPMEVNFNFDDPNLIILPLAFGKRQGREFIWNDLLSLETGSLKLANGRVIEKTLYNRRTRQDEPALFVALTFERREVLDSSNIKPMNLIGVDRGENIPAVIALTDPEGCPLSRFKDSLGNPTHILRIGESYKEKQRTIQAKKEVEQRRAGGYSRKYASKAKNLADDMVRNTARDLLYYAVTQDAMLIFENLSRGFGRQGKRTFMAERQYTRMEDWLTAKLAYEGLPSKTYLSKTLAQYTSKTCSNCGFTITSADYDRVLEKLKKTATGWMTTINGKELKVEGQITYYNRYKRQNVVKDLSVELDRLSEESVNNDISSWTKGRSGEALSLLKKRFSHRPVQEKFVCLNCGFETHADEQAALNIARSWLFLRSQEYKKYQTNKTTGNTDKRAFVETWQSFYRKKLKEVWKPAV

SEQ ID NO: 29059 - protein, 979 aa, synthetic construct
  REGION 1..979: note = engineered CasX variant
QEIKRINKIRRRLVKDSNTKKAGKTRGPMKTLLVRVMTPDLRERLENLRKKPENIPQPISNTSRANLNKLLTDYTEMKKAILHVYWEEFQKDPVGLMSRVAQPASKKIDQNKLKPEMDEKGNLTTAGFACSQCGQPLFVYKLEQVSEKGKAYTNYFGRCNVAEHEKLILLAQLKPEKDSDEAVTYSLGKFGQRALDFYSIHVTKESTHPVKPLAQIAGNRYASGPVGKALSDACMGTIASFLSKYQDIIIEHQKVVKGNQKRLESLRELAGKENLEYPSVTLPPQPHTKEGVDAYNEVIARVRMWVNLNLWQKLKLSRDDAKPLLRLKGFPSFPLVERQANEVDWWDMVCNVKKLINEKKEDGKVFWQNLAGYKRQEALRPYLSSEEDRKKGKKFARYQLGDLLLHLEKKHGEDWGKVYDEAWERIDKKVEGLSKHIKLEEERRSEDAQSKAALTDWLRAKASFVIEGLKEADKDEFCRCELKLQKWYGDLRGKPFAIEAENSILDISGFSKQYNCAFIWQKDGVKKLNLYLIINYFKGGKLRFKKIKPEAFEANRFYTVINKKSGEIVIMEVNFNFDDPNLIILPLAFGKRQGREFIWNDLLSLETGSLKLANGRVIEKTLYNRRTRQDEPALFVALTFERREVLDSSNIKPMNLIGVDRGENIPAVIALTDPEGCPLSRFKDSLGNPTHILRIGESYKEKQRTIQAKKEVEQRRAGGYSRKYASKAKNLADDMVRNTARDLLYYAVTQDAMLIFENLSRGFGRQGKRTFMAERQYTRMEDWLTAKLAYEGLPSKTYLSKTLAQYTSKTCSNCGFTITSADYDRVLEKLKKTATGWMTTINGKELKVEGQITYYNRYKRQNVVKDLSVELDRLSEESVNNDISSWTKGRSGEALSLLKKRFSHRPVQEKFVCLNCGFETHADEQAALNIARSWLFLRSQEYKKYQTNKTTGNTDKRAFVETWQSFYRKKLKEVWKPAV

SEQ ID NO: 29060 - protein, 978 aa, synthetic construct
  REGION 1..978: note = engineered CasX variant
QEIKRINKIRRRLVKDSNTKKAGKTGPMKTLLVRVMTPDLRERLENLRKKPENIPQPISNTSRANLNKLLTDYTEMKKAILHVYWEEFQKDPVGLMSRVAQPASKKIDQNKLKPEMDEKGNLTTAGFACSQCGQPLFVYKLEQVSEKGKAYTNYFGRCNVAEHEKLILLAQLKPEKDSDEAVTYSLGKFGQRALDFYSIHVTKESTHPVKPLAQIAGNRYASSPVGKALSGACMGTIASFLSKYQDIIIEHQKVVKGNQKRLESLRELAGKENLEYPSVTLPPQPHTKEGVDAYNEVIARVRMWVNLNLWQKLKLSRDDAKPLLRLKGFPSFPLVERQANEVDWWDMVCNVKKLINEKKEDGKVFWQNLAGYKRQEALRPYLSSEEDRKKGKKFARYQLGDLLLHLEKKHGEDWGKVYDEAWERIDKKVEGLSKHIKLEEERRSEDAQSKAALTDWLRAKASFVIEGLKEADKDEFCRCELKLQKWYGDLRGKPFAIEAENSILDISGFSKQYNCAFIWQKDGVKKLNLYLIINYFKGGKLRFKKIKPEAFEANRFYTVINKKSGEIVPMEVNFNFDDPNLIILPLAFGKRQGREFIWNDLLSLETGSLKLANGRVIEKTLYNRRTRQDEPALFVALTFERREVLDSSNIKPMNLIGVDRGENIPAVIALTDPEGCPLSRFKDSLGNPTHILRIGESYKEKQRTIQAKKEVEQRRAGGYSRKYASKAKNLADDMVRNTARDLLYYAVTQDAMLIFENLSRGFGRQGKRTFMAERQYTRMEDWLTAKLAYEGLPSKTYLSKTLAQYTSKTCSNCGFTITSADYDRVLEKLKKTATGWMTTINGKELKVEGQITYYNRYKRQNVVKDLSVELDRLSEESVNNDISSWTKGRSGEALSLLKKRFSHRPVQEKFVCLNCGFETHADEQAALNIARSWLFLRSQEYKKYQTNKTTGNTDKRAFVETWQSFYRKKLKEVWKPAV

SEQ ID NO: 29061 - protein, 978 aa, synthetic construct
  REGION 1..978: note = engineered CasX variant
QEIKRINKIRRRLVKDSNTKKAGKTGPMKTLLVRVMTPDLRERLENLRKKPENIPQPISNTSRANLNKLLTDYTEMKKAILHVYWEEFQKDPVGLMSRVAQPASKKIDQNKLKPEMDEKGNLTTAGFACSQCGQPLFVYKLEQVSEKGKAYTNYFGRCNVAEHEKLILLAQLKPEKDSDEAVTYSLGKFGQRALDFYSIHVTKESTHPVKPLAQIAGNRYASSPVGKALSDACMGTIASFLSKYQDIIIEHQKVVKGNQKRLESLRELAGKENLEYPSVTLPPQPHTKEGVDAYNEVIARVRMWVNLNLWQKLKLSRDDAKPLLRLKNFPSFPLVERQANEVDWWDMVCNVKKLINEKKEDGKVFWQNLAGYKRQEALRPYLSSEEDRKKGKKFARYQLGDLLLHLEKKHGEDWGKVYDEAWERIDKKVEGLSKHIKLEEERRSEDAQSKAALTDWLRAKASFVIEGLKEADKDEFCRCELKLQKWYGDLRGKPFAIEAENSILDISGFSKQYNCAFIWQKDGVKKLNLYLIINYFKGGKLRFKKIKPEAFEANRFYTVINKKSGEIVPMEVNFNFDDPNLIILPLAFGKRQGREFIWNDLLSLETGSLKLANGRVIEKTLYNRRTRQDEPALFVALTFERREVLDSSNIKPMNLIGVDRGENIPAVIALTDPEGCPLSRFKDSLGNPTHILRIGESYKEKQRTIQAKKEVEQRRAGGYSRKYASKAKNLADDMVRNTARDLLYYAVTQDAMLIFENLSRGFGRQGKRTFMAERQYTRMEDWLTAKLAYEGLPSKTYLSKTLAQYTSKTCSNCGFTITSADYDRVLEKLKKTATGWMTTINGKELKVEGQITYYNRYKRQNVVKDLSVELDRLSEESVNNDISSWTKGRSGEALSLLKKRFSHRPVQEKFVCLNCGFETHADEQAALNIARSWLFLRSQEYKKYQTNKTTGNTDKRAFVETWQSFYRKKLKEVWKPAV

SEQ ID NO: 29062 - protein, 978 aa, synthetic construct
  REGION 1..978: note = engineered CasX variant
QEIKRINKIRRRLVKDSNTKKAGKTGPMKTLLVRVMTPDLRERLENLRKKPENIPQPISNTSRANLNKLLTDYTEMKKAILHVYWEEFQKDPVGLMSRVAQPASKKIDQNKLKPEMDEKGNLTTAGFACSQCGQPLFVYKLEQVSEKGKAYTNYFGRCNVAEHEKLILLAQLKPEKDSDEAVTYSLGKFGQRALDFYSIHVTKESTHPVKPLAQIAGNRYASSPVGKALSDACMGTIASFLSKYQDIIIEHQKVVKGNQKRLESLRELAGKENLEYPSVTLPPQPHTKEGVDAYNEVIARVRMWVNLNLWQKLKLSRDDAKPLLRLKGFPSFPLVERQANEVDWWDMVCNVKKLINEKKEDGKVFWQNLAGYKRQEALRPYLSSEEDRKKGKKFARYQLGDLLNHLEKKHGEDWGKVYDEAWERIDKKVEGLSKHIKLEEERRSEDAQSKAALTDWLRAKASFVIEGLKEADKDEFCRCELKLQKWYGDLRGKPFAIEAENSILDISGFSKQYNCAFIWQKDGVKKLNLYLIINYFKGGKLRFKKIKPEAFEANRFYTVINKKSGEIVPMEVNFNFDDPNLIILPLAFGKRQGREFIWNDLLSLETGSLKLANGRVIEKTLYNRRTRQDEPALFVALTFERREVLDSSNIKPMNLIGVDRGENIPAVIALTDPEGCPLSRFKDSLGNPTHILRIGESYKEKQRTIQAKKEVEQRRAGGYSRKYASKAKNLADDMVRNTARDLLYYAVTQDAMLIFENLSRGFGRQGKRTFMAERQYTRMEDWLTAKLAYEGLPSKTYLSKTLAQYTSKTCSNCGFTITSADYDRVLEKLKKTATGWMTTINGKELKVEGQITYYNRYKRQNVVKDLSVELDRLSEESVNNDISSWTKGRSGEALSLLKKRFSHRPVQEKFVCLNCGFETHADEQAALNIARSWLFLRSQEYKKYQTNKTTGNTDKRAFVETWQSFYRKKLKEVWKPAV

SEQ ID NO: 29063 - protein, 978 aa, synthetic construct
  REGION 1..978: note = engineered CasX variant
QEIKRINKIRRRLVKDSNTKKAGKTGPMKTLLVRVMTPDLRERLENLRKKPENIPQPISNTSRANLNKLLTDYTEMKKAILHVYWEEFQKDPVGLMSRVAQPASKKIDQNKLKPEMDEKGNLTTAGFACSQCGQPLFVYKLEQVSEKGKAYTNYFGRCNVAEHEKLILLAQLKPEKDSDEAVTYSLGKFGQRALDFYSIHVTKESTHPVKPLAQIAGNRYASSPVGKALSDACMGTIASFLSKYQDIIIEHQKVVKGNQKRLESLRELAGKENLEYPSVTLPPQPHTKEGVDAYNEVIARVRMWVNLNLWQKLKLSRDDAKPLLRLKGFPSFPLVERQANEVDWWDMVCNVKKLINEKKEDGKVFWQNLAGYKRQEALRPYLSSEEDRKKGKKFARYQLGDLLWHLEKKHGEDWGKVYDEAWERIDKKVEGLSKHIKLEEERRSEDAQSKAALTDWLRAKASFVIEGLKEADKDEFCRCELKLQKWYGDLRGKPFAIEAENSILDISGFSKQYNCAFIWQKDGVKKLNLYLIINYFKGGKLRFKKIKPEAFEANRFYTVINKKSGEIVPMEVNFNFDDPNLIILPLAFGKRQGREFIWNDLLSLETGSLKLANGRVIEKTLYNRRTRQDEPALFVALTFERREVLDSSNIKPMNLIGVDRGENIPAVIALTDPEGCPLSRFKDSLGNPTHILRIGESYKEKQRTIQAKKEVEQRRAGGYSRKYASKAKNLADDMVRNTARDLLYYAVTQDAMLIFENLSRGFGRQGKRTFMAERQYTRMEDWLTAKLAYEGLPSKTYLSKTLAQYTSKTCSNCGFTITSADYDRVLEKLKKTATGWMTTINGKELKVEGQITYYNRYKRQNVVKDLSVELDRLSEESVNNDISSWTKGRSGEALSLLKKRFSHRPVQEKFVCLNCGFETHADEQAALNIARSWLFLRSQEYKKYQTNKTTGNTDKRAFVETWQSFYRKKLKEVWKPAV

SEQ ID NO: 29064 - protein, 978 aa, synthetic construct
  REGION 1..978: note = engineered CasX variant
QEIKRINKIRRRLVKDSNTKKAGKTGPMKTLLVRVMTPDLRERLENLRKKPENIPQPISNTSRANLNKLLTDYTEMKKAILHVYWEEFQKDPVGLMSRVAQPASKKIDQNKLKPEMDEKGNLTTAGFACSQCGQPLFVYKLEQVSEKGKAYTNYFGRCNVAEHEKLILLAQLKPEKDSDEAVTYSLGKFGQRALDFYSIHVTKESTHPVKPLAQIAGNRYASSPVGKALSDACMGTIASFLSKYQDIIIEHQKVVKGNQKRLESLRELAGKENLEYPSVTLPPQPHTKEGVDAYNEVIARVRMWVNLNLWQKLKLSRDDAKPLLRLKGFPSFPLVERQANEVDWWDMVCNVKKLINEKKEDGKVFWQNLAGYKRQEALRPYLSSEEDRKKGKKFARYQLGDLLLHLYKKHGEDWGKVYDEAWERIDKKVEGLSKHIKLEEERRSEDAQSKAALTDWLRAKASFVIEGLKEADKDEFCRCELKLQKWYGDLRGKPFAIEAENSILDISGFSKQYNCAFIWQKDGVKKLNLYLIINYFKGGKLRFKKIKPEAFEANRFYTVINKKSGEIVPMEVNFNFDDPNLIILPLAFGKRQGREFIWNDLLSLETGSLKLANGRVIEKTLYNRRTRQDEPALFVALTFERREVLDSSNIKPMNLIGVDRGENIPAVIALTDPEGCPLSRFKDSLGNPTHILRIGESYKEKQRTIQAKKEVEQRRAGGYSRKYASKAKNLADDMVRNTARDLLYYAVTQDAMLIFENLSRGFGRQGKRTFMAERQYTRMEDWLTAKLAYEGLPSKTYLSKTLAQYTSKTCSNCGFTITSADYDRVLEKLKKTATGWMTTINGKELKVEGQITYYNRYKRQNVVKDLSVELDRLSEESVNNDISSWTKGRSGEALSLLKKRFSHRPVQEKFVCLNCGFETHADEQAALNIARSWLFLRSQEYKKYQTNKTTGNTDKRAFVETWQSFYRKKLKEVWKPAV

SEQ ID NO: 29065 - protein, 978 aa, synthetic construct
  REGION 1..978: note = engineered CasX variant
QEIKRINKIRRRLVKDSNTKKAGKTGPMKTLLVRVMTPDLRERLENLRKKPENIPQPISNTSRANLNKLLTDYTEMKKAILHVYWEEFQKDPVGLMSRVAQPASKKIDQNKLKPEMDEKGNLTTAGFACSQCGQPLFVYKLEQVSEKGKAYTNYFGRCNVAEHEKLILLAQLKPEKDSDEAVTYSLGKFGQRALDFYSIHVTKESTHPVKPLAQIAGNRYASSPVGKALSDACMGTIASFLSKYQDIIIEHQKVVKGNQKRLESLRELAGKENLEYPSVTLPPQPHTKEGVDAYNEVIARVRMWVNLNLWQKLKLSRDDAKPLLRLKGFPSFPLVERQANEVDWWDMVCNVKKLINEKKEDGKVFWQNLAGYKRQEALRPYLSSEEDRKKGKKFARYQLGDLLLHLEKKHPEDWGKVYDEAWERIDKKVEGLSKHIKLEEERRSEDAQSKAALTDWLRAKASFVIEGLKEADKDEFCRCELKLQKWYGDLRGKPFAIEAENSILDISGFSKQYNCAFIWQKDGVKKLNLYLIINYFKGGKLRFKKIKPEAFEANRFYTVINKKSGEIVPMEVNFNFDDPNLIILPLAFGKRQGREFIWNDLLSLETGSLKLANGRVIEKTLYNRRTRQDEPALFVALTFERREVLDSSNIKPMNLIGVDRGENIPAVIALTDPEGCPLSRFKDSLGNPTHILRIGESYKEKQRTIQAKKEVEQRRAGGYSRKYASKAKNLADDMVRNTARDLLYYAVTQDAMLIFENLSRGFGRQGKRTFMAERQYTRMEDWLTAKLAYEGLPSKTYLSKTLAQYTSKTCSNCGFTITSADYDRVLEKLKKTATGWMTTINGKELKVEGQITYYNRYKRQNVVKDLSVELDRLSEESVNNDISSWTKGRSGEALSLLKKRFSHRPVQEKFVCLNCGFETHADEQAALNIARSWLFLRSQEYKKYQTNKTTGNTDKRAFVETWQSFYRKKLKEVWKPAV

SEQ ID NO: 29066 - protein, 979 aa, synthetic construct
  REGION 1..979: note = engineered CasX variant
QEIKRINKIRRRLVKDSNTKKAGKTGPMKTLLVRVMTPDLRERLENLRKKPENIPQPISNTSRANLNKLLTDYTEMKKAILHVYWEEFQKDPVGLMSRVAQPASKKIDQNKLKPEMDEKGNLTTAGFACSQCGQPLFVYKLEQVSEKGKAYTNYFGRCNVAEHEKLILLAQLKPEKDSDEAVTYSLGKFGQRALDFYSIHVTKESTHPVKPLAQIAGNRYASSPVGKALSDACMGTIASFLSKYQDIIIEHQKVVKGNQKRLESLRELAGKENLEYPSVTLPPQPHTKEGVDAYNEVIARVRMWVNLNLWQKLKLSRDDAKPLLRLKGFPSFPLVERQANEVDWWDMVCNVKKLINEKKEDGKVFWQNLAGYKRQEALRPYLSSEEDRKKGKKFARYQLGDLLLHLEKKHGERDWGKVYDEAWERIDKKVEGLSKHIKLEEERRSEDAQSKAALTDWLRAKASFVIEGLKEADKDEFCRCELKLQKWYGDLRGKPFAIEAENSILDISGFSKQYNCAFIWQKDGVKKLNLYLIINYFKGGKLRFKKIKPEAFEANRFYTVINKKSGEIVPMEVNFNFDDPNLIILPLAFGKRQGREFIWNDLLSLETGSLKLANGRVIEKTLYNRRTRQDEPALFVALTFERREVLDSSNIKPMNLIGVDRGENIPAVIALTDPEGCPLSRFKDSLGNPTHILRIGESYKEKQRTIQAKKEVEQRRAGGYSRKYASKAKNLADDMVRNTARDLLYYAVTQDAMLIFENLSRGFGRQGKRTFMAERQYTRMEDWLTAKLAYEGLPSKTYLSKTLAQYTSKTCSNCGFTITSADYDRVLEKLKKTATGWMTTINGKELKVEGQITYYNRYKRQNVVKDLSVELDRLSEESVNNDISSWTKGRSGEALSLLKKRFSHRPVQEKFVCLNCGFETHADEQAALNIARSWLFLRSQEYKKYQTNKTTGNTDKRAFVETWQSFYRKKLKEVWKPAV

SEQ ID NO: 29067 - protein, 979 aa, synthetic construct
  REGION 1..979: note = engineered CasX variant
QEIKRINKIRRRLVKDSNTKKAGKTGPMKTLLVRVMTPDLRERLENLRKKPENIPQPISNTSRANLNKLLTDYTEMKKAILHVYWEEFQKDPVGLMSRVAQPASKKIDQNKLKPEMDEKGNLTTAGFACSQCGQPLFVYKLEQVSEKGKAYTNYFGRCNVAEHEKLILLAQLKPEKDSDEAVTYSLGKFGQRALDFYSIHVTKESTHPVKPLAQIAGNRYASSPVGKALSDACMGTIASFLSKYQDIIIEHQKVVKGNQKRLESLRELAGKENLEYPSVTLPPQPHTKEGVDAYNEVIARVRMWVNLNLWQKLKLSRDDAKPLLRLKGFPSFPLVERQANEVDWWDMVCNVKKLINEKKEDGKVFWQNLAGYKRQEALRPYLSSEEDRKKGKKFARYQLGDLLLHLEKKHGEYDWGKVYDEAWERIDKKVEGLSKHIKLEEERRSEDAQSKAALTDWLRAKASFVIEGLKEADKDEFCRCELKLQKWYGDLRGKPFAIEAENSILDISGFSKQYNCAFIWQKDGVKKLNLYLIINYFKGGKLRFKKIKPEAFEANRFYTVINKKSGEIVPMEVNFNFDDPNLIILPLAFGKRQGREFIWNDLLSLETGSLKLANGRVIEKTLYNRRTRQDEPALFVALTFERREVLDSSNIKPMNLIGVDRGENIPAVIALTDPEGCPLSRFKDSLGNPTHILRIGESYKEKQRTIQAKKEVEQRRAGGYSRKYASKAKNLADDMVRNTARDLLYYAVTQDAMLIFENLSRGFGRQGKRTFMAERQYTRMEDWLTAKLAYEGLPSKTYLSKTLAQYTSKTCSNCGFTITSADYDRVLEKLKKTATGWMTTINGKELKVEGQITYYNRYKRQNVVKDLSVELDRLSEESVNNDISSWTKGRSGEALSLLKKRFSHRPVQEKFVCLNCGFETHADEQAALNIARSWLFLRSQEYKKYQTNKTTGNTDKRAFVETWQSFYRKKLKEVWKPAV

SEQ ID NO: 29068 - protein, 978 aa, synthetic construct
  REGION 1..978: note = engineered CasX variant
QEIKRINKIRRRLVKDSNTKKAGKTGPMKTLLVRVMTPDLRERLENLRKKPENIPQPISNTSRANLNKLLTDYTEMKKAILHVYWEEFQKDPVGLMSRVAQPASKKIDQNKLKPEMDEKGNLTTAGFACSQCGQPLFVYKLEQVSEKGKAYTNYFGRCNVAEHEKLILLAQLKPEKDSDEAVTYSLGKFGQRALDFYSIHVTKESTHPVKPLAQIAGNRYASSPVGKALSDACMGTIASFLSKYQDIIIEHQKVVKGNQKRLESLRELAGKENLEYPSVTLPPQPHTKEGVDAYNEVIARVRMWVNLNLWQKLKLSRDDAKPLLRLKGFPSFPLVERQANEVDWWDMVCNVKKLINEKKEDGKVFWQNLAGYKRQEALRPYLSSEEDRKKGKKFARYQLGDLLLHLEKKHGEDWGDVYDEAWERIDKKVEGLSKHIKLEEERRSEDAQSKAALTDWLRAKASFVIEGLKEADKDEFCRCELKLQKWYGDLRGKPFAIEAENSILDISGFSKQYNCAFIWQKDGVKKLNLYLIINYFKGGKLRFKKIKPEAFEANRFYTVINKKSGEIVPMEVNFNFDDPNLIILPLAFGKRQGREFIWNDLLSLETGSLKLANGRVIEKTLYNRRTRQDEPALFVALTFERREVLDSSNIKPMNLIGVDRGENIPAVIALTDPEGCPLSRFKDSLGNPTHILRIGESYKEKQRTIQAKKEVEQRRAGGYSRKYASKAKNLADDMVRNTARDLLYYAVTQDAMLIFENLSRGFGRQGKRTFMAERQYTRMEDWLTAKLAYEGLPSKTYLSKTLAQYTSKTCSNCGFTITSADYDRVLEKLKKTATGWMTTINGKELKVEGQITYYNRYKRQNVVKDLSVELDRLSEESVNNDISSWTKGRSGEALSLLKKRFSHRPVQEKFVCLNCGFETHADEQAALNIARSWLFLRSQEYKKYQTNKTTGNTDKRAFVETWQSFYRKKLKEVWKPAV

SEQ ID NO: 29069 - protein, 978 aa, synthetic construct
  REGION 1..978: note = engineered CasX variant
QEIKRINKIRRRLVKDSNTKKAGKTGPMKTLLVRVMTPDLRERLENLRKKPENIPQPISNTSRANLNKLLTDYTEMKKAILHVYWEEFQKDPVGLMSRVAQPASKKIDQNKLKPEMDEKGNLTTAGFACSQCGQPLFVYKLEQVSEKGKAYTNYFGRCNVAEHEKLILLAQLKPEKDSDEAVTYSLGKFGQRALDFYSIHVTKESTHPVKPLAQIAGNRYASSPVGKALSDACMGTIASFLSKYQDIIIEHQKVVKGNQKRLESLRELAGKENLEYPSVTLPPQPHTKEGVDAYNEVIARVRMWVNLNLWQKLKLSRDDAKPLLRLKGFPSFPLVERQANEVDWWDMVCNVKKLINEKKEDGKVFWQNLAGYKRQEALRPYLSSEEDRKKGKKFARYQLGDLLLHLEKKHGEDWGKVYGEAWERIDKKVEGLSKHIKLEEERRSEDAQSKAALTDWLRAKASFVIEGLKEADKDEFCRCELKLQKWYGDLRGKPFAIEAENSILDISGFSKQYNCAFIWQKDGVKKLNLYLIINYFKGGKLRFKKIKPEAFEANRFYTVINKKSGEIVPMEVNFNFDDPNLIILPLAFGKRQGREFIWNDLLSLETGSLKLANGRVIEKTLYNRRTRQDEPALFVALTFERREVLDSSNIKPMNLIGVDRGENIPAVIALTDPEGCPLSRFKDSLGNPTHILRIGESYKEKQRTIQAKKEVEQRRAGGYSRKYASKAKNLADDMVRNTARDLLYYAVTQDAMLIFENLSRGFGRQGKRTFMAERQYTRMEDWLTAKLAYEGLPSKTYLSKTLAQYTSKTCSNCGFTITSADYDRVLEKLKKTATGWMTTINGKELKVEGQITYYNRYKRQNVVKDLSVELDRLSEESVNNDISSWTKGRSGEALSLLKKRFSHRPVQEKFVCLNCGFETHADEQAALNIARSWLFLRSQEYKKYQTNKTTGNTDKRAFVETWQSFYRKKLKEVWKPAV

SEQ ID NO: 29070 - protein, 978 aa, synthetic construct
  REGION 1..978: note = engineered CasX variant
QEIKRINKIRRRLVKDSNTKKAGKTGPMKTLLVRVMTPDLRERLENLRKKPENIPQPISNTSRANLNKLLTDYTEMKKAILHVYWEEFQKDPVGLMSRVAQPASKKIDQNKLKPEMDEKGNLTTAGFACSQCGQPLFVYKLEQVSEKGKAYTNYFGRCNVAEHEKLILLAQLKPEKDSDEAVTYSLGKFGQRALDFYSIHVTKESTHPVKPLAQIAGNRYASSPVGKALSDACMGTIASFLSKYQDIIIEHQKVVKGNQKRLESLRELAGKENLEYPSVTLPPQPHTKEGVDAYNEVIARVRMWVNLNLWQKLKLSRDDAKPLLRLKGFPSFPLVERQANEVDWWDMVCNVKKLINEKKEDGKVFWQNLAGYKRQEALRPYLSSEEDRKKGKKFARYQLGDLLLHLEKKHGEDWGKVYDEAWERIDKKVEGLSKHIKLEEERRSEDAQSKAALTDWLRAKASFVIEGKKEADKDEFCRCELKLQKWYGDLRGKPFAIEAENSILDISGFSKQYNCAFIWQKDGVKKLNLYLIINYFKGGKLRFKKIKPEAFEANRFYTVINKKSGEIVPMEVNFNFDDPNLIILPLAFGKRQGREFIWNDLLSLETGSLKLANGRVIEKTLYNRRTRQDEPALFVALTFERREVLDSSNIKPMNLIGVDRGENIPAVIALTDPEGCPLSRFKDSLGNPTHILRIGESYKEKQRTIQAKKEVEQRRAGGYSRKYASKAKNLADDMVRNTARDLLYYAVTQDAMLIFENLSRGFGRQGKRTFMAERQYTRMEDWLTAKLAYEGLPSKTYLSKTLAQYTSKTCSNCGFTITSADYDRVLEKLKKTATGWMTTINGKELKVEGQITYYNRYKRQNVVKDLSVELDRLSEESVNNDISSWTKGRSGEALSLLKKRFSHRPVQEKFVCLNCGFETHADEQAALNIARSWLFLRSQEYKKYQTNKTTGNTDKRAFVETWQSFYRKKLKEVWKPAV

SEQ ID NO: 29071 - protein, 978 aa, synthetic construct
  REGION 1..978: note = engineered CasX variant
QEIKRINKIRRRLVKDSNTKKAGKTGPMKTLLVRVMTPDLRERLENLRKKPENIPQPISNTSRANLNKLLTDYTEMKKAILHVYWEEFQKDPVGLMSRVAQPASKKIDQNKLKPEMDEKGNLTTAGFACSQCGQPLFVYKLEQVSEKGKAYTNYFGRCNVAEHEKLILLAQLKPEKDSDEAVTYSLGKFGQRALDFYSIHVTKESTHPVKPLAQIAGNRYASSPVGKALSDACMGTIASFLSKYQDIIIEHQKVVKGNQKRLESLRELAGKENLEYPSVTLPPQPHTKEGVDAYNEVIARVRMWVNLNLWQKLKLSRDDAKPLLRLKGFPSFPLVERQANEVDWWDMVCNVKKLINEKKEDGKVFWQNLAGYKRQEALRPYLSSEEDRKKGKKFARYQLGDLLLHLEKKHGEDWGKVYDEAWERIDKKVEGLSKHIKLEEERRSEDAQSKAALTDWLRAKASFVIEGSKEADKDEFCRCELKLQKWYGDLRGKPFAIEAENSILDISGFSKQYNCAFIWQKDGVKKLNLYLIINYFKGGKLRFKKIKPEAFEANRFYTVINKKSGEIVPMEVNFNFDDPNLIILPLAFGKRQGREFIWNDLLSLETGSLKLANGRVIEKTLYNRRTRQDEPALFVALTFERREVLDSSNIKPMNLIGVDRGENIPAVIALTDPEGCPLSRFKDSLGNPTHILRIGESYKEKQRTIQAKKEVEQRRAGGYSRKYASKAKNLADDMVRNTARDLLYYAVTQDAMLIFENLSRGFGRQGKRTFMAERQYTRMEDWLTAKLAYEGLPSKTYLSKTLAQYTSKTCSNCGFTITSADYDRVLEKLKKTATGWMTTINGKELKVEGQITYYNRYKRQNVVKDLSVELDRLSEESVNNDISSWTKGRSGEALSLLKKRFSHRPVQEKFVCLNCGFETHADEQAALNIARSWLFLRSQEYKKYQTNKTTGNTDKRAFVETWQSFYRKKLKEVWKPAV

SEQ ID NO: 29072 - protein, 979 aa, synthetic construct
  REGION 1..979: note = engineered CasX variant
QEIKRINKIRRRLVKDSNTKKAGKTGPMKTLLVRVMTPDLRERLENLRKKPENIPQPISNTSRANLNKLLTDYTEMKKAILHVYWEEFQKDPVGLMSRVAQPASKKIDQNKLKPEMDEKGNLTTAGFACSQCGQPLFVYKLEQVSEKGKAYTNYFGRCNVAEHEKLILLAQLKPEKDSDEAVTYSLGKFGQRALDFYSIHVTKESTHPVKPLAQIAGNRYASSPVGKALSDACMGTIASFLSKYQDIIIEHQKVVKGNQKRLESLRELAGKENLEYPSVTLPPQPHTKEGVDAYNEVIARVRMWVNLNLWQKLKLSRDDAKPLLRLKGFPSFPLVERQANEVDWWDMVCNVKKLINEKKEDGKVFWQNLAGYKRQEALRPYLSSEEDRKKGKKFARYQLGDLLLHLEKKHGEDWGKVYDEAWERIDKKVEGLSKHIKLEEERRSEDAQSKAALTDWLRAKASFVIEGLKEADDKDEFCRCELKLQKWYGDLRGKPFAIEAENSILDISGFSKQYNCAFIWQKDGVKKLNLYLIINYFKGGKLRFKKIKPEAFEANRFYTVINKKSGEIVPMEVNFNFDDPNLIILPLAFGKRQGREFIWNDLLSLETGSLKLANGRVIEKTLYNRRTRQDEPALFVALTFERREVLDSSNIKPMNLIGVDRGENIPAVIALTDPEGCPLSRFKDSLGNPTHILRIGESYKEKQRTIQAKKEVEQRRAGGYSRKYASKAKNLADDMVRNTARDLLYYAVTQDAMLIFENLSRGFGRQGKRTFMAERQYTRMEDWLTAKLAYEGLPSKTYLSKTLAQYTSKTCSNCGFTITSADYDRVLEKLKKTATGWMTTINGKELKVEGQITYYNRYKRQNVVKDLSVELDRLSEESVNNDISSWTKGRSGEALSLLKKRFSHRPVQEKFVCLNCGFETHADEQAALNIARSWLFLRSQEYKKYQTNKTTGNTDKRAFVETWQSFYRKKLKEVWKPAV

SEQ ID NO: 29073 - protein, 979 aa, synthetic construct
  REGION 1..979: note = engineered CasX variant
QEIKRINKIRRRLVKDSNTKKAGKTGPMKTLLVRVMTPDLRERLENLRKKPENIPQPISNTSRANLNKLLTDYTEMKKAILHVYWEEFQKDPVGLMSRVAQPASKKIDQNKLKPEMDEKGNLTTAGFACSQCGQPLFVYKLEQVSEKGKAYTNYFGRCNVAEHEKLILLAQLKPEKDSDEAVTYSLGKFGQRALDFYSIHVTKESTHPVKPLAQIAGNRYASSPVGKALSDACMGTIASFLSKYQDIIIEHQKVVKGNQKRLESLRELAGKENLEYPSVTLPPQPHTKEGVDAYNEVIARVRMWVNLNLWQKLKLSRDDAKPLLRLKGFPSFPLVERQANEVDWWDMVCNVKKLINEKKEDGKVFWQNLAGYKRQEALRPYLSSEEDRKKGKKFARYQLGDLLLHLEKKHGEDWGKVYDEAWERIDKKVEGLSKHIKLEEERRSEDAQSKAALTDWLRAKASFVIEGLKEADKDEFCRCELKLQKWYGDLRGKPFAIEAENSILDISGFSKQYNCAFIWQKDGVKKLNLYLIINYFKGGKLRFKKIKPEAFEANRFYTVINKKSGEIVPMEVNFNFDDPNLIILPLAFGKRQGREFIWNDLLSLETGSLKLANGRVIEKTLYNRRTRQDEPALFVALTFERREVLDSSNIKPMNLIGVDRGENIPAVIALTDPEGCPLSRFKDSLGNPTHILRIGESYKEKQRTIQAKKEVEQRRAGGYSRKYASKAKNLADDMVRNTARDLLYYAVTQDAMLIFENLSRGFGRQGKRTFMAERQYTRMEDWLTAKLAYEGLPSKTYLSKTLAQYTSKTCSNCGFTITSADYDRVLEKLKKTATGWMTTINGKELKVEGQITYYNRYKRQNVVKDLSVELDRLSEESVNNDISSWTKGRSGNEALSLLKKRFSHRPVQEKFVCLNCGFETHADEQAALNIARSWLFLRSQEYKKYQTNKTTGNTDKRAFVETWQSFYRKKLKEVWKPAV

SEQ ID NO: 29074 - protein, 978 aa, synthetic construct
  REGION 1..978: note = engineered CasX variant
QEIKRINKIRRRLVKDSNTKKAGKTGPMKTLLVRVMTPDLRERLENLRKKPENIPQPISNTSRANLNKLLTDYTEMKKAILHVYWEEFQKDPVGLMSRVAQPASKKIDQNKLKPEMDEKGNLTTAGFACSQCGQPLFVYKLEQVSEKGKAYTNYFGRCNVAEHEKLILLAQLKPEKDSDEAVTYSLGKFGQRALDFYSIHVTKESTHPVKPLAQIAGNRYASSPVGKALSDACMGTIASFLSKYQDIIIEHQKVVKGNQKRLESLRELAGKENLEYPSVTLPPQPHTKEGVDAYNEVIARVRMWVNLNLWQKLKLSRDDAKPLLRLKGFPSFPLVERQANEVDWWDMVCNVKKLINEKKEDGKVFWQNLAGYKRQEALRPYLSSEEDRQKGKKFARYQLGDLLLHLEKKHGEDWGKVYDEAWERIDKKVEGLSKHIKLEEERRSEDAQSKAALTDWLRAKASFVIEGLKEADKDEFCRCELKLQKWYGDLRGKPFAIEAENSILDISGFSKQYNCAFIWQKDGVKKLNLYLIINYFKGGKLRFKKIKPEAFEANRFYTVINKKSGEIVPMEVNFNFDDPNLIILPLAFGKRQGREFIWNDLLSLETGSLKLANGRVIEKTLYNRRTRQDEPALFVALTFERREVLDSSNIKPMNLIGVDRGENIPAVIALTDPEGCPLSRFKDSLGNPTHILRIGESYKEKQRTIQAKKEVEQRRAGGYSRKYASKAKNLADDMVRNTARDLLYYAVTQDAMLIFENLSRGFGRQGKRTFMAERQYTRMEDWLTAKLAYEGLPSKTYLSKTLAQYTSKTCSNCGFTITSADYDRVLEKLKKTATGWMTTINGKELKVEGQITYYNRYKRQNVVKDLSVELDRLSEESVNNDISSWTKGRSGEALSLLKKRFSHRPVQEKFVCLNCGFETHADEQAALNIARSWLFLRSQEYKKYQTNKTTGNTDKRAFVETWQSFYRKKLKEVWKPAV

SEQ ID NO: 29075 - protein, 978 aa, synthetic construct
  REGION 1..978: note = engineered CasX variant
QEIKRINKIRRRLVKDSNTKKAGKTGPMKTLLVRVMTPDLRERLENLRKKPENIPQPISNTSRANLNKLLTDYTEMKKAILHVYWEEFQKDPVGLMSRVAQPASKKIDQNKLKPEMDEKGNLTTAGFACSQCGQPLFVYKLEQVSEKGKAYTNYFGRCNVAEHEKLILLAQLKPEKDSDEAVTYSLGKFGQRALDFYSIHVTKESTHPVKPLAQIAGNRYASSPVGKALSDACMGTIASFLSKYQDIIIEHQKVVKGNQKRLESLRELAGKENLEYPSVTLPPQPHTKEGVDAYNEVIARVRMWVNLNLWQKLKLSRDDAKPLLRLKGFPSFPLVERQANEVDWWDMVCNVKKLINEKKEDGKVFWQNLAGYKRQEALRPYLSSEEDRKKGKKFARYQLGDLLLHLEKKHGEDWGKVYDEAWERIDKKVEGLSKHIKLEEERRSEDAQSKAALTDWLRAKASFVIEGLKEADKDEFCRCELKLQKWYGDLRGKPFAIEAENSILDISGFSKQYNCAFIWQKDGVKKLNLYLIINYFKGGKLRFKKIKPEAFEANRFYTVINKKSGEIVPMEVNFNFDDPNLIILPLAFGKRQGREFIWNDLLSLETGSLKLANGRVIEKTLYNRRTRQDEPALFVALTFERREVLDSSNIKPMNLIGVDRGENIPAVIALTDPEGCPLSRFKDSLGNPTHILRIGESYKEKQRTIQAKKEVEQRRAGGYSRKYASKAKNLADDMVRNTARDLLYYAVTQDAMLIFENLSRGFGRQGKRTFMAERQYTRMEDWLTAKLAYEGLPSQTYLSKTLAQYTSKTCSNCGFTITSADYDRVLEKLKKTATGWMTTINGKELKVEGQITYYNRYKRQNVVKDLSVELDRLSEESVNNDISSWTKGRSGEALSLLKKRFSHRPVQEKFVCLNCGFETHADEQAALNIARSWLFLRSQEYKKYQTNKTTGNTDKRAFVETWQSFYRKKLKEVWKPAV

SEQ ID NO: 29076 - protein, 978 aa, synthetic construct
  REGION 1..978: note = engineered CasX variant
QEIKRINKIRRRLVKDSNTKKAGKTGPMKTLLVRVMTPDLRERLENLRKKPENIPQPISNTSRANLNKLLTDYTEMKKAILHVYWEEFQKDPVGLMSRVAQPASKKIDQNKLKPEMDEKGNLTTAGFACSQCGQPLFVYKLEQVSEKGKAYTNYFGRCNVAEHEKLILLAQLKPEKDSDEAVTYSLGKFGQRALDFYSIHVTKESTHPVKPLAQIAGNRYASSPVGKALSDACMGTIASFLSKYQDIIIEHQKVVKGNQKRLESLRELAGKENLEYPSVTLPPQPHTKEGVDAYNEVIARVRMWVNLNLWQKLKLSRDDAKPLLRLKGFPSFPLVERQANEVDWWDMVCNVKKLINEKKEDGKVFWQNLAGYKRQEALRPYLSSEEDRKKGKKFARYQLGDLLLHLEKKHGEDWGKVYDEAWERIDKKVEGLSKHIKLEEERRSEDAQSKAALTDWLRAKASFVIEGLKEADKDEFCRCELKLQKWYGDLRGKPFAIEAENSILDISGFSKQYNCAFIWQKDGVKKLNLYLIINYFKGGKLRFKKIKPEAFEANRFYTVINKKSGEIVPMEVNFNFDDPNLIILPLAFGKRQGREFIWNDLLSLETGSLKLANGRVIEKTLYNRRTRQDEPALFVALTFERREVLDSSNIKPMNLIGVDRGENIPAVIALTDPEGCPLSRFKDSLGNPTHILRIGESYKEKQRTIQAKKEVEQRRAGGYSRKYASKAKNLADDMVRNTARDLLYYAVTQDAMLIFENLSRGFGRQGKRTFMAERQYTRMEDWLTAKLAYNGLPSKTYLSKTLAQYTSKTCSNCGFTITSADYDRVLEKLKKTATGWMTTINGKELKVEGQITYYNRYKRQNVVKDLSVELDRLSEESVNNDISSWTKGRSGEALSLLKKRFSHRPVQEKFVCLNCGFETHADEQAALNIARSWLFLRSQEYKKYQTNKTTGNTDKRAFVETWQSFYRKKLKEVWKPAV

SEQ ID NO: 29077 - protein, 978 aa, synthetic construct
  REGION 1..978: note = engineered CasX variant
QEIKRINKIRRRLVKDSNTKKAGKTGPMKTLLVRVMTPDLRERLENLRKKPENIPQPISNTSRANLNKLLTDYTEMKKAILHVYWEEFQKDPVGLMSRVAQPASKKIDQNKLKPEMDEKGNLTTAGFACSQCGQPLFVYKLEQVSEKGKAYTNYFGRCNVAEHEKLIQLAQLKPEKDSDEAVTYSLGKFGQRALDFYSIHVTKESTHPVKPLAQIAGNRYASSPVGKALSDACMGTIASFLSKYQDIIIEHQKVVKGNQKRLESLRELAGKENLEYPSVTLPPQPHTKEGVDAYNEVIARVRMWVNLNLWQKLKLSRDDAKPLLRLKGFPSFPLVERQANEVDWWDMVCNVKKLINEKKEDGKVFWQNLAGYKRQEALRPYLSSEEDRKKGKKFARYQLGDLLLHLEKKHGEDWGKVYDEAWERIDKKVEGLSKHIKLEEERRSEDAQSKAALTDWLRAKASFVIEGLKEADKDEFCRCELKLQKWYGDLRGKPFAIEAENSILDISGFSKQYNCAFIWQKDGVKKLNLYLIINYFKGGKLRFKKIKPEAFEANRFYTVINKKSGEIVPMEVNFNFDDPNLIILPLAFGKRQGREFIWNDLLSLETGSLKLANGRVIEKTLYNRRTRQDEPALFVALTFERREVLDSSNIKPMNLIGVDRGENIPAVIALTDPEGCPLSRFKDSLGNPTHILRIGESYKEKQRTIQAKKEVEQRRAGGYSRKYASKAKNLADDMVRNTARDLLYYAVTQDAMLIFENLSRGFGRQGKRTFMAERQYTRMEDWLTAKLAYEGLPSKTYLSKTLAQYTSKTCSNCGFTITSADYDRVLEKLKKTATGWMTTINGKELKVEGQITYYNRYKRQNVVKDLSVELDRLSEESVNNDISSWTKGRSGEALSLLKKRFSHRPVQEKFVCLNCGFETHADEQAALNIARSWLFLRSQEYKKYQTNKTTGNTDKRAFVETWQSFYRKKLKEVWKPAV

SEQ ID NO: 29078 - protein, 978 aa, synthetic construct
  REGION 1..978: note = engineered CasX variant
QEIKRINKIRRRLVKDSNTKKAGKTGPMKTLLVRVMTPDLRERLENLRKKPENIPQPISNTSRANLNKLLTDYTEMKKAILHVYWEEFQKDPVGLMSRVAQPASKKIDQNKLKPEMDEKGNLTTAGFACSQCGQPLFVYKLEQVSEKGKAYTNYFGRCNVAEHEKLILLAQLKPEKDSDEAVTYSLGKFGQRALDFYSIHVTKESTHPVKPLAQIAGNRYASSPVGKALSDACMGTIASFLSKYQDIIIEHQKVVKGNQKRLESLRELAGKENLEYPSVTLPPQPHTKEGVDAYNEVIARVRMWVNLNLWQKLKLSRDDAKPLLRLKGFPSFPLVERQANEVDWWDMVCNVKKLINEKKEDGKVFWQNLAIYKRQEALRPYLSSEEDRKKGKKFARYQLGDLLLHLEKKHGEDWGKVYDEAWERIDKKVEGLSKHIKLEEERRSEDAQSKAALTDWLRAKASFVIEGLKEADKDEFCRCELKLQKWYGDLRGKPFAIEAENSILDISGFSKQYNCAFIWQKDGVKKLNLYLIINYFKGGKLRFKKIKPEAFEANRFYTVINKKSGEIVPMEVNFNFDDPNLIILPLAFGKRQGREFIWNDLLSLETGSLKLANGRVIEKTLYNRRTRQDEPALFVALTFERREVLDSSNIKPMNLIGVDRGENIPAVIALTDPEGCPLSRFKDSLGNPTHILRIGESYKEKQRTIQAKKEVEQRRAGGYSRKYASKAKNLADDMVRNTARDLLYYAVTQDAMLIFENLSRGFGRQGKRTFMAERQYTRMEDWLTAKLAYEGLPSKTYLSKTLAQYTSKTCSNCGFTITSADYDRVLEKLKKTATGWMTTINGKELKVEGQITYYNRYKRQNVVKDLSVELDRLSEESVNNDISSWTKGRSGEALSLLKKRFSHRPVQEKFVCLNCGFETHADEQAALNIARSWLFLRSQEYKKYQTNKTTGNTDKRAFVETWQSFYRKKLKEVWKPAV

SEQ ID NO: 29079 - protein, 978 aa, synthetic construct
  REGION 1..978: note = engineered CasX variant
QEIKRINKIRRRLVKDSNTKKAGKTGPMKTLLVRVMTPDLRERLENLRKKPENIPQPISNTSRANLNKLLTDYTEMKKAILHVYWEEFQKDPVGLMSRVAQPASKKIDQNKLKPEMDEKGNLTTAGFACSQCGQPLFVYKLEQVSEKGKAYTNYFGRCNVAEHEKLILLAQLKPEKDSDEAVTYSLGKFGQRALDFYSIHVTKESTHPVKPLAQIAGNRYASSPVGKALSDACMGTIASFLSKYQDIIIEHQKVVKGNQKRLESLRELAGKENLEYPSVTLPPQPHTKEGVDAYNEVIARVRMWVNLNLWQKLKLSRDDAKPLLRLKGFPSFPLVERQANEVDWWDMVCNVKKLINEKKEDGKVFWQNLAGYKRQEALRPYLSSEEDREKGKKFARYQLGDLLLHLEKKHGEDWGKVYDEAWERIDKKVEGLSKHIKLEEERRSEDAQSKAALTDWLRAKASFVIEGLKEADKDEFCRCELKLQKWYGDLRGKPFAIEAENSILDISGFSKQYNCAFIWQKDGVKKLNLYLIINYFKGGKLRFKKIKPEAFEANRFYTVINKKSGEIVPMEVNFNFDDPNLIILPLAFGKRQGREFIWNDLLSLETGSLKLANGRVIEKTLYNRRTRQDEPALFVALTFERREVLDSSNIKPMNLIGVDRGENIPAVIALTDPEGCPLSRFKDSLGNPTHILRIGESYKEKQRTIQAKKEVEQRRAGGYSRKYASKAKNLADDMVRNTARDLLYYAVTQDAMLIFENLSRGFGRQGKRTFMAERQYTRMEDWLTAKLAYEGLPSKTYLSKTLAQYTSKTCSNCGFTITSADYDRVLEKLKKTATGWMTTINGKELKVEGQITYYNRYKRQNVVKDLSVELDRLSEESVNNDISSWTKGRSGEALSLLKKRFSHRPVQEKFVCLNCGFETHADEQAALNIARSWLFLRSQEYKKYQTNKTTGNTDKRAFVETWQSFYRKKLKEVWKPAV

SEQ ID NO: 29080 - protein, 978 aa, synthetic construct
  REGION 1..978: note = engineered CasX variant
QEIKRINKIRRRLVKDSNTKKAGKTGPMKTLLVRVMTPDLRERLENLRKKPENIPQPISNTSRANLNKLLTDYTEMKKAILHVYWEEFQKDPVGLMSRVAQPASKKIDQNKLKPEMDEKGNLTTAGFACSQCGQPLFVYKLEQVSEKGKAYTNYFGRCNVAEHEKLILLAQLKPEKDSDEAVTYSLGKFGQRALDFYSIHVTKESTHPVKPLAQIAGNRYASSPVGKALSDACMGTIASFLSKYQDIIIEHQKVVKGNQKRLESLRELAGKENLEYPSVTLPPQPHTKEGVDAYNEVIARVRMWVNLNLWQKLKLSRDDAKPLLRLKGFPSFPLVERQANEVDWWDMVCNVKKLINEKKEDGKVFWQNLAGYKRQEALRPYLSSEEDRKKGKKFARYQLGDLLLHLEKKHGEDWGKVYDEAWERIDKKVEGLSKHIKLEEERRSEDAQSKAALTDWLRAKASFVIEGLKEADKDEFCRCELKLQKWYGDLRGKPFAIEAENSILDISGFSKQYNCAFIWQKDGVKKLNLYLIINYFKGGKLRFKKIKPEAFEANRFYTVINKKSGEIVIMEVNFNFDDPNLIILPLAFGKRQGREFIWNDLLSLETGSLKLANGRVIEKTLYNRRTRQDEPALFVALTFERREVLDSSNIKPMNLIGVDRGENIPAVIALTDPEGCPLSRFKDSLGNPTHILRIGESYKEKQRTIQAKKEVEQRRAGGYSRKYASKAKNLADDMVRNTARDLLYYAVTQDAMLIFENLSRGFGRQGKRTFMAERQYTRMEDWLTAKLAYEGLPSKTYLSKTLAQYTSKTCSNCGFTITSADYDRVLEKLKKTATGWMTTINGKELKVEGQITYYNRYKRQNVVKDLSVELDRLSEESVNNDISSWTKGRSGEALSLLKKRFSHRPVQEKFVCLNCGFETHADEQAALNIARSWLFLRSQEYKKYQTNKTTGNTDKRAFVETWQSFYRKKLKEVWKPAV

SEQ ID NO: 29081 - protein, 978 aa, synthetic construct
  REGION 1..978: note = engineered CasX variant
QEIKRINKIRRRLVKDSNTKKAGKTGPMKTLLVRVMTPDLRERLENLRKKPENIPQPISNTSRANLNKLLTDYTEMKKAILHVYWEEFQKDPVGLMSRVAQPASKKIDQNKLKPEMDEKGNLTTAGFACSQCGQPLFVYKLEQVSEKGKAYTNYFGRCNVAEHEKLILLDQLKPEKDSDEAVTYSLGKFGQRALDFYSIHVTKESTHPVKPLAQIAGNRYASGPVGKALSGACMGTIASFLSKYQDIIIEHQKVVKGNQKRLESLRELAGKENLEYPSVTLPPQPHTKEGVDAYNEVIARVRMWVNLNLWQKLKLSRDDAKPLLRLKGFPSFPLVERQANEVDWWDMVCNVKKLINEKKEDGKVFWQNLAGYKRQEALRPYLSSEEDRKKGKKFARYQLGDLLLHLEKKHGEDWGKVYDEAWERIDKKVEGLSKHIKLEEERRSEDAQSKAALTDWLRAKASFVIEGLKEADKDEFCRCELKLQKWYGDLRGKPFAIEAENSILDISGFSKQYNCAFIWQKDGVKKLNLYLIINYFKGGKLRFKKIKPEAFEANRFYTVINKKSGEIVPMEVNFNFDDPNLIILPLAFGKRQGREFIWNDLLSLETGSLKLANGRVIEKTLYNRRTRQDEPALFVALTFERREVLDSSNIKPMNLIGVDRGENIPAVIALTDPEGCPLSRFKDSLGNPTHILRIGESYKEKQRTIQAKKEVEQRRAGGYSRKYASKAKNLADDMVRNTARDLLYYAVTQDAMLIFENLSRGFGRQGKRTFMAERQYTRMEDWLTAKLAYEGLPSKTYLSKTLAQYTSKTCSNCGFTITSADYDRVLEKLKKTATGWMTTINGKELKVEGQITYYNRYKRQNVVKDLSVELDRLSEESVNNDISSWTKGRSGEALSLLKKRFSHRPVQEKFVCLNCGFETHADEQAALNIARSWLFLRSQEYKKYQTNKTTGNTDKRAFVETWQSFYRKKLKEVWKPAV

SEQ ID NO: 29082 - protein, 978 aa, synthetic construct
  REGION 1..978: note = engineered CasX variant
QEIKRINKIRRRLVKDSNTKKAGKTGPMKTLLVRVMTPDLRERLENLRKKPENIPQPISNTSRANLNKLLTDYTEMKKAILHVYWEEFQKDPVGLMSRVAQPASKKIDQNKLKPEMDEKGNLTTAGFACSQCGQPLFVYKLEQVSEKGKAYTNYFGRCNVAEHEKLILLDQLKPEKDSDEAVTYSLGKFGQRALDFYSIHVTKESTHPVKPLAQIAGNRYASGPVGKALSDACMGTIASFLSKYQDIIIEHQKVVKGNQKRLESLRELAGKENLEYPSVTLPPQPHTKEGVDAYNEVIARVRMWVNLNLWQKLKLSRDDAKPLLRLKNFPSFPLVERQANEVDWWDMVCNVKKLINEKKEDGKVFWQNLAGYKRQEALRPYLSSEEDRKKGKKFARYQLGDLLLHLEKKHGEDWGKVYDEAWERIDKKVEGLSKHIKLEEERRSEDAQSKAALTDWLRAKASFVIEGLKEADKDEFCRCELKLQKWYGDLRGKPFAIEAENSILDISGFSKQYNCAFIWQKDGVKKLNLYLIINYFKGGKLRFKKIKPEAFEANRFYTVINKKSGEIVPMEVNFNFDDPNLIILPLAFGKRQGREFIWNDLLSLETGSLKLANGRVIEKTLYNRRTRQDEPALFVALTFERREVLDSSNIKPMNLIGVDRGENIPAVIALTDPEGCPLSRFKDSLGNPTHILRIGESYKEKQRTIQAKKEVEQRRAGGYSRKYASKAKNLADDMVRNTARDLLYYAVTQDAMLIFENLSRGFGRQGKRTFMAERQYTRMEDWLTAKLAYEGLPSKTYLSKTLAQYTSKTCSNCGFTITSADYDRVLEKLKKTATGWMTTINGKELKVEGQITYYNRYKRQNVVKDLSVELDRLSEESVNNDISSWTKGRSGEALSLLKKRFSHRPVQEKFVCLNCGFETHADEQAALNIARSWLFLRSQEYKKYQTNKTTGNTDKRAFVETWQSFYRKKLKEVWKPAV

SEQ ID NO: 29083 - protein, 978 aa, synthetic construct
  REGION 1..978: note = engineered CasX variant
QEIKRINKIRRRLVKDSNTKKAGKTGPMKTLLVRVMTPDLRERLENLRKKPENIPQPISNTSRANLNKLLTDYTEMKKAILHVYWEEFQKDPVGLMSRVAQPASKKIDQNKLKPEMDEKGNLTTAGFACSQCGQPLFVYKLEQVSEKGKAYTNYFGRCNVAEHEKLILLDQLKPEKDSDEAVTYSLGKFGQRALDFYSIHVTKESTHPVKPLAQIAGNRYASGPVGKALSDACMGTIASFLSKYQDIIIEHQKVVKGNQKRLESLRELAGKENLEYPSVTLPPQPHTKEGVDAYNEVIARVRMWVNLNLWQKLKLSRDDAKPLLRLKGFPSFPLVERQANEVDWWDMVCNVKKLINEKKEDGKVFWQNLAGYKRQEALRPYLSSEEDRKKGKKFARYQLGDLLNHLEKKHGEDWGKVYDEAWERIDKKVEGLSKHIKLEEERRSEDAQSKAALTDWLRAKASFVIEGLKEADKDEFCRCELKLQKWYGDLRGKPFAIEAENSILDISGFSKQYNCAFIWQKDGVKKLNLYLIINYFKGGKLRFKKIKPEAFEANRFYTVINKKSGEIVPMEVNFNFDDPNLIILPLAFGKRQGREFIWNDLLSLETGSLKLANGRVIEKTLYNRRTRQDEPALFVALTFERREVLDSSNIKPMNLIGVDRGENIPAVIALTDPEGCPLSRFKDSLGNPTHILRIGESYKEKQRTIQAKKEVEQRRAGGYSRKYASKAKNLADDMVRNTARDLLYYAVTQDAMLIFENLSRGFGRQGKRTFMAERQYTRMEDWLTAKLAYEGLPSKTYLSKTLAQYTSKTCSNCGFTITSADYDRVLEKLKKTATGWMTTINGKELKVEGQITYYNRYKRQNVVKDLSVELDRLSEESVNNDISSWTKGRSGEALSLLKKRFSHRPVQEKFVCLNCGFETHADEQAALNIARSWLFLRSQEYKKYQTNKTTGNTDKRAFVETWQSFYRKKLKEVWKPAV

SEQ ID NO: 29084 - protein, 978 aa, synthetic construct
  REGION 1..978: note = engineered CasX variant
QEIKRINKIRRRLVKDSNTKKAGKTGPMKTLLVRVMTPDLRERLENLRKKPENIPQPISNTSRANLNKLLTDYTEMKKAILHVYWEEFQKDPVGLMSRVAQPASKKIDQNKLKPEMDEKGNLTTAGFACSQCGQPLFVYKLEQVSEKGKAYTNYFGRCNVAEHEKLILLDQLKPEKDSDEAVTYSLGKFGQRALDFYSIHVTKESTHPVKPLAQIAGNRYASGPVGKALSDACMGTIASFLSKYQDIIIEHQKVVKGNQKRLESLRELAGKENLEYPSVTLPPQPHTKEGVDAYNEVIARVRMWVNLNLWQKLKLSRDDAKPLLRLKGFPSFPLVERQANEVDWWDMVCNVKKLINEKKEDGKVFWQNLAGYKRQEALRPYLSSEEDRKKGKKFARYQLGDLLWHLEKKHGEDWGKVYDEAWERIDKKVEGLSKHIKLEEERRSEDAQSKAALTDWLRAKASFVIEGLKEADKDEFCRCELKLQKWYGDLRGKPFAIEAENSILDISGFSKQYNCAFIWQKDGVKKLNLYLIINYFKGGKLRFKKIKPEAFEANRFYTVINKKSGEIVPMEVNFNFDDPNLIILPLAFGKRQGREFIWNDLLSLETGSLKLANGRVIEKTLYNRRTRQDEPALFVALTFERREVLDSSNIKPMNLIGVDRGENIPAVIALTDPEGCPLSRFKDSLGNPTHILRIGESYKEKQRTIQAKKEVEQRRAGGYSRKYASKAKNLADDMVRNTARDLLYYAVTQDAMLIFENLSRGFGRQGKRTFMAERQYTRMEDWLTAKLAYEGLPSKTYLSKTLAQYTSKTCSNCGFTITSADYDRVLEKLKKTATGWMTTINGKELKVEGQITYYNRYKRQNVVKDLSVELDRLSEESVNNDISSWTKGRSGEALSLLKKRFSHRPVQEKFVCLNCGFETHADEQAALNIARSWLFLRSQEYKKYQTNKTTGNTDKRAFVETWQSFYRKKLKEVWKPAV

SEQ ID NO: 29085 - protein, 978 aa, synthetic construct
  REGION 1..978: note = engineered CasX variant
QEIKRINKIRRRLVKDSNTKKAGKTGPMKTLLVRVMTPDLRERLENLRKKPENIPQPISNTSRANLNKLLTDYTEMKKAILHVYWEEFQKDPVGLMSRVAQPASKKIDQNKLKPEMDEKGNLTTAGFACSQCGQPLFVYKLEQVSEKGKAYTNYFGRCNVAEHEKLILLDQLKPEKDSDEAVTYSLGKFGQRALDFYSIHVTKESTHPVKPLAQIAGNRYASGPVGKALSDACMGTIASFLSKYQDIIIEHQKVVKGNQKRLESLRELAGKENLEYPSVTLPPQPHTKEGVDAYNEVIARVRMWVNLNLWQKLKLSRDDAKPLLRLKGFPSFPLVERQANEVDWWDMVCNVKKLINEKKEDGKVFWQNLAGYKRQEALRPYLSSEEDRKKGKKFARYQLGDLLLHLYKKHGEDWGKVYDEAWERIDKKVEGLSKHIKLEEERRSEDAQSKAALTDWLRAKASFVIEGLKEADKDEFCRCELKLQKWYGDLRGKPFAIEAENSILDISGFSKQYNCAFIWQKDGVKKLNLYLIINYFKGGKLRFKKIKPEAFEANRFYTVINKKSGEIVPMEVNFNFDDPNLIILPLAFGKRQGREFIWNDLLSLETGSLKLANGRVIEKTLYNRRTRQDEPALFVALTFERREVLDSSNIKPMNLIGVDRGENIPAVIALTDPEGCPLSRFKDSLGNPTHILRIGESYKEKQRTIQAKKEVEQRRAGGYSRKYASKAKNLADDMVRNTARDLLYYAVTQDAMLIFENLSRGFGRQGKRTFMAERQYTRMEDWLTAKLAYEGLPSKTYLSKTLAQYTSKTCSNCGFTITSADYDRVLEKLKKTATGWMTTINGKELKVEGQITYYNRYKRQNVVKDLSVELDRLSEESVNNDISSWTKGRSGEALSLLKKRFSHRPVQEKFVCLNCGFETHADEQAALNIARSWLFLRSQEYKKYQTNKTTGNTDKRAFVETWQSFYRKKLKEVWKPAV

SEQ ID NO: 29086 - protein, 978 aa, synthetic construct
  REGION 1..978: note = engineered CasX variant
QEIKRINKIRRRLVKDSNTKKAGKTGPMKTLLVRVMTPDLRERLENLRKKPENIPQPISNTSRANLNKLLTDYTEMKKAILHVYWEEFQKDPVGLMSRVAQPASKKIDQNKLKPEMDEKGNLTTAGFACSQCGQPLFVYKLEQVSEKGKAYTNYFGRCNVAEHEKLILLDQLKPEKDSDEAVTYSLGKFGQRALDFYSIHVTKESTHPVKPLAQIAGNRYASGPVGKALSDACMGTIASFLSKYQDIIIEHQKVVKGNQKRLESLRELAGKENLEYPSVTLPPQPHTKEGVDAYNEVIARVRMWVNLNLWQKLKLSRDDAKPLLRLKGFPSFPLVERQANEVDWWDMVCNVKKLINEKKEDGKVFWQNLAGYKRQEALRPYLSSEEDRKKGKKFARYQLGDLLLHLEKKHPEDWGKVYDEAWERIDKKVEGLSKHIKLEEERRSEDAQSKAALTDWLRAKASFVIEGLKEADKDEFCRCELKLQKWYGDLRGKPFAIEAENSILDISGFSKQYNCAFIWQKDGVKKLNLYLIINYFKGGKLRFKKIKPEAFEANRFYTVINKKSGEIVPMEVNFNFDDPNLIILPLAFGKRQGREFIWNDLLSLETGSLKLANGRVIEKTLYNRRTRQDEPALFVALTFERREVLDSSNIKPMNLIGVDRGENIPAVIALTDPEGCPLSRFKDSLGNPTHILRIGESYKEKQRTIQAKKEVEQRRAGGYSRKYASKAKNLADDMVRNTARDLLYYAVTQDAMLIFENLSRGFGRQGKRTFMAERQYTRMEDWLTAKLAYEGLPSKTYLSKTLAQYTSKTCSNCGFTITSADYDRVLEKLKKTATGWMTTINGKELKVEGQITYYNRYKRQNVVKDLSVELDRLSEESVNNDISSWTKGRSGEALSLLKKRFSHRPVQEKFVCLNCGFETHADEQAALNIARSWLFLRSQEYKKYQTNKTTGNTDKRAFVETWQSFYRKKLKEVWKPAV

SEQ ID NO: 29087 - protein, 979 aa, synthetic construct
  REGION 1..979: note = engineered CasX variant
QEIKRINKIRRRLVKDSNTKKAGKTGPMKTLLVRVMTPDLRERLENLRKKPENIPQPISNTSRANLNKLLTDYTEMKKAILHVYWEEFQKDPVGLMSRVAQPASKKIDQNKLKPEMDEKGNLTTAGFACSQCGQPLFVYKLEQVSEKGKAYTNYFGRCNVAEHEKLILLDQLKPEKDSDEAVTYSLGKFGQRALDFYSIHVTKESTHPVKPLAQIAGNRYASGPVGKALSDACMGTIASFLSKYQDIIIEHQKVVKGNQKRLESLRELAGKENLEYPSVTLPPQPHTKEGVDAYNEVIARVRMWVNLNLWQKLKLSRDDAKPLLRLKGFPSFPLVERQANEVDWWDMVCNVKKLINEKKEDGKVFWQNLAGYKRQEALRPYLSSEEDRKKGKKFARYQLGDLLLHLEKKHGERDWGKVYDEAWERIDKKVEGLSKHIKLEEERRSEDAQSKAALTDWLRAKASFVIEGLKEADKDEFCRCELKLQKWYGDLRGKPFAIEAENSILDISGFSKQYNCAFIWQKDGVKKLNLYLIINYFKGGKLRFKKIKPEAFEANRFYTVINKKSGEIVPMEVNFNFDDPNLIILPLAFGKRQGREFIWNDLLSLETGSLKLANGRVIEKTLYNRRTRQDEPALFVALTFERREVLDSSNIKPMNLIGVDRGENIPAVIALTDPEGCPLSRFKDSLGNPTHILRIGESYKEKQRTIQAKKEVEQRRAGGYSRKYASKAKNLADDMVRNTARDLLYYAVTQDAMLIFENLSRGFGRQGKRTFMAERQYTRMEDWLTAKLAYEGLPSKTYLSKTLAQYTSKTCSNCGFTITSADYDRVLEKLKKTATGWMTTINGKELKVEGQITYYNRYKRQNVVKDLSVELDRLSEESVNNDISSWTKGRSGEALSLLKKRFSHRPVQEKFVCLNCGFETHADEQAALNIARSWLFLRSQEYKKYQTNKTTGNTDKRAFVETWQSFYRKKLKEVWKPAV

SEQ ID NO: 29088 - protein, 979 aa, synthetic construct
  REGION 1..979: note = engineered CasX variant
QEIKRINKIRRRLVKDSNTKKAGKTGPMKTLLVRVMTPDLRERLENLRKKPENIPQPISNTSRANLNKLLTDYTEMKKAILHVYWEEFQKDPVGLMSRVAQPASKKIDQNKLKPEMDEKGNLTTAGFACSQCGQPLFVYKLEQVSEKGKAYTNYFGRCNVAEHEKLILLDQLKPEKDSDEAVTYSLGKFGQRALDFYSIHVTKESTHPVKPLAQIAGNRYASGPVGKALSDACMGTIASFLSKYQDIIIEHQKVVKGNQKRLESLRELAGKENLEYPSVTLPPQPHTKEGVDAYNEVIARVRMWVNLNLWQKLKLSRDDAKPLLRLKGFPSFPLVERQANEVDWWDMVCNVKKLINEKKEDGKVFWQNLAGYKRQEALRPYLSSEEDRKKGKKFARYQLGDLLLHLEKKHGEYDWGKVYDEAWERIDKKVEGLSKHIKLEEERRSEDAQSKAALTDWLRAKASFVIEGLKEADKDEFCRCELKLQKWYGDLRGKPFAIEAENSILDISGFSKQYNCAFIWQKDGVKKLNLYLIINYFKGGKLRFKKIKPEAFEANRFYTVINKKSGEIVPMEVNFNFDDPNLIILPLAFGKRQGREFIWNDLLSLETGSLKLANGRVIEKTLYNRRTRQDEPALFVALTFERREVLDSSNIKPMNLIGVDRGENIPAVIALTDPEGCPLSRFKDSLGNPTHILRIGESYKEKQRTIQAKKEVEQRRAGGYSRKYASKAKNLADDMVRNTARDLLYYAVTQDAMLIFENLSRGFGRQGKRTFMAERQYTRMEDWLTAKLAYEGLPSKTYLSKTLAQYTSKTCSNCGFTITSADYDRVLEKLKKTATGWMTTINGKELKVEGQITYYNRYKRQNVVKDLSVELDRLSEESVNNDISSWTKGRSGEALSLLKKRFSHRPVQEKFVCLNCGFETHADEQAALNIARSWLFLRSQEYKKYQTNKTTGNTDKRAFVETWQSFYRKKLKEVWKPAV

SEQ ID NO: 29089 - protein, 978 aa, synthetic construct
  REGION 1..978: note = engineered CasX variant
QEIKRINKIRRRLVKDSNTKKAGKTGPMKTLLVRVMTPDLRERLENLRKKPENIPQPISNTSRANLNKLLTDYTEMKKAILHVYWEEFQKDPVGLMSRVAQPASKKIDQNKLKPEMDEKGNLTTAGFACSQCGQPLFVYKLEQVSEKGKAYTNYFGRCNVAEHEKLILLDQLKPEKDSDEAVTYSLGKFGQRALDFYSIHVTKESTHPVKPLAQIAGNRYASGPVGKALSDACMGTIASFLSKYQDIIIEHQKVVKGNQKRLESLRELAGKENLEYPSVTLPPQPHTKEGVDAYNEVIARVRMWVNLNLWQKLKLSRDDAKPLLRLKGFPSFPLVERQANEVDWWDMVCNVKKLINEKKEDGKVFWQNLAGYKRQEALRPYLSSEEDRKKGKKFARYQLGDLLLHLEKKHGEDWGDVYDEAWERIDKKVEGLSKHIKLEEERRSEDAQSKAALTDWLRAKASFVIEGLKEADKDEFCRCELKLQKWYGDLRGKPFAIEAENSILDISGFSKQYNCAFIWQKDGVKKLNLYLIINYFKGGKLRFKKIKPEAFEANRFYTVINKKSGEIVPMEVNFNFDDPNLIILPLAFGKRQGREFIWNDLLSLETGSLKLANGRVIEKTLYNRRTRQDEPALFVALTFERREVLDSSNIKPMNLIGVDRGENIPAVIALTDPEGCPLSRFKDSLGNPTHILRIGESYKEKQRTIQAKKEVEQRRAGGYSRKYASKAKNLADDMVRNTARDLLYYAVTQDAMLIFENLSRGFGRQGKRTFMAERQYTRMEDWLTAKLAYEGLPSKTYLSKTLAQYTSKTCSNCGFTITSADYDRVLEKLKKTATGWMTTINGKELKVEGQITYYNRYKRQNVVKDLSVELDRLSEESVNNDISSWTKGRSGEALSLLKKRFSHRPVQEKFVCLNCGFETHADEQAALNIARSWLFLRSQEYKKYQTNKTTGNTDKRAFVETWQSFYRKKLKEVWKPAV

SEQ ID NO: 29090 - protein, 978 aa, synthetic construct
  REGION 1..978: note = engineered CasX variant
QEIKRINKIRRRLVKDSNTKKAGKTGPMKTLLVRVMTPDLRERLENLRKKPENIPQPISNTSRANLNKLLTDYTEMKKAILHVYWEEFQKDPVGLMSRVAQPASKKIDQNKLKPEMDEKGNLTTAGFACSQCGQPLFVYKLEQVSEKGKAYTNYFGRCNVAEHEKLILLDQLKPEKDSDEAVTYSLGKFGQRALDFYSIHVTKESTHPVKPLAQIAGNRYASGPVGKALSDACMGTIASFLSKYQDIIIEHQKVVKGNQKRLESLRELAGKENLEYPSVTLPPQPHTKEGVDAYNEVIARVRMWVNLNLWQKLKLSRDDAKPLLRLKGFPSFPLVERQANEVDWWDMVCNVKKLINEKKEDGKVFWQNLAGYKRQEALRPYLSSEEDRKKGKKFARYQLGDLLLHLEKKHGEDWGKVYGEAWERIDKKVEGLSKHIKLEEERRSEDAQSKAALTDWLRAKASFVIEGLKEADKDEFCRCELKLQKWYGDLRGKPFAIEAENSILDISGFSKQYNCAFIWQKDGVKKLNLYLIINYFKGGKLRFKKIKPEAFEANRFYTVINKKSGEIVPMEVNFNFDDPNLIILPLAFGKRQGREFIWNDLLSLETGSLKLANGRVIEKTLYNRRTRQDEPALFVALTFERREVLDSSNIKPMNLIGVDRGENIPAVIALTDPEGCPLSRFKDSLGNPTHILRIGESYKEKQRTIQAKKEVEQRRAGGYSRKYASKAKNLADDMVRNTARDLLYYAVTQDAMLIFENLSRGFGRQGKRTFMAERQYTRMEDWLTAKLAYEGLPSKTYLSKTLAQYTSKTCSNCGFTITSADYDRVLEKLKKTATGWMTTINGKELKVEGQITYYNRYKRQNVVKDLSVELDRLSEESVNNDISSWTKGRSGEALSLLKKRFSHRPVQEKFVCLNCGFETHADEQAALNIARSWLFLRSQEYKKYQTNKTTGNTDKRAFVETWQSFYRKKLKEVWKPAV

SEQ ID NO: 29091 - protein, 978 aa, synthetic construct
  REGION 1..978: note = engineered CasX variant
QEIKRINKIRRRLVKDSNTKKAGKTGPMKTLLVRVMTPDLRERLENLRKKPENIPQPISNTSRANLNKLLTDYTEMKKAILHVYWEEFQKDPVGLMSRVAQPASKKIDQNKLKPEMDEKGNLTTAGFACSQCGQPLFVYKLEQVSEKGKAYTNYFGRCNVAEHEKLILLDQLKPEKDSDEAVTYSLGKFGQRALDFYSIHVTKESTHPVKPLAQIAGNRYASGPVGKALSDACMGTIASFLSKYQDIIIEHQKVVKGNQKRLESLRELAGKENLEYPSVTLPPQPHTKEGVDAYNEVIARVRMWVNLNLWQKLKLSRDDAKPLLRLKGFPSFPLVERQANEVDWWDMVCNVKKLINEKKEDGKVFWQNLAGYKRQEALRPYLSSEEDRKKGKKFARYQLGDLLLHLEKKHGEDWGKVYDEAWERIDKKVEGLSKHIKLEEERRSEDAQSKAALTDWLRAKASFVIEGKKEADKDEFCRCELKLQKWYGDLRGKPFAIEAENSILDISGFSKQYNCAFIWQKDGVKKLNLYLIINYFKGGKLRFKKIKPEAFEANRFYTVINKKSGEIVPMEVNFNFDDPNLIILPLAFGKRQGREFIWNDLLSLETGSLKLANGRVIEKTLYNRRTRQDEPALFVALTFERREVLDSSNIKPMNLIGVDRGENIPAVIALTDPEGCPLSRFKDSLGNPTHILRIGESYKEKQRTIQAKKEVEQRRAGGYSRKYASKAKNLADDMVRNTARDLLYYAVTQDAMLIFENLSRGFGRQGKRTFMAERQYTRMEDWLTAKLAYEGLPSKTYLSKTLAQYTSKTCSNCGFTITSADYDRVLEKLKKTATGWMTTINGKELKVEGQITYYNRYKRQNVVKDLSVELDRLSEESVNNDISSWTKGRSGEALSLLKKRFSHRPVQEKFVCLNCGFETHADEQAALNIARSWLFLRSQEYKKYQTNKTTGNTDKRAFVETWQSFYRKKLKEVWKPAV

SEQ ID NO: 29092 - protein, 978 aa, synthetic construct
  REGION 1..978: note = engineered CasX variant
QEIKRINKIRRRLVKDSNTKKAGKTGPMKTLLVRVMTPDLRERLENLRKKPENIPQPISNTSRANLNKLLTDYTEMKKAILHVYWEEFQKDPVGLMSRVAQPASKKIDQNKLKPEMDEKGNLTTAGFACSQCGQPLFVYKLEQVSEKGKAYTNYFGRCNVAEHEKLILLDQLKPEKDSDEAVTYSLGKFGQRALDFYSIHVTKESTHPVKPLAQIAGNRYASGPVGKALSDACMGTIASFLSKYQDIIIEHQKVVKGNQKRLESLRELAGKENLEYPSVTLPPQPHTKEGVDAYNEVIARVRMWVNLNLWQKLKLSRDDAKPLLRLKGFPSFPLVERQANEVDWWDMVCNVKKLINEKKEDGKVFWQNLAGYKRQEALRPYLSSEEDRKKGKKFARYQLGDLLLHLEKKHGEDWGKVYDEAWERIDKKVEGLSKHIKLEEERRSEDAQSKAALTDWLRAKASFVIEGSKEADKDEFCRCELKLQKWYGDLRGKPFAIEAENSILDISGFSKQYNCAFIWQKDGVKKLNLYLIINYFKGGKLRFKKIKPEAFEANRFYTVINKKSGEIVPMEVNFNFDDPNLIILPLAFGKRQGREFIWNDLLSLETGSLKLANGRVIEKTLYNRRTRQDEPALFVALTFERREVLDSSNIKPMNLIGVDRGENIPAVIALTDPEGCPLSRFKDSLGNPTHILRIGESYKEKQRTIQAKKEVEQRRAGGYSRKYASKAKNLADDMVRNTARDLLYYAVTQDAMLIFENLSRGFGRQGKRTFMAERQYTRMEDWLTAKLAYEGLPSKTYLSKTLAQYTSKTCSNCGFTITSADYDRVLEKLKKTATGWMTTINGKELKVEGQITYYNRYKRQNVVKDLSVELDRLSEESVNNDISSWTKGRSGEALSLLKKRFSHRPVQEKFVCLNCGFETHADEQAALNIARSWLFLRSQEYKKYQTNKTTGNTDKRAFVETWQSFYRKKLKEVWKPAV

SEQ ID NO: 29093 - protein, 979 aa, synthetic construct
  REGION 1..979: note = engineered CasX variant
QEIKRINKIRRRLVKDSNTKKAGKTGPMKTLLVRVMTPDLRERLENLRKKPENIPQPISNTSRANLNKLLTDYTEMKKAILHVYWEEFQKDPVGLMSRVAQPASKKIDQNKLKPEMDEKGNLTTAGFACSQCGQPLFVYKLEQVSEKGKAYTNYFGRCNVAEHEKLILLDQLKPEKDSDEAVTYSLGKFGQRALDFYSIHVTKESTHPVKPLAQIAGNRYASGPVGKALSDACMGTIASFLSKYQDIIIEHQKVVKGNQKRLESLRELAGKENLEYPSVTLPPQPHTKEGVDAYNEVIARVRMWVNLNLWQKLKLSRDDAKPLLRLKGFPSFPLVERQANEVDWWDMVCNVKKLINEKKEDGKVFWQNLAGYKRQEALRPYLSSEEDRKKGKKFARYQLGDLLLHLEKKHGEDWGKVYDEAWERIDKKVEGLSKHIKLEEERRSEDAQSKAALTDWLRAKASFVIEGLKEADDKDEFCRCELKLQKWYGDLRGKPFAIEAENSILDISGFSKQYNCAFIWQKDGVKKLNLYLIINYFKGGKLRFKKIKPEAFEANRFYTVINKKSGEIVPMEVNFNFDDPNLIILPLAFGKRQGREFIWNDLLSLETGSLKLANGRVIEKTLYNRRTRQDEPALFVALTFERREVLDSSNIKPMNLIGVDRGENIPAVIALTDPEGCPLSRFKDSLGNPTHILRIGESYKEKQRTIQAKKEVEQRRAGGYSRKYASKAKNLADDMVRNTARDLLYYAVTQDAMLIFENLSRGFGRQGKRTFMAERQYTRMEDWLTAKLAYEGLPSKTYLSKTLAQYTSKTCSNCGFTITSADYDRVLEKLKKTATGWMTTINGKELKVEGQITYYNRYKRQNVVKDLSVELDRLSEESVNNDISSWTKGRSGEALSLLKKRFSHRPVQEKFVCLNCGFETHADEQAALNIARSWLFLRSQEYKKYQTNKTTGNTDKRAFVETWQSFYRKKLKEVWKPAV

SEQ ID NO: 29094 - protein, 979 aa, synthetic construct
  REGION 1..979: note = engineered CasX variant
QEIKRINKIRRRLVKDSNTKKAGKTGPMKTLLVRVMTPDLRERLENLRKKPENIPQPISNTSRANLNKLLTDYTEMKKAILHVYWEEFQKDPVGLMSRVAQPASKKIDQNKLKPEMDEKGNLTTAGFACSQCGQPLFVYKLEQVSEKGKAYTNYFGRCNVAEHEKLILLDQLKPEKDSDEAVTYSLGKFGQRALDFYSIHVTKESTHPVKPLAQIAGNRYASGPVGKALSDACMGTIASFLSKYQDIIIEHQKVVKGNQKRLESLRELAGKENLEYPSVTLPPQPHTKEGVDAYNEVIARVRMWVNLNLWQKLKLSRDDAKPLLRLKGFPSFPLVERQANEVDWWDMVCNVKKLINEKKEDGKVFWQNLAGYKRQEALRPYLSSEEDRKKGKKFARYQLGDLLLHLEKKHGEDWGKVYDEAWERIDKKVEGLSKHIKLEEERRSEDAQSKAALTDWLRAKASFVIEGLKEADKDEFCRCELKLQKWYGDLRGKPFAIEAENSILDISGFSKQYNCAFIWQKDGVKKLNLYLIINYFKGGKLRFKKIKPEAFEANRFYTVINKKSGEIVPMEVNFNFDDPNLIILPLAFGKRQGREFIWNDLLSLETGSLKLANGRVIEKTLYNRRTRQDEPALFVALTFERREVLDSSNIKPMNLIGVDRGENIPAVIALTDPEGCPLSRFKDSLGNPTHILRIGESYKEKQRTIQAKKEVEQRRAGGYSRKYASKAKNLADDMVRNTARDLLYYAVTQDAMLIFENLSRGFGRQGKRTFMAERQYTRMEDWLTAKLAYEGLPSKTYLSKTLAQYTSKTCSNCGFTITSADYDRVLEKLKKTATGWMTTINGKELKVEGQITYYNRYKRQNVVKDLSVELDRLSEESVNNDISSWTKGRSGNEALSLLKKRFSHRPVQEKFVCLNCGFETHADEQAALNIARSWLFLRSQEYKKYQTNKTTGNTDKRAFVETWQSFYRKKLKEVWKPAV

SEQ ID NO: 29095 - protein, 978 aa, synthetic construct
  REGION 1..978: note = engineered CasX variant
QEIKRINKIRRRLVKDSNTKKAGKTGPMKTLLVRVMTPDLRERLENLRKKPENIPQPISNTSRANLNKLLTDYTEMKKAILHVYWEEFQKDPVGLMSRVAQPASKKIDQNKLKPEMDEKGNLTTAGFACSQCGQPLFVYKLEQVSEKGKAYTNYFGRCNVAEHEKLILLDQLKPEKDSDEAVTYSLGKFGQRALDFYSIHVTKESTHPVKPLAQIAGNRYASGPVGKALSDACMGTIASFLSKYQDIIIEHQKVVKGNQKRLESLRELAGKENLEYPSVTLPPQPHTKEGVDAYNEVIARVRMWVNLNLWQKLKLSRDDAKPLLRLKGFPSFPLVERQANEVDWWDMVCNVKKLINEKKEDGKVFWQNLAGYKRQEALRPYLSSEEDRQKGKKFARYQLGDLLLHLEKKHGEDWGKVYDEAWERIDKKVEGLSKHIKLEEERRSEDAQSKAALTDWLRAKASFVIEGLKEADKDEFCRCELKLQKWYGDLRGKPFAIEAENSILDISGFSKQYNCAFIWQKDGVKKLNLYLIINYFKGGKLRFKKIKPEAFEANRFYTVINKKSGEIVPMEVNFNFDDPNLIILPLAFGKRQGREFIWNDLLSLETGSLKLANGRVIEKTLYNRRTRQDEPALFVALTFERREVLDSSNIKPMNLIGVDRGENIPAVIALTDPEGCPLSRFKDSLGNPTHILRIGESYKEKQRTIQAKKEVEQRRAGGYSRKYASKAKNLADDMVRNTARDLLYYAVTQDAMLIFENLSRGFGRQGKRTFMAERQYTRMEDWLTAKLAYEGLPSKTYLSKTLAQYTSKTCSNCGFTITSADYDRVLEKLKKTATGWMTTINGKELKVEGQITYYNRYKRQNVVKDLSVELDRLSEESVNNDISSWTKGRSGEALSLLKKRFSHRPVQEKFVCLNCGFETHADEQAALNIARSWLFLRSQEYKKYQTNKTTGNTDKRAFVETWQSFYRKKLKEVWKPAV

SEQ ID NO: 29096 - protein, 978 aa, synthetic construct
  REGION 1..978: note = engineered CasX variant
QEIKRINKIRRRLVKDSNTKKAGKTGPMKTLLVRVMTPDLRERLENLRKKPENIPQPISNTSRANLNKLLTDYTEMKKAILHVYWEEFQKDPVGLMSRVAQPASKKIDQNKLKPEMDEKGNLTTAGFACSQCGQPLFVYKLEQVSEKGKAYTNYFGRCNVAEHEKLILLDQLKPEKDSDEAVTYSLGKFGQRALDFYSIHVTKESTHPVKPLAQIAGNRYASGPVGKALSDACMGTIASFLSKYQDIIIEHQKVVKGNQKRLESLRELAGKENLEYPSVTLPPQPHTKEGVDAYNEVIARVRMWVNLNLWQKLKLSRDDAKPLLRLKGFPSFPLVERQANEVDWWDMVCNVKKLINEKKEDGKVFWQNLAGYKRQEALRPYLSSEEDRKKGKKFARYQLGDLLLHLEKKHGEDWGKVYDEAWERIDKKVEGLSKHIKLEEERRSEDAQSKAALTDWLRAKASFVIEGLKEADKDEFCRCELKLQKWYGDLRGKPFAIEAENSILDISGFSKQYNCAFIWQKDGVKKLNLYLIINYFKGGKLRFKKIKPEAFEANRFYTVINKKSGEIVPMEVNFNFDDPNLIILPLAFGKRQGREFIWNDLLSLETGSLKLANGRVIEKTLYNRRTRQDEPALFVALTFERREVLDSSNIKPMNLIGVDRGENIPAVIALTDPEGCPLSRFKDSLGNPTHILRIGESYKEKQRTIQAKKEVEQRRAGGYSRKYASKAKNLADDMVRNTARDLLYYAVTQDAMLIFENLSRGFGRQGKRTFMAERQYTRMEDWLTAKLAYEGLPSQTYLSKTLAQYTSKTCSNCGFTITSADYDRVLEKLKKTATGWMTTINGKELKVEGQITYYNRYKRQNVVKDLSVELDRLSEESVNNDISSWTKGRSGEALSLLKKRFSHRPVQEKFVCLNCGFETHADEQAALNIARSWLFLRSQEYKKYQTNKTTGNTDKRAFVETWQSFYRKKLKEVWKPAV

SEQ ID NO: 29097 - protein, 978 aa, synthetic construct
  REGION 1..978: note = engineered CasX variant
QEIKRINKIRRRLVKDSNTKKAGKTGPMKTLLVRVMTPDLRERLENLRKKPENIPQPISNTSRANLNKLLTDYTEMKKAILHVYWEEFQKDPVGLMSRVAQPASKKIDQNKLKPEMDEKGNLTTAGFACSQCGQPLFVYKLEQVSEKGKAYTNYFGRCNVAEHEKLILLDQLKPEKDSDEAVTYSLGKFGQRALDFYSIHVTKESTHPVKPLAQIAGNRYASGPVGKALSDACMGTIASFLSKYQDIIIEHQKVVKGNQKRLESLRELAGKENLEYPSVTLPPQPHTKEGVDAYNEVIARVRMWVNLNLWQKLKLSRDDAKPLLRLKGFPSFPLVERQANEVDWWDMVCNVKKLINEKKEDGKVFWQNLAGYKRQEALRPYLSSEEDRKKGKKFARYQLGDLLLHLEKKHGEDWGKVYDEAWERIDKKVEGLSKHIKLEEERRSEDAQSKAALTDWLRAKASFVIEGLKEADKDEFCRCELKLQKWYGDLRGKPFAIEAENSILDISGFSKQYNCAFIWQKDGVKKLNLYLIINYFKGGKLRFKKIKPEAFEANRFYTVINKKSGEIVPMEVNFNFDDPNLIILPLAFGKRQGREFIWNDLLSLETGSLKLANGRVIEKTLYNRRTRQDEPALFVALTFERREVLDSSNIKPMNLIGVDRGENIPAVIALTDPEGCPLSRFKDSLGNPTHILRIGESYKEKQRTIQAKKEVEQRRAGGYSRKYASKAKNLADDMVRNTARDLLYYAVTQDAMLIFENLSRGFGRQGKRTFMAERQYTRMEDWLTAKLAYNGLPSKTYLSKTLAQYTSKTCSNCGFTITSADYDRVLEKLKKTATGWMTTINGKELKVEGQITYYNRYKRQNVVKDLSVELDRLSEESVNNDISSWTKGRSGEALSLLKKRFSHRPVQEKFVCLNCGFETHADEQAALNIARSWLFLRSQEYKKYQTNKTTGNTDKRAFVETWQSFYRKKLKEVWKPAV

SEQ ID NO: 29098 - protein, 978 aa, synthetic construct
  REGION 1..978: note = engineered CasX variant
QEIKRINKIRRRLVKDSNTKKAGKTGPMKTLLVRVMTPDLRERLENLRKKPENIPQPISNTSRANLNKLLTDYTEMKKAILHVYWEEFQKDPVGLMSRVAQPASKKIDQNKLKPEMDEKGNLTTAGFACSQCGQPLFVYKLEQVSEKGKAYTNYFGRCNVAEHEKLIQLDQLKPEKDSDEAVTYSLGKFGQRALDFYSIHVTKESTHPVKPLAQIAGNRYASGPVGKALSDACMGTIASFLSKYQDIIIEHQKVVKGNQKRLESLRELAGKENLEYPSVTLPPQPHTKEGVDAYNEVIARVRMWVNLNLWQKLKLSRDDAKPLLRLKGFPSFPLVERQANEVDWWDMVCNVKKLINEKKEDGKVFWQNLAGYKRQEALRPYLSSEEDRKKGKKFARYQLGDLLLHLEKKHGEDWGKVYDEAWERIDKKVEGLSKHIKLEEERRSEDAQSKAALTDWLRAKASFVIEGLKEADKDEFCRCELKLQKWYGDLRGKPFAIEAENSILDISGFSKQYNCAFIWQKDGVKKLNLYLIINYFKGGKLRFKKIKPEAFEANRFYTVINKKSGEIVPMEVNFNFDDPNLIILPLAFGKRQGREFIWNDLLSLETGSLKLANGRVIEKTLYNRRTRQDEPALFVALTFERREVLDSSNIKPMNLIGVDRGENIPAVIALTDPEGCPLSRFKDSLGNPTHILRIGESYKEKQRTIQAKKEVEQRRAGGYSRKYASKAKNLADDMVRNTARDLLYYAVTQDAMLIFENLSRGFGRQGKRTFMAERQYTRMEDWLTAKLAYEGLPSKTYLSKTLAQYTSKTCSNCGFTITSADYDRVLEKLKKTATGWMTTINGKELKVEGQITYYNRYKRQNVVKDLSVELDRLSEESVNNDISSWTKGRSGEALSLLKKRFSHRPVQEKFVCLNCGFETHADEQAALNIARSWLFLRSQEYKKYQTNKTTGNTDKRAFVETWQSFYRKKLKEVWKPAV

SEQ ID NO: 29099 - protein, 978 aa, synthetic construct
  REGION 1..978: note = engineered CasX variant
QEIKRINKIRRRLVKDSNTKKAGKTGPMKTLLVRVMTPDLRERLENLRKKPENIPQPISNTSRANLNKLLTDYTEMKKAILHVYWEEFQKDPVGLMSRVAQPASKKIDQNKLKPEMDEKGNLTTAGFACSQCGQPLFVYKLEQVSEKGKAYTNYFGRCNVAEHEKLILLDQLKPEKDSDEAVTYSLGKFGQRALDFYSIHVTKESTHPVKPLAQIAGNRYASGPVGKALSDACMGTIASFLSKYQDIIIEHQKVVKGNQKRLESLRELAGKENLEYPSVTLPPQPHTKEGVDAYNEVIARVRMWVNLNLWQKLKLSRDDAKPLLRLKGFPSFPLVERQANEVDWWDMVCNVKKLINEKKEDGKVFWQNLAIYKRQEALRPYLSSEEDRKKGKKFARYQLGDLLLHLEKKHGEDWGKVYDEAWERIDKKVEGLSKHIKLEEERRSEDAQSKAALTDWLRAKASFVIEGLKEADKDEFCRCELKLQKWYGDLRGKPFAIEAENSILDISGFSKQYNCAFIWQKDGVKKLNLYLIINYFKGGKLRFKKIKPEAFEANRFYTVINKKSGEIVPMEVNFNFDDPNLIILPLAFGKRQGREFIWNDLLSLETGSLKLANGRVIEKTLYNRRTRQDEPALFVALTFERREVLDSSNIKPMNLIGVDRGENIPAVIALTDPEGCPLSRFKDSLGNPTHILRIGESYKEKQRTIQAKKEVEQRRAGGYSRKYASKAKNLADDMVRNTARDLLYYAVTQDAMLIFENLSRGFGRQGKRTFMAERQYTRMEDWLTAKLAYEGLPSKTYLSKTLAQYTSKTCSNCGFTITSADYDRVLEKLKKTATGWMTTINGKELKVEGQITYYNRYKRQNVVKDLSVELDRLSEESVNNDISSWTKGRSGEALSLLKKRFSHRPVQEKFVCLNCGFETHADEQAALNIARSWLFLRSQEYKKYQTNKTTGNTDKRAFVETWQSFYRKKLKEVWKPAV

SEQ ID NO: 29100 - protein, 978 aa, synthetic construct
  REGION 1..978: note = engineered CasX variant
QEIKRINKIRRRLVKDSNTKKAGKTGPMKTLLVRVMTPDLRERLENLRKKPENIPQPISNTSRANLNKLLTDYTEMKKAILHVYWEEFQKDPVGLMSRVAQPASKKIDQNKLKPEMDEKGNLTTAGFACSQCGQPLFVYKLEQVSEKGKAYTNYFGRCNVAEHEKLILLDQLKPEKDSDEAVTYSLGKFGQRALDFYSIHVTKESTHPVKPLAQIAGNRYASGPVGKALSDACMGTIASFLSKYQDIIIEHQKVVKGNQKRLESLRELAGKENLEYPSVTLPPQPHTKEGVDAYNEVIARVRMWVNLNLWQKLKLSRDDAKPLLRLKGFPSFPLVERQANEVDWWDMVCNVKKLINEKKEDGKVFWQNLAGYKRQEALRPYLSSEEDREKGKKFARYQLGDLLLHLEKKHGEDWGKVYDEAWERIDKKVEGLSKHIKLEEERRSEDAQSKAALTDWLRAKASFVIEGLKEADKDEFCRCELKLQKWYGDLRGKPFAIEAENSILDISGFSKQYNCAFIWQKDGVKKLNLYLIINYFKGGKLRFKKIKPEAFEANRFYTVINKKSGEIVPMEVNFNFDDPNLIILPLAFGKRQGREFIWNDLLSLETGSLKLANGRVIEKTLYNRRTRQDEPALFVALTFERREVLDSSNIKPMNLIGVDRGENIPAVIALTDPEGCPLSRFKDSLGNPTHILRIGESYKEKQRTIQAKKEVEQRRAGGYSRKYASKAKNLADDMVRNTARDLLYYAVTQDAMLIFENLSRGFGRQGKRTFMAERQYTRMEDWLTAKLAYEGLPSKTYLSKTLAQYTSKTCSNCGFTITSADYDRVLEKLKKTATGWMTTINGKELKVEGQITYYNRYKRQNVVKDLSVELDRLSEESVNNDISSWTKGRSGEALSLLKKRFSHRPVQEKFVCLNCGFETHADEQAALNIARSWLFLRSQEYKKYQTNKTTGNTDKRAFVETWQSFYRKKLKEVWKPAV

SEQ ID NO: 29101 - protein, 978 aa, synthetic construct
  REGION 1..978: note = engineered CasX variant
QEIKRINKIRRRLVKDSNTKKAGKTGPMKTLLVRVMTPDLRERLENLRKKPENIPQPISNTSRANLNKLLTDYTEMKKAILHVYWEEFQKDPVGLMSRVAQPASKKIDQNKLKPEMDEKGNLTTAGFACSQCGQPLFVYKLEQVSEKGKAYTNYFGRCNVAEHEKLILLDQLKPEKDSDEAVTYSLGKFGQRALDFYSIHVTKESTHPVKPLAQIAGNRYASGPVGKALSDACMGTIASFLSKYQDIIIEHQKVVKGNQKRLESLRELAGKENLEYPSVTLPPQPHTKEGVDAYNEVIARVRMWVNLNLWQKLKLSRDDAKPLLRLKGFPSFPLVERQANEVDWWDMVCNVKKLINEKKEDGKVFWQNLAGYKRQEALRPYLSSEEDRKKGKKFARYQLGDLLLHLEKKHGEDWGKVYDEAWERIDKKVEGLSKHIKLEEERRSEDAQSKAALTDWLRAKASFVIEGLKEADKDEFCRCELKLQKWYGDLRGKPFAIEAENSILDISGFSKQYNCAFIWQKDGVKKLNLYLIINYFKGGKLRFKKIKPEAFEANRFYTVINKKSGEIVIMEVNFNFDDPNLIILPLAFGKRQGREFIWNDLLSLETGSLKLANGRVIEKTLYNRRTRQDEPALFVALTFERREVLDSSNIKPMNLIGVDRGENIPAVIALTDPEGCPLSRFKDSLGNPTHILRIGESYKEKQRTIQAKKEVEQRRAGGYSRKYASKAKNLADDMVRNTARDLLYYAVTQDAMLIFENLSRGFGRQGKRTFMAERQYTRMEDWLTAKLAYEGLPSKTYLSKTLAQYTSKTCSNCGFTITSADYDRVLEKLKKTATGWMTTINGKELKVEGQITYYNRYKRQNVVKDLSVELDRLSEESVNNDISSWTKGRSGEALSLLKKRFSHRPVQEKFVCLNCGFETHADEQAALNIARSWLFLRSQEYKKYQTNKTTGNTDKRAFVETWQSFYRKKLKEVWKPAV

SEQ ID NO: 29102 - protein, 978 aa, synthetic construct
  REGION 1..978: note = engineered CasX variant
QEGKRINKIRRRLVKDSNTKKAGKTGPMKTLLVRVMTPDLRERLENLRKKPENIPQPISNTSRANLNKLLTDYTEMKKAILHVYWEEFQKDPVGLMSRVAQPASKKIDQNKLKPEMDEKGNLTTAGFACSQCGQPLFVYKLEQVSEKGKAYTNYFGRCNVAEHEKLILLAQLKPEKDSDEAVTYSLGKFGQRALDFYSIHVTKESTHPVKPLAQIAGNRYASGPVGKALSGACMGTIASFLSKYQDIIIEHQKVVKGNQKRLESLRELAGKENLEYPSVTLPPQPHTKEGVDAYNEVIARVRMWVNLNLWQKLKLSRDDAKPLLRLKGFPSFPLVERQANEVDWWDMVCNVKKLINEKKEDGKVFWQNLAGYKRQEALRPYLSSEEDRKKGKKFARYQLGDLLLHLEKKHGEDWGKVYDEAWERIDKKVEGLSKHIKLEEERRSEDAQSKAALTDWLRAKASFVIEGLKEADKDEFCRCELKLQKWYGDLRGKPFAIEAENSILDISGFSKQYNCAFIWQKDGVKKLNLYLIINYFKGGKLRFKKIKPEAFEANRFYTVINKKSGEIVPMEVNFNFDDPNLIILPLAFGKRQGREFIWNDLLSLETGSLKLANGRVIEKTLYNRRTRQDEPALFVALTFERREVLDSSNIKPMNLIGVDRGENIPAVIALTDPEGCPLSRFKDSLGNPTHILRIGESYKEKQRTIQAKKEVEQRRAGGYSRKYASKAKNLADDMVRNTARDLLYYAVTQDAMLIFENLSRGFGRQGKRTFMAERQYTRMEDWLTAKLAYEGLPSKTYLSKTLAQYTSKTCSNCGFTITSADYDRVLEKLKKTATGWMTTINGKELKVEGQITYYNRYKRQNVVKDLSVELDRLSEESVNNDISSWTKGRSGEALSLLKKRFSHRPVQEKFVCLNCGFETHADEQAALNIARSWLFLRSQEYKKYQTNKTTGNTDKRAFVETWQSFYRKKLKEVWKPAV

SEQ ID NO: 29103 - protein, 978 aa, synthetic construct
  REGION 1..978: note = engineered CasX variant
QEGKRINKIRRRLVKDSNTKKAGKTGPMKTLLVRVMTPDLRERLENLRKKPENIPQPISNTSRANLNKLLTDYTEMKKAILHVYWEEFQKDPVGLMSRVAQPASKKIDQNKLKPEMDEKGNLTTAGFACSQCGQPLFVYKLEQVSEKGKAYTNYFGRCNVAEHEKLILLAQLKPEKDSDEAVTYSLGKFGQRALDFYSIHVTKESTHPVKPLAQIAGNRYASGPVGKALSDACMGTIASFLSKYQDIIIEHQKVVKGNQKRLESLRELAGKENLEYPSVTLPPQPHTKEGVDAYNEVIARVRMWVNLNLWQKLKLSRDDAKPLLRLKNFPSFPLVERQANEVDWWDMVCNVKKLINEKKEDGKVFWQNLAGYKRQEALRPYLSSEEDRKKGKKFARYQLGDLLLHLEKKHGEDWGKVYDEAWERIDKKVEGLSKHIKLEEERRSEDAQSKAALTDWLRAKASFVIEGLKEADKDEFCRCELKLQKWYGDLRGKPFAIEAENSILDISGFSKQYNCAFIWQKDGVKKLNLYLIINYFKGGKLRFKKIKPEAFEANRFYTVINKKSGEIVPMEVNFNFDDPNLIILPLAFGKRQGREFIWNDLLSLETGSLKLANGRVIEKTLYNRRTRQDEPALFVALTFERREVLDSSNIKPMNLIGVDRGENIPAVIALTDPEGCPLSRFKDSLGNPTHILRIGESYKEKQRTIQAKKEVEQRRAGGYSRKYASKAKNLADDMVRNTARDLLYYAVTQDAMLIFENLSRGFGRQGKRTFMAERQYTRMEDWLTAKLAYEGLPSKTYLSKTLAQYTSKTCSNCGFTITSADYDRVLEKLKKTATGWMTTINGKELKVEGQITYYNRYKRQNVVKDLSVELDRLSEESVNNDISSWTKGRSGEALSLLKKRFSHRPVQEKFVCLNCGFETHADEQAALNIARSWLFLRSQEYKKYQTNKTTGNTDKRAFVETWQSFYRKKLKEVWKPAV

SEQ ID NO: 29104 - protein, 978 aa, synthetic construct
  REGION 1..978: note = engineered CasX variant
QEGKRINKIRRRLVKDSNTKKAGKTGPMKTLLVRVMTPDLRERLENLRKKPENIPQPISNTSRANLNKLLTDYTEMKKAILHVYWEEFQKDPVGLMSRVAQPASKKIDQNKLKPEMDEKGNLTTAGFACSQCGQPLFVYKLEQVSEKGKAYTNYFGRCNVAEHEKLILLAQLKPEKDSDEAVTYSLGKFGQRALDFYSIHVTKESTHPVKPLAQIAGNRYASGPVGKALSDACMGTIASFLSKYQDIIIEHQKVVKGNQKRLESLRELAGKENLEYPSVTLPPQPHTKEGVDAYNEVIARVRMWVNLNLWQKLKLSRDDAKPLLRLKGFPSFPLVERQANEVDWWDMVCNVKKLINEKKEDGKVFWQNLAGYKRQEALRPYLSSEEDRKKGKKFARYQLGDLLNHLEKKHGEDWGKVYDEAWERIDKKVEGLSKHIKLEEERRSEDAQSKAALTDWLRAKASFVIEGLKEADKDEFCRCELKLQKWYGDLRGKPFAIEAENSILDISGFSKQYNCAFIWQKDGVKKLNLYLIINYFKGGKLRFKKIKPEAFEANRFYTVINKKSGEIVPMEVNFNFDDPNLIILPLAFGKRQGREFIWNDLLSLETGSLKLANGRVIEKTLYNRRTRQDEPALFVALTFERREVLDSSNIKPMNLIGVDRGENIPAVIALTDPEGCPLSRFKDSLGNPTHILRIGESYKEKQRTIQAKKEVEQRRAGGYSRKYASKAKNLADDMVRNTARDLLYYAVTQDAMLIFENLSRGFGRQGKRTFMAERQYTRMEDWLTAKLAYEGLPSKTYLSKTLAQYTSKTCSNCGFTITSADYDRVLEKLKKTATGWMTTINGKELKVEGQITYYNRYKRQNVVKDLSVELDRLSEESVNNDISSWTKGRSGEALSLLKKRFSHRPVQEKFVCLNCGFETHADEQAALNIARSWLFLRSQEYKKYQTNKTTGNTDKRAFVETWQSFYRKKLKEVWKPAV

SEQ ID NO: 29105 - protein, 978 aa, synthetic construct
  REGION 1..978: note = engineered CasX variant
QEGKRINKIRRRLVKDSNTKKAGKTGPMKTLLVRVMTPDLRERLENLRKKPENIPQPISNTSRANLNKLLTDYTEMKKAILHVYWEEFQKDPVGLMSRVAQPASKKIDQNKLKPEMDEKGNLTTAGFACSQCGQPLFVYKLEQVSEKGKAYTNYFGRCNVAEHEKLILLAQLKPEKDSDEAVTYSLGKFGQRALDFYSIHVTKESTHPVKPLAQIAGNRYASGPVGKALSDACMGTIASFLSKYQDIIIEHQKVVKGNQKRLESLRELAGKENLEYPSVTLPPQPHTKEGVDAYNEVIARVRMWVNLNLWQKLKLSRDDAKPLLRLKGFPSFPLVERQANEVDWWDMVCNVKKLINEKKEDGKVFWQNLAGYKRQEALRPYLSSEEDRKKGKKFARYQLGDLLWHLEKKHGEDWGKVYDEAWERIDKKVEGLSKHIKLEEERRSEDAQSKAALTDWLRAKASFVIEGLKEADKDEFCRCELKLQKWYGDLRGKPFAIEAENSILDISGFSKQYNCAFIWQKDGVKKLNLYLIINYFKGGKLRFKKIKPEAFEANRFYTVINKKSGEIVPMEVNFNFDDPNLIILPLAFGKRQGREFIWNDLLSLETGSLKLANGRVIEKTLYNRRTRQDEPALFVALTFERREVLDSSNIKPMNLIGVDRGENIPAVIALTDPEGCPLSRFKDSLGNPTHILRIGESYKEKQRTIQAKKEVEQRRAGGYSRKYASKAKNLADDMVRNTARDLLYYAVTQDAMLIFENLSRGFGRQGKRTFMAERQYTRMEDWLTAKLAYEGLPSKTYLSKTLAQYTSKTCSNCGFTITSADYDRVLEKLKKTATGWMTTINGKELKVEGQITYYNRYKRQNVVKDLSVELDRLSEESVNNDISSWTKGRSGEALSLLKKRFSHRPVQEKFVCLNCGFETHADEQAALNIARSWLFLRSQEYKKYQTNKTTGNTDKRAFVETWQSFYRKKLKEVWKPAV

SEQ ID NO: 29106 - protein, 978 aa, synthetic construct
  REGION 1..978: note = engineered CasX variant
QEGKRINKIRRRLVKDSNTKKAGKTGPMKTLLVRVMTPDLRERLENLRKKPENIPQPISNTSRANLNKLLTDYTEMKKAILHVYWEEFQKDPVGLMSRVAQPASKKIDQNKLKPEMDEKGNLTTAGFACSQCGQPLFVYKLEQVSEKGKAYTNYFGRCNVAEHEKLILLAQLKPEKDSDEAVTYSLGKFGQRALDFYSIHVTKESTHPVKPLAQIAGNRYASGPVGKALSDACMGTIASFLSKYQDIIIEHQKVVKGNQKRLESLRELAGKENLEYPSVTLPPQPHTKEGVDAYNEVIARVRMWVNLNLWQKLKLSRDDAKPLLRLKGFPSFPLVERQANEVDWWDMVCNVKKLINEKKEDGKVFWQNLAGYKRQEALRPYLSSEEDRKKGKKFARYQLGDLLLHLYKKHGEDWGKVYDEAWERIDKKVEGLSKHIKLEEERRSEDAQSKAALTDWLRAKASFVIEGLKEADKDEFCRCELKLQKWYGDLRGKPFAIEAENSILDISGFSKQYNCAFIWQKDGVKKLNLYLIINYFKGGKLRFKKIKPEAFEANRFYTVINKKSGEIVPMEVNFNFDDPNLIILPLAFGKRQGREFIWNDLLSLETGSLKLANGRVIEKTLYNRRTRQDEPALFVALTFERREVLDSSNIKPMNLIGVDRGENIPAVIALTDPEGCPLSRFKDSLGNPTHILRIGESYKEKQRTIQAKKEVEQRRAGGYSRKYASKAKNLADDMVRNTARDLLYYAVTQDAMLIFENLSRGFGRQGKRTFMAERQYTRMEDWLTAKLAYEGLPSKTYLSKTLAQYTSKTCSNCGFTITSADYDRVLEKLKKTATGWMTTINGKELKVEGQITYYNRYKRQNVVKDLSVELDRLSEESVNNDISSWTKGRSGEALSLLKKRFSHRPVQEKFVCLNCGFETHADEQAALNIARSWLFLRSQEYKKYQTNKTTGNTDKRAFVETWQSFYRKKLKEVWKPAV

SEQ ID NO: 29107 - protein, 978 aa, synthetic construct
  REGION 1..978: note = engineered CasX variant
QEGKRINKIRRRLVKDSNTKKAGKTGPMKTLLVRVMTPDLRERLENLRKKPENIPQPISNTSRANLNKLLTDYTEMKKAILHVYWEEFQKDPVGLMSRVAQPASKKIDQNKLKPEMDEKGNLTTAGFACSQCGQPLFVYKLEQVSEKGKAYTNYFGRCNVAEHEKLILLAQLKPEKDSDEAVTYSLGKFGQRALDFYSIHVTKESTHPVKPLAQIAGNRYASGPVGKALSDACMGTIASFLSKYQDIIIEHQKVVKGNQKRLESLRELAGKENLEYPSVTLPPQPHTKEGVDAYNEVIARVRMWVNLNLWQKLKLSRDDAKPLLRLKGFPSFPLVERQANEVDWWDMVCNVKKLINEKKEDGKVFWQNLAGYKRQEALRPYLSSEEDRKKGKKFARYQLGDLLLHLEKKHPEDWGKVYDEAWERIDKKVEGLSKHIKLEEERRSEDAQSKAALTDWLRAKASFVIEGLKEADKDEFCRCELKLQKWYGDLRGKPFAIEAENSILDISGFSKQYNCAFIWQKDGVKKLNLYLIINYFKGGKLRFKKIKPEAFEANRFYTVINKKSGEIVPMEVNFNFDDPNLIILPLAFGKRQGREFIWNDLLSLETGSLKLANGRVIEKTLYNRRTRQDEPALFVALTFERREVLDSSNIKPMNLIGVDRGENIPAVIALTDPEGCPLSRFKDSLGNPTHILRIGESYKEKQRTIQAKKEVEQRRAGGYSRKYASKAKNLADDMVRNTARDLLYYAVTQDAMLIFENLSRGFGRQGKRTFMAERQYTRMEDWLTAKLAYEGLPSKTYLSKTLAQYTSKTCSNCGFTITSADYDRVLEKLKKTATGWMTTINGKELKVEGQITYYNRYKRQNVVKDLSVELDRLSEESVNNDISSWTKGRSGEALSLLKKRFSHRPVQEKFVCLNCGFETHADEQAALNIARSWLFLRSQEYKKYQTNKTTGNTDKRAFVETWQSFYRKKLKEVWKPAV

SEQ ID NO: 29108 - protein, 979 aa, synthetic construct
  REGION 1..979: note = engineered CasX variant
QEGKRINKIRRRLVKDSNTKKAGKTGPMKTLLVRVMTPDLRERLENLRKKPENIPQPISNTSRANLNKLLTDYTEMKKAILHVYWEEFQKDPVGLMSRVAQPASKKIDQNKLKPEMDEKGNLTTAGFACSQCGQPLFVYKLEQVSEKGKAYTNYFGRCNVAEHEKLILLAQLKPEKDSDEAVTYSLGKFGQRALDFYSIHVTKESTHPVKPLAQIAGNRYASGPVGKALSDACMGTIASFLSKYQDIIIEHQKVVKGNQKRLESLRELAGKENLEYPSVTLPPQPHTKEGVDAYNEVIARVRMWVNLNLWQKLKLSRDDAKPLLRLKGFPSFPLVERQANEVDWWDMVCNVKKLINEKKEDGKVFWQNLAGYKRQEALRPYLSSEEDRKKGKKFARYQLGDLLLHLEKKHGERDWGKVYDEAWERIDKKVEGLSKHIKLEEERRSEDAQSKAALTDWLRAKASFVIEGLKEADKDEFCRCELKLQKWYGDLRGKPFAIEAENSILDISGFSKQYNCAFIWQKDGVKKLNLYLIINYFKGGKLRFKKIKPEAFEANRFYTVINKKSGEIVPMEVNFNFDDPNLIILPLAFGKRQGREFIWNDLLSLETGSLKLANGRVIEKTLYNRRTRQDEPALFVALTFERREVLDSSNIKPMNLIGVDRGENIPAVIALTDPEGCPLSRFKDSLGNPTHILRIGESYKEKQRTIQAKKEVEQRRAGGYSRKYASKAKNLADDMVRNTARDLLYYAVTQDAMLIFENLSRGFGRQGKRTFMAERQYTRMEDWLTAKLAYEGLPSKTYLSKTLAQYTSKTCSNCGFTITSADYDRVLEKLKKTATGWMTTINGKELKVEGQITYYNRYKRQNVVKDLSVELDRLSEESVNNDISSWTKGRSGEALSLLKKRFSHRPVQEKFVCLNCGFETHADEQAALNIARSWLFLRSQEYKKYQTNKTTGNTDKRAFVETWQSFYRKKLKEVWKPAV

SEQ ID NO: 29109 - protein, 979 aa, synthetic construct
  REGION 1..979: note = engineered CasX variant
QEGKRINKIRRRLVKDSNTKKAGKTGPMKTLLVRVMTPDLRERLENLRKKPENIPQPISNTSRANLNKLLTDYTEMKKAILHVYWEEFQKDPVGLMSRVAQPASKKIDQNKLKPEMDEKGNLTTAGFACSQCGQPLFVYKLEQVSEKGKAYTNYFGRCNVAEHEKLILLAQLKPEKDSDEAVTYSLGKFGQRALDFYSIHVTKESTHPVKPLAQIAGNRYASGPVGKALSDACMGTIASFLSKYQDIIIEHQKVVKGNQKRLESLRELAGKENLEYPSVTLPPQPHTKEGVDAYNEVIARVRMWVNLNLWQKLKLSRDDAKPLLRLKGFPSFPLVERQANEVDWWDMVCNVKKLINEKKEDGKVFWQNLAGYKRQEALRPYLSSEEDRKKGKKFARYQLGDLLLHLEKKHGEYDWGKVYDEAWERIDKKVEGLSKHIKLEEERRSEDAQSKAALTDWLRAKASFVIEGLKEADKDEFCRCELKLQKWYGDLRGKPFAIEAENSILDISGFSKQYNCAFIWQKDGVKKLNLYLIINYFKGGKLRFKKIKPEAFEANRFYTVINKKSGEIVPMEVNFNFDDPNLIILPLAFGKRQGREFIWNDLLSLETGSLKLANGRVIEKTLYNRRTRQDEPALFVALTFERREVLDSSNIKPMNLIGVDRGENIPAVIALTDPEGCPLSRFKDSLGNPTHILRIGESYKEKQRTIQAKKEVEQRRAGGYSRKYASKAKNLADDMVRNTARDLLYYAVTQDAMLIFENLSRGFGRQGKRTFMAERQYTRMEDWLTAKLAYEGLPSKTYLSKTLAQYTSKTCSNCGFTITSADYDRVLEKLKKTATGWMTTINGKELKVEGQITYYNRYKRQNVVKDLSVELDRLSEESVNNDISSWTKGRSGEALSLLKKRFSHRPVQEKFVCLNCGFETHADEQAALNIARSWLFLRSQEYKKYQTNKTTGNTDKRAFVETWQSFYRKKLKEVWKPAV

SEQ ID NO: 29110 - protein, 978 aa, synthetic construct
  REGION 1..978: note = engineered CasX variant
QEGKRINKIRRRLVKDSNTKKAGKTGPMKTLLVRVMTPDLRERLENLRKKPENIPQPISNTSRANLNKLLTDYTEMKKAILHVYWEEFQKDPVGLMSRVAQPASKKIDQNKLKPEMDEKGNLTTAGFACSQCGQPLFVYKLEQVSEKGKAYTNYFGRCNVAEHEKLILLAQLKPEKDSDEAVTYSLGKFGQRALDFYSIHVTKESTHPVKPLAQIAGNRYASGPVGKALSDACMGTIASFLSKYQDIIIEHQKVVKGNQKRLESLRELAGKENLEYPSVTLPPQPHTKEGVDAYNEVIARVRMWVNLNLWQKLKLSRDDAKPLLRLKGFPSFPLVERQANEVDWWDMVCNVKKLINEKKEDGKVFWQNLAGYKRQEALRPYLSSEEDRKKGKKFARYQLGDLLLHLEKKHGEDWGDVYDEAWERIDKKVEGLSKHIKLEEERRSEDAQSKAALTDWLRAKASFVIEGLKEADKDEFCRCELKLQKWYGDLRGKPFAIEAENSILDISGFSKQYNCAFIWQKDGVKKLNLYLIINYFKGGKLRFKKIKPEAFEANRFYTVINKKSGEIVPMEVNFNFDDPNLIILPLAFGKRQGREFIWNDLLSLETGSLKLANGRVIEKTLYNRRTRQDEPALFVALTFERREVLDSSNIKPMNLIGVDRGENIPAVIALTDPEGCPLSRFKDSLGNPTHILRIGESYKEKQRTIQAKKEVEQRRAGGYSRKYASKAKNLADDMVRNTARDLLYYAVTQDAMLIFENLSRGFGRQGKRTFMAERQYTRMEDWLTAKLAYEGLPSKTYLSKTLAQYTSKTCSNCGFTITSADYDRVLEKLKKTATGWMTTINGKELKVEGQITYYNRYKRQNVVKDLSVELDRLSEESVNNDISSWTKGRSGEALSLLKKRFSHRPVQEKFVCLNCGFETHADEQAALNIARSWLFLRSQEYKKYQTNKTTGNTDKRAFVETWQSFYRKKLKEVWKPAV

SEQ ID NO: 29111 - protein, 978 aa, synthetic construct
  REGION 1..978: note = engineered CasX variant
QEGKRINKIRRRLVKDSNTKKAGKTGPMKTLLVRVMTPDLRERLENLRKKPENIPQPISNTSRANLNKLLTDYTEMKKAILHVYWEEFQKDPVGLMSRVAQPASKKIDQNKLKPEMDEKGNLTTAGFACSQCGQPLFVYKLEQVSEKGKAYTNYFGRCNVAEHEKLILLAQLKPEKDSDEAVTYSLGKFGQRALDFYSIHVTKESTHPVKPLAQIAGNRYASGPVGKALSDACMGTIASFLSKYQDIIIEHQKVVKGNQKRLESLRELAGKENLEYPSVTLPPQPHTKEGVDAYNEVIARVRMWVNLNLWQKLKLSRDDAKPLLRLKGFPSFPLVERQANEVDWWDMVCNVKKLINEKKEDGKVFWQNLAGYKRQEALRPYLSSEEDRKKGKKFARYQLGDLLLHLEKKHGEDWGKVYGEAWERIDKKVEGLSKHIKLEEERRSEDAQSKAALTDWLRAKASFVIEGLKEADKDEFCRCELKLQKWYGDLRGKPFAIEAENSILDISGFSKQYNCAFIWQKDGVKKLNLYLIINYFKGGKLRFKKIKPEAFEANRFYTVINKKSGEIVPMEVNFNFDDPNLIILPLAFGKRQGREFIWNDLLSLETGSLKLANGRVIEKTLYNRRTRQDEPALFVALTFERREVLDSSNIKPMNLIGVDRGENIPAVIALTDPEGCPLSRFKDSLGNPTHILRIGESYKEKQRTIQAKKEVEQRRAGGYSRKYASKAKNLADDMVRNTARDLLYYAVTQDAMLIFENLSRGFGRQGKRTFMAERQYTRMEDWLTAKLAYEGLPSKTYLSKTLAQYTSKTCSNCGFTITSADYDRVLEKLKKTATGWMTTINGKELKVEGQITYYNRYKRQNVVKDLSVELDRLSEESVNNDISSWTKGRSGEALSLLKKRFSHRPVQEKFVCLNCGFETHADEQAALNIARSWLFLRSQEYKKYQTNKTTGNTDKRAFVETWQSFYRKKLKEVWKPAV

SEQ ID NO: 29112 - protein, 978 aa, synthetic construct
  REGION 1..978: note = engineered CasX variant
QEGKRINKIRRRLVKDSNTKKAGKTGPMKTLLVRVMTPDLRERLENLRKKPENIPQPISNTSRANLNKLLTDYTEMKKAILHVYWEEFQKDPVGLMSRVAQPASKKIDQNKLKPEMDEKGNLTTAGFACSQCGQPLFVYKLEQVSEKGKAYTNYFGRCNVAEHEKLILLAQLKPEKDSDEAVTYSLGKFGQRALDFYSIHVTKESTHPVKPLAQIAGNRYASGPVGKALSDACMGTIASFLSKYQDIIIEHQKVVKGNQKRLESLRELAGKENLEYPSVTLPPQPHTKEGVDAYNEVIARVRMWVNLNLWQKLKLSRDDAKPLLRLKGFPSFPLVERQANEVDWWDMVCNVKKLINEKKEDGKVFWQNLAGYKRQEALRPYLSSEEDRKKGKKFARYQLGDLLLHLEKKHGEDWGKVYDEAWERIDKKVEGLSKHIKLEEERRSEDAQSKAALTDWLRAKASFVIEGKKEADKDEFCRCELKLQKWYGDLRGKPFAIEAENSILDISGFSKQYNCAFIWQKDGVKKLNLYLIINYFKGGKLRFKKIKPEAFEANRFYTVINKKSGEIVPMEVNFNFDDPNLIILPLAFGKRQGREFIWNDLLSLETGSLKLANGRVIEKTLYNRRTRQDEPALFVALTFERREVLDSSNIKPMNLIGVDRGENIPAVIALTDPEGCPLSRFKDSLGNPTHILRIGESYKEKQRTIQAKKEVEQRRAGGYSRKYASKAKNLADDMVRNTARDLLYYAVTQDAMLIFENLSRGFGRQGKRTFMAERQYTRMEDWLTAKLAYEGLPSKTYLSKTLAQYTSKTCSNCGFTITSADYDRVLEKLKKTATGWMTTINGKELKVEGQITYYNRYKRQNVVKDLSVELDRLSEESVNNDISSWTKGRSGEALSLLKKRFSHRPVQEKFVCLNCGFETHADEQAALNIARSWLFLRSQEYKKYQTNKTTGNTDKRAFVETWQSFYRKKLKEVWKPAV

SEQ ID NO: 29113 - protein, 978 aa, synthetic construct
  REGION 1..978: note = engineered CasX variant
QEGKRINKIRRRLVKDSNTKKAGKTGPMKTLLVRVMTPDLRERLENLRKKPENIPQPISNTSRANLNKLLTDYTEMKKAILHVYWEEFQKDPVGLMSRVAQPASKKIDQNKLKPEMDEKGNLTTAGFACSQCGQPLFVYKLEQVSEKGKAYTNYFGRCNVAEHEKLILLAQLKPEKDSDEAVTYSLGKFGQRALDFYSIHVTKESTHPVKPLAQIAGNRYASGPVGKALSDACMGTIASFLSKYQDIIIEHQKVVKGNQKRLESLRELAGKENLEYPSVTLPPQPHTKEGVDAYNEVIARVRMWVNLNLWQKLKLSRDDAKPLLRLKGFPSFPLVERQANEVDWWDMVCNVKKLINEKKEDGKVFWQNLAGYKRQEALRPYLSSEEDRKKGKKFARYQLGDLLLHLEKKHGEDWGKVYDEAWERIDKKVEGLSKHIKLEEERRSEDAQSKAALTDWLRAKASFVIEGSKEADKDEFCRCELKLQKWYGDLRGKPFAIEAENSILDISGFSKQYNCAFIWQKDGVKKLNLYLIINYFKGGKLRFKKIKPEAFEANRFYTVINKKSGEIVPMEVNFNFDDPNLIILPLAFGKRQGREFIWNDLLSLETGSLKLANGRVIEKTLYNRRTRQDEPALFVALTFERREVLDSSNIKPMNLIGVDRGENIPAVIALTDPEGCPLSRFKDSLGNPTHILRIGESYKEKQRTIQAKKEVEQRRAGGYSRKYASKAKNLADDMVRNTARDLLYYAVTQDAMLIFENLSRGFGRQGKRTFMAERQYTRMEDWLTAKLAYEGLPSKTYLSKTLAQYTSKTCSNCGFTITSADYDRVLEKLKKTATGWMTTINGKELKVEGQITYYNRYKRQNVVKDLSVELDRLSEESVNNDISSWTKGRSGEALSLLKKRFSHRPVQEKFVCLNCGFETHADEQAALNIARSWLFLRSQEYKKYQTNKTTGNTDKRAFVETWQSFYRKKLKEVWKPAV

SEQ ID NO: 29114 - protein, 979 aa, synthetic construct
  REGION 1..979: note = engineered CasX variant
QEGKRINKIRRRLVKDSNTKKAGKTGPMKTLLVRVMTPDLRERLENLRKKPENIPQPISNTSRANLNKLLTDYTEMKKAILHVYWEEFQKDPVGLMSRVAQPASKKIDQNKLKPEMDEKGNLTTAGFACSQCGQPLFVYKLEQVSEKGKAYTNYFGRCNVAEHEKLILLAQLKPEKDSDEAVTYSLGKFGQRALDFYSIHVTKESTHPVKPLAQIAGNRYASGPVGKALSDACMGTIASFLSKYQDIIIEHQKVVKGNQKRLESLRELAGKENLEYPSVTLPPQPHTKEGVDAYNEVIARVRMWVNLNLWQKLKLSRDDAKPLLRLKGFPSFPLVERQANEVDWWDMVCNVKKLINEKKEDGKVFWQNLAGYKRQEALRPYLSSEEDRKKGKKFARYQLGDLLLHLEKKHGEDWGKVYDEAWERIDKKVEGLSKHIKLEEERRSEDAQSKAALTDWLRAKASFVIEGLKEADDKDEFCRCELKLQKWYGDLRGKPFAIEAENSILDISGFSKQYNCAFIWQKDGVKKLNLYLIINYFKGGKLRFKKIKPEAFEANRFYTVINKKSGEIVPMEVNFNFDDPNLIILPLAFGKRQGREFIWNDLLSLETGSLKLANGRVIEKTLYNRRTRQDEPALFVALTFERREVLDSSNIKPMNLIGVDRGENIPAVIALTDPEGCPLSRFKDSLGNPTHILRIGESYKEKQRTIQAKKEVEQRRAGGYSRKYASKAKNLADDMVRNTARDLLYYAVTQDAMLIFENLSRGFGRQGKRTFMAERQYTRMEDWLTAKLAYEGLPSKTYLSKTLAQYTSKTCSNCGFTITSADYDRVLEKLKKTATGWMTTINGKELKVEGQITYYNRYKRQNVVKDLSVELDRLSEESVNNDISSWTKGRSGEALSLLKKRFSHRPVQEKFVCLNCGFETHADEQAALNIARSWLFLRSQEYKKYQTNKTTGNTDKRAFVETWQSFYRKKLKEVWKPAV

SEQ ID NO: 29115 - protein, 979 aa, synthetic construct
  REGION 1..979: note = engineered CasX variant
QEGKRINKIRRRLVKDSNTKKAGKTGPMKTLLVRVMTPDLRERLENLRKKPENIPQPISNTSRANLNKLLTDYTEMKKAILHVYWEEFQKDPVGLMSRVAQPASKKIDQNKLKPEMDEKGNLTTAGFACSQCGQPLFVYKLEQVSEKGKAYTNYFGRCNVAEHEKLILLAQLKPEKDSDEAVTYSLGKFGQRALDFYSIHVTKESTHPVKPLAQIAGNRYASGPVGKALSDACMGTIASFLSKYQDIIIEHQKVVKGNQKRLESLRELAGKENLEYPSVTLPPQPHTKEGVDAYNEVIARVRMWVNLNLWQKLKLSRDDAKPLLRLKGFPSFPLVERQANEVDWWDMVCNVKKLINEKKEDGKVFWQNLAGYKRQEALRPYLSSEEDRKKGKKFARYQLGDLLLHLEKKHGEDWGKVYDEAWERIDKKVEGLSKHIKLEEERRSEDAQSKAALTDWLRAKASFVIEGLKEADKDEFCRCELKLQKWYGDLRGKPFAIEAENSILDISGFSKQYNCAFIWQKDGVKKLNLYLIINYFKGGKLRFKKIKPEAFEANRFYTVINKKSGEIVPMEVNFNFDDPNLIILPLAFGKRQGREFIWNDLLSLETGSLKLANGRVIEKTLYNRRTRQDEPALFVALTFERREVLDSSNIKPMNLIGVDRGENIPAVIALTDPEGCPLSRFKDSLGNPTHILRIGESYKEKQRTIQAKKEVEQRRAGGYSRKYASKAKNLADDMVRNTARDLLYYAVTQDAMLIFENLSRGFGRQGKRTFMAERQYTRMEDWLTAKLAYEGLPSKTYLSKTLAQYTSKTCSNCGFTITSADYDRVLEKLKKTATGWMTTINGKELKVEGQITYYNRYKRQNVVKDLSVELDRLSEESVNNDISSWTKGRSGNEALSLLKKRFSHRPVQEKFVCLNCGFETHADEQAALNIARSWLFLRSQEYKKYQTNKTTGNTDKRAFVETWQSFYRKKLKEVWKPAV

SEQ ID NO: 29116 - protein, 978 aa, synthetic construct
  REGION 1..978: note = engineered CasX variant
QEGKRINKIRRRLVKDSNTKKAGKTGPMKTLLVRVMTPDLRERLENLRKKPENIPQPISNTSRANLNKLLTDYTEMKKAILHVYWEEFQKDPVGLMSRVAQPASKKIDQNKLKPEMDEKGNLTTAGFACSQCGQPLFVYKLEQVSEKGKAYTNYFGRCNVAEHEKLILLAQLKPEKDSDEAVTYSLGKFGQRALDFYSIHVTKESTHPVKPLAQIAGNRYASGPVGKALSDACMGTIASFLSKYQDIIIEHQKVVKGNQKRLESLRELAGKENLEYPSVTLPPQPHTKEGVDAYNEVIARVRMWVNLNLWQKLKLSRDDAKPLLRLKGFPSFPLVERQANEVDWWDMVCNVKKLINEKKEDGKVFWQNLAGYKRQEALRPYLSSEEDRQKGKKFARYQLGDLLLHLEKKHGEDWGKVYDEAWERIDKKVEGLSKHIKLEEERRSEDAQSKAALTDWLRAKASFVIEGLKEADKDEFCRCELKLQKWYGDLRGKPFAIEAENSILDISGFSKQYNCAFIWQKDGVKKLNLYLIINYFKGGKLRFKKIKPEAFEANRFYTVINKKSGEIVPMEVNFNFDDPNLIILPLAFGKRQGREFIWNDLLSLETGSLKLANGRVIEKTLYNRRTRQDEPALFVALTFERREVLDSSNIKPMNLIGVDRGENIPAVIALTDPEGCPLSRFKDSLGNPTHILRIGESYKEKQRTIQAKKEVEQRRAGGYSRKYASKAKNLADDMVRNTARDLLYYAVTQDAMLIFENLSRGFGRQGKRTFMAERQYTRMEDWLTAKLAYEGLPSKTYLSKTLAQYTSKTCSNCGFTITSADYDRVLEKLKKTATGWMTTINGKELKVEGQITYYNRYKRQNVVKDLSVELDRLSEESVNNDISSWTKGRSGEALSLLKKRFSHRPVQEKFVCLNCGFETHADEQAALNIARSWLFLRSQEYKKYQTNKTTGNTDKRAFVETWQSFYRKKLKEVWKPAV

SEQ ID NO: 29117 - protein, 978 aa, synthetic construct
  REGION 1..978: note = engineered CasX variant
QEGKRINKIRRRLVKDSNTKKAGKTGPMKTLLVRVMTPDLRERLENLRKKPENIPQPISNTSRANLNKLLTDYTEMKKAILHVYWEEFQKDPVGLMSRVAQPASKKIDQNKLKPEMDEKGNLTTAGFACSQCGQPLFVYKLEQVSEKGKAYTNYFGRCNVAEHEKLILLAQLKPEKDSDEAVTYSLGKFGQRALDFYSIHVTKESTHPVKPLAQIAGNRYASGPVGKALSDACMGTIASFLSKYQDIIIEHQKVVKGNQKRLESLRELAGKENLEYPSVTLPPQPHTKEGVDAYNEVIARVRMWVNLNLWQKLKLSRDDAKPLLRLKGFPSFPLVERQANEVDWWDMVCNVKKLINEKKEDGKVFWQNLAGYKRQEALRPYLSSEEDRKKGKKFARYQLGDLLLHLEKKHGEDWGKVYDEAWERIDKKVEGLSKHIKLEEERRSEDAQSKAALTDWLRAKASFVIEGLKEADKDEFCRCELKLQKWYGDLRGKPFAIEAENSILDISGFSKQYNCAFIWQKDGVKKLNLYLIINYFKGGKLRFKKIKPEAFEANRFYTVINKKSGEIVPMEVNFNFDDPNLIILPLAFGKRQGREFIWNDLLSLETGSLKLANGRVIEKTLYNRRTRQDEPALFVALTFERREVLDSSNIKPMNLIGVDRGENIPAVIALTDPEGCPLSRFKDSLGNPTHILRIGESYKEKQRTIQAKKEVEQRRAGGYSRKYASKAKNLADDMVRNTARDLLYYAVTQDAMLIFENLSRGFGRQGKRTFMAERQYTRMEDWLTAKLAYEGLPSQTYLSKTLAQYTSKTCSNCGFTITSADYDRVLEKLKKTATGWMTTINGKELKVEGQITYYNRYKRQNVVKDLSVELDRLSEESVNNDISSWTKGRSGEALSLLKKRFSHRPVQEKFVCLNCGFETHADEQAALNIARSWLFLRSQEYKKYQTNKTTGNTDKRAFVETWQSFYRKKLKEVWKPAV

SEQ ID NO: 29118 - protein, 978 aa, synthetic construct
  REGION 1..978: note = engineered CasX variant
QEGKRINKIRRRLVKDSNTKKAGKTGPMKTLLVRVMTPDLRERLENLRKKPENIPQPISNTSRANLNKLLTDYTEMKKAILHVYWEEFQKDPVGLMSRVAQPASKKIDQNKLKPEMDEKGNLTTAGFACSQCGQPLFVYKLEQVSEKGKAYTNYFGRCNVAEHEKLILLAQLKPEKDSDEAVTYSLGKFGQRALDFYSIHVTKESTHPVKPLAQIAGNRYASGPVGKALSDACMGTIASFLSKYQDIIIEHQKVVKGNQKRLESLRELAGKENLEYPSVTLPPQPHTKEGVDAYNEVIARVRMWVNLNLWQKLKLSRDDAKPLLRLKGFPSFPLVERQANEVDWWDMVCNVKKLINEKKEDGKVFWQNLAGYKRQEALRPYLSSEEDRKKGKKFARYQLGDLLLHLEKKHGEDWGKVYDEAWERIDKKVEGLSKHIKLEEERRSEDAQSKAALTDWLRAKASFVIEGLKEADKDEFCRCELKLQKWYGDLRGKPFAIEAENSILDISGFSKQYNCAFIWQKDGVKKLNLYLIINYFKGGKLRFKKIKPEAFEANRFYTVINKKSGEIVPMEVNFNFDDPNLIILPLAFGKRQGREFIWNDLLSLETGSLKLANGRVIEKTLYNRRTRQDEPALFVALTFERREVLDSSNIKPMNLIGVDRGENIPAVIALTDPEGCPLSRFKDSLGNPTHILRIGESYKEKQRTIQAKKEVEQRRAGGYSRKYASKAKNLADDMVRNTARDLLYYAVTQDAMLIFENLSRGFGRQGKRTFMAERQYTRMEDWLTAKLAYNGLPSKTYLSKTLAQYTSKTCSNCGFTITSADYDRVLEKLKKTATGWMTTINGKELKVEGQITYYNRYKRQNVVKDLSVELDRLSEESVNNDISSWTKGRSGEALSLLKKRFSHRPVQEKFVCLNCGFETHADEQAALNIARSWLFLRSQEYKKYQTNKTTGNTDKRAFVETWQSFYRKKLKEVWKPAV

SEQ ID NO: 29119 - protein, 978 aa, synthetic construct
  REGION 1..978: note = engineered CasX variant
QEGKRINKIRRRLVKDSNTKKAGKTGPMKTLLVRVMTPDLRERLENLRKKPENIPQPISNTSRANLNKLLTDYTEMKKAILHVYWEEFQKDPVGLMSRVAQPASKKIDQNKLKPEMDEKGNLTTAGFACSQCGQPLFVYKLEQVSEKGKAYTNYFGRCNVAEHEKLIQLAQLKPEKDSDEAVTYSLGKFGQRALDFYSIHVTKESTHPVKPLAQIAGNRYASGPVGKALSDACMGTIASFLSKYQDIIIEHQKVVKGNQKRLESLRELAGKENLEYPSVTLPPQPHTKEGVDAYNEVIARVRMWVNLNLWQKLKLSRDDAKPLLRLKGFPSFPLVERQANEVDWWDMVCNVKKLINEKKEDGKVFWQNLAGYKRQEALRPYLSSEEDRKKGKKFARYQLGDLLLHLEKKHGEDWGKVYDEAWERIDKKVEGLSKHIKLEEERRSEDAQSKAALTDWLRAKASFVIEGLKEADKDEFCRCELKLQKWYGDLRGKPFAIEAENSILDISGFSKQYNCAFIWQKDGVKKLNLYLIINYFKGGKLRFKKIKPEAFEANRFYTVINKKSGEIVPMEVNFNFDDPNLIILPLAFGKRQGREFIWNDLLSLETGSLKLANGRVIEKTLYNRRTRQDEPALFVALTFERREVLDSSNIKPMNLIGVDRGENIPAVIALTDPEGCPLSRFKDSLGNPTHILRIGESYKEKQRTIQAKKEVEQRRAGGYSRKYASKAKNLADDMVRNTARDLLYYAVTQDAMLIFENLSRGFGRQGKRTFMAERQYTRMEDWLTAKLAYEGLPSKTYLSKTLAQYTSKTCSNCGFTITSADYDRVLEKLKKTATGWMTTINGKELKVEGQITYYNRYKRQNVVKDLSVELDRLSEESVNNDISSWTKGRSGEALSLLKKRFSHRPVQEKFVCLNCGFETHADEQAALNIARSWLFLRSQEYKKYQTNKTTGNTDKRAFVETWQSFYRKKLKEVWKPAV

SEQ ID NO: 29120 - protein, 978 aa, synthetic construct
  REGION 1..978: note = engineered CasX variant
QEGKRINKIRRRLVKDSNTKKAGKTGPMKTLLVRVMTPDLRERLENLRKKPENIPQPISNTSRANLNKLLTDYTEMKKAILHVYWEEFQKDPVGLMSRVAQPASKKIDQNKLKPEMDEKGNLTTAGFACSQCGQPLFVYKLEQVSEKGKAYTNYFGRCNVAEHEKLILLAQLKPEKDSDEAVTYSLGKFGQRALDFYSIHVTKESTHPVKPLAQIAGNRYASGPVGKALSDACMGTIASFLSKYQDIIIEHQKVVKGNQKRLESLRELAGKENLEYPSVTLPPQPHTKEGVDAYNEVIARVRMWVNLNLWQKLKLSRDDAKPLLRLKGFPSFPLVERQANEVDWWDMVCNVKKLINEKKEDGKVFWQNLAIYKRQEALRPYLSSEEDRKKGKKFARYQLGDLLLHLEKKHGEDWGKVYDEAWERIDKKVEGLSKHIKLEEERRSEDAQSKAALTDWLRAKASFVIEGLKEADKDEFCRCELKLQKWYGDLRGKPFAIEAENSILDISGFSKQYNCAFIWQKDGVKKLNLYLIINYFKGGKLRFKKIKPEAFEANRFYTVINKKSGEIVPMEVNFNFDDPNLIILPLAFGKRQGREFIWNDLLSLETGSLKLANGRVIEKTLYNRRTRQDEPALFVALTFERREVLDSSNIKPMNLIGVDRGENIPAVIALTDPEGCPLSRFKDSLGNPTHILRIGESYKEKQRTIQAKKEVEQRRAGGYSRKYASKAKNLADDMVRNTARDLLYYAVTQDAMLIFENLSRGFGRQGKRTFMAERQYTRMEDWLTAKLAYEGLPSKTYLSKTLAQYTSKTCSNCGFTITSADYDRVLEKLKKTATGWMTTINGKELKVEGQITYYNRYKRQNVVKDLSVELDRLSEESVNNDISSWTKGRSGEALSLLKKRFSHRPVQEKFVCLNCGFETHADEQAALNIARSWLFLRSQEYKKYQTNKTTGNTDKRAFVETWQSFYRKKLKEVWKPAV

SEQ ID NO: 29121 - protein, 978 aa, synthetic construct
  REGION 1..978: note = engineered CasX variant
QEGKRINKIRRRLVKDSNTKKAGKTGPMKTLLVRVMTPDLRERLENLRKKPENIPQPISNTSRANLNKLLTDYTEMKKAILHVYWEEFQKDPVGLMSRVAQPASKKIDQNKLKPEMDEKGNLTTAGFACSQCGQPLFVYKLEQVSEKGKAYTNYFGRCNVAEHEKLILLAQLKPEKDSDEAVTYSLGKFGQRALDFYSIHVTKESTHPVKPLAQIAGNRYASGPVGKALSDACMGTIASFLSKYQDIIIEHQKVVKGNQKRLESLRELAGKENLEYPSVTLPPQPHTKEGVDAYNEVIARVRMWVNLNLWQKLKLSRDDAKPLLRLKGFPSFPLVERQANEVDWWDMVCNVKKLINEKKEDGKVFWQNLAGYKRQEALRPYLSSEEDREKGKKFARYQLGDLLLHLEKKHGEDWGKVYDEAWERIDKKVEGLSKHIKLEEERRSEDAQSKAALTDWLRAKASFVIEGLKEADKDEFCRCELKLQKWYGDLRGKPFAIEAENSILDISGFSKQYNCAFIWQKDGVKKLNLYLIINYFKGGKLRFKKIKPEAFEANRFYTVINKKSGEIVPMEVNFNFDDPNLIILPLAFGKRQGREFIWNDLLSLETGSLKLANGRVIEKTLYNRRTRQDEPALFVALTFERREVLDSSNIKPMNLIGVDRGENIPAVIALTDPEGCPLSRFKDSLGNPTHILRIGESYKEKQRTIQAKKEVEQRRAGGYSRKYASKAKNLADDMVRNTARDLLYYAVTQDAMLIFENLSRGFGRQGKRTFMAERQYTRMEDWLTAKLAYEGLPSKTYLSKTLAQYTSKTCSNCGFTITSADYDRVLEKLKKTATGWMTTINGKELKVEGQITYYNRYKRQNVVKDLSVELDRLSEESVNNDISSWTKGRSGEALSLLKKRFSHRPVQEKFVCLNCGFETHADEQAALNIARSWLFLRSQEYKKYQTNKTTGNTDKRAFVETWQSFYRKKLKEVWKPAV

SEQ ID NO: 29122 - protein, 978 aa, synthetic construct
  REGION 1..978: note = engineered CasX variant
QEGKRINKIRRRLVKDSNTKKAGKTGPMKTLLVRVMTPDLRERLENLRKKPENIPQPISNTSRANLNKLLTDYTEMKKAILHVYWEEFQKDPVGLMSRVAQPASKKIDQNKLKPEMDEKGNLTTAGFACSQCGQPLFVYKLEQVSEKGKAYTNYFGRCNVAEHEKLILLAQLKPEKDSDEAVTYSLGKFGQRALDFYSIHVTKESTHPVKPLAQIAGNRYASGPVGKALSDACMGTIASFLSKYQDIIIEHQKVVKGNQKRLESLRELAGKENLEYPSVTLPPQPHTKEGVDAYNEVIARVRMWVNLNLWQKLKLSRDDAKPLLRLKGFPSFPLVERQANEVDWWDMVCNVKKLINEKKEDGKVFWQNLAGYKRQEALRPYLSSEEDRKKGKKFARYQLGDLLLHLEKKHGEDWGKVYDEAWERIDKKVEGLSKHIKLEEERRSEDAQSKAALTDWLRAKASFVIEGLKEADKDEFCRCELKLQKWYGDLRGKPFAIEAENSILDISGFSKQYNCAFIWQKDGVKKLNLYLIINYFKGGKLRFKKIKPEAFEANRFYTVINKKSGEIVIMEVNFNFDDPNLIILPLAFGKRQGREFIWNDLLSLETGSLKLANGRVIEKTLYNRRTRQDEPALFVALTFERREVLDSSNIKPMNLIGVDRGENIPAVIALTDPEGCPLSRFKDSLGNPTHILRIGESYKEKQRTIQAKKEVEQRRAGGYSRKYASKAKNLADDMVRNTARDLLYYAVTQDAMLIFENLSRGFGRQGKRTFMAERQYTRMEDWLTAKLAYEGLPSKTYLSKTLAQYTSKTCSNCGFTITSADYDRVLEKLKKTATGWMTTINGKELKVEGQITYYNRYKRQNVVKDLSVELDRLSEESVNNDISSWTKGRSGEALSLLKKRFSHRPVQEKFVCLNCGFETHADEQAALNIARSWLFLRSQEYKKYQTNKTTGNTDKRAFVETWQSFYRKKLKEVWKPAV

SEQ ID NO: 29123 - protein, 979 aa, synthetic construct
  REGION 1..979: note = engineered CasX variant
QEIGKRINKIRRRLVKDSNTKKAGKTGPMKTLLVRVMTPDLRERLENLRKKPENIPQPISNTSRANLNKLLTDYTEMKKAILHVYWEEFQKDPVGLMSRVAQPASKKIDQNKLKPEMDEKGNLTTAGFACSQCGQPLFVYKLEQVSEKGKAYTNYFGRCNVAEHEKLILLAQLKPEKDSDEAVTYSLGKFGQRALDFYSIHVTKESTHPVKPLAQIAGNRYASGPVGKALSGACMGTIASFLSKYQDIIIEHQKVVKGNQKRLESLRELAGKENLEYPSVTLPPQPHTKEGVDAYNEVIARVRMWVNLNLWQKLKLSRDDAKPLLRLKGFPSFPLVERQANEVDWWDMVCNVKKLINEKKEDGKVFWQNLAGYKRQEALRPYLSSEEDRKKGKKFARYQLGDLLLHLEKKHGEDWGKVYDEAWERIDKKVEGLSKHIKLEEERRSEDAQSKAALTDWLRAKASFVIEGLKEADKDEFCRCELKLQKWYGDLRGKPFAIEAENSILDISGFSKQYNCAFIWQKDGVKKLNLYLIINYFKGGKLRFKKIKPEAFEANRFYTVINKKSGEIVPMEVNFNFDDPNLIILPLAFGKRQGREFIWNDLLSLETGSLKLANGRVIEKTLYNRRTRQDEPALFVALTFERREVLDSSNIKPMNLIGVDRGENIPAVIALTDPEGCPLSRFKDSLGNPTHILRIGESYKEKQRTIQAKKEVEQRRAGGYSRKYASKAKNLADDMVRNTARDLLYYAVTQDAMLIFENLSRGFGRQGKRTFMAERQYTRMEDWLTAKLAYEGLPSKTYLSKTLAQYTSKTCSNCGFTITSADYDRVLEKLKKTATGWMTTINGKELKVEGQITYYNRYKRQNVVKDLSVELDRLSEESVNNDISSWTKGRSGEALSLLKKRFSHRPVQEKFVCLNCGFETHADEQAALNIARSWLFLRSQEYKKYQTNKTTGNTDKRAFVETWQSFYRKKLKEVWKPAV

SEQ ID NO: 29124 - protein, 979 aa, synthetic construct
  REGION 1..979: note = engineered CasX variant
QEIGKRINKIRRRLVKDSNTKKAGKTGPMKTLLVRVMTPDLRERLENLRKKPENIPQPISNTSRANLNKLLTDYTEMKKAILHVYWEEFQKDPVGLMSRVAQPASKKIDQNKLKPEMDEKGNLTTAGFACSQCGQPLFVYKLEQVSEKGKAYTNYFGRCNVAEHEKLILLAQLKPEKDSDEAVTYSLGKFGQRALDFYSIHVTKESTHPVKPLAQIAGNRYASGPVGKALSDACMGTIASFLSKYQDIIIEHQKVVKGNQKRLESLRELAGKENLEYPSVTLPPQPHTKEGVDAYNEVIARVRMWVNLNLWQKLKLSRDDAKPLLRLKNFPSFPLVERQANEVDWWDMVCNVKKLINEKKEDGKVFWQNLAGYKRQEALRPYLSSEEDRKKGKKFARYQLGDLLLHLEKKHGEDWGKVYDEAWERIDKKVEGLSKHIKLEEERRSEDAQSKAALTDWLRAKASFVIEGLKEADKDEFCRCELKLQKWYGDLRGKPFAIEAENSILDISGFSKQYNCAFIWQKDGVKKLNLYLIINYFKGGKLRFKKIKPEAFEANRFYTVINKKSGEIVPMEVNFNFDDPNLIILPLAFGKRQGREFIWNDLLSLETGSLKLANGRVIEKTLYNRRTRQDEPALFVALTFERREVLDSSNIKPMNLIGVDRGENIPAVIALTDPEGCPLSRFKDSLGNPTHILRIGESYKEKQRTIQAKKEVEQRRAGGYSRKYASKAKNLADDMVRNTARDLLYYAVTQDAMLIFENLSRGFGRQGKRTFMAERQYTRMEDWLTAKLAYEGLPSKTYLSKTLAQYTSKTCSNCGFTITSADYDRVLEKLKKTATGWMTTINGKELKVEGQITYYNRYKRQNVVKDLSVELDRLSEESVNNDISSWTKGRSGEALSLLKKRFSHRPVQEKFVCLNCGFETHADEQAALNIARSWLFLRSQEYKKYQTNKTTGNTDKRAFVETWQSFYRKKLKEVWKPAV

SEQ ID NO: 29125 - protein, 979 aa, synthetic construct
  REGION 1..979: note = engineered CasX variant
QEIGKRINKIRRRLVKDSNTKKAGKTGPMKTLLVRVMTPDLRERLENLRKKPENIPQPISNTSRANLNKLLTDYTEMKKAILHVYWEEFQKDPVGLMSRVAQPASKKIDQNKLKPEMDEKGNLTTAGFACSQCGQPLFVYKLEQVSEKGKAYTNYFGRCNVAEHEKLILLAQLKPEKDSDEAVTYSLGKFGQRALDFYSIHVTKESTHPVKPLAQIAGNRYASGPVGKALSDACMGTIASFLSKYQDIIIEHQKVVKGNQKRLESLRELAGKENLEYPSVTLPPQPHTKEGVDAYNEVIARVRMWVNLNLWQKLKLSRDDAKPLLRLKGFPSFPLVERQANEVDWWDMVCNVKKLINEKKEDGKVFWQNLAGYKRQEALRPYLSSEEDRKKGKKFARYQLGDLLNHLEKKHGEDWGKVYDEAWERIDKKVEGLSKHIKLEEERRSEDAQSKAALTDWLRAKASFVIEGLKEADKDEFCRCELKLQKWYGDLRGKPFAIEAENSILDISGFSKQYNCAFIWQKDGVKKLNLYLIINYFKGGKLRFKKIKPEAFEANRFYTVINKKSGEIVPMEVNFNFDDPNLIILPLAFGKRQGREFIWNDLLSLETGSLKLANGRVIEKTLYNRRTRQDEPALFVALTFERREVLDSSNIKPMNLIGVDRGENIPAVIALTDPEGCPLSRFKDSLGNPTHILRIGESYKEKQRTIQAKKEVEQRRAGGYSRKYASKAKNLADDMVRNTARDLLYYAVTQDAMLIFENLSRGFGRQGKRTFMAERQYTRMEDWLTAKLAYEGLPSKTYLSKTLAQYTSKTCSNCGFTITSADYDRVLEKLKKTATGWMTTINGKELKVEGQITYYNRYKRQNVVKDLSVELDRLSEESVNNDISSWTKGRSGEALSLLKKRFSHRPVQEKFVCLNCGFETHADEQAALNIARSWLFLRSQEYKKYQTNKTTGNTDKRAFVETWQSFYRKKLKEVWKPAV

SEQ ID NO: 29126 - protein, 979 aa, synthetic construct
  REGION 1..979: note = engineered CasX variant
QEIGKRINKIRRRLVKDSNTKKAGKTGPMKTLLVRVMTPDLRERLENLRKKPENIPQPISNTSRANLNKLLTDYTEMKKAILHVYWEEFQKDPVGLMSRVAQPASKKIDQNKLKPEMDEKGNLTTAGFACSQCGQPLFVYKLEQVSEKGKAYTNYFGRCNVAEHEKLILLAQLKPEKDSDEAVTYSLGKFGQRALDFYSIHVTKESTHPVKPLAQIAGNRYASGPVGKALSDACMGTIASFLSKYQDIIIEHQKVVKGNQKRLESLRELAGKENLEYPSVTLPPQPHTKEGVDAYNEVIARVRMWVNLNLWQKLKLSRDDAKPLLRLKGFPSFPLVERQANEVDWWDMVCNVKKLINEKKEDGKVFWQNLAGYKRQEALRPYLSSEEDRKKGKKFARYQLGDLLWHLEKKHGEDWGKVYDEAWERIDKKVEGLSKHIKLEEERRSEDAQSKAALTDWLRAKASFVIEGLKEADKDEFCRCELKLQKWYGDLRGKPFAIEAENSILDISGFSKQYNCAFIWQKDGVKKLNLYLIINYFKGGKLRFKKIKPEAFEANRFYTVINKKSGEIVPMEVNFNFDDPNLIILPLAFGKRQGREFIWNDLLSLETGSLKLANGRVIEKTLYNRRTRQDEPALFVALTFERREVLDSSNIKPMNLIGVDRGENIPAVIALTDPEGCPLSRFKDSLGNPTHILRIGESYKEKQRTIQAKKEVEQRRAGGYSRKYASKAKNLADDMVRNTARDLLYYAVTQDAMLIFENLSRGFGRQGKRTFMAERQYTRMEDWLTAKLAYEGLPSKTYLSKTLAQYTSKTCSNCGFTITSADYDRVLEKLKKTATGWMTTINGKELKVEGQITYYNRYKRQNVVKDLSVELDRLSEESVNNDISSWTKGRSGEALSLLKKRFSHRPVQEKFVCLNCGFETHADEQAALNIARSWLFLRSQEYKKYQTNKTTGNTDKRAFVETWQSFYRKKLKEVWKPAV

SEQ ID NO: 29127 - protein, 979 aa, synthetic construct
  REGION 1..979: note = engineered CasX variant
QEIGKRINKIRRRLVKDSNTKKAGKTGPMKTLLVRVMTPDLRERLENLRKKPENIPQPISNTSRANLNKLLTDYTEMKKAILHVYWEEFQKDPVGLMSRVAQPASKKIDQNKLKPEMDEKGNLTTAGFACSQCGQPLFVYKLEQVSEKGKAYTNYFGRCNVAEHEKLILLAQLKPEKDSDEAVTYSLGKFGQRALDFYSIHVTKESTHPVKPLAQIAGNRYASGPVGKALSDACMGTIASFLSKYQDIIIEHQKVVKGNQKRLESLRELAGKENLEYPSVTLPPQPHTKEGVDAYNEVIARVRMWVNLNLWQKLKLSRDDAKPLLRLKGFPSFPLVERQANEVDWWDMVCNVKKLINEKKEDGKVFWQNLAGYKRQEALRPYLSSEEDRKKGKKFARYQLGDLLLHLYKKHGEDWGKVYDEAWERIDKKVEGLSKHIKLEEERRSEDAQSKAALTDWLRAKASFVIEGLKEADKDEFCRCELKLQKWYGDLRGKPFAIEAENSILDISGFSKQYNCAFIWQKDGVKKLNLYLIINYFKGGKLRFKKIKPEAFEANRFYTVINKKSGEIVPMEVNFNFDDPNLIILPLAFGKRQGREFIWNDLLSLETGSLKLANGRVIEKTLYNRRTRQDEPALFVALTFERREVLDSSNIKPMNLIGVDRGENIPAVIALTDPEGCPLSRFKDSLGNPTHILRIGESYKEKQRTIQAKKEVEQRRAGGYSRKYASKAKNLADDMVRNTARDLLYYAVTQDAMLIFENLSRGFGRQGKRTFMAERQYTRMEDWLTAKLAYEGLPSKTYLSKTLAQYTSKTCSNCGFTITSADYDRVLEKLKKTATGWMTTINGKELKVEGQITYYNRYKRQNVVKDLSVELDRLSEESVNNDISSWTKGRSGEALSLLKKRFSHRPVQEKFVCLNCGFETHADEQAALNIARSWLFLRSQEYKKYQTNKTTGNTDKRAFVETWQSFYRKKLKEVWKPAV

SEQ ID NO: 29128 - protein, 979 aa, synthetic construct
  REGION 1..979: note = engineered CasX variant
QEIGKRINKIRRRLVKDSNTKKAGKTGPMKTLLVRVMTPDLRERLENLRKKPENIPQPISNTSRANLNKLLTDYTEMKKAILHVYWEEFQKDPVGLMSRVAQPASKKIDQNKLKPEMDEKGNLTTAGFACSQCGQPLFVYKLEQVSEKGKAYTNYFGRCNVAEHEKLILLAQLKPEKDSDEAVTYSLGKFGQRALDFYSIHVTKESTHPVKPLAQIAGNRYASGPVGKALSDACMGTIASFLSKYQDIIIEHQKVVKGNQKRLESLRELAGKENLEYPSVTLPPQPHTKEGVDAYNEVIARVRMWVNLNLWQKLKLSRDDAKPLLRLKGFPSFPLVERQANEVDWWDMVCNVKKLINEKKEDGKVFWQNLAGYKRQEALRPYLSSEEDRKKGKKFARYQLGDLLLHLEKKHPEDWGKVYDEAWERIDKKVEGLSKHIKLEEERRSEDAQSKAALTDWLRAKASFVIEGLKEADKDEFCRCELKLQKWYGDLRGKPFAIEAENSILDISGFSKQYNCAFIWQKDGVKKLNLYLIINYFKGGKLRFKKIKPEAFEANRFYTVINKKSGEIVPMEVNFNFDDPNLIILPLAFGKRQGREFIWNDLLSLETGSLKLANGRVIEKTLYNRRTRQDEPALFVALTFERREVLDSSNIKPMNLIGVDRGENIPAVIALTDPEGCPLSRFKDSLGNPTHILRIGESYKEKQRTIQAKKEVEQRRAGGYSRKYASKAKNLADDMVRNTARDLLYYAVTQDAMLIFENLSRGFGRQGKRTFMAERQYTRMEDWLTAKLAYEGLPSKTYLSKTLAQYTSKTCSNCGFTITSADYDRVLEKLKKTATGWMTTINGKELKVEGQITYYNRYKRQNVVKDLSVELDRLSEESVNNDISSWTKGRSGEALSLLKKRFSHRPVQEKFVCLNCGFETHADEQAALNIARSWLFLRSQEYKKYQTNKTTGNTDKRAFVETWQSFYRKKLKEVWKPAV

SEQ ID NO: 29129 - protein, 980 aa, synthetic construct
  REGION 1..980: note = engineered CasX variant
QEIGKRINKIRRRLVKDSNTKKAGKTGPMKTLLVRVMTPDLRERLENLRKKPENIPQPISNTSRANLNKLLTDYTEMKKAILHVYWEEFQKDPVGLMSRVAQPASKKIDQNKLKPEMDEKGNLTTAGFACSQCGQPLFVYKLEQVSEKGKAYTNYFGRCNVAEHEKLILLAQLKPEKDSDEAVTYSLGKFGQRALDFYSIHVTKESTHPVKPLAQIAGNRYASGPVGKALSDACMGTIASFLSKYQDIIIEHQKVVKGNQKRLESLRELAGKENLEYPSVTLPPQPHTKEGVDAYNEVIARVRMWVNLNLWQKLKLSRDDAKPLLRLKGFPSFPLVERQANEVDWWDMVCNVKKLINEKKEDGKVFWQNLAGYKRQEALRPYLSSEEDRKKGKKFARYQLGDLLLHLEKKHGERDWGKVYDEAWERIDKKVEGLSKHIKLEEERRSEDAQSKAALTDWLRAKASFVIEGLKEADKDEFCRCELKLQKWYGDLRGKPFAIEAENSILDISGFSKQYNCAFIWQKDGVKKLNLYLIINYFKGGKLRFKKIKPEAFEANRFYTVINKKSGEIVPMEVNFNFDDPNLIILPLAFGKRQGREFIWNDLLSLETGSLKLANGRVIEKTLYNRRTRQDEPALFVALTFERREVLDSSNIKPMNLIGVDRGENIPAVIALTDPEGCPLSRFKDSLGNPTHILRIGESYKEKQRTIQAKKEVEQRRAGGYSRKYASKAKNLADDMVRNTARDLLYYAVTQDAMLIFENLSRGFGRQGKRTFMAERQYTRMEDWLTAKLAYEGLPSKTYLSKTLAQYTSKTCSNCGFTITSADYDRVLEKLKKTATGWMTTINGKELKVEGQITYYNRYKRQNVVKDLSVELDRLSEESVNNDISSWTKGRSGEALSLLKKRFSHRPVQEKFVCLNCGFETHADEQAALNIARSWLFLRSQEYKKYQTNKTTGNTDKRAFVETWQSFYRKKLKEVWKPAV

SEQ ID NO: 29130 - protein, 980 aa, synthetic construct
  REGION 1..980: note = engineered CasX variant
QEIGKRINKIRRRLVKDSNTKKAGKTGPMKTLLVRVMTPDLRERLENLRKKPENIPQPISNTSRANLNKLLTDYTEMKKAILHVYWEEFQKDPVGLMSRVAQPASKKIDQNKLKPEMDEKGNLTTAGFACSQCGQPLFVYKLEQVSEKGKAYTNYFGRCNVAEHEKLILLAQLKPEKDSDEAVTYSLGKFGQRALDFYSIHVTKESTHPVKPLAQIAGNRYASGPVGKALSDACMGTIASFLSKYQDIIIEHQKVVKGNQKRLESLRELAGKENLEYPSVTLPPQPHTKEGVDAYNEVIARVRMWVNLNLWQKLKLSRDDAKPLLRLKGFPSFPLVERQANEVDWWDMVCNVKKLINEKKEDGKVFWQNLAGYKRQEALRPYLSSEEDRKKGKKFARYQLGDLLLHLEKKHGEYDWGKVYDEAWERIDKKVEGLSKHIKLEEERRSEDAQSKAALTDWLRAKASFVIEGLKEADKDEFCRCELKLQKWYGDLRGKPFAIEAENSILDISGFSKQYNCAFIWQKDGVKKLNLYLIINYFKGGKLRFKKIKPEAFEANRFYTVINKKSGEIVPMEVNFNFDDPNLIILPLAFGKRQGREFIWNDLLSLETGSLKLANGRVIEKTLYNRRTRQDEPALFVALTFERREVLDSSNIKPMNLIGVDRGENIPAVIALTDPEGCPLSRFKDSLGNPTHILRIGESYKEKQRTIQAKKEVEQRRAGGYSRKYASKAKNLADDMVRNTARDLLYYAVTQDAMLIFENLSRGFGRQGKRTFMAERQYTRMEDWLTAKLAYEGLPSKTYLSKTLAQYTSKTCSNCGFTITSADYDRVLEKLKKTATGWMTTINGKELKVEGQITYYNRYKRQNVVKDLSVELDRLSEESVNNDISSWTKGRSGEALSLLKKRFSHRPVQEKFVCLNCGFETHADEQAALNIARSWLFLRSQEYKKYQTNKTTGNTDKRAFVETWQSFYRKKLKEVWKPAV

SEQ ID NO: 29131 - protein, 979 aa, synthetic construct
  REGION 1..979: note = engineered CasX variant
QEIGKRINKIRRRLVKDSNTKKAGKTGPMKTLLVRVMTPDLRERLENLRKKPENIPQPISNTSRANLNKLLTDYTEMKKAILHVYWEEFQKDPVGLMSRVAQPASKKIDQNKLKPEMDEKGNLTTAGFACSQCGQPLFVYKLEQVSEKGKAYTNYFGRCNVAEHEKLILLAQLKPEKDSDEAVTYSLGKFGQRALDFYSIHVTKESTHPVKPLAQIAGNRYASGPVGKALSDACMGTIASFLSKYQDIIIEHQKVVKGNQKRLESLRELAGKENLEYPSVTLPPQPHTKEGVDAYNEVIARVRMWVNLNLWQKLKLSRDDAKPLLRLKGFPSFPLVERQANEVDWWDMVCNVKKLINEKKEDGKVFWQNLAGYKRQEALRPYLSSEEDRKKGKKFARYQLGDLLLHLEKKHGEDWGDVYDEAWERIDKKVEGLSKHIKLEEERRSEDAQSKAALTDWLRAKASFVIEGLKEADKDEFCRCELKLQKWYGDLRGKPFAIEAENSILDISGFSKQYNCAFIWQKDGVKKLNLYLIINYFKGGKLRFKKIKPEAFEANRFYTVINKKSGEIVPMEVNFNFDDPNLIILPLAFGKRQGREFIWNDLLSLETGSLKLANGRVIEKTLYNRRTRQDEPALFVALTFERREVLDSSNIKPMNLIGVDRGENIPAVIALTDPEGCPLSRFKDSLGNPTHILRIGESYKEKQRTIQAKKEVEQRRAGGYSRKYASKAKNLADDMVRNTARDLLYYAVTQDAMLIFENLSRGFGRQGKRTFMAERQYTRMEDWLTAKLAYEGLPSKTYLSKTLAQYTSKTCSNCGFTITSADYDRVLEKLKKTATGWMTTINGKELKVEGQITYYNRYKRQNVVKDLSVELDRLSEESVNNDISSWTKGRSGEALSLLKKRFSHRPVQEKFVCLNCGFETHADEQAALNIARSWLFLRSQEYKKYQTNKTTGNTDKRAFVETWQSFYRKKLKEVWKPAV

SEQ ID NO: 29132 - protein, 979 aa, synthetic construct
  REGION 1..979: note = engineered CasX variant
QEIGKRINKIRRRLVKDSNTKKAGKTGPMKTLLVRVMTPDLRERLENLRKKPENIPQPISNTSRANLNKLLTDYTEMKKAILHVYWEEFQKDPVGLMSRVAQPASKKIDQNKLKPEMDEKGNLTTAGFACSQCGQPLFVYKLEQVSEKGKAYTNYFGRCNVAEHEKLILLAQLKPEKDSDEAVTYSLGKFGQRALDFYSIHVTKESTHPVKPLAQIAGNRYASGPVGKALSDACMGTIASFLSKYQDIIIEHQKVVKGNQKRLESLRELAGKENLEYPSVTLPPQPHTKEGVDAYNEVIARVRMWVNLNLWQKLKLSRDDAKPLLRLKGFPSFPLVERQANEVDWWDMVCNVKKLINEKKEDGKVFWQNLAGYKRQEALRPYLSSEEDRKKGKKFARYQLGDLLLHLEKKHGEDWGKVYGEAWERIDKKVEGLSKHIKLEEERRSEDAQSKAALTDWLRAKASFVIEGLKEADKDEFCRCELKLQKWYGDLRGKPFAIEAENSILDISGFSKQYNCAFIWQKDGVKKLNLYLIINYFKGGKLRFKKIKPEAFEANRFYTVINKKSGEIVPMEVNFNFDDPNLIILPLAFGKRQGREFIWNDLLSLETGSLKLANGRVIEKTLYNRRTRQDEPALFVALTFERREVLDSSNIKPMNLIGVDRGENIPAVIALTDPEGCPLSRFKDSLGNPTHILRIGESYKEKQRTIQAKKEVEQRRAGGYSRKYASKAKNLADDMVRNTARDLLYYAVTQDAMLIFENLSRGFGRQGKRTFMAERQYTRMEDWLTAKLAYEGLPSKTYLSKTLAQYTSKTCSNCGFTITSADYDRVLEKLKKTATGWMTTINGKELKVEGQITYYNRYKRQNVVKDLSVELDRLSEESVNNDISSWTKGRSGEALSLLKKRFSHRPVQEKFVCLNCGFETHADEQAALNIARSWLFLRSQEYKKYQTNKTTGNTDKRAFVETWQSFYRKKLKEVWKPAV

SEQ ID NO: 29133 - protein, 979 aa, synthetic construct
  REGION 1..979: note = engineered CasX variant
QEIGKRINKIRRRLVKDSNTKKAGKTGPMKTLLVRVMTPDLRERLENLRKKPENIPQPISNTSRANLNKLLTDYTEMKKAILHVYWEEFQKDPVGLMSRVAQPASKKIDQNKLKPEMDEKGNLTTAGFACSQCGQPLFVYKLEQVSEKGKAYTNYFGRCNVAEHEKLILLAQLKPEKDSDEAVTYSLGKFGQRALDFYSIHVTKESTHPVKPLAQIAGNRYASGPVGKALSDACMGTIASFLSKYQDIIIEHQKVVKGNQKRLESLRELAGKENLEYPSVTLPPQPHTKEGVDAYNEVIARVRMWVNLNLWQKLKLSRDDAKPLLRLKGFPSFPLVERQANEVDWWDMVCNVKKLINEKKEDGKVFWQNLAGYKRQEALRPYLSSEEDRKKGKKFARYQLGDLLLHLEKKHGEDWGKVYDEAWERIDKKVEGLSKHIKLEEERRSEDAQSKAALTDWLRAKASFVIEGKKEADKDEFCRCELKLQKWYGDLRGKPFAIEAENSILDISGFSKQYNCAFIWQKDGVKKLNLYLIINYFKGGKLRFKKIKPEAFEANRFYTVINKKSGEIVPMEVNFNFDDPNLIILPLAFGKRQGREFIWNDLLSLETGSLKLANGRVIEKTLYNRRTRQDEPALFVALTFERREVLDSSNIKPMNLIGVDRGENIPAVIALTDPEGCPLSRFKDSLGNPTHILRIGESYKEKQRTIQAKKEVEQRRAGGYSRKYASKAKNLADDMVRNTARDLLYYAVTQDAMLIFENLSRGFGRQGKRTFMAERQYTRMEDWLTAKLAYEGLPSKTYLSKTLAQYTSKTCSNCGFTITSADYDRVLEKLKKTATGWMTTINGKELKVEGQITYYNRYKRQNVVKDLSVELDRLSEESVNNDISSWTKGRSGEALSLLKKRFSHRPVQEKFVCLNCGFETHADEQAALNIARSWLFLRSQEYKKYQTNKTTGNTDKRAFVETWQSFYRKKLKEVWKPAV

SEQ ID NO: 29134 - protein, 979 aa, synthetic construct
  REGION 1..979: note = engineered CasX variant
QEIGKRINKIRRRLVKDSNTKKAGKTGPMKTLLVRVMTPDLRERLENLRKKPENIPQPISNTSRANLNKLLTDYTEMKKAILHVYWEEFQKDPVGLMSRVAQPASKKIDQNKLKPEMDEKGNLTTAGFACSQCGQPLFVYKLEQVSEKGKAYTNYFGRCNVAEHEKLILLAQLKPEKDSDEAVTYSLGKFGQRALDFYSIHVTKESTHPVKPLAQIAGNRYASGPVGKALSDACMGTIASFLSKYQDIIIEHQKVVKGNQKRLESLRELAGKENLEYPSVTLPPQPHTKEGVDAYNEVIARVRMWVNLNLWQKLKLSRDDAKPLLRLKGFPSFPLVERQANEVDWWDMVCNVKKLINEKKEDGKVFWQNLAGYKRQEALRPYLSSEEDRKKGKKFARYQLGDLLLHLEKKHGEDWGKVYDEAWERIDKKVEGLSKHIKLEEERRSEDAQSKAALTDWLRAKASFVIEGSKEADKDEFCRCELKLQKWYGDLRGKPFAIEAENSILDISGFSKQYNCAFIWQKDGVKKLNLYLIINYFKGGKLRFKKIKPEAFEANRFYTVINKKSGEIVPMEVNFNFDDPNLIILPLAFGKRQGREFIWNDLLSLETGSLKLANGRVIEKTLYNRRTRQDEPALFVALTFERREVLDSSNIKPMNLIGVDRGENIPAVIALTDPEGCPLSRFKDSLGNPTHILRIGESYKEKQRTIQAKKEVEQRRAGGYSRKYASKAKNLADDMVRNTARDLLYYAVTQDAMLIFENLSRGFGRQGKRTFMAERQYTRMEDWLTAKLAYEGLPSKTYLSKTLAQYTSKTCSNCGFTITSADYDRVLEKLKKTATGWMTTINGKELKVEGQITYYNRYKRQNVVKDLSVELDRLSEESVNNDISSWTKGRSGEALSLLKKRFSHRPVQEKFVCLNCGFETHADEQAALNIARSWLFLRSQEYKKYQTNKTTGNTDKRAFVETWQSFYRKKLKEVWKPAV

SEQ ID NO: 29135 - protein, 980 aa, synthetic construct
  REGION 1..980: note = engineered CasX variant
QEIGKRINKIRRRLVKDSNTKKAGKTGPMKTLLVRVMTPDLRERLENLRKKPENIPQPISNTSRANLNKLLTDYTEMKKAILHVYWEEFQKDPVGLMSRVAQPASKKIDQNKLKPEMDEKGNLTTAGFACSQCGQPLFVYKLEQVSEKGKAYTNYFGRCNVAEHEKLILLAQLKPEKDSDEAVTYSLGKFGQRALDFYSIHVTKESTHPVKPLAQIAGNRYASGPVGKALSDACMGTIASFLSKYQDIIIEHQKVVKGNQKRLESLRELAGKENLEYPSVTLPPQPHTKEGVDAYNEVIARVRMWVNLNLWQKLKLSRDDAKPLLRLKGFPSFPLVERQANEVDWWDMVCNVKKLINEKKEDGKVFWQNLAGYKRQEALRPYLSSEEDRKKGKKFARYQLGDLLLHLEKKHGEDWGKVYDEAWERIDKKVEGLSKHIKLEEERRSEDAQSKAALTDWLRAKASFVIEGLKEADDKDEFCRCELKLQKWYGDLRGKPFAIEAENSILDISGFSKQYNCAFIWQKDGVKKLNLYLIINYFKGGKLRFKKIKPEAFEANRFYTVINKKSGEIVPMEVNFNFDDPNLIILPLAFGKRQGREFIWNDLLSLETGSLKLANGRVIEKTLYNRRTRQDEPALFVALTFERREVLDSSNIKPMNLIGVDRGENIPAVIALTDPEGCPLSRFKDSLGNPTHILRIGESYKEKQRTIQAKKEVEQRRAGGYSRKYASKAKNLADDMVRNTARDLLYYAVTQDAMLIFENLSRGFGRQGKRTFMAERQYTRMEDWLTAKLAYEGLPSKTYLSKTLAQYTSKTCSNCGFTITSADYDRVLEKLKKTATGWMTTINGKELKVEGQITYYNRYKRQNVVKDLSVELDRLSEESVNNDISSWTKGRSGEALSLLKKRFSHRPVQEKFVCLNCGFETHADEQAALNIARSWLFLRSQEYKKYQTNKTTGNTDKRAFVETWQSFYRKKLKEVWKPAV

SEQ ID NO: 29136 - protein, 980 aa, synthetic construct
  REGION 1..980: note = engineered CasX variant
QEIGKRINKIRRRLVKDSNTKKAGKTGPMKTLLVRVMTPDLRERLENLRKKPENIPQPISNTSRANLNKLLTDYTEMKKAILHVYWEEFQKDPVGLMSRVAQPASKKIDQNKLKPEMDEKGNLTTAGFACSQCGQPLFVYKLEQVSEKGKAYTNYFGRCNVAEHEKLILLAQLKPEKDSDEAVTYSLGKFGQRALDFYSIHVTKESTHPVKPLAQIAGNRYASGPVGKALSDACMGTIASFLSKYQDIIIEHQKVVKGNQKRLESLRELAGKENLEYPSVTLPPQPHTKEGVDAYNEVIARVRMWVNLNLWQKLKLSRDDAKPLLRLKGFPSFPLVERQANEVDWWDMVCNVKKLINEKKEDGKVFWQNLAGYKRQEALRPYLSSEEDRKKGKKFARYQLGDLLLHLEKKHGEDWGKVYDEAWERIDKKVEGLSKHIKLEEERRSEDAQSKAALTDWLRAKASFVIEGLKEADKDEFCRCELKLQKWYGDLRGKPFAIEAENSILDISGFSKQYNCAFIWQKDGVKKLNLYLIINYFKGGKLRFKKIKPEAFEANRFYTVINKKSGEIVPMEVNFNFDDPNLIILPLAFGKRQGREFIWNDLLSLETGSLKLANGRVIEKTLYNRRTRQDEPALFVALTFERREVLDSSNIKPMNLIGVDRGENIPAVIALTDPEGCPLSRFKDSLGNPTHILRIGESYKEKQRTIQAKKEVEQRRAGGYSRKYASKAKNLADDMVRNTARDLLYYAVTQDAMLIFENLSRGFGRQGKRTFMAERQYTRMEDWLTAKLAYEGLPSKTYLSKTLAQYTSKTCSNCGFTITSADYDRVLEKLKKTATGWMTTINGKELKVEGQITYYNRYKRQNVVKDLSVELDRLSEESVNNDISSWTKGRSGNEALSLLKKRFSHRPVQEKFVCLNCGFETHADEQAALNIARSWLFLRSQEYKKYQTNKTTGNTDKRAFVETWQSFYRKKLKEVWKPAV

SEQ ID NO: 29137 - protein, 979 aa, synthetic construct
  REGION 1..979: note = engineered CasX variant
QEIGKRINKIRRRLVKDSNTKKAGKTGPMKTLLVRVMTPDLRERLENLRKKPENIPQPISNTSRANLNKLLTDYTEMKKAILHVYWEEFQKDPVGLMSRVAQPASKKIDQNKLKPEMDEKGNLTTAGFACSQCGQPLFVYKLEQVSEKGKAYTNYFGRCNVAEHEKLILLAQLKPEKDSDEAVTYSLGKFGQRALDFYSIHVTKESTHPVKPLAQIAGNRYASGPVGKALSDACMGTIASFLSKYQDIIIEHQKVVKGNQKRLESLRELAGKENLEYPSVTLPPQPHTKEGVDAYNEVIARVRMWVNLNLWQKLKLSRDDAKPLLRLKGFPSFPLVERQANEVDWWDMVCNVKKLINEKKEDGKVFWQNLAGYKRQEALRPYLSSEEDRQKGKKFARYQLGDLLLHLEKKHGEDWGKVYDEAWERIDKKVEGLSKHIKLEEERRSEDAQSKAALTDWLRAKASFVIEGLKEADKDEFCRCELKLQKWYGDLRGKPFAIEAENSILDISGFSKQYNCAFIWQKDGVKKLNLYLIINYFKGGKLRFKKIKPEAFEANRFYTVINKKSGEIVPMEVNFNFDDPNLIILPLAFGKRQGREFIWNDLLSLETGSLKLANGRVIEKTLYNRRTRQDEPALFVALTFERREVLDSSNIKPMNLIGVDRGENIPAVIALTDPEGCPLSRFKDSLGNPTHILRIGESYKEKQRTIQAKKEVEQRRAGGYSRKYASKAKNLADDMVRNTARDLLYYAVTQDAMLIFENLSRGFGRQGKRTFMAERQYTRMEDWLTAKLAYEGLPSKTYLSKTLAQYTSKTCSNCGFTITSADYDRVLEKLKKTATGWMTTINGKELKVEGQITYYNRYKRQNVVKDLSVELDRLSEESVNNDISSWTKGRSGEALSLLKKRFSHRPVQEKFVCLNCGFETHADEQAALNIARSWLFLRSQEYKKYQTNKTTGNTDKRAFVETWQSFYRKKLKEVWKPAV

SEQ ID NO: 29138 - protein, 979 aa, synthetic construct
  REGION 1..979: note = engineered CasX variant
QEIGKRINKIRRRLVKDSNTKKAGKTGPMKTLLVRVMTPDLRERLENLRKKPENIPQPISNTSRANLNKLLTDYTEMKKAILHVYWEEFQKDPVGLMSRVAQPASKKIDQNKLKPEMDEKGNLTTAGFACSQCGQPLFVYKLEQVSEKGKAYTNYFGRCNVAEHEKLILLAQLKPEKDSDEAVTYSLGKFGQRALDFYSIHVTKESTHPVKPLAQIAGNRYASGPVGKALSDACMGTIASFLSKYQDIIIEHQKVVKGNQKRLESLRELAGKENLEYPSVTLPPQPHTKEGVDAYNEVIARVRMWVNLNLWQKLKLSRDDAKPLLRLKGFPSFPLVERQANEVDWWDMVCNVKKLINEKKEDGKVFWQNLAGYKRQEALRPYLSSEEDRKKGKKFARYQLGDLLLHLEKKHGEDWGKVYDEAWERIDKKVEGLSKHIKLEEERRSEDAQSKAALTDWLRAKASFVIEGLKEADKDEFCRCELKLQKWYGDLRGKPFAIEAENSILDISGFSKQYNCAFIWQKDGVKKLNLYLIINYFKGGKLRFKKIKPEAFEANRFYTVINKKSGEIVPMEVNFNFDDPNLIILPLAFGKRQGREFIWNDLLSLETGSLKLANGRVIEKTLYNRRTRQDEPALFVALTFERREVLDSSNIKPMNLIGVDRGENIPAVIALTDPEGCPLSRFKDSLGNPTHILRIGESYKEKQRTIQAKKEVEQRRAGGYSRKYASKAKNLADDMVRNTARDLLYYAVTQDAMLIFENLSRGFGRQGKRTFMAERQYTRMEDWLTAKLAYEGLPSQTYLSKTLAQYTSKTCSNCGFTITSADYDRVLEKLKKTATGWMTTINGKELKVEGQITYYNRYKRQNVVKDLSVELDRLSEESVNNDISSWTKGRSGEALSLLKKRFSHRPVQEKFVCLNCGFETHADEQAALNIARSWLFLRSQEYKKYQTNKTTGNTDKRAFVETWQSFYRKKLKEVWKPAV

SEQ ID NO: 29139 - protein, 979 aa, synthetic construct
  REGION 1..979: note = engineered CasX variant
QEIGKRINKIRRRLVKDSNTKKAGKTGPMKTLLVRVMTPDLRERLENLRKKPENIPQPISNTSRANLNKLLTDYTEMKKAILHVYWEEFQKDPVGLMSRVAQPASKKIDQNKLKPEMDEKGNLTTAGFACSQCGQPLFVYKLEQVSEKGKAYTNYFGRCNVAEHEKLILLAQLKPEKDSDEAVTYSLGKFGQRALDFYSIHVTKESTHPVKPLAQIAGNRYASGPVGKALSDACMGTIASFLSKYQDIIIEHQKVVKGNQKRLESLRELAGKENLEYPSVTLPPQPHTKEGVDAYNEVIARVRMWVNLNLWQKLKLSRDDAKPLLRLKGFPSFPLVERQANEVDWWDMVCNVKKLINEKKEDGKVFWQNLAGYKRQEALRPYLSSEEDRKKGKKFARYQLGDLLLHLEKKHGEDWGKVYDEAWERIDKKVEGLSKHIKLEEERRSEDAQSKAALTDWLRAKASFVIEGLKEADKDEFCRCELKLQKWYGDLRGKPFAIEAENSILDISGFSKQYNCAFIWQKDGVKKLNLYLIINYFKGGKLRFKKIKPEAFEANRFYTVINKKSGEIVPMEVNFNFDDPNLIILPLAFGKRQGREFIWNDLLSLETGSLKLANGRVIEKTLYNRRTRQDEPALFVALTFERREVLDSSNIKPMNLIGVDRGENIPAVIALTDPEGCPLSRFKDSLGNPTHILRIGESYKEKQRTIQAKKEVEQRRAGGYSRKYASKAKNLADDMVRNTARDLLYYAVTQDAMLIFENLSRGFGRQGKRTFMAERQYTRMEDWLTAKLAYNGLPSKTYLSKTLAQYTSKTCSNCGFTITSADYDRVLEKLKKTATGWMTTINGKELKVEGQITYYNRYKRQNVVKDLSVELDRLSEESVNNDISSWTKGRSGEALSLLKKRFSHRPVQEKFVCLNCGFETHADEQAALNIARSWLFLRSQEYKKYQTNKTTGNTDKRAFVETWQSFYRKKLKEVWKPAV

SEQ ID NO: 29140 - protein, 979 aa, synthetic construct
  REGION 1..979: note = engineered CasX variant
QEIGKRINKIRRRLVKDSNTKKAGKTGPMKTLLVRVMTPDLRERLENLRKKPENIPQPISNTSRANLNKLLTDYTEMKKAILHVYWEEFQKDPVGLMSRVAQPASKKIDQNKLKPEMDEKGNLTTAGFACSQCGQPLFVYKLEQVSEKGKAYTNYFGRCNVAEHEKLIQLAQLKPEKDSDEAVTYSLGKFGQRALDFYSIHVTKESTHPVKPLAQIAGNRYASGPVGKALSDACMGTIASFLSKYQDIIIEHQKVVKGNQKRLESLRELAGKENLEYPSVTLPPQPHTKEGVDAYNEVIARVRMWVNLNLWQKLKLSRDDAKPLLRLKGFPSFPLVERQANEVDWWDMVCNVKKLINEKKEDGKVFWQNLAGYKRQEALRPYLSSEEDRKKGKKFARYQLGDLLLHLEKKHGEDWGKVYDEAWERIDKKVEGLSKHIKLEEERRSEDAQSKAALTDWLRAKASFVIEGLKEADKDEFCRCELKLQKWYGDLRGKPFAIEAENSILDISGFSKQYNCAFIWQKDGVKKLNLYLIINYFKGGKLRFKKIKPEAFEANRFYTVINKKSGEIVPMEVNFNFDDPNLIILPLAFGKRQGREFIWNDLLSLETGSLKLANGRVIEKTLYNRRTRQDEPALFVALTFERREVLDSSNIKPMNLIGVDRGENIPAVIALTDPEGCPLSRFKDSLGNPTHILRIGESYKEKQRTIQAKKEVEQRRAGGYSRKYASKAKNLADDMVRNTARDLLYYAVTQDAMLIFENLSRGFGRQGKRTFMAERQYTRMEDWLTAKLAYEGLPSKTYLSKTLAQYTSKTCSNCGFTITSADYDRVLEKLKKTATGWMTTINGKELKVEGQITYYNRYKRQNVVKDLSVELDRLSEESVNNDISSWTKGRSGEALSLLKKRFSHRPVQEKFVCLNCGFETHADEQAALNIARSWLFLRSQEYKKYQTNKTTGNTDKRAFVETWQSFYRKKLKEVWKPAV

SEQ ID NO: 29141 - protein, 979 aa, synthetic construct
  REGION 1..979: note = engineered CasX variant
QEIGKRINKIRRRLVKDSNTKKAGKTGPMKTLLVRVMTPDLRERLENLRKKPENIPQPISNTSRANLNKLLTDYTEMKKAILHVYWEEFQKDPVGLMSRVAQPASKKIDQNKLKPEMDEKGNLTTAGFACSQCGQPLFVYKLEQVSEKGKAYTNYFGRCNVAEHEKLILLAQLKPEKDSDEAVTYSLGKFGQRALDFYSIHVTKESTHPVKPLAQIAGNRYASGPVGKALSDACMGTIASFLSKYQDIIIEHQKVVKGNQKRLESLRELAGKENLEYPSVTLPPQPHTKEGVDAYNEVIARVRMWVNLNLWQKLKLSRDDAKPLLRLKGFPSFPLVERQANEVDWWDMVCNVKKLINEKKEDGKVFWQNLAIYKRQEALRPYLSSEEDRKKGKKFARYQLGDLLLHLEKKHGEDWGKVYDEAWERIDKKVEGLSKHIKLEEERRSEDAQSKAALTDWLRAKASFVIEGLKEADKDEFCRCELKLQKWYGDLRGKPFAIEAENSILDISGFSKQYNCAFIWQKDGVKKLNLYLIINYFKGGKLRFKKIKPEAFEANRFYTVINKKSGEIVPMEVNFNFDDPNLIILPLAFGKRQGREFIWNDLLSLETGSLKLANGRVIEKTLYNRRTRQDEPALFVALTFERREVLDSSNIKPMNLIGVDRGENIPAVIALTDPEGCPLSRFKDSLGNPTHILRIGESYKEKQRTIQAKKEVEQRRAGGYSRKYASKAKNLADDMVRNTARDLLYYAVTQDAMLIFENLSRGFGRQGKRTFMAERQYTRMEDWLTAKLAYEGLPSKTYLSKTLAQYTSKTCSNCGFTITSADYDRVLEKLKKTATGWMTTINGKELKVEGQITYYNRYKRQNVVKDLSVELDRLSEESVNNDISSWTKGRSGEALSLLKKRFSHRPVQEKFVCLNCGFETHADEQAALNIARSWLFLRSQEYKKYQTNKTTGNTDKRAFVETWQSFYRKKLKEVWKPAV

SEQ ID NO: 29142 - protein, 979 aa, synthetic construct
  REGION 1..979: note = engineered CasX variant
QEIGKRINKIRRRLVKDSNTKKAGKTGPMKTLLVRVMTPDLRERLENLRKKPENIPQPISNTSRANLNKLLTDYTEMKKAILHVYWEEFQKDPVGLMSRVAQPASKKIDQNKLKPEMDEKGNLTTAGFACSQCGQPLFVYKLEQVSEKGKAYTNYFGRCNVAEHEKLILLAQLKPEKDSDEAVTYSLGKFGQRALDFYSIHVTKESTHPVKPLAQIAGNRYASGPVGKALSDACMGTIASFLSKYQDIIIEHQKVVKGNQKRLESLRELAGKENLEYPSVTLPPQPHTKEGVDAYNEVIARVRMWVNLNLWQKLKLSRDDAKPLLRLKGFPSFPLVERQANEVDWWDMVCNVKKLINEKKEDGKVFWQNLAGYKRQEALRPYLSSEEDREKGKKFARYQLGDLLLHLEKKHGEDWGKVYDEAWERIDKKVEGLSKHIKLEEERRSEDAQSKAALTDWLRAKASFVIEGLKEADKDEFCRCELKLQKWYGDLRGKPFAIEAENSILDISGFSKQYNCAFIWQKDGVKKLNLYLIINYFKGGKLRFKKIKPEAFEANRFYTVINKKSGEIVPMEVNFNFDDPNLIILPLAFGKRQGREFIWNDLLSLETGSLKLANGRVIEKTLYNRRTRQDEPALFVALTFERREVLDSSNIKPMNLIGVDRGENIPAVIALTDPEGCPLSRFKDSLGNPTHILRIGESYKEKQRTIQAKKEVEQRRAGGYSRKYASKAKNLADDMVRNTARDLLYYAVTQDAMLIFENLSRGFGRQGKRTFMAERQYTRMEDWLTAKLAYEGLPSKTYLSKTLAQYTSKTCSNCGFTITSADYDRVLEKLKKTATGWMTTINGKELKVEGQITYYNRYKRQNVVKDLSVELDRLSEESVNNDISSWTKGRSGEALSLLKKRFSHRPVQEKFVCLNCGFETHADEQAALNIARSWLFLRSQEYKKYQTNKTTGNTDKRAFVETWQSFYRKKLKEVWKPAV

SEQ ID NO: 29143 - protein, 979 aa, synthetic construct
  REGION 1..979: note = engineered CasX variant
QEIGKRINKIRRRLVKDSNTKKAGKTGPMKTLLVRVMTPDLRERLENLRKKPENIPQPISNTSRANLNKLLTDYTEMKKAILHVYWEEFQKDPVGLMSRVAQPASKKIDQNKLKPEMDEKGNLTTAGFACSQCGQPLFVYKLEQVSEKGKAYTNYFGRCNVAEHEKLILLAQLKPEKDSDEAVTYSLGKFGQRALDFYSIHVTKESTHPVKPLAQIAGNRYASGPVGKALSDACMGTIASFLSKYQDIIIEHQKVVKGNQKRLESLRELAGKENLEYPSVTLPPQPHTKEGVDAYNEVIARVRMWVNLNLWQKLKLSRDDAKPLLRLKGFPSFPLVERQANEVDWWDMVCNVKKLINEKKEDGKVFWQNLAGYKRQEALRPYLSSEEDRKKGKKFARYQLGDLLLHLEKKHGEDWGKVYDEAWERIDKKVEGLSKHIKLEEERRSEDAQSKAALTDWLRAKASFVIEGLKEADKDEFCRCELKLQKWYGDLRGKPFAIEAENSILDISGFSKQYNCAFIWQKDGVKKLNLYLIINYFKGGKLRFKKIKPEAFEANRFYTVINKKSGEIVIMEVNFNFDDPNLIILPLAFGKRQGREFIWNDLLSLETGSLKLANGRVIEKTLYNRRTRQDEPALFVALTFERREVLDSSNIKPMNLIGVDRGENIPAVIALTDPEGCPLSRFKDSLGNPTHILRIGESYKEKQRTIQAKKEVEQRRAGGYSRKYASKAKNLADDMVRNTARDLLYYAVTQDAMLIFENLSRGFGRQGKRTFMAERQYTRMEDWLTAKLAYEGLPSKTYLSKTLAQYTSKTCSNCGFTITSADYDRVLEKLKKTATGWMTTINGKELKVEGQITYYNRYKRQNVVKDLSVELDRLSEESVNNDISSWTKGRSGEALSLLKKRFSHRPVQEKFVCLNCGFETHADEQAALNIARSWLFLRSQEYKKYQTNKTTGNTDKRAFVETWQSFYRKKLKEVWKPAV

SEQ ID NO: 29144 - protein, 978 aa, synthetic construct
  REGION 1..978: note = engineered CasX variant
QEIGRINKIRRRLVKDSNTKKAGKTGPMKTLLVRVMTPDLRERLENLRKKPENIPQPISNTSRANLNKLLTDYTEMKKAILHVYWEEFQKDPVGLMSRVAQPASKKIDQNKLKPEMDEKGNLTTAGFACSQCGQPLFVYKLEQVSEKGKAYTNYFGRCNVAEHEKLILLAQLKPEKDSDEAVTYSLGKFGQRALDFYSIHVTKESTHPVKPLAQIAGNRYASGPVGKALSGACMGTIASFLSKYQDIIIEHQKVVKGNQKRLESLRELAGKENLEYPSVTLPPQPHTKEGVDAYNEVIARVRMWVNLNLWQKLKLSRDDAKPLLRLKGFPSFPLVERQANEVDWWDMVCNVKKLINEKKEDGKVFWQNLAGYKRQEALRPYLSSEEDRKKGKKFARYQLGDLLLHLEKKHGEDWGKVYDEAWERIDKKVEGLSKHIKLEEERRSEDAQSKAALTDWLRAKASFVIEGLKEADKDEFCRCELKLQKWYGDLRGKPFAIEAENSILDISGFSKQYNCAFIWQKDGVKKLNLYLIINYFKGGKLRFKKIKPEAFEANRFYTVINKKSGEIVPMEVNFNFDDPNLIILPLAFGKRQGREFIWNDLLSLETGSLKLANGRVIEKTLYNRRTRQDEPALFVALTFERREVLDSSNIKPMNLIGVDRGENIPAVIALTDPEGCPLSRFKDSLGNPTHILRIGESYKEKQRTIQAKKEVEQRRAGGYSRKYASKAKNLADDMVRNTARDLLYYAVTQDAMLIFENLSRGFGRQGKRTFMAERQYTRMEDWLTAKLAYEGLPSKTYLSKTLAQYTSKTCSNCGFTITSADYDRVLEKLKKTATGWMTTINGKELKVEGQITYYNRYKRQNVVKDLSVELDRLSEESVNNDISSWTKGRSGEALSLLKKRFSHRPVQEKFVCLNCGFETHADEQAALNIARSWLFLRSQEYKKYQTNKTTGNTDKRAFVETWQSFYRKKLKEVWKPAV

SEQ ID NO: 29145 - protein, 978 aa, synthetic construct
  REGION 1..978: note = engineered CasX variant
QEIGRINKIRRRLVKDSNTKKAGKTGPMKTLLVRVMTPDLRERLENLRKKPENIPQPISNTSRANLNKLLTDYTEMKKAILHVYWEEFQKDPVGLMSRVAQPASKKIDQNKLKPEMDEKGNLTTAGFACSQCGQPLFVYKLEQVSEKGKAYTNYFGRCNVAEHEKLILLAQLKPEKDSDEAVTYSLGKFGQRALDFYSIHVTKESTHPVKPLAQIAGNRYASGPVGKALSDACMGTIASFLSKYQDIIIEHQKVVKGNQKRLESLRELAGKENLEYPSVTLPPQPHTKEGVDAYNEVIARVRMWVNLNLWQKLKLSRDDAKPLLRLKNFPSFPLVERQANEVDWWDMVCNVKKLINEKKEDGKVFWQNLAGYKRQEALRPYLSSEEDRKKGKKFARYQLGDLLLHLEKKHGEDWGKVYDEAWERIDKKVEGLSKHIKLEEERRSEDAQSKAALTDWLRAKASFVIEGLKEADKDEFCRCELKLQKWYGDLRGKPFAIEAENSILDISGFSKQYNCAFIWQKDGVKKLNLYLIINYFKGGKLRFKKIKPEAFEANRFYTVINKKSGEIVPMEVNFNFDDPNLIILPLAFGKRQGREFIWNDLLSLETGSLKLANGRVIEKTLYNRRTRQDEPALFVALTFERREVLDSSNIKPMNLIGVDRGENIPAVIALTDPEGCPLSRFKDSLGNPTHILRIGESYKEKQRTIQAKKEVEQRRAGGYSRKYASKAKNLADDMVRNTARDLLYYAVTQDAMLIFENLSRGFGRQGKRTFMAERQYTRMEDWLTAKLAYEGLPSKTYLSKTLAQYTSKTCSNCGFTITSADYDRVLEKLKKTATGWMTTINGKELKVEGQITYYNRYKRQNVVKDLSVELDRLSEESVNNDISSWTKGRSGEALSLLKKRFSHRPVQEKFVCLNCGFETHADEQAALNIARSWLFLRSQEYKKYQTNKTTGNTDKRAFVETWQSFYRKKLKEVWKPAV

SEQ ID NO: 29146 - protein, 978 aa, synthetic construct
  REGION 1..978: note = engineered CasX variant
QEIGRINKIRRRLVKDSNTKKAGKTGPMKTLLVRVMTPDLRERLENLRKKPENIPQPISNTSRANLNKLLTDYTEMKKAILHVYWEEFQKDPVGLMSRVAQPASKKIDQNKLKPEMDEKGNLTTAGFACSQCGQPLFVYKLEQVSEKGKAYTNYFGRCNVAEHEKLILLAQLKPEKDSDEAVTYSLGKFGQRALDFYSIHVTKESTHPVKPLAQIAGNRYASGPVGKALSDACMGTIASFLSKYQDIIIEHQKVVKGNQKRLESLRELAGKENLEYPSVTLPPQPHTKEGVDAYNEVIARVRMWVNLNLWQKLKLSRDDAKPLLRLKGFPSFPLVERQANEVDWWDMVCNVKKLINEKKEDGKVFWQNLAGYKRQEALRPYLSSEEDRKKGKKFARYQLGDLLNHLEKKHGEDWGKVYDEAWERIDKKVEGLSKHIKLEEERRSEDAQSKAALTDWLRAKASFVIEGLKEADKDEFCRCELKLQKWYGDLRGKPFAIEAENSILDISGFSKQYNCAFIWQKDGVKKLNLYLIINYFKGGKLRFKKIKPEAFEANRFYTVINKKSGEIVPMEVNFNFDDPNLIILPLAFGKRQGREFIWNDLLSLETGSLKLANGRVIEKTLYNRRTRQDEPALFVALTFERREVLDSSNIKPMNLIGVDRGENIPAVIALTDPEGCPLSRFKDSLGNPTHILRIGESYKEKQRTIQAKKEVEQRRAGGYSRKYASKAKNLADDMVRNTARDLLYYAVTQDAMLIFENLSRGFGRQGKRTFMAERQYTRMEDWLTAKLAYEGLPSKTYLSKTLAQYTSKTCSNCGFTITSADYDRVLEKLKKTATGWMTTINGKELKVEGQITYYNRYKRQNVVKDLSVELDRLSEESVNNDISSWTKGRSGEALSLLKKRFSHRPVQEKFVCLNCGFETHADEQAALNIARSWLFLRSQEYKKYQTNKTTGNTDKRAFVETWQSFYRKKLKEVWKPAV

SEQ ID NO: 29147 - protein, 978 aa, synthetic construct
  REGION 1..978: note = engineered CasX variant
QEIGRINKIRRRLVKDSNTKKAGKTGPMKTLLVRVMTPDLRERLENLRKKPENIPQPISNTSRANLNKLLTDYTEMKKAILHVYWEEFQKDPVGLMSRVAQPASKKIDQNKLKPEMDEKGNLTTAGFACSQCGQPLFVYKLEQVSEKGKAYTNYFGRCNVAEHEKLILLAQLKPEKDSDEAVTYSLGKFGQRALDFYSIHVTKESTHPVKPLAQIAGNRYASGPVGKALSDACMGTIASFLSKYQDIIIEHQKVVKGNQKRLESLRELAGKENLEYPSVTLPPQPHTKEGVDAYNEVIARVRMWVNLNLWQKLKLSRDDAKPLLRLKGFPSFPLVERQANEVDWWDMVCNVKKLINEKKEDGKVFWQNLAGYKRQEALRPYLSSEEDRKKGKKFARYQLGDLLWHLEKKHGEDWGKVYDEAWERIDKKVEGLSKHIKLEEERRSEDAQSKAALTDWLRAKASFVIEGLKEADKDEFCRCELKLQKWYGDLRGKPFAIEAENSILDISGFSKQYNCAFIWQKDGVKKLNLYLIINYFKGGKLRFKKIKPEAFEANRFYTVINKKSGEIVPMEVNFNFDDPNLIILPLAFGKRQGREFIWNDLLSLETGSLKLANGRVIEKTLYNRRTRQDEPALFVALTFERREVLDSSNIKPMNLIGVDRGENIPAVIALTDPEGCPLSRFKDSLGNPTHILRIGESYKEKQRTIQAKKEVEQRRAGGYSRKYASKAKNLADDMVRNTARDLLYYAVTQDAMLIFENLSRGFGRQGKRTFMAERQYTRMEDWLTAKLAYEGLPSKTYLSKTLAQYTSKTCSNCGFTITSADYDRVLEKLKKTATGWMTTINGKELKVEGQITYYNRYKRQNVVKDLSVELDRLSEESVNNDISSWTKGRSGEALSLLKKRFSHRPVQEKFVCLNCGFETHADEQAALNIARSWLFLRSQEYKKYQTNKTTGNTDKRAFVETWQSFYRKKLKEVWKPAV

SEQ ID NO: 29148 - protein, 978 aa, synthetic construct
  REGION 1..978: note = engineered CasX variant
QEIGRINKIRRRLVKDSNTKKAGKTGPMKTLLVRVMTPDLRERLENLRKKPENIPQPISNTSRANLNKLLTDYTEMKKAILHVYWEEFQKDPVGLMSRVAQPASKKIDQNKLKPEMDEKGNLTTAGFACSQCGQPLFVYKLEQVSEKGKAYTNYFGRCNVAEHEKLILLAQLKPEKDSDEAVTYSLGKFGQRALDFYSIHVTKESTHPVKPLAQIAGNRYASGPVGKALSDACMGTIASFLSKYQDIIIEHQKVVKGNQKRLESLRELAGKENLEYPSVTLPPQPHTKEGVDAYNEVIARVRMWVNLNLWQKLKLSRDDAKPLLRLKGFPSFPLVERQANEVDWWDMVCNVKKLINEKKEDGKVFWQNLAGYKRQEALRPYLSSEEDRKKGKKFARYQLGDLLLHLYKKHGEDWGKVYDEAWERIDKKVEGLSKHIKLEEERRSEDAQSKAALTDWLRAKASFVIEGLKEADKDEFCRCELKLQKWYGDLRGKPFAIEAENSILDISGFSKQYNCAFIWQKDGVKKLNLYLIINYFKGGKLRFKKIKPEAFEANRFYTVINKKSGEIVPMEVNFNFDDPNLIILPLAFGKRQGREFIWNDLLSLETGSLKLANGRVIEKTLYNRRTRQDEPALFVALTFERREVLDSSNIKPMNLIGVDRGENIPAVIALTDPEGCPLSRFKDSLGNPTHILRIGESYKEKQRTIQAKKEVEQRRAGGYSRKYASKAKNLADDMVRNTARDLLYYAVTQDAMLIFENLSRGFGRQGKRTFMAERQYTRMEDWLTAKLAYEGLPSKTYLSKTLAQYTSKTCSNCGFTITSADYDRVLEKLKKTATGWMTTINGKELKVEGQITYYNRYKRQNVVKDLSVELDRLSEESVNNDISSWTKGRSGEALSLLKKRFSHRPVQEKFVCLNCGFETHADEQAALNIARSWLFLRSQEYKKYQTNKTTGNTDKRAFVETWQSFYRKKLKEVWKPAV

SEQ ID NO: 29149 - protein, 978 aa, synthetic construct
  REGION 1..978: note = engineered CasX variant
QEIGRINKIRRRLVKDSNTKKAGKTGPMKTLLVRVMTPDLRERLENLRKKPENIPQPISNTSRANLNKLLTDYTEMKKAILHVYWEEFQKDPVGLMSRVAQPASKKIDQNKLKPEMDEKGNLTTAGFACSQCGQPLFVYKLEQVSEKGKAYTNYFGRCNVAEHEKLILLAQLKPEKDSDEAVTYSLGKFGQRALDFYSIHVTKESTHPVKPLAQIAGNRYASGPVGKALSDACMGTIASFLSKYQDIIIEHQKVVKGNQKRLESLRELAGKENLEYPSVTLPPQPHTKEGVDAYNEVIARVRMWVNLNLWQKLKLSRDDAKPLLRLKGFPSFPLVERQANEVDWWDMVCNVKKLINEKKEDGKVFWQNLAGYKRQEALRPYLSSEEDRKKGKKFARYQLGDLLLHLEKKHPEDWGKVYDEAWERIDKKVEGLSKHIKLEEERRSEDAQSKAALTDWLRAKASFVIEGLKEADKDEFCRCELKLQKWYGDLRGKPFAIEAENSILDISGFSKQYNCAFIWQKDGVKKLNLYLIINYFKGGKLRFKKIKPEAFEANRFYTVINKKSGEIVPMEVNFNFDDPNLIILPLAFGKRQGREFIWNDLLSLETGSLKLANGRVIEKTLYNRRTRQDEPALFVALTFERREVLDSSNIKPMNLIGVDRGENIPAVIALTDPEGCPLSRFKDSLGNPTHILRIGESYKEKQRTIQAKKEVEQRRAGGYSRKYASKAKNLADDMVRNTARDLLYYAVTQDAMLIFENLSRGFGRQGKRTFMAERQYTRMEDWLTAKLAYEGLPSKTYLSKTLAQYTSKTCSNCGFTITSADYDRVLEKLKKTATGWMTTINGKELKVEGQITYYNRYKRQNVVKDLSVELDRLSEESVNNDISSWTKGRSGEALSLLKKRFSHRPVQEKFVCLNCGFETHADEQAALNIARSWLFLRSQEYKKYQTNKTTGNTDKRAFVETWQSFYRKKLKEVWKPAV

SEQ ID NO: 29150 - protein, 979 aa, synthetic construct
  REGION 1..979: note = engineered CasX variant
QEIGRINKIRRRLVKDSNTKKAGKTGPMKTLLVRVMTPDLRERLENLRKKPENIPQPISNTSRANLNKLLTDYTEMKKAILHVYWEEFQKDPVGLMSRVAQPASKKIDQNKLKPEMDEKGNLTTAGFACSQCGQPLFVYKLEQVSEKGKAYTNYFGRCNVAEHEKLILLAQLKPEKDSDEAVTYSLGKFGQRALDFYSIHVTKESTHPVKPLAQIAGNRYASGPVGKALSDACMGTIASFLSKYQDIIIEHQKVVKGNQKRLESLRELAGKENLEYPSVTLPPQPHTKEGVDAYNEVIARVRMWVNLNLWQKLKLSRDDAKPLLRLKGFPSFPLVERQANEVDWWDMVCNVKKLINEKKEDGKVFWQNLAGYKRQEALRPYLSSEEDRKKGKKFARYQLGDLLLHLEKKHGERDWGKVYDEAWERIDKKVEGLSKHIKLEEERRSEDAQSKAALTDWLRAKASFVIEGLKEADKDEFCRCELKLQKWYGDLRGKPFAIEAENSILDISGFSKQYNCAFIWQKDGVKKLNLYLIINYFKGGKLRFKKIKPEAFEANRFYTVINKKSGEIVPMEVNFNFDDPNLIILPLAFGKRQGREFIWNDLLSLETGSLKLANGRVIEKTLYNRRTRQDEPALFVALTFERREVLDSSNIKPMNLIGVDRGENIPAVIALTDPEGCPLSRFKDSLGNPTHILRIGESYKEKQRTIQAKKEVEQRRAGGYSRKYASKAKNLADDMVRNTARDLLYYAVTQDAMLIFENLSRGFGRQGKRTFMAERQYTRMEDWLTAKLAYEGLPSKTYLSKTLAQYTSKTCSNCGFTITSADYDRVLEKLKKTATGWMTTINGKELKVEGQITYYNRYKRQNVVKDLSVELDRLSEESVNNDISSWTKGRSGEALSLLKKRFSHRPVQEKFVCLNCGFETHADEQAALNIARSWLFLRSQEYKKYQTNKTTGNTDKRAFVETWQSFYRKKLKEVWKPAV

SEQ ID NO: 29151 - protein, 979 aa, synthetic construct
  REGION 1..979: note = engineered CasX variant
QEIGRINKIRRRLVKDSNTKKAGKTGPMKTLLVRVMTPDLRERLENLRKKPENIPQPISNTSRANLNKLLTDYTEMKKAILHVYWEEFQKDPVGLMSRVAQPASKKIDQNKLKPEMDEKGNLTTAGFACSQCGQPLFVYKLEQVSEKGKAYTNYFGRCNVAEHEKLILLAQLKPEKDSDEAVTYSLGKFGQRALDFYSIHVTKESTHPVKPLAQIAGNRYASGPVGKALSDACMGTIASFLSKYQDIIIEHQKVVKGNQKRLESLRELAGKENLEYPSVTLPPQPHTKEGVDAYNEVIARVRMWVNLNLWQKLKLSRDDAKPLLRLKGFPSFPLVERQANEVDWWDMVCNVKKLINEKKEDGKVFWQNLAGYKRQEALRPYLSSEEDRKKGKKFARYQLGDLLLHLEKKHGEYDWGKVYDEAWERIDKKVEGLSKHIKLEEERRSEDAQSKAALTDWLRAKASFVIEGLKEADKDEFCRCELKLQKWYGDLRGKPFAIEAENSILDISGFSKQYNCAFIWQKDGVKKLNLYLIINYFKGGKLRFKKIKPEAFEANRFYTVINKKSGEIVPMEVNFNFDDPNLIILPLAFGKRQGREFIWNDLLSLETGSLKLANGRVIEKTLYNRRTRQDEPALFVALTFERREVLDSSNIKPMNLIGVDRGENIPAVIALTDPEGCPLSRFKDSLGNPTHILRIGESYKEKQRTIQAKKEVEQRRAGGYSRKYASKAKNLADDMVRNTARDLLYYAVTQDAMLIFENLSRGFGRQGKRTFMAERQYTRMEDWLTAKLAYEGLPSKTYLSKTLAQYTSKTCSNCGFTITSADYDRVLEKLKKTATGWMTTINGKELKVEGQITYYNRYKRQNVVKDLSVELDRLSEESVNNDISSWTKGRSGEALSLLKKRFSHRPVQEKFVCLNCGFETHADEQAALNIARSWLFLRSQEYKKYQTNKTTGNTDKRAFVETWQSFYRKKLKEVWKPAV

SEQ ID NO: 29152 - protein, 978 aa, synthetic construct
  REGION 1..978: note = engineered CasX variant
QEIGRINKIRRRLVKDSNTKKAGKTGPMKTLLVRVMTPDLRERLENLRKKPENIPQPISNTSRANLNKLLTDYTEMKKAILHVYWEEFQKDPVGLMSRVAQPASKKIDQNKLKPEMDEKGNLTTAGFACSQCGQPLFVYKLEQVSEKGKAYTNYFGRCNVAEHEKLILLAQLKPEKDSDEAVTYSLGKFGQRALDFYSIHVTKESTHPVKPLAQIAGNRYASGPVGKALSDACMGTIASFLSKYQDIIIEHQKVVKGNQKRLESLRELAGKENLEYPSVTLPPQPHTKEGVDAYNEVIARVRMWVNLNLWQKLKLSRDDAKPLLRLKGFPSFPLVERQANEVDWWDMVCNVKKLINEKKEDGKVFWQNLAGYKRQEALRPYLSSEEDRKKGKKFARYQLGDLLLHLEKKHGEDWGDVYDEAWERIDKKVEGLSKHIKLEEERRSEDAQSKAALTDWLRAKASFVIEGLKEADKDEFCRCELKLQKWYGDLRGKPFAIEAENSILDISGFSKQYNCAFIWQKDGVKKLNLYLIINYFKGGKLRFKKIKPEAFEANRFYTVINKKSGEIVPMEVNFNFDDPNLIILPLAFGKRQGREFIWNDLLSLETGSLKLANGRVIEKTLYNRRTRQDEPALFVALTFERREVLDSSNIKPMNLIGVDRGENIPAVIALTDPEGCPLSRFKDSLGNPTHILRIGESYKEKQRTIQAKKEVEQRRAGGYSRKYASKAKNLADDMVRNTARDLLYYAVTQDAMLIFENLSRGFGRQGKRTFMAERQYTRMEDWLTAKLAYEGLPSKTYLSKTLAQYTSKTCSNCGFTITSADYDRVLEKLKKTATGWMTTINGKELKVEGQITYYNRYKRQNVVKDLSVELDRLSEESVNNDISSWTKGRSGEALSLLKKRFSHRPVQEKFVCLNCGFETHADEQAALNIARSWLFLRSQEYKKYQTNKTTGNTDKRAFVETWQSFYRKKLKEVWKPAV

SEQ ID NO: 29153 - protein, 978 aa, synthetic construct
  REGION 1..978: note = engineered CasX variant
QEIGRINKIRRRLVKDSNTKKAGKTGPMKTLLVRVMTPDLRERLENLRKKPENIPQPISNTSRANLNKLLTDYTEMKKAILHVYWEEFQKDPVGLMSRVAQPASKKIDQNKLKPEMDEKGNLTTAGFACSQCGQPLFVYKLEQVSEKGKAYTNYFGRCNVAEHEKLILLAQLKPEKDSDEAVTYSLGKFGQRALDFYSIHVTKESTHPVKPLAQIAGNRYASGPVGKALSDACMGTIASFLSKYQDIIIEHQKVVKGNQKRLESLRELAGKENLEYPSVTLPPQPHTKEGVDAYNEVIARVRMWVNLNLWQKLKLSRDDAKPLLRLKGFPSFPLVERQANEVDWWDMVCNVKKLINEKKEDGKVFWQNLAGYKRQEALRPYLSSEEDRKKGKKFARYQLGDLLLHLEKKHGEDWGKVYGEAWERIDKKVEGLSKHIKLEEERRSEDAQSKAALTDWLRAKASFVIEGLKEADKDEFCRCELKLQKWYGDLRGKPFAIEAENSILDISGFSKQYNCAFIWQKDGVKKLNLYLIINYFKGGKLRFKKIKPEAFEANRFYTVINKKSGEIVPMEVNFNFDDPNLIILPLAFGKRQGREFIWNDLLSLETGSLKLANGRVIEKTLYNRRTRQDEPALFVALTFERREVLDSSNIKPMNLIGVDRGENIPAVIALTDPEGCPLSRFKDSLGNPTHILRIGESYKEKQRTIQAKKEVEQRRAGGYSRKYASKAKNLADDMVRNTARDLLYYAVTQDAMLIFENLSRGFGRQGKRTFMAERQYTRMEDWLTAKLAYEGLPSKTYLSKTLAQYTSKTCSNCGFTITSADYDRVLEKLKKTATGWMTTINGKELKVEGQITYYNRYKRQNVVKDLSVELDRLSEESVNNDISSWTKGRSGEALSLLKKRFSHRPVQEKFVCLNCGFETHADEQAALNIARSWLFLRSQEYKKYQTNKTTGNTDKRAFVETWQSFYRKKLKEVWKPAV

SEQ ID NO: 29154 - protein, 978 aa, synthetic construct
  REGION 1..978: note = engineered CasX variant
QEIGRINKIRRRLVKDSNTKKAGKTGPMKTLLVRVMTPDLRERLENLRKKPENIPQPISNTSRANLNKLLTDYTEMKKAILHVYWEEFQKDPVGLMSRVAQPASKKIDQNKLKPEMDEKGNLTTAGFACSQCGQPLFVYKLEQVSEKGKAYTNYFGRCNVAEHEKLILLAQLKPEKDSDEAVTYSLGKFGQRALDFYSIHVTKESTHPVKPLAQIAGNRYASGPVGKALSDACMGTIASFLSKYQDIIIEHQKVVKGNQKRLESLRELAGKENLEYPSVTLPPQPHTKEGVDAYNEVIARVRMWVNLNLWQKLKLSRDDAKPLLRLKGFPSFPLVERQANEVDWWDMVCNVKKLINEKKEDGKVFWQNLAGYKRQEALRPYLSSEEDRKKGKKFARYQLGDLLLHLEKKHGEDWGKVYDEAWERIDKKVEGLSKHIKLEEERRSEDAQSKAALTDWLRAKASFVIEGKKEADKDEFCRCELKLQKWYGDLRGKPFAIEAENSILDISGFSKQYNCAFIWQKDGVKKLNLYLIINYFKGGKLRFKKIKPEAFEANRFYTVINKKSGEIVPMEVNFNFDDPNLIILPLAFGKRQGREFIWNDLLSLETGSLKLANGRVIEKTLYNRRTRQDEPALFVALTFERREVLDSSNIKPMNLIGVDRGENIPAVIALTDPEGCPLSRFKDSLGNPTHILRIGESYKEKQRTIQAKKEVEQRRAGGYSRKYASKAKNLADDMVRNTARDLLYYAVTQDAMLIFENLSRGFGRQGKRTFMAERQYTRMEDWLTAKLAYEGLPSKTYLSKTLAQYTSKTCSNCGFTITSADYDRVLEKLKKTATGWMTTINGKELKVEGQITYYNRYKRQNVVKDLSVELDRLSEESVNNDISSWTKGRSGEALSLLKKRFSHRPVQEKFVCLNCGFETHADEQAALNIARSWLFLRSQEYKKYQTNKTTGNTDKRAFVETWQSFYRKKLKEVWKPAV

SEQ ID NO: 29155 - protein, 978 aa, synthetic construct
  REGION 1..978: note = engineered CasX variant
QEIGRINKIRRRLVKDSNTKKAGKTGPMKTLLVRVMTPDLRERLENLRKKPENIPQPISNTSRANLNKLLTDYTEMKKAILHVYWEEFQKDPVGLMSRVAQPASKKIDQNKLKPEMDEKGNLTTAGFACSQCGQPLFVYKLEQVSEKGKAYTNYFGRCNVAEHEKLILLAQLKPEKDSDEAVTYSLGKFGQRALDFYSIHVTKESTHPVKPLAQIAGNRYASGPVGKALSDACMGTIASFLSKYQDIIIEHQKVVKGNQKRLESLRELAGKENLEYPSVTLPPQPHTKEGVDAYNEVIARVRMWVNLNLWQKLKLSRDDAKPLLRLKGFPSFPLVERQANEVDWWDMVCNVKKLINEKKEDGKVFWQNLAGYKRQEALRPYLSSEEDRKKGKKFARYQLGDLLLHLEKKHGEDWGKVYDEAWERIDKKVEGLSKHIKLEEERRSEDAQSKAALTDWLRAKASFVIEGSKEADKDEFCRCELKLQKWYGDLRGKPFAIEAENSILDISGFSKQYNCAFIWQKDGVKKLNLYLIINYFKGGKLRFKKIKPEAFEANRFYTVINKKSGEIVPMEVNFNFDDPNLIILPLAFGKRQGREFIWNDLLSLETGSLKLANGRVIEKTLYNRRTRQDEPALFVALTFERREVLDSSNIKPMNLIGVDRGENIPAVIALTDPEGCPLSRFKDSLGNPTHILRIGESYKEKQRTIQAKKEVEQRRAGGYSRKYASKAKNLADDMVRNTARDLLYYAVTQDAMLIFENLSRGFGRQGKRTFMAERQYTRMEDWLTAKLAYEGLPSKTYLSKTLAQYTSKTCSNCGFTITSADYDRVLEKLKKTATGWMTTINGKELKVEGQITYYNRYKRQNVVKDLSVELDRLSEESVNNDISSWTKGRSGEALSLLKKRFSHRPVQEKFVCLNCGFETHADEQAALNIARSWLFLRSQEYKKYQTNKTTGNTDKRAFVETWQSFYRKKLKEVWKPAV

SEQ ID NO: 29156 - protein, 979 aa, synthetic construct
  REGION 1..979: note = engineered CasX variant
QEIGRINKIRRRLVKDSNTKKAGKTGPMKTLLVRVMTPDLRERLENLRKKPENIPQPISNTSRANLNKLLTDYTEMKKAILHVYWEEFQKDPVGLMSRVAQPASKKIDQNKLKPEMDEKGNLTTAGFACSQCGQPLFVYKLEQVSEKGKAYTNYFGRCNVAEHEKLILLAQLKPEKDSDEAVTYSLGKFGQRALDFYSIHVTKESTHPVKPLAQIAGNRYASGPVGKALSDACMGTIASFLSKYQDIIIEHQKVVKGNQKRLESLRELAGKENLEYPSVTLPPQPHTKEGVDAYNEVIARVRMWVNLNLWQKLKLSRDDAKPLLRLKGFPSFPLVERQANEVDWWDMVCNVKKLINEKKEDGKVFWQNLAGYKRQEALRPYLSSEEDRKKGKKFARYQLGDLLLHLEKKHGEDWGKVYDEAWERIDKKVEGLSKHIKLEEERRSEDAQSKAALTDWLRAKASFVIEGLKEADDKDEFCRCELKLQKWYGDLRGKPFAIEAENSILDISGFSKQYNCAFIWQKDGVKKLNLYLIINYFKGGKLRFKKIKPEAFEANRFYTVINKKSGEIVPMEVNFNFDDPNLIILPLAFGKRQGREFIWNDLLSLETGSLKLANGRVIEKTLYNRRTRQDEPALFVALTFERREVLDSSNIKPMNLIGVDRGENIPAVIALTDPEGCPLSRFKDSLGNPTHILRIGESYKEKQRTIQAKKEVEQRRAGGYSRKYASKAKNLADDMVRNTARDLLYYAVTQDAMLIFENLSRGFGRQGKRTFMAERQYTRMEDWLTAKLAYEGLPSKTYLSKTLAQYTSKTCSNCGFTITSADYDRVLEKLKKTATGWMTTINGKELKVEGQITYYNRYKRQNVVKDLSVELDRLSEESVNNDISSWTKGRSGEALSLLKKRFSHRPVQEKFVCLNCGFETHADEQAALNIARSWLFLRSQEYKKYQTNKTTGNTDKRAFVETWQSFYRKKLKEVWKPAV

SEQ ID NO: 29157 - protein, 979 aa, synthetic construct
  REGION 1..979: note = engineered CasX variant
QEIGRINKIRRRLVKDSNTKKAGKTGPMKTLLVRVMTPDLRERLENLRKKPENIPQPISNTSRANLNKLLTDYTEMKKAILHVYWEEFQKDPVGLMSRVAQPASKKIDQNKLKPEMDEKGNLTTAGFACSQCGQPLFVYKLEQVSEKGKAYTNYFGRCNVAEHEKLILLAQLKPEKDSDEAVTYSLGKFGQRALDFYSIHVTKESTHPVKPLAQIAGNRYASGPVGKALSDACMGTIASFLSKYQDIIIEHQKVVKGNQKRLESLRELAGKENLEYPSVTLPPQPHTKEGVDAYNEVIARVRMWVNLNLWQKLKLSRDDAKPLLRLKGFPSFPLVERQANEVDWWDMVCNVKKLINEKKEDGKVFWQNLAGYKRQEALRPYLSSEEDRKKGKKFARYQLGDLLLHLEKKHGEDWGKVYDEAWERIDKKVEGLSKHIKLEEERRSEDAQSKAALTDWLRAKASFVIEGLKEADKDEFCRCELKLQKWYGDLRGKPFAIEAENSILDISGFSKQYNCAFIWQKDGVKKLNLYLIINYFKGGKLRFKKIKPEAFEANRFYTVINKKSGEIVPMEVNFNFDDPNLIILPLAFGKRQGREFIWNDLLSLETGSLKLANGRVIEKTLYNRRTRQDEPALFVALTFERREVLDSSNIKPMNLIGVDRGENIPAVIALTDPEGCPLSRFKDSLGNPTHILRIGESYKEKQRTIQAKKEVEQRRAGGYSRKYASKAKNLADDMVRNTARDLLYYAVTQDAMLIFENLSRGFGRQGKRTFMAERQYTRMEDWLTAKLAYEGLPSKTYLSKTLAQYTSKTCSNCGFTITSADYDRVLEKLKKTATGWMTTINGKELKVEGQITYYNRYKRQNVVKDLSVELDRLSEESVNNDISSWTKGRSGNEALSLLKKRFSHRPVQEKFVCLNCGFETHADEQAALNIARSWLFLRSQEYKKYQTNKTTGNTDKRAFVETWQSFYRKKLKEVWKPAV

SEQ ID NO: 29158 - protein, 978 aa, synthetic construct
  REGION 1..978: note = engineered CasX variant
QEIGRINKIRRRLVKDSNTKKAGKTGPMKTLLVRVMTPDLRERLENLRKKPENIPQPISNTSRANLNKLLTDYTEMKKAILHVYWEEFQKDPVGLMSRVAQPASKKIDQNKLKPEMDEKGNLTTAGFACSQCGQPLFVYKLEQVSEKGKAYTNYFGRCNVAEHEKLILLAQLKPEKDSDEAVTYSLGKFGQRALDFYSIHVTKESTHPVKPLAQIAGNRYASGPVGKALSDACMGTIASFLSKYQDIIIEHQKVVKGNQKRLESLRELAGKENLEYPSVTLPPQPHTKEGVDAYNEVIARVRMWVNLNLWQKLKLSRDDAKPLLRLKGFPSFPLVERQANEVDWWDMVCNVKKLINEKKEDGKVFWQNLAGYKRQEALRPYLSSEEDRQKGKKFARYQLGDLLLHLEKKHGEDWGKVYDEAWERIDKKVEGLSKHIKLEEERRSEDAQSKAALTDWLRAKASFVIEGLKEADKDEFCRCELKLQKWYGDLRGKPFAIEAENSILDISGFSKQYNCAFIWQKDGVKKLNLYLIINYFKGGKLRFKKIKPEAFEANRFYTVINKKSGEIVPMEVNFNFDDPNLIILPLAFGKRQGREFIWNDLLSLETGSLKLANGRVIEKTLYNRRTRQDEPALFVALTFERREVLDSSNIKPMNLIGVDRGENIPAVIALTDPEGCPLSRFKDSLGNPTHILRIGESYKEKQRTIQAKKEVEQRRAGGYSRKYASKAKNLADDMVRNTARDLLYYAVTQDAMLIFENLSRGFGRQGKRTFMAERQYTRMEDWLTAKLAYEGLPSKTYLSKTLAQYTSKTCSNCGFTITSADYDRVLEKLKKTATGWMTTINGKELKVEGQITYYNRYKRQNVVKDLSVELDRLSEESVNNDISSWTKGRSGEALSLLKKRFSHRPVQEKFVCLNCGFETHADEQAALNIARSWLFLRSQEYKKYQTNKTTGNTDKRAFVETWQSFYRKKLKEVWKPAV

SEQ ID NO: 29159 - protein, 978 aa, synthetic construct
  REGION 1..978: note = engineered CasX variant
QEIGRINKIRRRLVKDSNTKKAGKTGPMKTLLVRVMTPDLRERLENLRKKPENIPQPISNTSRANLNKLLTDYTEMKKAILHVYWEEFQKDPVGLMSRVAQPASKKIDQNKLKPEMDEKGNLTTAGFACSQCGQPLFVYKLEQVSEKGKAYTNYFGRCNVAEHEKLILLAQLKPEKDSDEAVTYSLGKFGQRALDFYSIHVTKESTHPVKPLAQIAGNRYASGPVGKALSDACMGTIASFLSKYQDIIIEHQKVVKGNQKRLESLRELAGKENLEYPSVTLPPQPHTKEGVDAYNEVIARVRMWVNLNLWQKLKLSRDDAKPLLRLKGFPSFPLVERQANEVDWWDMVCNVKKLINEKKEDGKVFWQNLAGYKRQEALRPYLSSEEDRKKGKKFARYQLGDLLLHLEKKHGEDWGKVYDEAWERIDKKVEGLSKHIKLEEERRSEDAQSKAALTDWLRAKASFVIEGLKEADKDEFCRCELKLQKWYGDLRGKPFAIEAENSILDISGFSKQYNCAFIWQKDGVKKLNLYLIINYFKGGKLRFKKIKPEAFEANRFYTVINKKSGEIVPMEVNFNFDDPNLIILPLAFGKRQGREFIWNDLLSLETGSLKLANGRVIEKTLYNRRTRQDEPALFVALTFERREVLDSSNIKPMNLIGVDRGENIPAVIALTDPEGCPLSRFKDSLGNPTHILRIGESYKEKQRTIQAKKEVEQRRAGGYSRKYASKAKNLADDMVRNTARDLLYYAVTQDAMLIFENLSRGFGRQGKRTFMAERQYTRMEDWLTAKLAYEGLPSQTYLSKTLAQYTSKTCSNCGFTITSADYDRVLEKLKKTATGWMTTINGKELKVEGQITYYNRYKRQNVVKDLSVELDRLSEESVNNDISSWTKGRSGEALSLLKKRFSHRPVQEKFVCLNCGFETHADEQAALNIARSWLFLRSQEYKKYQTNKTTGNTDKRAFVETWQSFYRKKLKEVWKPAV

SEQ ID NO: 29160 - protein, 978 aa, synthetic construct
  REGION 1..978: note = engineered CasX variant
QEIGRINKIRRRLVKDSNTKKAGKTGPMKTLLVRVMTPDLRERLENLRKKPENIPQPISNTSRANLNKLLTDYTEMKKAILHVYWEEFQKDPVGLMSRVAQPASKKIDQNKLKPEMDEKGNLTTAGFACSQCGQPLFVYKLEQVSEKGKAYTNYFGRCNVAEHEKLILLAQLKPEKDSDEAVTYSLGKFGQRALDFYSIHVTKESTHPVKPLAQIAGNRYASGPVGKALSDACMGTIASFLSKYQDIIIEHQKVVKGNQKRLESLRELAGKENLEYPSVTLPPQPHTKEGVDAYNEVIARVRMWVNLNLWQKLKLSRDDAKPLLRLKGFPSFPLVERQANEVDWWDMVCNVKKLINEKKEDGKVFWQNLAGYKRQEALRPYLSSEEDRKKGKKFARYQLGDLLLHLEKKHGEDWGKVYDEAWERIDKKVEGLSKHIKLEEERRSEDAQSKAALTDWLRAKASFVIEGLKEADKDEFCRCELKLQKWYGDLRGKPFAIEAENSILDISGFSKQYNCAFIWQKDGVKKLNLYLIINYFKGGKLRFKKIKPEAFEANRFYTVINKKSGEIVPMEVNFNFDDPNLIILPLAFGKRQGREFIWNDLLSLETGSLKLANGRVIEKTLYNRRTRQDEPALFVALTFERREVLDSSNIKPMNLIGVDRGENIPAVIALTDPEGCPLSRFKDSLGNPTHILRIGESYKEKQRTIQAKKEVEQRRAGGYSRKYASKAKNLADDMVRNTARDLLYYAVTQDAMLIFENLSRGFGRQGKRTFMAERQYTRMEDWLTAKLAYNGLPSKTYLSKTLAQYTSKTCSNCGFTITSADYDRVLEKLKKTATGWMTTINGKELKVEGQITYYNRYKRQNVVKDLSVELDRLSEESVNNDISSWTKGRSGEALSLLKKRFSHRPVQEKFVCLNCGFETHADEQAALNIARSWLFLRSQEYKKYQTNKTTGNTDKRAFVETWQSFYRKKLKEVWKPAV

SEQ ID NO: 29161 - protein, 978 aa, synthetic construct
  REGION 1..978: note = engineered CasX variant
QEIGRINKIRRRLVKDSNTKKAGKTGPMKTLLVRVMTPDLRERLENLRKKPENIPQPISNTSRANLNKLLTDYTEMKKAILHVYWEEFQKDPVGLMSRVAQPASKKIDQNKLKPEMDEKGNLTTAGFACSQCGQPLFVYKLEQVSEKGKAYTNYFGRCNVAEHEKLIQLAQLKPEKDSDEAVTYSLGKFGQRALDFYSIHVTKESTHPVKPLAQIAGNRYASGPVGKALSDACMGTIASFLSKYQDIIIEHQKVVKGNQKRLESLRELAGKENLEYPSVTLPPQPHTKEGVDAYNEVIARVRMWVNLNLWQKLKLSRDDAKPLLRLKGFPSFPLVERQANEVDWWDMVCNVKKLINEKKEDGKVFWQNLAGYKRQEALRPYLSSEEDRKKGKKFARYQLGDLLLHLEKKHGEDWGKVYDEAWERIDKKVEGLSKHIKLEEERRSEDAQSKAALTDWLRAKASFVIEGLKEADKDEFCRCELKLQKWYGDLRGKPFAIEAENSILDISGFSKQYNCAFIWQKDGVKKLNLYLIINYFKGGKLRFKKIKPEAFEANRFYTVINKKSGEIVPMEVNFNFDDPNLIILPLAFGKRQGREFIWNDLLSLETGSLKLANGRVIEKTLYNRRTRQDEPALFVALTFERREVLDSSNIKPMNLIGVDRGENIPAVIALTDPEGCPLSRFKDSLGNPTHILRIGESYKEKQRTIQAKKEVEQRRAGGYSRKYASKAKNLADDMVRNTARDLLYYAVTQDAMLIFENLSRGFGRQGKRTFMAERQYTRMEDWLTAKLAYEGLPSKTYLSKTLAQYTSKTCSNCGFTITSADYDRVLEKLKKTATGWMTTINGKELKVEGQITYYNRYKRQNVVKDLSVELDRLSEESVNNDISSWTKGRSGEALSLLKKRFSHRPVQEKFVCLNCGFETHADEQAALNIARSWLFLRSQEYKKYQTNKTTGNTDKRAFVETWQSFYRKKLKEVWKPAV

SEQ ID NO: 29162 - protein, 978 aa, synthetic construct
  REGION 1..978: note = engineered CasX variant
QEIGRINKIRRRLVKDSNTKKAGKTGPMKTLLVRVMTPDLRERLENLRKKPENIPQPISNTSRANLNKLLTDYTEMKKAILHVYWEEFQKDPVGLMSRVAQPASKKIDQNKLKPEMDEKGNLTTAGFACSQCGQPLFVYKLEQVSEKGKAYTNYFGRCNVAEHEKLILLAQLKPEKDSDEAVTYSLGKFGQRALDFYSIHVTKESTHPVKPLAQIAGNRYASGPVGKALSDACMGTIASFLSKYQDIIIEHQKVVKGNQKRLESLRELAGKENLEYPSVTLPPQPHTKEGVDAYNEVIARVRMWVNLNLWQKLKLSRDDAKPLLRLKGFPSFPLVERQANEVDWWDMVCNVKKLINEKKEDGKVFWQNLAIYKRQEALRPYLSSEEDRKKGKKFARYQLGDLLLHLEKKHGEDWGKVYDEAWERIDKKVEGLSKHIKLEEERRSEDAQSKAALTDWLRAKASFVIEGLKEADKDEFCRCELKLQKWYGDLRGKPFAIEAENSILDISGFSKQYNCAFIWQKDGVKKLNLYLIINYFKGGKLRFKKIKPEAFEANRFYTVINKKSGEIVPMEVNFNFDDPNLIILPLAFGKRQGREFIWNDLLSLETGSLKLANGRVIEKTLYNRRTRQDEPALFVALTFERREVLDSSNIKPMNLIGVDRGENIPAVIALTDPEGCPLSRFKDSLGNPTHILRIGESYKEKQRTIQAKKEVEQRRAGGYSRKYASKAKNLADDMVRNTARDLLYYAVTQDAMLIFENLSRGFGRQGKRTFMAERQYTRMEDWLTAKLAYEGLPSKTYLSKTLAQYTSKTCSNCGFTITSADYDRVLEKLKKTATGWMTTINGKELKVEGQITYYNRYKRQNVVKDLSVELDRLSEESVNNDISSWTKGRSGEALSLLKKRFSHRPVQEKFVCLNCGFETHADEQAALNIARSWLFLRSQEYKKYQTNKTTGNTDKRAFVETWQSFYRKKLKEVWKPAV

SEQ ID NO: 29163 - protein, 978 aa, synthetic construct
  REGION 1..978: note = engineered CasX variant
QEIGRINKIRRRLVKDSNTKKAGKTGPMKTLLVRVMTPDLRERLENLRKKPENIPQPISNTSRANLNKLLTDYTEMKKAILHVYWEEFQKDPVGLMSRVAQPASKKIDQNKLKPEMDEKGNLTTAGFACSQCGQPLFVYKLEQVSEKGKAYTNYFGRCNVAEHEKLILLAQLKPEKDSDEAVTYSLGKFGQRALDFYSIHVTKESTHPVKPLAQIAGNRYASGPVGKALSDACMGTIASFLSKYQDIIIEHQKVVKGNQKRLESLRELAGKENLEYPSVTLPPQPHTKEGVDAYNEVIARVRMWVNLNLWQKLKLSRDDAKPLLRLKGFPSFPLVERQANEVDWWDMVCNVKKLINEKKEDGKVFWQNLAGYKRQEALRPYLSSEEDREKGKKFARYQLGDLLLHLEKKHGEDWGKVYDEAWERIDKKVEGLSKHIKLEEERRSEDAQSKAALTDWLRAKASFVIEGLKEADKDEFCRCELKLQKWYGDLRGKPFAIEAENSILDISGFSKQYNCAFIWQKDGVKKLNLYLIINYFKGGKLRFKKIKPEAFEANRFYTVINKKSGEIVPMEVNFNFDDPNLIILPLAFGKRQGREFIWNDLLSLETGSLKLANGRVIEKTLYNRRTRQDEPALFVALTFERREVLDSSNIKPMNLIGVDRGENIPAVIALTDPEGCPLSRFKDSLGNPTHILRIGESYKEKQRTIQAKKEVEQRRAGGYSRKYASKAKNLADDMVRNTARDLLYYAVTQDAMLIFENLSRGFGRQGKRTFMAERQYTRMEDWLTAKLAYEGLPSKTYLSKTLAQYTSKTCSNCGFTITSADYDRVLEKLKKTATGWMTTINGKELKVEGQITYYNRYKRQNVVKDLSVELDRLSEESVNNDISSWTKGRSGEALSLLKKRFSHRPVQEKFVCLNCGFETHADEQAALNIARSWLFLRSQEYKKYQTNKTTGNTDKRAFVETWQSFYRKKLKEVWKPAV

SEQ ID NO: 29164 - protein, 978 aa, synthetic construct
  REGION 1..978: note = engineered CasX variant
QEIGRINKIRRRLVKDSNTKKAGKTGPMKTLLVRVMTPDLRERLENLRKKPENIPQPISNTSRANLNKLLTDYTEMKKAILHVYWEEFQKDPVGLMSRVAQPASKKIDQNKLKPEMDEKGNLTTAGFACSQCGQPLFVYKLEQVSEKGKAYTNYFGRCNVAEHEKLILLAQLKPEKDSDEAVTYSLGKFGQRALDFYSIHVTKESTHPVKPLAQIAGNRYASGPVGKALSDACMGTIASFLSKYQDIIIEHQKVVKGNQKRLESLRELAGKENLEYPSVTLPPQPHTKEGVDAYNEVIARVRMWVNLNLWQKLKLSRDDAKPLLRLKGFPSFPLVERQANEVDWWDMVCNVKKLINEKKEDGKVFWQNLAGYKRQEALRPYLSSEEDRKKGKKFARYQLGDLLLHLEKKHGEDWGKVYDEAWERIDKKVEGLSKHIKLEEERRSEDAQSKAALTDWLRAKASFVIEGLKEADKDEFCRCELKLQKWYGDLRGKPFAIEAENSILDISGFSKQYNCAFIWQKDGVKKLNLYLIINYFKGGKLRFKKIKPEAFEANRFYTVINKKSGEIVIMEVNFNFDDPNLIILPLAFGKRQGREFIWNDLLSLETGSLKLANGRVIEKTLYNRRTRQDEPALFVALTFERREVLDSSNIKPMNLIGVDRGENIPAVIALTDPEGCPLSRFKDSLGNPTHILRIGESYKEKQRTIQAKKEVEQRRAGGYSRKYASKAKNLADDMVRNTARDLLYYAVTQDAMLIFENLSRGFGRQGKRTFMAERQYTRMEDWLTAKLAYEGLPSKTYLSKTLAQYTSKTCSNCGFTITSADYDRVLEKLKKTATGWMTTINGKELKVEGQITYYNRYKRQNVVKDLSVELDRLSEESVNNDISSWTKGRSGEALSLLKKRFSHRPVQEKFVCLNCGFETHADEQAALNIARSWLFLRSQEYKKYQTNKTTGNTDKRAFVETWQSFYRKKLKEVWKPAV

SEQ ID NO: 29165 - protein, 979 aa, synthetic construct
  REGION 1..979: note = engineered CasX variant
QEIKGRINKIRRRLVKDSNTKKAGKTGPMKTLLVRVMTPDLRERLENLRKKPENIPQPISNTSRANLNKLLTDYTEMKKAILHVYWEEFQKDPVGLMSRVAQPASKKIDQNKLKPEMDEKGNLTTAGFACSQCGQPLFVYKLEQVSEKGKAYTNYFGRCNVAEHEKLILLAQLKPEKDSDEAVTYSLGKFGQRALDFYSIHVTKESTHPVKPLAQIAGNRYASGPVGKALSGACMGTIASFLSKYQDIIIEHQKVVKGNQKRLESLRELAGKENLEYPSVTLPPQPHTKEGVDAYNEVIARVRMWVNLNLWQKLKLSRDDAKPLLRLKGFPSFPLVERQANEVDWWDMVCNVKKLINEKKEDGKVFWQNLAGYKRQEALRPYLSSEEDRKKGKKFARYQLGDLLLHLEKKHGEDWGKVYDEAWERIDKKVEGLSKHIKLEEERRSEDAQSKAALTDWLRAKASFVIEGLKEADKDEFCRCELKLQKWYGDLRGKPFAIEAENSILDISGFSKQYNCAFIWQKDGVKKLNLYLIINYFKGGKLRFKKIKPEAFEANRFYTVINKKSGEIVPMEVNFNFDDPNLIILPLAFGKRQGREFIWNDLLSLETGSLKLANGRVIEKTLYNRRTRQDEPALFVALTFERREVLDSSNIKPMNLIGVDRGENIPAVIALTDPEGCPLSRFKDSLGNPTHILRIGESYKEKQRTIQAKKEVEQRRAGGYSRKYASKAKNLADDMVRNTARDLLYYAVTQDAMLIFENLSRGFGRQGKRTFMAERQYTRMEDWLTAKLAYEGLPSKTYLSKTLAQYTSKTCSNCGFTITSADYDRVLEKLKKTATGWMTTINGKELKVEGQITYYNRYKRQNVVKDLSVELDRLSEESVNNDISSWTKGRSGEALSLLKKRFSHRPVQEKFVCLNCGFETHADEQAALNIARSWLFLRSQEYKKYQTNKTTGNTDKRAFVETWQSFYRKKLKEVWKPAV

SEQ ID NO: 29166 - protein, 979 aa, synthetic construct
  REGION 1..979: note = engineered CasX variant
QEIKGRINKIRRRLVKDSNTKKAGKTGPMKTLLVRVMTPDLRERLENLRKKPENIPQPISNTSRANLNKLLTDYTEMKKAILHVYWEEFQKDPVGLMSRVAQPASKKIDQNKLKPEMDEKGNLTTAGFACSQCGQPLFVYKLEQVSEKGKAYTNYFGRCNVAEHEKLILLAQLKPEKDSDEAVTYSLGKFGQRALDFYSIHVTKESTHPVKPLAQIAGNRYASGPVGKALSDACMGTIASFLSKYQDIIIEHQKVVKGNQKRLESLRELAGKENLEYPSVTLPPQPHTKEGVDAYNEVIARVRMWVNLNLWQKLKLSRDDAKPLLRLKNFPSFPLVERQANEVDWWDMVCNVKKLINEKKEDGKVFWQNLAGYKRQEALRPYLSSEEDRKKGKKFARYQLGDLLLHLEKKHGEDWGKVYDEAWERIDKKVEGLSKHIKLEEERRSEDAQSKAALTDWLRAKASFVIEGLKEADKDEFCRCELKLQKWYGDLRGKPFAIEAENSILDISGFSKQYNCAFIWQKDGVKKLNLYLIINYFKGGKLRFKKIKPEAFEANRFYTVINKKSGEIVPMEVNFNFDDPNLIILPLAFGKRQGREFIWNDLLSLETGSLKLANGRVIEKTLYNRRTRQDEPALFVALTFERREVLDSSNIKPMNLIGVDRGENIPAVIALTDPEGCPLSRFKDSLGNPTHILRIGESYKEKQRTIQAKKEVEQRRAGGYSRKYASKAKNLADDMVRNTARDLLYYAVTQDAMLIFENLSRGFGRQGKRTFMAERQYTRMEDWLTAKLAYEGLPSKTYLSKTLAQYTSKTCSNCGFTITSADYDRVLEKLKKTATGWMTTINGKELKVEGQITYYNRYKRQNVVKDLSVELDRLSEESVNNDISSWTKGRSGEALSLLKKRFSHRPVQEKFVCLNCGFETHADEQAALNIARSWLFLRSQEYKKYQTNKTTGNTDKRAFVETWQSFYRKKLKEVWKPAV

SEQ ID NO: 29167 - protein, 979 aa, synthetic construct
  REGION 1..979: note = engineered CasX variant
QEIKGRINKIRRRLVKDSNTKKAGKTGPMKTLLVRVMTPDLRERLENLRKKPENIPQPISNTSRANLNKLLTDYTEMKKAILHVYWEEFQKDPVGLMSRVAQPASKKIDQNKLKPEMDEKGNLTTAGFACSQCGQPLFVYKLEQVSEKGKAYTNYFGRCNVAEHEKLILLAQLKPEKDSDEAVTYSLGKFGQRALDFYSIHVTKESTHPVKPLAQIAGNRYASGPVGKALSDACMGTIASFLSKYQDIIIEHQKVVKGNQKRLESLRELAGKENLEYPSVTLPPQPHTKEGVDAYNEVIARVRMWVNLNLWQKLKLSRDDAKPLLRLKGFPSFPLVERQANEVDWWDMVCNVKKLINEKKEDGKVFWQNLAGYKRQEALRPYLSSEEDRKKGKKFARYQLGDLLNHLEKKHGEDWGKVYDEAWERIDKKVEGLSKHIKLEEERRSEDAQSKAALTDWLRAKASFVIEGLKEADKDEFCRCELKLQKWYGDLRGKPFAIEAENSILDISGFSKQYNCAFIWQKDGVKKLNLYLIINYFKGGKLRFKKIKPEAFEANRFYTVINKKSGEIVPMEVNFNFDDPNLIILPLAFGKRQGREFIWNDLLSLETGSLKLANGRVIEKTLYNRRTRQDEPALFVALTFERREVLDSSNIKPMNLIGVDRGENIPAVIALTDPEGCPLSRFKDSLGNPTHILRIGESYKEKQRTIQAKKEVEQRRAGGYSRKYASKAKNLADDMVRNTARDLLYYAVTQDAMLIFENLSRGFGRQGKRTFMAERQYTRMEDWLTAKLAYEGLPSKTYLSKTLAQYTSKTCSNCGFTITSADYDRVLEKLKKTATGWMTTINGKELKVEGQITYYNRYKRQNVVKDLSVELDRLSEESVNNDISSWTKGRSGEALSLLKKRFSHRPVQEKFVCLNCGFETHADEQAALNIARSWLFLRSQEYKKYQTNKTTGNTDKRAFVETWQSFYRKKLKEVWKPAV

SEQ ID NO: 29168 - protein, 979 aa, synthetic construct
  REGION 1..979: note = engineered CasX variant
QEIKGRINKIRRRLVKDSNTKKAGKTGPMKTLLVRVMTPDLRERLENLRKKPENIPQPISNTSRANLNKLLTDYTEMKKAILHVYWEEFQKDPVGLMSRVAQPASKKIDQNKLKPEMDEKGNLTTAGFACSQCGQPLFVYKLEQVSEKGKAYTNYFGRCNVAEHEKLILLAQLKPEKDSDEAVTYSLGKFGQRALDFYSIHVTKESTHPVKPLAQIAGNRYASGPVGKALSDACMGTIASFLSKYQDIIIEHQKVVKGNQKRLESLRELAGKENLEYPSVTLPPQPHTKEGVDAYNEVIARVRMWVNLNLWQKLKLSRDDAKPLLRLKGFPSFPLVERQANEVDWWDMVCNVKKLINEKKEDGKVFWQNLAGYKRQEALRPYLSSEEDRKKGKKFARYQLGDLLWHLEKKHGEDWGKVYDEAWERIDKKVEGLSKHIKLEEERRSEDAQSKAALTDWLRAKASFVIEGLKEADKDEFCRCELKLQKWYGDLRGKPFAIEAENSILDISGFSKQYNCAFIWQKDGVKKLNLYLIINYFKGGKLRFKKIKPEAFEANRFYTVINKKSGEIVPMEVNFNFDDPNLIILPLAFGKRQGREFIWNDLLSLETGSLKLANGRVIEKTLYNRRTRQDEPALFVALTFERREVLDSSNIKPMNLIGVDRGENIPAVIALTDPEGCPLSRFKDSLGNPTHILRIGESYKEKQRTIQAKKEVEQRRAGGYSRKYASKAKNLADDMVRNTARDLLYYAVTQDAMLIFENLSRGFGRQGKRTFMAERQYTRMEDWLTAKLAYEGLPSKTYLSKTLAQYTSKTCSNCGFTITSADYDRVLEKLKKTATGWMTTINGKELKVEGQITYYNRYKRQNVVKDLSVELDRLSEESVNNDISSWTKGRSGEALSLLKKRFSHRPVQEKFVCLNCGFETHADEQAALNIARSWLFLRSQEYKKYQTNKTTGNTDKRAFVETWQSFYRKKLKEVWKPAV

SEQ ID NO: 29169 - protein, 979 aa, synthetic construct
  REGION 1..979: note = engineered CasX variant
QEIKGRINKIRRRLVKDSNTKKAGKTGPMKTLLVRVMTPDLRERLENLRKKPENIPQPISNTSRANLNKLLTDYTEMKKAILHVYWEEFQKDPVGLMSRVAQPASKKIDQNKLKPEMDEKGNLTTAGFACSQCGQPLFVYKLEQVSEKGKAYTNYFGRCNVAEHEKLILLAQLKPEKDSDEAVTYSLGKFGQRALDFYSIHVTKESTHPVKPLAQIAGNRYASGPVGKALSDACMGTIASFLSKYQDIIIEHQKVVKGNQKRLESLRELAGKENLEYPSVTLPPQPHTKEGVDAYNEVIARVRMWVNLNLWQKLKLSRDDAKPLLRLKGFPSFPLVERQANEVDWWDMVCNVKKLINEKKEDGKVFWQNLAGYKRQEALRPYLSSEEDRKKGKKFARYQLGDLLLHLYKKHGEDWGKVYDEAWERIDKKVEGLSKHIKLEEERRSEDAQSKAALTDWLRAKASFVIEGLKEADKDEFCRCELKLQKWYGDLRGKPFAIEAENSILDISGFSKQYNCAFIWQKDGVKKLNLYLIINYFKGGKLRFKKIKPEAFEANRFYTVINKKSGEIVPMEVNFNFDDPNLIILPLAFGKRQGREFIWNDLLSLETGSLKLANGRVIEKTLYNRRTRQDEPALFVALTFERREVLDSSNIKPMNLIGVDRGENIPAVIALTDPEGCPLSRFKDSLGNPTHILRIGESYKEKQRTIQAKKEVEQRRAGGYSRKYASKAKNLADDMVRNTARDLLYYAVTQDAMLIFENLSRGFGRQGKRTFMAERQYTRMEDWLTAKLAYEGLPSKTYLSKTLAQYTSKTCSNCGFTITSADYDRVLEKLKKTATGWMTTINGKELKVEGQITYYNRYKRQNVVKDLSVELDRLSEESVNNDISSWTKGRSGEALSLLKKRFSHRPVQEKFVCLNCGFETHADEQAALNIARSWLFLRSQEYKKYQTNKTTGNTDKRAFVETWQSFYRKKLKEVWKPAV

SEQ ID NO: 29170 - protein, 979 aa, synthetic construct
  REGION 1..979: note = engineered CasX variant
QEIKGRINKIRRRLVKDSNTKKAGKTGPMKTLLVRVMTPDLRERLENLRKKPENIPQPISNTSRANLNKLLTDYTEMKKAILHVYWEEFQKDPVGLMSRVAQPASKKIDQNKLKPEMDEKGNLTTAGFACSQCGQPLFVYKLEQVSEKGKAYTNYFGRCNVAEHEKLILLAQLKPEKDSDEAVTYSLGKFGQRALDFYSIHVTKESTHPVKPLAQIAGNRYASGPVGKALSDACMGTIASFLSKYQDIIIEHQKVVKGNQKRLESLRELAGKENLEYPSVTLPPQPHTKEGVDAYNEVIARVRMWVNLNLWQKLKLSRDDAKPLLRLKGFPSFPLVERQANEVDWWDMVCNVKKLINEKKEDGKVFWQNLAGYKRQEALRPYLSSEEDRKKGKKFARYQLGDLLLHLEKKHPEDWGKVYDEAWERIDKKVEGLSKHIKLEEERRSEDAQSKAALTDWLRAKASFVIEGLKEADKDEFCRCELKLQKWYGDLRGKPFAIEAENSILDISGFSKQYNCAFIWQKDGVKKLNLYLIINYFKGGKLRFKKIKPEAFEANRFYTVINKKSGEIVPMEVNFNFDDPNLIILPLAFGKRQGREFIWNDLLSLETGSLKLANGRVIEKTLYNRRTRQDEPALFVALTFERREVLDSSNIKPMNLIGVDRGENIPAVIALTDPEGCPLSRFKDSLGNPTHILRIGESYKEKQRTIQAKKEVEQRRAGGYSRKYASKAKNLADDMVRNTARDLLYYAVTQDAMLIFENLSRGFGRQGKRTFMAERQYTRMEDWLTAKLAYEGLPSKTYLSKTLAQYTSKTCSNCGFTITSADYDRVLEKLKKTATGWMTTINGKELKVEGQITYYNRYKRQNVVKDLSVELDRLSEESVNNDISSWTKGRSGEALSLLKKRFSHRPVQEKFVCLNCGFETHADEQAALNIARSWLFLRSQEYKKYQTNKTTGNTDKRAFVETWQSFYRKKLKEVWKPAV

SEQ ID NO: 29171 - protein, 980 aa, synthetic construct
  REGION 1..980: note = engineered CasX variant
QEIKGRINKIRRRLVKDSNTKKAGKTGPMKTLLVRVMTPDLRERLENLRKKPENIPQPISNTSRANLNKLLTDYTEMKKAILHVYWEEFQKDPVGLMSRVAQPASKKIDQNKLKPEMDEKGNLTTAGFACSQCGQPLFVYKLEQVSEKGKAYTNYFGRCNVAEHEKLILLAQLKPEKDSDEAVTYSLGKFGQRALDFYSIHVTKESTHPVKPLAQIAGNRYASGPVGKALSDACMGTIASFLSKYQDIIIEHQKVVKGNQKRLESLRELAGKENLEYPSVTLPPQPHTKEGVDAYNEVIARVRMWVNLNLWQKLKLSRDDAKPLLRLKGFPSFPLVERQANEVDWWDMVCNVKKLINEKKEDGKVFWQNLAGYKRQEALRPYLSSEEDRKKGKKFARYQLGDLLLHLEKKHGERDWGKVYDEAWERIDKKVEGLSKHIKLEEERRSEDAQSKAALTDWLRAKASFVIEGLKEADKDEFCRCELKLQKWYGDLRGKPFAIEAENSILDISGFSKQYNCAFIWQKDGVKKLNLYLIINYFKGGKLRFKKIKPEAFEANRFYTVINKKSGEIVPMEVNFNFDDPNLIILPLAFGKRQGREFIWNDLLSLETGSLKLANGRVIEKTLYNRRTRQDEPALFVALTFERREVLDSSNIKPMNLIGVDRGENIPAVIALTDPEGCPLSRFKDSLGNPTHILRIGESYKEKQRTIQAKKEVEQRRAGGYSRKYASKAKNLADDMVRNTARDLLYYAVTQDAMLIFENLSRGFGRQGKRTFMAERQYTRMEDWLTAKLAYEGLPSKTYLSKTLAQYTSKTCSNCGFTITSADYDRVLEKLKKTATGWMTTINGKELKVEGQITYYNRYKRQNVVKDLSVELDRLSEESVNNDISSWTKGRSGEALSLLKKRFSHRPVQEKFVCLNCGFETHADEQAALNIARSWLFLRSQEYKKYQTNKTTGNTDKRAFVETWQSFYRKKLKEVWKPAV

SEQ ID NO: 29172 - protein, 980 aa, synthetic construct
  REGION 1..980: note = engineered CasX variant
QEIKGRINKIRRRLVKDSNTKKAGKTGPMKTLLVRVMTPDLRERLENLRKKPENIPQPISNTSRANLNKLLTDYTEMKKAILHVYWEEFQKDPVGLMSRVAQPASKKIDQNKLKPEMDEKGNLTTAGFACSQCGQPLFVYKLEQVSEKGKAYTNYFGRCNVAEHEKLILLAQLKPEKDSDEAVTYSLGKFGQRALDFYSIHVTKESTHPVKPLAQIAGNRYASGPVGKALSDACMGTIASFLSKYQDIIIEHQKVVKGNQKRLESLRELAGKENLEYPSVTLPPQPHTKEGVDAYNEVIARVRMWVNLNLWQKLKLSRDDAKPLLRLKGFPSFPLVERQANEVDWWDMVCNVKKLINEKKEDGKVFWQNLAGYKRQEALRPYLSSEEDRKKGKKFARYQLGDLLLHLEKKHGEYDWGKVYDEAWERIDKKVEGLSKHIKLEEERRSEDAQSKAALTDWLRAKASFVIEGLKEADKDEFCRCELKLQKWYGDLRGKPFAIEAENSILDISGFSKQYNCAFIWQKDGVKKLNLYLIINYFKGGKLRFKKIKPEAFEANRFYTVINKKSGEIVPMEVNFNFDDPNLIILPLAFGKRQGREFIWNDLLSLETGSLKLANGRVIEKTLYNRRTRQDEPALFVALTFERREVLDSSNIKPMNLIGVDRGENIPAVIALTDPEGCPLSRFKDSLGNPTHILRIGESYKEKQRTIQAKKEVEQRRAGGYSRKYASKAKNLADDMVRNTARDLLYYAVTQDAMLIFENLSRGFGRQGKRTFMAERQYTRMEDWLTAKLAYEGLPSKTYLSKTLAQYTSKTCSNCGFTITSADYDRVLEKLKKTATGWMTTINGKELKVEGQITYYNRYKRQNVVKDLSVELDRLSEESVNNDISSWTKGRSGEALSLLKKRFSHRPVQEKFVCLNCGFETHADEQAALNIARSWLFLRSQEYKKYQTNKTTGNTDKRAFVETWQSFYRKKLKEVWKPAV

SEQ ID NO: 29173 - protein, 979 aa, synthetic construct
  REGION 1..979: note = engineered CasX variant
QEIKGRINKIRRRLVKDSNTKKAGKTGPMKTLLVRVMTPDLRERLENLRKKPENIPQPISNTSRANLNKLLTDYTEMKKAILHVYWEEFQKDPVGLMSRVAQPASKKIDQNKLKPEMDEKGNLTTAGFACSQCGQPLFVYKLEQVSEKGKAYTNYFGRCNVAEHEKLILLAQLKPEKDSDEAVTYSLGKFGQRALDFYSIHVTKESTHPVKPLAQIAGNRYASGPVGKALSDACMGTIASFLSKYQDIIIEHQKVVKGNQKRLESLRELAGKENLEYPSVTLPPQPHTKEGVDAYNEVIARVRMWVNLNLWQKLKLSRDDAKPLLRLKGFPSFPLVERQANEVDWWDMVCNVKKLINEKKEDGKVFWQNLAGYKRQEALRPYLSSEEDRKKGKKFARYQLGDLLLHLEKKHGEDWGDVYDEAWERIDKKVEGLSKHIKLEEERRSEDAQSKAALTDWLRAKASFVIEGLKEADKDEFCRCELKLQKWYGDLRGKPFAIEAENSILDISGFSKQYNCAFIWQKDGVKKLNLYLIINYFKGGKLRFKKIKPEAFEANRFYTVINKKSGEIVPMEVNFNFDDPNLIILPLAFGKRQGREFIWNDLLSLETGSLKLANGRVIEKTLYNRRTRQDEPALFVALTFERREVLDSSNIKPMNLIGVDRGENIPAVIALTDPEGCPLSRFKDSLGNPTHILRIGESYKEKQRTIQAKKEVEQRRAGGYSRKYASKAKNLADDMVRNTARDLLYYAVTQDAMLIFENLSRGFGRQGKRTFMAERQYTRMEDWLTAKLAYEGLPSKTYLSKTLAQYTSKTCSNCGFTITSADYDRVLEKLKKTATGWMTTINGKELKVEGQITYYNRYKRQNVVKDLSVELDRLSEESVNNDISSWTKGRSGEALSLLKKRFSHRPVQEKFVCLNCGFETHADEQAALNIARSWLFLRSQEYKKYQTNKTTGNTDKRAFVETWQSFYRKKLKEVWKPAV

SEQ ID NO: 29174 - protein, 979 aa, synthetic construct
  REGION 1..979: note = engineered CasX variant
QEIKGRINKIRRRLVKDSNTKKAGKTGPMKTLLVRVMTPDLRERLENLRKKPENIPQPISNTSRANLNKLLTDYTEMKKAILHVYWEEFQKDPVGLMSRVAQPASKKIDQNKLKPEMDEKGNLTTAGFACSQCGQPLFVYKLEQVSEKGKAYTNYFGRCNVAEHEKLILLAQLKPEKDSDEAVTYSLGKFGQRALDFYSIHVTKESTHPVKPLAQIAGNRYASGPVGKALSDACMGTIASFLSKYQDIIIEHQKVVKGNQKRLESLRELAGKENLEYPSVTLPPQPHTKEGVDAYNEVIARVRMWVNLNLWQKLKLSRDDAKPLLRLKGFPSFPLVERQANEVDWWDMVCNVKKLINEKKEDGKVFWQNLAGYKRQEALRPYLSSEEDRKKGKKFARYQLGDLLLHLEKKHGEDWGKVYGEAWERIDKKVEGLSKHIKLEEERRSEDAQSKAALTDWLRAKASFVIEGLKEADKDEFCRCELKLQKWYGDLRGKPFAIEAENSILDISGFSKQYNCAFIWQKDGVKKLNLYLIINYFKGGKLRFKKIKPEAFEANRFYTVINKKSGEIVPMEVNFNFDDPNLIILPLAFGKRQGREFIWNDLLSLETGSLKLANGRVIEKTLYNRRTRQDEPALFVALTFERREVLDSSNIKPMNLIGVDRGENIPAVIALTDPEGCPLSRFKDSLGNPTHILRIGESYKEKQRTIQAKKEVEQRRAGGYSRKYASKAKNLADDMVRNTARDLLYYAVTQDAMLIFENLSRGFGRQGKRTFMAERQYTRMEDWLTAKLAYEGLPSKTYLSKTLAQYTSKTCSNCGFTITSADYDRVLEKLKKTATGWMTTINGKELKVEGQITYYNRYKRQNVVKDLSVELDRLSEESVNNDISSWTKGRSGEALSLLKKRFSHRPVQEKFVCLNCGFETHADEQAALNIARSWLFLRSQEYKKYQTNKTTGNTDKRAFVETWQSFYRKKLKEVWKPAV

SEQ ID NO: 29175 - protein, 979 aa, synthetic construct
  REGION 1..979: note = engineered CasX variant
QEIKGRINKIRRRLVKDSNTKKAGKTGPMKTLLVRVMTPDLRERLENLRKKPENIPQPISNTSRANLNKLLTDYTEMKKAILHVYWEEFQKDPVGLMSRVAQPASKKIDQNKLKPEMDEKGNLTTAGFACSQCGQPLFVYKLEQVSEKGKAYTNYFGRCNVAEHEKLILLAQLKPEKDSDEAVTYSLGKFGQRALDFYSIHVTKESTHPVKPLAQIAGNRYASGPVGKALSDACMGTIASFLSKYQDIIIEHQKVVKGNQKRLESLRELAGKENLEYPSVTLPPQPHTKEGVDAYNEVIARVRMWVNLNLWQKLKLSRDDAKPLLRLKGFPSFPLVERQANEVDWWDMVCNVKKLINEKKEDGKVFWQNLAGYKRQEALRPYLSSEEDRKKGKKFARYQLGDLLLHLEKKHGEDWGKVYDEAWERIDKKVEGLSKHIKLEEERRSEDAQSKAALTDWLRAKASFVIEGKKEADKDEFCRCELKLQKWYGDLRGKPFAIEAENSILDISGFSKQYNCAFIWQKDGVKKLNLYLIINYFKGGKLRFKKIKPEAFEANRFYTVINKKSGEIVPMEVNFNFDDPNLIILPLAFGKRQGREFIWNDLLSLETGSLKLANGRVIEKTLYNRRTRQDEPALFVALTFERREVLDSSNIKPMNLIGVDRGENIPAVIALTDPEGCPLSRFKDSLGNPTHILRIGESYKEKQRTIQAKKEVEQRRAGGYSRKYASKAKNLADDMVRNTARDLLYYAVTQDAMLIFENLSRGFGRQGKRTFMAERQYTRMEDWLTAKLAYEGLPSKTYLSKTLAQYTSKTCSNCGFTITSADYDRVLEKLKKTATGWMTTINGKELKVEGQITYYNRYKRQNVVKDLSVELDRLSEESVNNDISSWTKGRSGEALSLLKKRFSHRPVQEKFVCLNCGFETHADEQAALNIARSWLFLRSQEYKKYQTNKTTGNTDKRAFVETWQSFYRKKLKEVWKPAV

SEQ ID NO: 29176 - protein, 979 aa, synthetic construct
  REGION 1..979: note = engineered CasX variant
QEIKGRINKIRRRLVKDSNTKKAGKTGPMKTLLVRVMTPDLRERLENLRKKPENIPQPISNTSRANLNKLLTDYTEMKKAILHVYWEEFQKDPVGLMSRVAQPASKKIDQNKLKPEMDEKGNLTTAGFACSQCGQPLFVYKLEQVSEKGKAYTNYFGRCNVAEHEKLILLAQLKPEKDSDEAVTYSLGKFGQRALDFYSIHVTKESTHPVKPLAQIAGNRYASGPVGKALSDACMGTIASFLSKYQDIIIEHQKVVKGNQKRLESLRELAGKENLEYPSVTLPPQPHTKEGVDAYNEVIARVRMWVNLNLWQKLKLSRDDAKPLLRLKGFPSFPLVERQANEVDWWDMVCNVKKLINEKKEDGKVFWQNLAGYKRQEALRPYLSSEEDRKKGKKFARYQLGDLLLHLEKKHGEDWGKVYDEAWERIDKKVEGLSKHIKLEEERRSEDAQSKAALTDWLRAKASFVIEGSKEADKDEFCRCELKLQKWYGDLRGKPFAIEAENSILDISGFSKQYNCAFIWQKDGVKKLNLYLIINYFKGGKLRFKKIKPEAFEANRFYTVINKKSGEIVPMEVNFNFDDPNLIILPLAFGKRQGREFIWNDLLSLETGSLKLANGRVIEKTLYNRRTRQDEPALFVALTFERREVLDSSNIKPMNLIGVDRGENIPAVIALTDPEGCPLSRFKDSLGNPTHILRIGESYKEKQRTIQAKKEVEQRRAGGYSRKYASKAKNLADDMVRNTARDLLYYAVTQDAMLIFENLSRGFGRQGKRTFMAERQYTRMEDWLTAKLAYEGLPSKTYLSKTLAQYTSKTCSNCGFTITSADYDRVLEKLKKTATGWMTTINGKELKVEGQITYYNRYKRQNVVKDLSVELDRLSEESVNNDISSWTKGRSGEALSLLKKRFSHRPVQEKFVCLNCGFETHADEQAALNIARSWLFLRSQEYKKYQTNKTTGNTDKRAFVETWQSFYRKKLKEVWKPAV

SEQ ID NO: 29177 - protein, 980 aa, synthetic construct
  REGION 1..980: note = engineered CasX variant
QEIKGRINKIRRRLVKDSNTKKAGKTGPMKTLLVRVMTPDLRERLENLRKKPENIPQPISNTSRANLNKLLTDYTEMKKAILHVYWEEFQKDPVGLMSRVAQPASKKIDQNKLKPEMDEKGNLTTAGFACSQCGQPLFVYKLEQVSEKGKAYTNYFGRCNVAEHEKLILLAQLKPEKDSDEAVTYSLGKFGQRALDFYSIHVTKESTHPVKPLAQIAGNRYASGPVGKALSDACMGTIASFLSKYQDIIIEHQKVVKGNQKRLESLRELAGKENLEYPSVTLPPQPHTKEGVDAYNEVIARVRMWVNLNLWQKLKLSRDDAKPLLRLKGFPSFPLVERQANEVDWWDMVCNVKKLINEKKEDGKVFWQNLAGYKRQEALRPYLSSEEDRKKGKKFARYQLGDLLLHLEKKHGEDWGKVYDEAWERIDKKVEGLSKHIKLEEERRSEDAQSKAALTDWLRAKASFVIEGLKEADDKDEFCRCELKLQKWYGDLRGKPFAIEAENSILDISGFSKQYNCAFIWQKDGVKKLNLYLIINYFKGGKLRFKKIKPEAFEANRFYTVINKKSGEIVPMEVNFNFDDPNLIILPLAFGKRQGREFIWNDLLSLETGSLKLANGRVIEKTLYNRRTRQDEPALFVALTFERREVLDSSNIKPMNLIGVDRGENIPAVIALTDPEGCPLSRFKDSLGNPTHILRIGESYKEKQRTIQAKKEVEQRRAGGYSRKYASKAKNLADDMVRNTARDLLYYAVTQDAMLIFENLSRGFGRQGKRTFMAERQYTRMEDWLTAKLAYEGLPSKTYLSKTLAQYTSKTCSNCGFTITSADYDRVLEKLKKTATGWMTTINGKELKVEGQITYYNRYKRQNVVKDLSVELDRLSEESVNNDISSWTKGRSGEALSLLKKRFSHRPVQEKFVCLNCGFETHADEQAALNIARSWLFLRSQEYKKYQTNKTTGNTDKRAFVETWQSFYRKKLKEVWKPAV

SEQ ID NO: 29178 - protein, 980 aa, synthetic construct
  REGION 1..980: note = engineered CasX variant
QEIKGRINKIRRRLVKDSNTKKAGKTGPMKTLLVRVMTPDLRERLENLRKKPENIPQPISNTSRANLNKLLTDYTEMKKAILHVYWEEFQKDPVGLMSRVAQPASKKIDQNKLKPEMDEKGNLTTAGFACSQCGQPLFVYKLEQVSEKGKAYTNYFGRCNVAEHEKLILLAQLKPEKDSDEAVTYSLGKFGQRALDFYSIHVTKESTHPVKPLAQIAGNRYASGPVGKALSDACMGTIASFLSKYQDIIIEHQKVVKGNQKRLESLRELAGKENLEYPSVTLPPQPHTKEGVDAYNEVIARVRMWVNLNLWQKLKLSRDDAKPLLRLKGFPSFPLVERQANEVDWWDMVCNVKKLINEKKEDGKVFWQNLAGYKRQEALRPYLSSEEDRKKGKKFARYQLGDLLLHLEKKHGEDWGKVYDEAWERIDKKVEGLSKHIKLEEERRSEDAQSKAALTDWLRAKASFVIEGLKEADKDEFCRCELKLQKWYGDLRGKPFAIEAENSILDISGFSKQYNCAFIWQKDGVKKLNLYLIINYFKGGKLRFKKIKPEAFEANRFYTVINKKSGEIVPMEVNFNFDDPNLIILPLAFGKRQGREFIWNDLLSLETGSLKLANGRVIEKTLYNRRTRQDEPALFVALTFERREVLDSSNIKPMNLIGVDRGENIPAVIALTDPEGCPLSRFKDSLGNPTHILRIGESYKEKQRTIQAKKEVEQRRAGGYSRKYASKAKNLADDMVRNTARDLLYYAVTQDAMLIFENLSRGFGRQGKRTFMAERQYTRMEDWLTAKLAYEGLPSKTYLSKTLAQYTSKTCSNCGFTITSADYDRVLEKLKKTATGWMTTINGKELKVEGQITYYNRYKRQNVVKDLSVELDRLSEESVNNDISSWTKGRSGNEALSLLKKRFSHRPVQEKFVCLNCGFETHADEQAALNIARSWLFLRSQEYKKYQTNKTTGNTDKRAFVETWQSFYRKKLKEVWKPAV

SEQ ID NO: 29179 - protein, 979 aa, synthetic construct
  REGION 1..979: note = engineered CasX variant
QEIKGRINKIRRRLVKDSNTKKAGKTGPMKTLLVRVMTPDLRERLENLRKKPENIPQPISNTSRANLNKLLTDYTEMKKAILHVYWEEFQKDPVGLMSRVAQPASKKIDQNKLKPEMDEKGNLTTAGFACSQCGQPLFVYKLEQVSEKGKAYTNYFGRCNVAEHEKLILLAQLKPEKDSDEAVTYSLGKFGQRALDFYSIHVTKESTHPVKPLAQIAGNRYASGPVGKALSDACMGTIASFLSKYQDIIIEHQKVVKGNQKRLESLRELAGKENLEYPSVTLPPQPHTKEGVDAYNEVIARVRMWVNLNLWQKLKLSRDDAKPLLRLKGFPSFPLVERQANEVDWWDMVCNVKKLINEKKEDGKVFWQNLAGYKRQEALRPYLSSEEDRQKGKKFARYQLGDLLLHLEKKHGEDWGKVYDEAWERIDKKVEGLSKHIKLEEERRSEDAQSKAALTDWLRAKASFVIEGLKEADKDEFCRCELKLQKWYGDLRGKPFAIEAENSILDISGFSKQYNCAFIWQKDGVKKLNLYLIINYFKGGKLRFKKIKPEAFEANRFYTVINKKSGEIVPMEVNFNFDDPNLIILPLAFGKRQGREFIWNDLLSLETGSLKLANGRVIEKTLYNRRTRQDEPALFVALTFERREVLDSSNIKPMNLIGVDRGENIPAVIALTDPEGCPLSRFKDSLGNPTHILRIGESYKEKQRTIQAKKEVEQRRAGGYSRKYASKAKNLADDMVRNTARDLLYYAVTQDAMLIFENLSRGFGRQGKRTFMAERQYTRMEDWLTAKLAYEGLPSKTYLSKTLAQYTSKTCSNCGFTITSADYDRVLEKLKKTATGWMTTINGKELKVEGQITYYNRYKRQNVVKDLSVELDRLSEESVNNDISSWTKGRSGEALSLLKKRFSHRPVQEKFVCLNCGFETHADEQAALNIARSWLFLRSQEYKKYQTNKTTGNTDKRAFVETWQSFYRKKLKEVWKPAV

SEQ ID NO: 29180 - protein, 979 aa, synthetic construct
  REGION 1..979: note = engineered CasX variant
QEIKGRINKIRRRLVKDSNTKKAGKTGPMKTLLVRVMTPDLRERLENLRKKPENIPQPISNTSRANLNKLLTDYTEMKKAILHVYWEEFQKDPVGLMSRVAQPASKKIDQNKLKPEMDEKGNLTTAGFACSQCGQPLFVYKLEQVSEKGKAYTNYFGRCNVAEHEKLILLAQLKPEKDSDEAVTYSLGKFGQRALDFYSIHVTKESTHPVKPLAQIAGNRYASGPVGKALSDACMGTIASFLSKYQDIIIEHQKVVKGNQKRLESLRELAGKENLEYPSVTLPPQPHTKEGVDAYNEVIARVRMWVNLNLWQKLKLSRDDAKPLLRLKGFPSFPLVERQANEVDWWDMVCNVKKLINEKKEDGKVFWQNLAGYKRQEALRPYLSSEEDRKKGKKFARYQLGDLLLHLEKKHGEDWGKVYDEAWERIDKKVEGLSKHIKLEEERRSEDAQSKAALTDWLRAKASFVIEGLKEADKDEFCRCELKLQKWYGDLRGKPFAIEAENSILDISGFSKQYNCAFIWQKDGVKKLNLYLIINYFKGGKLRFKKIKPEAFEANRFYTVINKKSGEIVPMEVNFNFDDPNLIILPLAFGKRQGREFIWNDLLSLETGSLKLANGRVIEKTLYNRRTRQDEPALFVALTFERREVLDSSNIKPMNLIGVDRGENIPAVIALTDPEGCPLSRFKDSLGNPTHILRIGESYKEKQRTIQAKKEVEQRRAGGYSRKYASKAKNLADDMVRNTARDLLYYAVTQDAMLIFENLSRGFGRQGKRTFMAERQYTRMEDWLTAKLAYEGLPSQTYLSKTLAQYTSKTCSNCGFTITSADYDRVLEKLKKTATGWMTTINGKELKVEGQITYYNRYKRQNVVKDLSVELDRLSEESVNNDISSWTKGRSGEALSLLKKRFSHRPVQEKFVCLNCGFETHADEQAALNIARSWLFLRSQEYKKYQTNKTTGNTDKRAFVETWQSFYRKKLKEVWKPAV

SEQ ID NO: 29181 - protein, 979 aa, synthetic construct
  REGION 1..979: note = engineered CasX variant
QEIKGRINKIRRRLVKDSNTKKAGKTGPMKTLLVRVMTPDLRERLENLRKKPENIPQPISNTSRANLNKLLTDYTEMKKAILHVYWEEFQKDPVGLMSRVAQPASKKIDQNKLKPEMDEKGNLTTAGFACSQCGQPLFVYKLEQVSEKGKAYTNYFGRCNVAEHEKLILLAQLKPEKDSDEAVTYSLGKFGQRALDFYSIHVTKESTHPVKPLAQIAGNRYASGPVGKALSDACMGTIASFLSKYQDIIIEHQKVVKGNQKRLESLRELAGKENLEYPSVTLPPQPHTKEGVDAYNEVIARVRMWVNLNLWQKLKLSRDDAKPLLRLKGFPSFPLVERQANEVDWWDMVCNVKKLINEKKEDGKVFWQNLAGYKRQEALRPYLSSEEDRKKGKKFARYQLGDLLLHLEKKHGEDWGKVYDEAWERIDKKVEGLSKHIKLEEERRSEDAQSKAALTDWLRAKASFVIEGLKEADKDEFCRCELKLQKWYGDLRGKPFAIEAENSILDISGFSKQYNCAFIWQKDGVKKLNLYLIINYFKGGKLRFKKIKPEAFEANRFYTVINKKSGEIVPMEVNFNFDDPNLIILPLAFGKRQGREFIWNDLLSLETGSLKLANGRVIEKTLYNRRTRQDEPALFVALTFERREVLDSSNIKPMNLIGVDRGENIPAVIALTDPEGCPLSRFKDSLGNPTHILRIGESYKEKQRTIQAKKEVEQRRAGGYSRKYASKAKNLADDMVRNTARDLLYYAVTQDAMLIFENLSRGFGRQGKRTFMAERQYTRMEDWLTAKLAYNGLPSKTYLSKTLAQYTSKTCSNCGFTITSADYDRVLEKLKKTATGWMTTINGKELKVEGQITYYNRYKRQNVVKDLSVELDRLSEESVNNDISSWTKGRSGEALSLLKKRFSHRPVQEKFVCLNCGFETHADEQAALNIARSWLFLRSQEYKKYQTNKTTGNTDKRAFVETWQSFYRKKLKEVWKPAV

SEQ ID NO: 29182 - protein, 979 aa, synthetic construct
  REGION 1..979: note = engineered CasX variant
QEIKGRINKIRRRLVKDSNTKKAGKTGPMKTLLVRVMTPDLRERLENLRKKPENIPQPISNTSRANLNKLLTDYTEMKKAILHVYWEEFQKDPVGLMSRVAQPASKKIDQNKLKPEMDEKGNLTTAGFACSQCGQPLFVYKLEQVSEKGKAYTNYFGRCNVAEHEKLIQLAQLKPEKDSDEAVTYSLGKFGQRALDFYSIHVTKESTHPVKPLAQIAGNRYASGPVGKALSDACMGTIASFLSKYQDIIIEHQKVVKGNQKRLESLRELAGKENLEYPSVTLPPQPHTKEGVDAYNEVIARVRMWVNLNLWQKLKLSRDDAKPLLRLKGFPSFPLVERQANEVDWWDMVCNVKKLINEKKEDGKVFWQNLAGYKRQEALRPYLSSEEDRKKGKKFARYQLGDLLLHLEKKHGEDWGKVYDEAWERIDKKVEGLSKHIKLEEERRSEDAQSKAALTDWLRAKASFVIEGLKEADKDEFCRCELKLQKWYGDLRGKPFAIEAENSILDISGFSKQYNCAFIWQKDGVKKLNLYLIINYFKGGKLRFKKIKPEAFEANRFYTVINKKSGEIVPMEVNFNFDDPNLIILPLAFGKRQGREFIWNDLLSLETGSLKLANGRVIEKTLYNRRTRQDEPALFVALTFERREVLDSSNIKPMNLIGVDRGENIPAVIALTDPEGCPLSRFKDSLGNPTHILRIGESYKEKQRTIQAKKEVEQRRAGGYSRKYASKAKNLADDMVRNTARDLLYYAVTQDAMLIFENLSRGFGRQGKRTFMAERQYTRMEDWLTAKLAYEGLPSKTYLSKTLAQYTSKTCSNCGFTITSADYDRVLEKLKKTATGWMTTINGKELKVEGQITYYNRYKRQNVVKDLSVELDRLSEESVNNDISSWTKGRSGEALSLLKKRFSHRPVQEKFVCLNCGFETHADEQAALNIARSWLFLRSQEYKKYQTNKTTGNTDKRAFVETWQSFYRKKLKEVWKPAV

SEQ ID NO: 29183 - protein, 979 aa, synthetic construct
  REGION 1..979: note = engineered CasX variant
QEIKGRINKIRRRLVKDSNTKKAGKTGPMKTLLVRVMTPDLRERLENLRKKPENIPQPISNTSRANLNKLLTDYTEMKKAILHVYWEEFQKDPVGLMSRVAQPASKKIDQNKLKPEMDEKGNLTTAGFACSQCGQPLFVYKLEQVSEKGKAYTNYFGRCNVAEHEKLILLAQLKPEKDSDEAVTYSLGKFGQRALDFYSIHVTKESTHPVKPLAQIAGNRYASGPVGKALSDACMGTIASFLSKYQDIIIEHQKVVKGNQKRLESLRELAGKENLEYPSVTLPPQPHTKEGVDAYNEVIARVRMWVNLNLWQKLKLSRDDAKPLLRLKGFPSFPLVERQANEVDWWDMVCNVKKLINEKKEDGKVFWQNLAIYKRQEALRPYLSSEEDRKKGKKFARYQLGDLLLHLEKKHGEDWGKVYDEAWERIDKKVEGLSKHIKLEEERRSEDAQSKAALTDWLRAKASFVIEGLKEADKDEFCRCELKLQKWYGDLRGKPFAIEAENSILDISGFSKQYNCAFIWQKDGVKKLNLYLIINYFKGGKLRFKKIKPEAFEANRFYTVINKKSGEIVPMEVNFNFDDPNLIILPLAFGKRQGREFIWNDLLSLETGSLKLANGRVIEKTLYNRRTRQDEPALFVALTFERREVLDSSNIKPMNLIGVDRGENIPAVIALTDPEGCPLSRFKDSLGNPTHILRIGESYKEKQRTIQAKKEVEQRRAGGYSRKYASKAKNLADDMVRNTARDLLYYAVTQDAMLIFENLSRGFGRQGKRTFMAERQYTRMEDWLTAKLAYEGLPSKTYLSKTLAQYTSKTCSNCGFTITSADYDRVLEKLKKTATGWMTTINGKELKVEGQITYYNRYKRQNVVKDLSVELDRLSEESVNNDISSWTKGRSGEALSLLKKRFSHRPVQEKFVCLNCGFETHADEQAALNIARSWLFLRSQEYKKYQTNKTTGNTDKRAFVETWQSFYRKKLKEVWKPAV

SEQ ID NO: 29184 - protein, 979 aa, synthetic construct
  REGION 1..979: note = engineered CasX variant
QEIKGRINKIRRRLVKDSNTKKAGKTGPMKTLLVRVMTPDLRERLENLRKKPENIPQPISNTSRANLNKLLTDYTEMKKAILHVYWEEFQKDPVGLMSRVAQPASKKIDQNKLKPEMDEKGNLTTAGFACSQCGQPLFVYKLEQVSEKGKAYTNYFGRCNVAEHEKLILLAQLKPEKDSDEAVTYSLGKFGQRALDFYSIHVTKESTHPVKPLAQIAGNRYASGPVGKALSDACMGTIASFLSKYQDIIIEHQKVVKGNQKRLESLRELAGKENLEYPSVTLPPQPHTKEGVDAYNEVIARVRMWVNLNLWQKLKLSRDDAKPLLRLKGFPSFPLVERQANEVDWWDMVCNVKKLINEKKEDGKVFWQNLAGYKRQEALRPYLSSEEDREKGKKFARYQLGDLLLHLEKKHGEDWGKVYDEAWERIDKKVEGLSKHIKLEEERRSEDAQSKAALTDWLRAKASFVIEGLKEADKDEFCRCELKLQKWYGDLRGKPFAIEAENSILDISGFSKQYNCAFIWQKDGVKKLNLYLIINYFKGGKLRFKKIKPEAFEANRFYTVINKKSGEIVPMEVNFNFDDPNLIILPLAFGKRQGREFIWNDLLSLETGSLKLANGRVIEKTLYNRRTRQDEPALFVALTFERREVLDSSNIKPMNLIGVDRGENIPAVIALTDPEGCPLSRFKDSLGNPTHILRIGESYKEKQRTIQAKKEVEQRRAGGYSRKYASKAKNLADDMVRNTARDLLYYAVTQDAMLIFENLSRGFGRQGKRTFMAERQYTRMEDWLTAKLAYEGLPSKTYLSKTLAQYTSKTCSNCGFTITSADYDRVLEKLKKTATGWMTTINGKELKVEGQITYYNRYKRQNVVKDLSVELDRLSEESVNNDISSWTKGRSGEALSLLKKRFSHRPVQEKFVCLNCGFETHADEQAALNIARSWLFLRSQEYKKYQTNKTTGNTDKRAFVETWQSFYRKKLKEVWKPAV

SEQ ID NO: 29185 - protein, 979 aa, synthetic construct
  REGION 1..979: note = engineered CasX variant
QEIKGRINKIRRRLVKDSNTKKAGKTGPMKTLLVRVMTPDLRERLENLRKKPENIPQPISNTSRANLNKLLTDYTEMKKAILHVYWEEFQKDPVGLMSRVAQPASKKIDQNKLKPEMDEKGNLTTAGFACSQCGQPLFVYKLEQVSEKGKAYTNYFGRCNVAEHEKLILLAQLKPEKDSDEAVTYSLGKFGQRALDFYSIHVTKESTHPVKPLAQIAGNRYASGPVGKALSDACMGTIASFLSKYQDIIIEHQKVVKGNQKRLESLRELAGKENLEYPSVTLPPQPHTKEGVDAYNEVIARVRMWVNLNLWQKLKLSRDDAKPLLRLKGFPSFPLVERQANEVDWWDMVCNVKKLINEKKEDGKVFWQNLAGYKRQEALRPYLSSEEDRKKGKKFARYQLGDLLLHLEKKHGEDWGKVYDEAWERIDKKVEGLSKHIKLEEERRSEDAQSKAALTDWLRAKASFVIEGLKEADKDEFCRCELKLQKWYGDLRGKPFAIEAENSILDISGFSKQYNCAFIWQKDGVKKLNLYLIINYFKGGKLRFKKIKPEAFEANRFYTVINKKSGEIVIMEVNFNFDDPNLIILPLAFGKRQGREFIWNDLLSLETGSLKLANGRVIEKTLYNRRTRQDEPALFVALTFERREVLDSSNIKPMNLIGVDRGENIPAVIALTDPEGCPLSRFKDSLGNPTHILRIGESYKEKQRTIQAKKEVEQRRAGGYSRKYASKAKNLADDMVRNTARDLLYYAVTQDAMLIFENLSRGFGRQGKRTFMAERQYTRMEDWLTAKLAYEGLPSKTYLSKTLAQYTSKTCSNCGFTITSADYDRVLEKLKKTATGWMTTINGKELKVEGQITYYNRYKRQNVVKDLSVELDRLSEESVNNDISSWTKGRSGEALSLLKKRFSHRPVQEKFVCLNCGFETHADEQAALNIARSWLFLRSQEYKKYQTNKTTGNTDKRAFVETWQSFYRKKLKEVWKPAV

SEQ ID NO: 29186 - protein, 978 aa, synthetic construct
  REGION 1..978: note = engineered CasX variant
QEIKRANKIRRRLVKDSNTKKAGKTGPMKTLLVRVMTPDLRERLENLRKKPENIPQPISNTSRANLNKLLTDYTEMKKAILHVYWEEFQKDPVGLMSRVAQPASKKIDQNKLKPEMDEKGNLTTAGFACSQCGQPLFVYKLEQVSEKGKAYTNYFGRCNVAEHEKLILLAQLKPEKDSDEAVTYSLGKFGQRALDFYSIHVTKESTHPVKPLAQIAGNRYASGPVGKALSGACMGTIASFLSKYQDIIIEHQKVVKGNQKRLESLRELAGKENLEYPSVTLPPQPHTKEGVDAYNEVIARVRMWVNLNLWQKLKLSRDDAKPLLRLKGFPSFPLVERQANEVDWWDMVCNVKKLINEKKEDGKVFWQNLAGYKRQEALRPYLSSEEDRKKGKKFARYQLGDLLLHLEKKHGEDWGKVYDEAWERIDKKVEGLSKHIKLEEERRSEDAQSKAALTDWLRAKASFVIEGLKEADKDEFCRCELKLQKWYGDLRGKPFAIEAENSILDISGFSKQYNCAFIWQKDGVKKLNLYLIINYFKGGKLRFKKIKPEAFEANRFYTVINKKSGEIVPMEVNFNFDDPNLIILPLAFGKRQGREFIWNDLLSLETGSLKLANGRVIEKTLYNRRTRQDEPALFVALTFERREVLDSSNIKPMNLIGVDRGENIPAVIALTDPEGCPLSRFKDSLGNPTHILRIGESYKEKQRTIQAKKEVEQRRAGGYSRKYASKAKNLADDMVRNTARDLLYYAVTQDAMLIFENLSRGFGRQGKRTFMAERQYTRMEDWLTAKLAYEGLPSKTYLSKTLAQYTSKTCSNCGFTITSADYDRVLEKLKKTATGWMTTINGKELKVEGQITYYNRYKRQNVVKDLSVELDRLSEESVNNDISSWTKGRSGEALSLLKKRFSHRPVQEKFVCLNCGFETHADEQAALNIARSWLFLRSQEYKKYQTNKTTGNTDKRAFVETWQSFYRKKLKEVWKPAV

SEQ ID NO: 29187 - protein, 978 aa, synthetic construct
  REGION 1..978: note = engineered CasX variant
QEIKRANKIRRRLVKDSNTKKAGKTGPMKTLLVRVMTPDLRERLENLRKKPENIPQPISNTSRANLNKLLTDYTEMKKAILHVYWEEFQKDPVGLMSRVAQPASKKIDQNKLKPEMDEKGNLTTAGFACSQCGQPLFVYKLEQVSEKGKAYTNYFGRCNVAEHEKLILLAQLKPEKDSDEAVTYSLGKFGQRALDFYSIHVTKESTHPVKPLAQIAGNRYASGPVGKALSDACMGTIASFLSKYQDIIIEHQKVVKGNQKRLESLRELAGKENLEYPSVTLPPQPHTKEGVDAYNEVIARVRMWVNLNLWQKLKLSRDDAKPLLRLKNFPSFPLVERQANEVDWWDMVCNVKKLINEKKEDGKVFWQNLAGYKRQEALRPYLSSEEDRKKGKKFARYQLGDLLLHLEKKHGEDWGKVYDEAWERIDKKVEGLSKHIKLEEERRSEDAQSKAALTDWLRAKASFVIEGLKEADKDEFCRCELKLQKWYGDLRGKPFAIEAENSILDISGFSKQYNCAFIWQKDGVKKLNLYLIINYFKGGKLRFKKIKPEAFEANRFYTVINKKSGEIVPMEVNFNFDDPNLIILPLAFGKRQGREFIWNDLLSLETGSLKLANGRVIEKTLYNRRTRQDEPALFVALTFERREVLDSSNIKPMNLIGVDRGENIPAVIALTDPEGCPLSRFKDSLGNPTHILRIGESYKEKQRTIQAKKEVEQRRAGGYSRKYASKAKNLADDMVRNTARDLLYYAVTQDAMLIFENLSRGFGRQGKRTFMAERQYTRMEDWLTAKLAYEGLPSKTYLSKTLAQYTSKTCSNCGFTITSADYDRVLEKLKKTATGWMTTINGKELKVEGQITYYNRYKRQNVVKDLSVELDRLSEESVNNDISSWTKGRSGEALSLLKKRFSHRPVQEKFVCLNCGFETHADEQAALNIARSWLFLRSQEYKKYQTNKTTGNTDKRAFVETWQSFYRKKLKEVWKPAV

SEQ ID NO: 29188 - protein, 978 aa, synthetic construct
  REGION 1..978: note = engineered CasX variant
QEIKRANKIRRRLVKDSNTKKAGKTGPMKTLLVRVMTPDLRERLENLRKKPENIPQPISNTSRANLNKLLTDYTEMKKAILHVYWEEFQKDPVGLMSRVAQPASKKIDQNKLKPEMDEKGNLTTAGFACSQCGQPLFVYKLEQVSEKGKAYTNYFGRCNVAEHEKLILLAQLKPEKDSDEAVTYSLGKFGQRALDFYSIHVTKESTHPVKPLAQIAGNRYASGPVGKALSDACMGTIASFLSKYQDIIIEHQKVVKGNQKRLESLRELAGKENLEYPSVTLPPQPHTKEGVDAYNEVIARVRMWVNLNLWQKLKLSRDDAKPLLRLKGFPSFPLVERQANEVDWWDMVCNVKKLINEKKEDGKVFWQNLAGYKRQEALRPYLSSEEDRKKGKKFARYQLGDLLNHLEKKHGEDWGKVYDEAWERIDKKVEGLSKHIKLEEERRSEDAQSKAALTDWLRAKASFVIEGLKEADKDEFCRCELKLQKWYGDLRGKPFAIEAENSILDISGFSKQYNCAFIWQKDGVKKLNLYLIINYFKGGKLRFKKIKPEAFEANRFYTVINKKSGEIVPMEVNFNFDDPNLIILPLAFGKRQGREFIWNDLLSLETGSLKLANGRVIEKTLYNRRTRQDEPALFVALTFERREVLDSSNIKPMNLIGVDRGENIPAVIALTDPEGCPLSRFKDSLGNPTHILRIGESYKEKQRTIQAKKEVEQRRAGGYSRKYASKAKNLADDMVRNTARDLLYYAVTQDAMLIFENLSRGFGRQGKRTFMAERQYTRMEDWLTAKLAYEGLPSKTYLSKTLAQYTSKTCSNCGFTITSADYDRVLEKLKKTATGWMTTINGKELKVEGQITYYNRYKRQNVVKDLSVELDRLSEESVNNDISSWTKGRSGEALSLLKKRFSHRPVQEKFVCLNCGFETHADEQAALNIARSWLFLRSQEYKKYQTNKTTGNTDKRAFVETWQSFYRKKLKEVWKPAV

SEQ ID NO: 29189 - protein, 978 aa, synthetic construct
  REGION 1..978: note = engineered CasX variant
QEIKRANKIRRRLVKDSNTKKAGKTGPMKTLLVRVMTPDLRERLENLRKKPENIPQPISNTSRANLNKLLTDYTEMKKAILHVYWEEFQKDPVGLMSRVAQPASKKIDQNKLKPEMDEKGNLTTAGFACSQCGQPLFVYKLEQVSEKGKAYTNYFGRCNVAEHEKLILLAQLKPEKDSDEAVTYSLGKFGQRALDFYSIHVTKESTHPVKPLAQIAGNRYASGPVGKALSDACMGTIASFLSKYQDIIIEHQKVVKGNQKRLESLRELAGKENLEYPSVTLPPQPHTKEGVDAYNEVIARVRMWVNLNLWQKLKLSRDDAKPLLRLKGFPSFPLVERQANEVDWWDMVCNVKKLINEKKEDGKVFWQNLAGYKRQEALRPYLSSEEDRKKGKKFARYQLGDLLWHLEKKHGEDWGKVYDEAWERIDKKVEGLSKHIKLEEERRSEDAQSKAALTDWLRAKASFVIEGLKEADKDEFCRCELKLQKWYGDLRGKPFAIEAENSILDISGFSKQYNCAFIWQKDGVKKLNLYLIINYFKGGKLRFKKIKPEAFEANRFYTVINKKSGEIVPMEVNFNFDDPNLIILPLAFGKRQGREFIWNDLLSLETGSLKLANGRVIEKTLYNRRTRQDEPALFVALTFERREVLDSSNIKPMNLIGVDRGENIPAVIALTDPEGCPLSRFKDSLGNPTHILRIGESYKEKQRTIQAKKEVEQRRAGGYSRKYASKAKNLADDMVRNTARDLLYYAVTQDAMLIFENLSRGFGRQGKRTFMAERQYTRMEDWLTAKLAYEGLPSKTYLSKTLAQYTSKTCSNCGFTITSADYDRVLEKLKKTATGWMTTINGKELKVEGQITYYNRYKRQNVVKDLSVELDRLSEESVNNDISSWTKGRSGEALSLLKKRFSHRPVQEKFVCLNCGFETHADEQAALNIARSWLFLRSQEYKKYQTNKTTGNTDKRAFVETWQSFYRKKLKEVWKPAV

SEQ ID NO: 29190 - protein, 978 aa, synthetic construct
  REGION 1..978: note = engineered CasX variant
QEIKRANKIRRRLVKDSNTKKAGKTGPMKTLLVRVMTPDLRERLENLRKKPENIPQPISNTSRANLNKLLTDYTEMKKAILHVYWEEFQKDPVGLMSRVAQPASKKIDQNKLKPEMDEKGNLTTAGFACSQCGQPLFVYKLEQVSEKGKAYTNYFGRCNVAEHEKLILLAQLKPEKDSDEAVTYSLGKFGQRALDFYSIHVTKESTHPVKPLAQIAGNRYASGPVGKALSDACMGTIASFLSKYQDIIIEHQKVVKGNQKRLESLRELAGKENLEYPSVTLPPQPHTKEGVDAYNEVIARVRMWVNLNLWQKLKLSRDDAKPLLRLKGFPSFPLVERQANEVDWWDMVCNVKKLINEKKEDGKVFWQNLAGYKRQEALRPYLSSEEDRKKGKKFARYQLGDLLLHLYKKHGEDWGKVYDEAWERIDKKVEGLSKHIKLEEERRSEDAQSKAALTDWLRAKASFVIEGLKEADKDEFCRCELKLQKWYGDLRGKPFAIEAENSILDISGFSKQYNCAFIWQKDGVKKLNLYLIINYFKGGKLRFKKIKPEAFEANRFYTVINKKSGEIVPMEVNFNFDDPNLIILPLAFGKRQGREFIWNDLLSLETGSLKLANGRVIEKTLYNRRTRQDEPALFVALTFERREVLDSSNIKPMNLIGVDRGENIPAVIALTDPEGCPLSRFKDSLGNPTHILRIGESYKEKQRTIQAKKEVEQRRAGGYSRKYASKAKNLADDMVRNTARDLLYYAVTQDAMLIFENLSRGFGRQGKRTFMAERQYTRMEDWLTAKLAYEGLPSKTYLSKTLAQYTSKTCSNCGFTITSADYDRVLEKLKKTATGWMTTINGKELKVEGQITYYNRYKRQNVVKDLSVELDRLSEESVNNDISSWTKGRSGEALSLLKKRFSHRPVQEKFVCLNCGFETHADEQAALNIARSWLFLRSQEYKKYQTNKTTGNTDKRAFVETWQSFYRKKLKEVWKPAV

SEQ ID NO: 29191 - protein, 978 aa, synthetic construct
  REGION 1..978: note = engineered CasX variant
QEIKRANKIRRRLVKDSNTKKAGKTGPMKTLLVRVMTPDLRERLENLRKKPENIPQPISNTSRANLNKLLTDYTEMKKAILHVYWEEFQKDPVGLMSRVAQPASKKIDQNKLKPEMDEKGNLTTAGFACSQCGQPLFVYKLEQVSEKGKAYTNYFGRCNVAEHEKLILLAQLKPEKDSDEAVTYSLGKFGQRALDFYSIHVTKESTHPVKPLAQIAGNRYASGPVGKALSDACMGTIASFLSKYQDIIIEHQKVVKGNQKRLESLRELAGKENLEYPSVTLPPQPHTKEGVDAYNEVIARVRMWVNLNLWQKLKLSRDDAKPLLRLKGFPSFPLVERQANEVDWWDMVCNVKKLINEKKEDGKVFWQNLAGYKRQEALRPYLSSEEDRKKGKKFARYQLGDLLLHLEKKHPEDWGKVYDEAWERIDKKVEGLSKHIKLEEERRSEDAQSKAALTDWLRAKASFVIEGLKEADKDEFCRCELKLQKWYGDLRGKPFAIEAENSILDISGFSKQYNCAFIWQKDGVKKLNLYLIINYFKGGKLRFKKIKPEAFEANRFYTVINKKSGEIVPMEVNFNFDDPNLIILPLAFGKRQGREFIWNDLLSLETGSLKLANGRVIEKTLYNRRTRQDEPALFVALTFERREVLDSSNIKPMNLIGVDRGENIPAVIALTDPEGCPLSRFKDSLGNPTHILRIGESYKEKQRTIQAKKEVEQRRAGGYSRKYASKAKNLADDMVRNTARDLLYYAVTQDAMLIFENLSRGFGRQGKRTFMAERQYTRMEDWLTAKLAYEGLPSKTYLSKTLAQYTSKTCSNCGFTITSADYDRVLEKLKKTATGWMTTINGKELKVEGQITYYNRYKRQNVVKDLSVELDRLSEESVNNDISSWTKGRSGEALSLLKKRFSHRPVQEKFVCLNCGFETHADEQAALNIARSWLFLRSQEYKKYQTNKTTGNTDKRAFVETWQSFYRKKLKEVWKPAV

SEQ ID NO: 29192 - protein, 979 aa, synthetic construct
  REGION 1..979: note = engineered CasX variant
QEIKRANKIRRRLVKDSNTKKAGKTGPMKTLLVRVMTPDLRERLENLRKKPENIPQPISNTSRANLNKLLTDYTEMKKAILHVYWEEFQKDPVGLMSRVAQPASKKIDQNKLKPEMDEKGNLTTAGFACSQCGQPLFVYKLEQVSEKGKAYTNYFGRCNVAEHEKLILLAQLKPEKDSDEAVTYSLGKFGQRALDFYSIHVTKESTHPVKPLAQIAGNRYASGPVGKALSDACMGTIASFLSKYQDIIIEHQKVVKGNQKRLESLRELAGKENLEYPSVTLPPQPHTKEGVDAYNEVIARVRMWVNLNLWQKLKLSRDDAKPLLRLKGFPSFPLVERQANEVDWWDMVCNVKKLINEKKEDGKVFWQNLAGYKRQEALRPYLSSEEDRKKGKKFARYQLGDLLLHLEKKHGERDWGKVYDEAWERIDKKVEGLSKHIKLEEERRSEDAQSKAALTDWLRAKASFVIEGLKEADKDEFCRCELKLQKWYGDLRGKPFAIEAENSILDISGFSKQYNCAFIWQKDGVKKLNLYLIINYFKGGKLRFKKIKPEAFEANRFYTVINKKSGEIVPMEVNFNFDDPNLIILPLAFGKRQGREFIWNDLLSLETGSLKLANGRVIEKTLYNRRTRQDEPALFVALTFERREVLDSSNIKPMNLIGVDRGENIPAVIALTDPEGCPLSRFKDSLGNPTHILRIGESYKEKQRTIQAKKEVEQRRAGGYSRKYASKAKNLADDMVRNTARDLLYYAVTQDAMLIFENLSRGFGRQGKRTFMAERQYTRMEDWLTAKLAYEGLPSKTYLSKTLAQYTSKTCSNCGFTITSADYDRVLEKLKKTATGWMTTINGKELKVEGQITYYNRYKRQNVVKDLSVELDRLSEESVNNDISSWTKGRSGEALSLLKKRFSHRPVQEKFVCLNCGFETHADEQAALNIARSWLFLRSQEYKKYQTNKTTGNTDKRAFVETWQSFYRKKLKEVWKPAV

SEQ ID NO: 29193 - protein, 979 aa, synthetic construct
  REGION 1..979: note = engineered CasX variant
QEIKRANKIRRRLVKDSNTKKAGKTGPMKTLLVRVMTPDLRERLENLRKKPENIPQPISNTSRANLNKLLTDYTEMKKAILHVYWEEFQKDPVGLMSRVAQPASKKIDQNKLKPEMDEKGNLTTAGFACSQCGQPLFVYKLEQVSEKGKAYTNYFGRCNVAEHEKLILLAQLKPEKDSDEAVTYSLGKFGQRALDFYSIHVTKESTHPVKPLAQIAGNRYASGPVGKALSDACMGTIASFLSKYQDIIIEHQKVVKGNQKRLESLRELAGKENLEYPSVTLPPQPHTKEGVDAYNEVIARVRMWVNLNLWQKLKLSRDDAKPLLRLKGFPSFPLVERQANEVDWWDMVCNVKKLINEKKEDGKVFWQNLAGYKRQEALRPYLSSEEDRKKGKKFARYQLGDLLLHLEKKHGEYDWGKVYDEAWERIDKKVEGLSKHIKLEEERRSEDAQSKAALTDWLRAKASFVIEGLKEADKDEFCRCELKLQKWYGDLRGKPFAIEAENSILDISGFSKQYNCAFIWQKDGVKKLNLYLIINYFKGGKLRFKKIKPEAFEANRFYTVINKKSGEIVPMEVNFNFDDPNLIILPLAFGKRQGREFIWNDLLSLETGSLKLANGRVIEKTLYNRRTRQDEPALFVALTFERREVLDSSNIKPMNLIGVDRGENIPAVIALTDPEGCPLSRFKDSLGNPTHILRIGESYKEKQRTIQAKKEVEQRRAGGYSRKYASKAKNLADDMVRNTARDLLYYAVTQDAMLIFENLSRGFGRQGKRTFMAERQYTRMEDWLTAKLAYEGLPSKTYLSKTLAQYTSKTCSNCGFTITSADYDRVLEKLKKTATGWMTTINGKELKVEGQITYYNRYKRQNVVKDLSVELDRLSEESVNNDISSWTKGRSGEALSLLKKRFSHRPVQEKFVCLNCGFETHADEQAALNIARSWLFLRSQEYKKYQTNKTTGNTDKRAFVETWQSFYRKKLKEVWKPAV

SEQ ID NO: 29194 - protein, 978 aa, synthetic construct
  REGION 1..978: note = engineered CasX variant
QEIKRANKIRRRLVKDSNTKKAGKTGPMKTLLVRVMTPDLRERLENLRKKPENIPQPISNTSRANLNKLLTDYTEMKKAILHVYWEEFQKDPVGLMSRVAQPASKKIDQNKLKPEMDEKGNLTTAGFACSQCGQPLFVYKLEQVSEKGKAYTNYFGRCNVAEHEKLILLAQLKPEKDSDEAVTYSLGKFGQRALDFYSIHVTKESTHPVKPLAQIAGNRYASGPVGKALSDACMGTIASFLSKYQDIIIEHQKVVKGNQKRLESLRELAGKENLEYPSVTLPPQPHTKEGVDAYNEVIARVRMWVNLNLWQKLKLSRDDAKPLLRLKGFPSFPLVERQANEVDWWDMVCNVKKLINEKKEDGKVFWQNLAGYKRQEALRPYLSSEEDRKKGKKFARYQLGDLLLHLEKKHGEDWGDVYDEAWERIDKKVEGLSKHIKLEEERRSEDAQSKAALTDWLRAKASFVIEGLKEADKDEFCRCELKLQKWYGDLRGKPFAIEAENSILDISGFSKQYNCAFIWQKDGVKKLNLYLIINYFKGGKLRFKKIKPEAFEANRFYTVINKKSGEIVPMEVNFNFDDPNLIILPLAFGKRQGREFIWNDLLSLETGSLKLANGRVIEKTLYNRRTRQDEPALFVALTFERREVLDSSNIKPMNLIGVDRGENIPAVIALTDPEGCPLSRFKDSLGNPTHILRIGESYKEKQRTIQAKKEVEQRRAGGYSRKYASKAKNLADDMVRNTARDLLYYAVTQDAMLIFENLSRGFGRQGKRTFMAERQYTRMEDWLTAKLAYEGLPSKTYLSKTLAQYTSKTCSNCGFTITSADYDRVLEKLKKTATGWMTTINGKELKVEGQITYYNRYKRQNVVKDLSVELDRLSEESVNNDISSWTKGRSGEALSLLKKRFSHRPVQEKFVCLNCGFETHADEQAALNIARSWLFLRSQEYKKYQTNKTTGNTDKRAFVETWQSFYRKKLKEVWKPAV

SEQ ID NO: 29195 - protein, 978 aa, synthetic construct
  REGION 1..978: note = engineered CasX variant
QEIKRANKIRRRLVKDSNTKKAGKTGPMKTLLVRVMTPDLRERLENLRKKPENIPQPISNTSRANLNKLLTDYTEMKKAILHVYWEEFQKDPVGLMSRVAQPASKKIDQNKLKPEMDEKGNLTTAGFACSQCGQPLFVYKLEQVSEKGKAYTNYFGRCNVAEHEKLILLAQLKPEKDSDEAVTYSLGKFGQRALDFYSIHVTKESTHPVKPLAQIAGNRYASGPVGKALSDACMGTIASFLSKYQDIIIEHQKVVKGNQKRLESLRELAGKENLEYPSVTLPPQPHTKEGVDAYNEVIARVRMWVNLNLWQKLKLSRDDAKPLLRLKGFPSFPLVERQANEVDWWDMVCNVKKLINEKKEDGKVFWQNLAGYKRQEALRPYLSSEEDRKKGKKFARYQLGDLLLHLEKKHGEDWGKVYGEAWERIDKKVEGLSKHIKLEEERRSEDAQSKAALTDWLRAKASFVIEGLKEADKDEFCRCELKLQKWYGDLRGKPFAIEAENSILDISGFSKQYNCAFIWQKDGVKKLNLYLIINYFKGGKLRFKKIKPEAFEANRFYTVINKKSGEIVPMEVNFNFDDPNLIILPLAFGKRQGREFIWNDLLSLETGSLKLANGRVIEKTLYNRRTRQDEPALFVALTFERREVLDSSNIKPMNLIGVDRGENIPAVIALTDPEGCPLSRFKDSLGNPTHILRIGESYKEKQRTIQAKKEVEQRRAGGYSRKYASKAKNLADDMVRNTARDLLYYAVTQDAMLIFENLSRGFGRQGKRTFMAERQYTRMEDWLTAKLAYEGLPSKTYLSKTLAQYTSKTCSNCGFTITSADYDRVLEKLKKTATGWMTTINGKELKVEGQITYYNRYKRQNVVKDLSVELDRLSEESVNNDISSWTKGRSGEALSLLKKRFSHRPVQEKFVCLNCGFETHADEQAALNIARSWLFLRSQEYKKYQTNKTTGNTDKRAFVETWQSFYRKKLKEVWKPAV

SEQ ID NO: 29196 - protein, 978 aa, synthetic construct
  REGION 1..978: note = engineered CasX variant
QEIKRANKIRRRLVKDSNTKKAGKTGPMKTLLVRVMTPDLRERLENLRKKPENIPQPISNTSRANLNKLLTDYTEMKKAILHVYWEEFQKDPVGLMSRVAQPASKKIDQNKLKPEMDEKGNLTTAGFACSQCGQPLFVYKLEQVSEKGKAYTNYFGRCNVAEHEKLILLAQLKPEKDSDEAVTYSLGKFGQRALDFYSIHVTKESTHPVKPLAQIAGNRYASGPVGKALSDACMGTIASFLSKYQDIIIEHQKVVKGNQKRLESLRELAGKENLEYPSVTLPPQPHTKEGVDAYNEVIARVRMWVNLNLWQKLKLSRDDAKPLLRLKGFPSFPLVERQANEVDWWDMVCNVKKLINEKKEDGKVFWQNLAGYKRQEALRPYLSSEEDRKKGKKFARYQLGDLLLHLEKKHGEDWGKVYDEAWERIDKKVEGLSKHIKLEEERRSEDAQSKAALTDWLRAKASFVIEGKKEADKDEFCRCELKLQKWYGDLRGKPFAIEAENSILDISGFSKQYNCAFIWQKDGVKKLNLYLIINYFKGGKLRFKKIKPEAFEANRFYTVINKKSGEIVPMEVNFNFDDPNLIILPLAFGKRQGREFIWNDLLSLETGSLKLANGRVIEKTLYNRRTRQDEPALFVALTFERREVLDSSNIKPMNLIGVDRGENIPAVIALTDPEGCPLSRFKDSLGNPTHILRIGESYKEKQRTIQAKKEVEQRRAGGYSRKYASKAKNLADDMVRNTARDLLYYAVTQDAMLIFENLSRGFGRQGKRTFMAERQYTRMEDWLTAKLAYEGLPSKTYLSKTLAQYTSKTCSNCGFTITSADYDRVLEKLKKTATGWMTTINGKELKVEGQITYYNRYKRQNVVKDLSVELDRLSEESVNNDISSWTKGRSGEALSLLKKRFSHRPVQEKFVCLNCGFETHADEQAALNIARSWLFLRSQEYKKYQTNKTTGNTDKRAFVETWQSFYRKKLKEVWKPAV

SEQ ID NO: 29197 - protein, 978 aa, synthetic construct
  REGION 1..978: note = engineered CasX variant
QEIKRANKIRRRLVKDSNTKKAGKTGPMKTLLVRVMTPDLRERLENLRKKPENIPQPISNTSRANLNKLLTDYTEMKKAILHVYWEEFQKDPVGLMSRVAQPASKKIDQNKLKPEMDEKGNLTTAGFACSQCGQPLFVYKLEQVSEKGKAYTNYFGRCNVAEHEKLILLAQLKPEKDSDEAVTYSLGKFGQRALDFYSIHVTKESTHPVKPLAQIAGNRYASGPVGKALSDACMGTIASFLSKYQDIIIEHQKVVKGNQKRLESLRELAGKENLEYPSVTLPPQPHTKEGVDAYNEVIARVRMWVNLNLWQKLKLSRDDAKPLLRLKGFPSFPLVERQANEVDWWDMVCNVKKLINEKKEDGKVFWQNLAGYKRQEALRPYLSSEEDRKKGKKFARYQLGDLLLHLEKKHGEDWGKVYDEAWERIDKKVEGLSKHIKLEEERRSEDAQSKAALTDWLRAKASFVIEGSKEADKDEFCRCELKLQKWYGDLRGKPFAIEAENSILDISGFSKQYNCAFIWQKDGVKKLNLYLIINYFKGGKLRFKKIKPEAFEANRFYTVINKKSGEIVPMEVNFNFDDPNLIILPLAFGKRQGREFIWNDLLSLETGSLKLANGRVIEKTLYNRRTRQDEPALFVALTFERREVLDSSNIKPMNLIGVDRGENIPAVIALTDPEGCPLSRFKDSLGNPTHILRIGESYKEKQRTIQAKKEVEQRRAGGYSRKYASKAKNLADDMVRNTARDLLYYAVTQDAMLIFENLSRGFGRQGKRTFMAERQYTRMEDWLTAKLAYEGLPSKTYLSKTLAQYTSKTCSNCGFTITSADYDRVLEKLKKTATGWMTTINGKELKVEGQITYYNRYKRQNVVKDLSVELDRLSEESVNNDISSWTKGRSGEALSLLKKRFSHRPVQEKFVCLNCGFETHADEQAALNIARSWLFLRSQEYKKYQTNKTTGNTDKRAFVETWQSFYRKKLKEVWKPAV

SEQ ID NO: 29198 - protein, 979 aa, synthetic construct
  REGION 1..979: note = engineered CasX variant
QEIKRANKIRRRLVKDSNTKKAGKTGPMKTLLVRVMTPDLRERLENLRKKPENIPQPISNTSRANLNKLLTDYTEMKKAILHVYWEEFQKDPVGLMSRVAQPASKKIDQNKLKPEMDEKGNLTTAGFACSQCGQPLFVYKLEQVSEKGKAYTNYFGRCNVAEHEKLILLAQLKPEKDSDEAVTYSLGKFGQRALDFYSIHVTKESTHPVKPLAQIAGNRYASGPVGKALSDACMGTIASFLSKYQDIIIEHQKVVKGNQKRLESLRELAGKENLEYPSVTLPPQPHTKEGVDAYNEVIARVRMWVNLNLWQKLKLSRDDAKPLLRLKGFPSFPLVERQANEVDWWDMVCNVKKLINEKKEDGKVFWQNLAGYKRQEALRPYLSSEEDRKKGKKFARYQLGDLLLHLEKKHGEDWGKVYDEAWERIDKKVEGLSKHIKLEEERRSEDAQSKAALTDWLRAKASFVIEGLKEADDKDEFCRCELKLQKWYGDLRGKPFAIEAENSILDISGFSKQYNCAFIWQKDGVKKLNLYLIINYFKGGKLRFKKIKPEAFEANRFYTVINKKSGEIVPMEVNFNFDDPNLIILPLAFGKRQGREFIWNDLLSLETGSLKLANGRVIEKTLYNRRTRQDEPALFVALTFERREVLDSSNIKPMNLIGVDRGENIPAVIALTDPEGCPLSRFKDSLGNPTHILRIGESYKEKQRTIQAKKEVEQRRAGGYSRKYASKAKNLADDMVRNTARDLLYYAVTQDAMLIFENLSRGFGRQGKRTFMAERQYTRMEDWLTAKLAYEGLPSKTYLSKTLAQYTSKTCSNCGFTITSADYDRVLEKLKKTATGWMTTINGKELKVEGQITYYNRYKRQNVVKDLSVELDRLSEESVNNDISSWTKGRSGEALSLLKKRFSHRPVQEKFVCLNCGFETHADEQAALNIARSWLFLRSQEYKKYQTNKTTGNTDKRAFVETWQSFYRKKLKEVWKPAV

SEQ ID NO: 29199 - protein, 979 aa, synthetic construct
  REGION 1..979: note = engineered CasX variant
QEIKRANKIRRRLVKDSNTKKAGKTGPMKTLLVRVMTPDLRERLENLRKKPENIPQPISNTSRANLNKLLTDYTEMKKAILHVYWEEFQKDPVGLMSRVAQPASKKIDQNKLKPEMDEKGNLTTAGFACSQCGQPLFVYKLEQVSEKGKAYTNYFGRCNVAEHEKLILLAQLKPEKDSDEAVTYSLGKFGQRALDFYSIHVTKESTHPVKPLAQIAGNRYASGPVGKALSDACMGTIASFLSKYQDIIIEHQKVVKGNQKRLESLRELAGKENLEYPSVTLPPQPHTKEGVDAYNEVIARVRMWVNLNLWQKLKLSRDDAKPLLRLKGFPSFPLVERQANEVDWWDMVCNVKKLINEKKEDGKVFWQNLAGYKRQEALRPYLSSEEDRKKGKKFARYQLGDLLLHLEKKHGEDWGKVYDEAWERIDKKVEGLSKHIKLEEERRSEDAQSKAALTDWLRAKASFVIEGLKEADKDEFCRCELKLQKWYGDLRGKPFAIEAENSILDISGFSKQYNCAFIWQKDGVKKLNLYLIINYFKGGKLRFKKIKPEAFEANRFYTVINKKSGEIVPMEVNFNFDDPNLIILPLAFGKRQGREFIWNDLLSLETGSLKLANGRVIEKTLYNRRTRQDEPALFVALTFERREVLDSSNIKPMNLIGVDRGENIPAVIALTDPEGCPLSRFKDSLGNPTHILRIGESYKEKQRTIQAKKEVEQRRAGGYSRKYASKAKNLADDMVRNTARDLLYYAVTQDAMLIFENLSRGFGRQGKRTFMAERQYTRMEDWLTAKLAYEGLPSKTYLSKTLAQYTSKTCSNCGFTITSADYDRVLEKLKKTATGWMTTINGKELKVEGQITYYNRYKRQNVVKDLSVELDRLSEESVNNDISSWTKGRSGNEALSLLKKRFSHRPVQEKFVCLNCGFETHADEQAALNIARSWLFLRSQEYKKYQTNKTTGNTDKRAFVETWQSFYRKKLKEVWKPAV

SEQ ID NO: 29200 - protein, 978 aa, synthetic construct
  REGION 1..978: note = engineered CasX variant
QEIKRANKIRRRLVKDSNTKKAGKTGPMKTLLVRVMTPDLRERLENLRKKPENIPQPISNTSRANLNKLLTDYTEMKKAILHVYWEEFQKDPVGLMSRVAQPASKKIDQNKLKPEMDEKGNLTTAGFACSQCGQPLFVYKLEQVSEKGKAYTNYFGRCNVAEHEKLILLAQLKPEKDSDEAVTYSLGKFGQRALDFYSIHVTKESTHPVKPLAQIAGNRYASGPVGKALSDACMGTIASFLSKYQDIIIEHQKVVKGNQKRLESLRELAGKENLEYPSVTLPPQPHTKEGVDAYNEVIARVRMWVNLNLWQKLKLSRDDAKPLLRLKGFPSFPLVERQANEVDWWDMVCNVKKLINEKKEDGKVFWQNLAGYKRQEALRPYLSSEEDRQKGKKFARYQLGDLLLHLEKKHGEDWGKVYDEAWERIDKKVEGLSKHIKLEEERRSEDAQSKAALTDWLRAKASFVIEGLKEADKDEFCRCELKLQKWYGDLRGKPFAIEAENSILDISGFSKQYNCAFIWQKDGVKKLNLYLIINYFKGGKLRFKKIKPEAFEANRFYTVINKKSGEIVPMEVNFNFDDPNLIILPLAFGKRQGREFIWNDLLSLETGSLKLANGRVIEKTLYNRRTRQDEPALFVALTFERREVLDSSNIKPMNLIGVDRGENIPAVIALTDPEGCPLSRFKDSLGNPTHILRIGESYKEKQRTIQAKKEVEQRRAGGYSRKYASKAKNLADDMVRNTARDLLYYAVTQDAMLIFENLSRGFGRQGKRTFMAERQYTRMEDWLTAKLAYEGLPSKTYLSKTLAQYTSKTCSNCGFTITSADYDRVLEKLKKTATGWMTTINGKELKVEGQITYYNRYKRQNVVKDLSVELDRLSEESVNNDISSWTKGRSGEALSLLKKRFSHRPVQEKFVCLNCGFETHADEQAALNIARSWLFLRSQEYKKYQTNKTTGNTDKRAFVETWQSFYRKKLKEVWKPAV

SEQ ID NO: 29201 - protein, 978 aa, synthetic construct
  REGION 1..978: note = engineered CasX variant
QEIKRANKIRRRLVKDSNTKKAGKTGPMKTLLVRVMTPDLRERLENLRKKPENIPQPISNTSRANLNKLLTDYTEMKKAILHVYWEEFQKDPVGLMSRVAQPASKKIDQNKLKPEMDEKGNLTTAGFACSQCGQPLFVYKLEQVSEKGKAYTNYFGRCNVAEHEKLILLAQLKPEKDSDEAVTYSLGKFGQRALDFYSIHVTKESTHPVKPLAQIAGNRYASGPVGKALSDACMGTIASFLSKYQDIIIEHQKVVKGNQKRLESLRELAGKENLEYPSVTLPPQPHTKEGVDAYNEVIARVRMWVNLNLWQKLKLSRDDAKPLLRLKGFPSFPLVERQANEVDWWDMVCNVKKLINEKKEDGKVFWQNLAGYKRQEALRPYLSSEEDRKKGKKFARYQLGDLLLHLEKKHGEDWGKVYDEAWERIDKKVEGLSKHIKLEEERRSEDAQSKAALTDWLRAKASFVIEGLKEADKDEFCRCELKLQKWYGDLRGKPFAIEAENSILDISGFSKQYNCAFIWQKDGVKKLNLYLIINYFKGGKLRFKKIKPEAFEANRFYTVINKKSGEIVPMEVNFNFDDPNLIILPLAFGKRQGREFIWNDLLSLETGSLKLANGRVIEKTLYNRRTRQDEPALFVALTFERREVLDSSNIKPMNLIGVDRGENIPAVIALTDPEGCPLSRFKDSLGNPTHILRIGESYKEKQRTIQAKKEVEQRRAGGYSRKYASKAKNLADDMVRNTARDLLYYAVTQDAMLIFENLSRGFGRQGKRTFMAERQYTRMEDWLTAKLAYEGLPSQTYLSKTLAQYTSKTCSNCGFTITSADYDRVLEKLKKTATGWMTTINGKELKVEGQITYYNRYKRQNVVKDLSVELDRLSEESVNNDISSWTKGRSGEALSLLKKRFSHRPVQEKFVCLNCGFETHADEQAALNIARSWLFLRSQEYKKYQTNKTTGNTDKRAFVETWQSFYRKKLKEVWKPAV

SEQ ID NO: 29202 - protein, 978 aa, synthetic construct
  REGION 1..978: note = engineered CasX variant
QEIKRANKIRRRLVKDSNTKKAGKTGPMKTLLVRVMTPDLRERLENLRKKPENIPQPISNTSRANLNKLLTDYTEMKKAILHVYWEEFQKDPVGLMSRVAQPASKKIDQNKLKPEMDEKGNLTTAGFACSQCGQPLFVYKLEQVSEKGKAYTNYFGRCNVAEHEKLILLAQLKPEKDSDEAVTYSLGKFGQRALDFYSIHVTKESTHPVKPLAQIAGNRYASGPVGKALSDACMGTIASFLSKYQDIIIEHQKVVKGNQKRLESLRELAGKENLEYPSVTLPPQPHTKEGVDAYNEVIARVRMWVNLNLWQKLKLSRDDAKPLLRLKGFPSFPLVERQANEVDWWDMVCNVKKLINEKKEDGKVFWQNLAGYKRQEALRPYLSSEEDRKKGKKFARYQLGDLLLHLEKKHGEDWGKVYDEAWERIDKKVEGLSKHIKLEEERRSEDAQSKAALTDWLRAKASFVIEGLKEADKDEFCRCELKLQKWYGDLRGKPFAIEAENSILDISGFSKQYNCAFIWQKDGVKKLNLYLIINYFKGGKLRFKKIKPEAFEANRFYTVINKKSGEIVPMEVNFNFDDPNLIILPLAFGKRQGREFIWNDLLSLETGSLKLANGRVIEKTLYNRRTRQDEPALFVALTFERREVLDSSNIKPMNLIGVDRGENIPAVIALTDPEGCPLSRFKDSLGNPTHILRIGESYKEKQRTIQAKKEVEQRRAGGYSRKYASKAKNLADDMVRNTARDLLYYAVTQDAMLIFENLSRGFGRQGKRTFMAERQYTRMEDWLTAKLAYNGLPSKTYLSKTLAQYTSKTCSNCGFTITSADYDRVLEKLKKTATGWMTTINGKELKVEGQITYYNRYKRQNVVKDLSVELDRLSEESVNNDISSWTKGRSGEALSLLKKRFSHRPVQEKFVCLNCGFETHADEQAALNIARSWLFLRSQEYKKYQTNKTTGNTDKRAFVETWQSFYRKKLKEVWKPAV

SEQ ID NO: 29203 - protein, 978 aa, synthetic construct
  REGION 1..978: note = engineered CasX variant
QEIKRANKIRRRLVKDSNTKKAGKTGPMKTLLVRVMTPDLRERLENLRKKPENIPQPISNTSRANLNKLLTDYTEMKKAILHVYWEEFQKDPVGLMSRVAQPASKKIDQNKLKPEMDEKGNLTTAGFACSQCGQPLFVYKLEQVSEKGKAYTNYFGRCNVAEHEKLIQLAQLKPEKDSDEAVTYSLGKFGQRALDFYSIHVTKESTHPVKPLAQIAGNRYASGPVGKALSDACMGTIASFLSKYQDIIIEHQKVVKGNQKRLESLRELAGKENLEYPSVTLPPQPHTKEGVDAYNEVIARVRMWVNLNLWQKLKLSRDDAKPLLRLKGFPSFPLVERQANEVDWWDMVCNVKKLINEKKEDGKVFWQNLAGYKRQEALRPYLSSEEDRKKGKKFARYQLGDLLLHLEKKHGEDWGKVYDEAWERIDKKVEGLSKHIKLEEERRSEDAQSKAALTDWLRAKASFVIEGLKEADKDEFCRCELKLQKWYGDLRGKPFAIEAENSILDISGFSKQYNCAFIWQKDGVKKLNLYLIINYFKGGKLRFKKIKPEAFEANRFYTVINKKSGEIVPMEVNFNFDDPNLIILPLAFGKRQGREFIWNDLLSLETGSLKLANGRVIEKTLYNRRTRQDEPALFVALTFERREVLDSSNIKPMNLIGVDRGENIPAVIALTDPEGCPLSRFKDSLGNPTHILRIGESYKEKQRTIQAKKEVEQRRAGGYSRKYASKAKNLADDMVRNTARDLLYYAVTQDAMLIFENLSRGFGRQGKRTFMAERQYTRMEDWLTAKLAYEGLPSKTYLSKTLAQYTSKTCSNCGFTITSADYDRVLEKLKKTATGWMTTINGKELKVEGQITYYNRYKRQNVVKDLSVELDRLSEESVNNDISSWTKGRSGEALSLLKKRFSHRPVQEKFVCLNCGFETHADEQAALNIARSWLFLRSQEYKKYQTNKTTGNTDKRAFVETWQSFYRKKLKEVWKPAV

SEQ ID NO: 29204 - protein, 978 aa, synthetic construct
  REGION 1..978: note = engineered CasX variant
QEIKRANKIRRRLVKDSNTKKAGKTGPMKTLLVRVMTPDLRERLENLRKKPENIPQPISNTSRANLNKLLTDYTEMKKAILHVYWEEFQKDPVGLMSRVAQPASKKIDQNKLKPEMDEKGNLTTAGFACSQCGQPLFVYKLEQVSEKGKAYTNYFGRCNVAEHEKLILLAQLKPEKDSDEAVTYSLGKFGQRALDFYSIHVTKESTHPVKPLAQIAGNRYASGPVGKALSDACMGTIASFLSKYQDIIIEHQKVVKGNQKRLESLRELAGKENLEYPSVTLPPQPHTKEGVDAYNEVIARVRMWVNLNLWQKLKLSRDDAKPLLRLKGFPSFPLVERQANEVDWWDMVCNVKKLINEKKEDGKVFWQNLAIYKRQEALRPYLSSEEDRKKGKKFARYQLGDLLLHLEKKHGEDWGKVYDEAWERIDKKVEGLSKHIKLEEERRSEDAQSKAALTDWLRAKASFVIEGLKEADKDEFCRCELKLQKWYGDLRGKPFAIEAENSILDISGFSKQYNCAFIWQKDGVKKLNLYLIINYFKGGKLRFKKIKPEAFEANRFYTVINKKSGEIVPMEVNFNFDDPNLIILPLAFGKRQGREFIWNDLLSLETGSLKLANGRVIEKTLYNRRTRQDEPALFVALTFERREVLDSSNIKPMNLIGVDRGENIPAVIALTDPEGCPLSRFKDSLGNPTHILRIGESYKEKQRTIQAKKEVEQRRAGGYSRKYASKAKNLADDMVRNTARDLLYYAVTQDAMLIFENLSRGFGRQGKRTFMAERQYTRMEDWLTAKLAYEGLPSKTYLSKTLAQYTSKTCSNCGFTITSADYDRVLEKLKKTATGWMTTINGKELKVEGQITYYNRYKRQNVVKDLSVELDRLSEESVNNDISSWTKGRSGEALSLLKKRFSHRPVQEKFVCLNCGFETHADEQAALNIARSWLFLRSQEYKKYQTNKTTGNTDKRAFVETWQSFYRKKLKEVWKPAV

SEQ ID NO: 29205 - protein, 978 aa, synthetic construct
  REGION 1..978: note = engineered CasX variant
QEIKRANKIRRRLVKDSNTKKAGKTGPMKTLLVRVMTPDLRERLENLRKKPENIPQPISNTSRANLNKLLTDYTEMKKAILHVYWEEFQKDPVGLMSRVAQPASKKIDQNKLKPEMDEKGNLTTAGFACSQCGQPLFVYKLEQVSEKGKAYTNYFGRCNVAEHEKLILLAQLKPEKDSDEAVTYSLGKFGQRALDFYSIHVTKESTHPVKPLAQIAGNRYASGPVGKALSDACMGTIASFLSKYQDIIIEHQKVVKGNQKRLESLRELAGKENLEYPSVTLPPQPHTKEGVDAYNEVIARVRMWVNLNLWQKLKLSRDDAKPLLRLKGFPSFPLVERQANEVDWWDMVCNVKKLINEKKEDGKVFWQNLAGYKRQEALRPYLSSEEDREKGKKFARYQLGDLLLHLEKKHGEDWGKVYDEAWERIDKKVEGLSKHIKLEEERRSEDAQSKAALTDWLRAKASFVIEGLKEADKDEFCRCELKLQKWYGDLRGKPFAIEAENSILDISGFSKQYNCAFIWQKDGVKKLNLYLIINYFKGGKLRFKKIKPEAFEANRFYTVINKKSGEIVPMEVNFNFDDPNLIILPLAFGKRQGREFIWNDLLSLETGSLKLANGRVIEKTLYNRRTRQDEPALFVALTFERREVLDSSNIKPMNLIGVDRGENIPAVIALTDPEGCPLSRFKDSLGNPTHILRIGESYKEKQRTIQAKKEVEQRRAGGYSRKYASKAKNLADDMVRNTARDLLYYAVTQDAMLIFENLSRGFGRQGKRTFMAERQYTRMEDWLTAKLAYEGLPSKTYLSKTLAQYTSKTCSNCGFTITSADYDRVLEKLKKTATGWMTTINGKELKVEGQITYYNRYKRQNVVKDLSVELDRLSEESVNNDISSWTKGRSGEALSLLKKRFSHRPVQEKFVCLNCGFETHADEQAALNIARSWLFLRSQEYKKYQTNKTTGNTDKRAFVETWQSFYRKKLKEVWKPAV

SEQ ID NO: 29206 - protein, 978 aa, synthetic construct
  REGION 1..978: note = engineered CasX variant
QEIKRANKIRRRLVKDSNTKKAGKTGPMKTLLVRVMTPDLRERLENLRKKPENIPQPISNTSRANLNKLLTDYTEMKKAILHVYWEEFQKDPVGLMSRVAQPASKKIDQNKLKPEMDEKGNLTTAGFACSQCGQPLFVYKLEQVSEKGKAYTNYFGRCNVAEHEKLILLAQLKPEKDSDEAVTYSLGKFGQRALDFYSIHVTKESTHPVKPLAQIAGNRYASGPVGKALSDACMGTIASFLSKYQDIIIEHQKVVKGNQKRLESLRELAGKENLEYPSVTLPPQPHTKEGVDAYNEVIARVRMWVNLNLWQKLKLSRDDAKPLLRLKGFPSFPLVERQANEVDWWDMVCNVKKLINEKKEDGKVFWQNLAGYKRQEALRPYLSSEEDRKKGKKFARYQLGDLLLHLEKKHGEDWGKVYDEAWERIDKKVEGLSKHIKLEEERRSEDAQSKAALTDWLRAKASFVIEGLKEADKDEFCRCELKLQKWYGDLRGKPFAIEAENSILDISGFSKQYNCAFIWQKDGVKKLNLYLIINYFKGGKLRFKKIKPEAFEANRFYTVINKKSGEIVIMEVNFNFDDPNLIILPLAFGKRQGREFIWNDLLSLETGSLKLANGRVIEKTLYNRRTRQDEPALFVALTFERREVLDSSNIKPMNLIGVDRGENIPAVIALTDPEGCPLSRFKDSLGNPTHILRIGESYKEKQRTIQAKKEVEQRRAGGYSRKYASKAKNLADDMVRNTARDLLYYAVTQDAMLIFENLSRGFGRQGKRTFMAERQYTRMEDWLTAKLAYEGLPSKTYLSKTLAQYTSKTCSNCGFTITSADYDRVLEKLKKTATGWMTTINGKELKVEGQITYYNRYKRQNVVKDLSVELDRLSEESVNNDISSWTKGRSGEALSLLKKRFSHRPVQEKFVCLNCGFETHADEQAALNIARSWLFLRSQEYKKYQTNKTTGNTDKRAFVETWQSFYRKKLKEVWKPAV

SEQ ID NO: 29207 - protein, 978 aa, synthetic construct
  REGION 1..978: note = engineered CasX variant
QEIKRISKIRRRLVKDSNTKKAGKTGPMKTLLVRVMTPDLRERLENLRKKPENIPQPISNTSRANLNKLLTDYTEMKKAILHVYWEEFQKDPVGLMSRVAQPASKKIDQNKLKPEMDEKGNLTTAGFACSQCGQPLFVYKLEQVSEKGKAYTNYFGRCNVAEHEKLILLAQLKPEKDSDEAVTYSLGKFGQRALDFYSIHVTKESTHPVKPLAQIAGNRYASGPVGKALSGACMGTIASFLSKYQDIIIEHQKVVKGNQKRLESLRELAGKENLEYPSVTLPPQPHTKEGVDAYNEVIARVRMWVNLNLWQKLKLSRDDAKPLLRLKGFPSFPLVERQANEVDWWDMVCNVKKLINEKKEDGKVFWQNLAGYKRQEALRPYLSSEEDRKKGKKFARYQLGDLLLHLEKKHGEDWGKVYDEAWERIDKKVEGLSKHIKLEEERRSEDAQSKAALTDWLRAKASFVIEGLKEADKDEFCRCELKLQKWYGDLRGKPFAIEAENSILDISGFSKQYNCAFIWQKDGVKKLNLYLIINYFKGGKLRFKKIKPEAFEANRFYTVINKKSGEIVPMEVNFNFDDPNLIILPLAFGKRQGREFIWNDLLSLETGSLKLANGRVIEKTLYNRRTRQDEPALFVALTFERREVLDSSNIKPMNLIGVDRGENIPAVIALTDPEGCPLSRFKDSLGNPTHILRIGESYKEKQRTIQAKKEVEQRRAGGYSRKYASKAKNLADDMVRNTARDLLYYAVTQDAMLIFENLSRGFGRQGKRTFMAERQYTRMEDWLTAKLAYEGLPSKTYLSKTLAQYTSKTCSNCGFTITSADYDRVLEKLKKTATGWMTTINGKELKVEGQITYYNRYKRQNVVKDLSVELDRLSEESVNNDISSWTKGRSGEALSLLKKRFSHRPVQEKFVCLNCGFETHADEQAALNIARSWLFLRSQEYKKYQTNKTTGNTDKRAFVETWQSFYRKKLKEVWKPAV

SEQ ID NO: 29208 - protein, 978 aa, synthetic construct
  REGION 1..978: note = engineered CasX variant
QEIKRISKIRRRLVKDSNTKKAGKTGPMKTLLVRVMTPDLRERLENLRKKPENIPQPISNTSRANLNKLLTDYTEMKKAILHVYWEEFQKDPVGLMSRVAQPASKKIDQNKLKPEMDEKGNLTTAGFACSQCGQPLFVYKLEQVSEKGKAYTNYFGRCNVAEHEKLILLAQLKPEKDSDEAVTYSLGKFGQRALDFYSIHVTKESTHPVKPLAQIAGNRYASGPVGKALSDACMGTIASFLSKYQDIIIEHQKVVKGNQKRLESLRELAGKENLEYPSVTLPPQPHTKEGVDAYNEVIARVRMWVNLNLWQKLKLSRDDAKPLLRLKNFPSFPLVERQANEVDWWDMVCNVKKLINEKKEDGKVFWQNLAGYKRQEALRPYLSSEEDRKKGKKFARYQLGDLLLHLEKKHGEDWGKVYDEAWERIDKKVEGLSKHIKLEEERRSEDAQSKAALTDWLRAKASFVIEGLKEADKDEFCRCELKLQKWYGDLRGKPFAIEAENSILDISGFSKQYNCAFIWQKDGVKKLNLYLIINYFKGGKLRFKKIKPEAFEANRFYTVINKKSGEIVPMEVNFNFDDPNLIILPLAFGKRQGREFIWNDLLSLETGSLKLANGRVIEKTLYNRRTRQDEPALFVALTFERREVLDSSNIKPMNLIGVDRGENIPAVIALTDPEGCPLSRFKDSLGNPTHILRIGESYKEKQRTIQAKKEVEQRRAGGYSRKYASKAKNLADDMVRNTARDLLYYAVTQDAMLIFENLSRGFGRQGKRTFMAERQYTRMEDWLTAKLAYEGLPSKTYLSKTLAQYTSKTCSNCGFTITSADYDRVLEKLKKTATGWMTTINGKELKVEGQITYYNRYKRQNVVKDLSVELDRLSEESVNNDISSWTKGRSGEALSLLKKRFSHRPVQEKFVCLNCGFETHADEQAALNIARSWLFLRSQEYKKYQTNKTTGNTDKRAFVETWQSFYRKKLKEVWKPAV

SEQ ID NO: 29209 - protein, 978 aa, synthetic construct
  REGION 1..978: note = engineered CasX variant
QEIKRISKIRRRLVKDSNTKKAGKTGPMKTLLVRVMTPDLRERLENLRKKPENIPQPISNTSRANLNKLLTDYTEMKKAILHVYWEEFQKDPVGLMSRVAQPASKKIDQNKLKPEMDEKGNLTTAGFACSQCGQPLFVYKLEQVSEKGKAYTNYFGRCNVAEHEKLILLAQLKPEKDSDEAVTYSLGKFGQRALDFYSIHVTKESTHPVKPLAQIAGNRYASGPVGKALSDACMGTIASFLSKYQDIIIEHQKVVKGNQKRLESLRELAGKENLEYPSVTLPPQPHTKEGVDAYNEVIARVRMWVNLNLWQKLKLSRDDAKPLLRLKGFPSFPLVERQANEVDWWDMVCNVKKLINEKKEDGKVFWQNLAGYKRQEALRPYLSSEEDRKKGKKFARYQLGDLLNHLEKKHGEDWGKVYDEAWERIDKKVEGLSKHIKLEEERRSEDAQSKAALTDWLRAKASFVIEGLKEADKDEFCRCELKLQKWYGDLRGKPFAIEAENSILDISGFSKQYNCAFIWQKDGVKKLNLYLIINYFKGGKLRFKKIKPEAFEANRFYTVINKKSGEIVPMEVNFNFDDPNLIILPLAFGKRQGREFIWNDLLSLETGSLKLANGRVIEKTLYNRRTRQDEPALFVALTFERREVLDSSNIKPMNLIGVDRGENIPAVIALTDPEGCPLSRFKDSLGNPTHILRIGESYKEKQRTIQAKKEVEQRRAGGYSRKYASKAKNLADDMVRNTARDLLYYAVTQDAMLIFENLSRGFGRQGKRTFMAERQYTRMEDWLTAKLAYEGLPSKTYLSKTLAQYTSKTCSNCGFTITSADYDRVLEKLKKTATGWMTTINGKELKVEGQITYYNRYKRQNVVKDLSVELDRLSEESVNNDISSWTKGRSGEALSLLKKRFSHRPVQEKFVCLNCGFETHADEQAALNIARSWLFLRSQEYKKYQTNKTTGNTDKRAFVETWQSFYRKKLKEVWKPAV

SEQ ID NO: 29210 - protein, 978 aa, synthetic construct
  REGION 1..978: note = engineered CasX variant
QEIKRISKIRRRLVKDSNTKKAGKTGPMKTLLVRVMTPDLRERLENLRKKPENIPQPISNTSRANLNKLLTDYTEMKKAILHVYWEEFQKDPVGLMSRVAQPASKKIDQNKLKPEMDEKGNLTTAGFACSQCGQPLFVYKLEQVSEKGKAYTNYFGRCNVAEHEKLILLAQLKPEKDSDEAVTYSLGKFGQRALDFYSIHVTKESTHPVKPLAQIAGNRYASGPVGKALSDACMGTIASFLSKYQDIIIEHQKVVKGNQKRLESLRELAGKENLEYPSVTLPPQPHTKEGVDAYNEVIARVRMWVNLNLWQKLKLSRDDAKPLLRLKGFPSFPLVERQANEVDWWDMVCNVKKLINEKKEDGKVFWQNLAGYKRQEALRPYLSSEEDRKKGKKFARYQLGDLLWHLEKKHGEDWGKVYDEAWERIDKKVEGLSKHIKLEEERRSEDAQSKAALTDWLRAKASFVIEGLKEADKDEFCRCELKLQKWYGDLRGKPFAIEAENSILDISGFSKQYNCAFIWQKDGVKKLNLYLIINYFKGGKLRFKKIKPEAFEANRFYTVINKKSGEIVPMEVNFNFDDPNLIILPLAFGKRQGREFIWNDLLSLETGSLKLANGRVIEKTLYNRRTRQDEPALFVALTFERREVLDSSNIKPMNLIGVDRGENIPAVIALTDPEGCPLSRFKDSLGNPTHILRIGESYKEKQRTIQAKKEVEQRRAGGYSRKYASKAKNLADDMVRNTARDLLYYAVTQDAMLIFENLSRGFGRQGKRTFMAERQYTRMEDWLTAKLAYEGLPSKTYLSKTLAQYTSKTCSNCGFTITSADYDRVLEKLKKTATGWMTTINGKELKVEGQITYYNRYKRQNVVKDLSVELDRLSEESVNNDISSWTKGRSGEALSLLKKRFSHRPVQEKFVCLNCGFETHADEQAALNIARSWLFLRSQEYKKYQTNKTTGNTDKRAFVETWQSFYRKKLKEVWKPAV

SEQ ID NO: 29211 - protein, 978 aa, synthetic construct
  REGION 1..978: note = engineered CasX variant
QEIKRISKIRRRLVKDSNTKKAGKTGPMKTLLVRVMTPDLRERLENLRKKPENIPQPISNTSRANLNKLLTDYTEMKKAILHVYWEEFQKDPVGLMSRVAQPASKKIDQNKLKPEMDEKGNLTTAGFACSQCGQPLFVYKLEQVSEKGKAYTNYFGRCNVAEHEKLILLAQLKPEKDSDEAVTYSLGKFGQRALDFYSIHVTKESTHPVKPLAQIAGNRYASGPVGKALSDACMGTIASFLSKYQDIIIEHQKVVKGNQKRLESLRELAGKENLEYPSVTLPPQPHTKEGVDAYNEVIARVRMWVNLNLWQKLKLSRDDAKPLLRLKGFPSFPLVERQANEVDWWDMVCNVKKLINEKKEDGKVFWQNLAGYKRQEALRPYLSSEEDRKKGKKFARYQLGDLLLHLYKKHGEDWGKVYDEAWERIDKKVEGLSKHIKLEEERRSEDAQSKAALTDWLRAKASFVIEGLKEADKDEFCRCELKLQKWYGDLRGKPFAIEAENSILDISGFSKQYNCAFIWQKDGVKKLNLYLIINYFKGGKLRFKKIKPEAFEANRFYTVINKKSGEIVPMEVNFNFDDPNLIILPLAFGKRQGREFIWNDLLSLETGSLKLANGRVIEKTLYNRRTRQDEPALFVALTFERREVLDSSNIKPMNLIGVDRGENIPAVIALTDPEGCPLSRFKDSLGNPTHILRIGESYKEKQRTIQAKKEVEQRRAGGYSRKYASKAKNLADDMVRNTARDLLYYAVTQDAMLIFENLSRGFGRQGKRTFMAERQYTRMEDWLTAKLAYEGLPSKTYLSKTLAQYTSKTCSNCGFTITSADYDRVLEKLKKTATGWMTTINGKELKVEGQITYYNRYKRQNVVKDLSVELDRLSEESVNNDISSWTKGRSGEALSLLKKRFSHRPVQEKFVCLNCGFETHADEQAALNIARSWLFLRSQEYKKYQTNKTTGNTDKRAFVETWQSFYRKKLKEVWKPAV

SEQ ID NO: 29212 - protein, 978 aa, synthetic construct
  REGION 1..978: note = engineered CasX variant
QEIKRISKIRRRLVKDSNTKKAGKTGPMKTLLVRVMTPDLRERLENLRKKPENIPQPISNTSRANLNKLLTDYTEMKKAILHVYWEEFQKDPVGLMSRVAQPASKKIDQNKLKPEMDEKGNLTTAGFACSQCGQPLFVYKLEQVSEKGKAYTNYFGRCNVAEHEKLILLAQLKPEKDSDEAVTYSLGKFGQRALDFYSIHVTKESTHPVKPLAQIAGNRYASGPVGKALSDACMGTIASFLSKYQDIIIEHQKVVKGNQKRLESLRELAGKENLEYPSVTLPPQPHTKEGVDAYNEVIARVRMWVNLNLWQKLKLSRDDAKPLLRLKGFPSFPLVERQANEVDWWDMVCNVKKLINEKKEDGKVFWQNLAGYKRQEALRPYLSSEEDRKKGKKFARYQLGDLLLHLEKKHPEDWGKVYDEAWERIDKKVEGLSKHIKLEEERRSEDAQSKAALTDWLRAKASFVIEGLKEADKDEFCRCELKLQKWYGDLRGKPFAIEAENSILDISGFSKQYNCAFIWQKDGVKKLNLYLIINYFKGGKLRFKKIKPEAFEANRFYTVINKKSGEIVPMEVNFNFDDPNLIILPLAFGKRQGREFIWNDLLSLETGSLKLANGRVIEKTLYNRRTRQDEPALFVALTFERREVLDSSNIKPMNLIGVDRGENIPAVIALTDPEGCPLSRFKDSLGNPTHILRIGESYKEKQRTIQAKKEVEQRRAGGYSRKYASKAKNLADDMVRNTARDLLYYAVTQDAMLIFENLSRGFGRQGKRTFMAERQYTRMEDWLTAKLAYEGLPSKTYLSKTLAQYTSKTCSNCGFTITSADYDRVLEKLKKTATGWMTTINGKELKVEGQITYYNRYKRQNVVKDLSVELDRLSEESVNNDISSWTKGRSGEALSLLKKRFSHRPVQEKFVCLNCGFETHADEQAALNIARSWLFLRSQEYKKYQTNKTTGNTDKRAFVETWQSFYRKKLKEVWKPAV

SEQ ID NO: 29213 - protein, 979 aa, synthetic construct
  REGION 1..979: note = engineered CasX variant
QEIKRISKIRRRLVKDSNTKKAGKTGPMKTLLVRVMTPDLRERLENLRKKPENIPQPISNTSRANLNKLLTDYTEMKKAILHVYWEEFQKDPVGLMSRVAQPASKKIDQNKLKPEMDEKGNLTTAGFACSQCGQPLFVYKLEQVSEKGKAYTNYFGRCNVAEHEKLILLAQLKPEKDSDEAVTYSLGKFGQRALDFYSIHVTKESTHPVKPLAQIAGNRYASGPVGKALSDACMGTIASFLSKYQDIIIEHQKVVKGNQKRLESLRELAGKENLEYPSVTLPPQPHTKEGVDAYNEVIARVRMWVNLNLWQKLKLSRDDAKPLLRLKGFPSFPLVERQANEVDWWDMVCNVKKLINEKKEDGKVFWQNLAGYKRQEALRPYLSSEEDRKKGKKFARYQLGDLLLHLEKKHGERDWGKVYDEAWERIDKKVEGLSKHIKLEEERRSEDAQSKAALTDWLRAKASFVIEGLKEADKDEFCRCELKLQKWYGDLRGKPFAIEAENSILDISGFSKQYNCAFIWQKDGVKKLNLYLIINYFKGGKLRFKKIKPEAFEANRFYTVINKKSGEIVPMEVNFNFDDPNLIILPLAFGKRQGREFIWNDLLSLETGSLKLANGRVIEKTLYNRRTRQDEPALFVALTFERREVLDSSNIKPMNLIGVDRGENIPAVIALTDPEGCPLSRFKDSLGNPTHILRIGESYKEKQRTIQAKKEVEQRRAGGYSRKYASKAKNLADDMVRNTARDLLYYAVTQDAMLIFENLSRGFGRQGKRTFMAERQYTRMEDWLTAKLAYEGLPSKTYLSKTLAQYTSKTCSNCGFTITSADYDRVLEKLKKTATGWMTTINGKELKVEGQITYYNRYKRQNVVKDLSVELDRLSEESVNNDISSWTKGRSGEALSLLKKRFSHRPVQEKFVCLNCGFETHADEQAALNIARSWLFLRSQEYKKYQTNKTTGNTDKRAFVETWQSFYRKKLKEVWKPAV

SEQ ID NO: 29214 - protein, 979 aa, synthetic construct
  REGION 1..979: note = engineered CasX variant
QEIKRISKIRRRLVKDSNTKKAGKTGPMKTLLVRVMTPDLRERLENLRKKPENIPQPISNTSRANLNKLLTDYTEMKKAILHVYWEEFQKDPVGLMSRVAQPASKKIDQNKLKPEMDEKGNLTTAGFACSQCGQPLFVYKLEQVSEKGKAYTNYFGRCNVAEHEKLILLAQLKPEKDSDEAVTYSLGKFGQRALDFYSIHVTKESTHPVKPLAQIAGNRYASGPVGKALSDACMGTIASFLSKYQDIIIEHQKVVKGNQKRLESLRELAGKENLEYPSVTLPPQPHTKEGVDAYNEVIARVRMWVNLNLWQKLKLSRDDAKPLLRLKGFPSFPLVERQANEVDWWDMVCNVKKLINEKKEDGKVFWQNLAGYKRQEALRPYLSSEEDRKKGKKFARYQLGDLLLHLEKKHGEYDWGKVYDEAWERIDKKVEGLSKHIKLEEERRSEDAQSKAALTDWLRAKASFVIEGLKEADKDEFCRCELKLQKWYGDLRGKPFAIEAENSILDISGFSKQYNCAFIWQKDGVKKLNLYLIINYFKGGKLRFKKIKPEAFEANRFYTVINKKSGEIVPMEVNFNFDDPNLIILPLAFGKRQGREFIWNDLLSLETGSLKLANGRVIEKTLYNRRTRQDEPALFVALTFERREVLDSSNIKPMNLIGVDRGENIPAVIALTDPEGCPLSRFKDSLGNPTHILRIGESYKEKQRTIQAKKEVEQRRAGGYSRKYASKAKNLADDMVRNTARDLLYYAVTQDAMLIFENLSRGFGRQGKRTFMAERQYTRMEDWLTAKLAYEGLPSKTYLSKTLAQYTSKTCSNCGFTITSADYDRVLEKLKKTATGWMTTINGKELKVEGQITYYNRYKRQNVVKDLSVELDRLSEESVNNDISSWTKGRSGEALSLLKKRFSHRPVQEKFVCLNCGFETHADEQAALNIARSWLFLRSQEYKKYQTNKTTGNTDKRAFVETWQSFYRKKLKEVWKPAV

SEQ ID NO: 29215 - protein, 978 aa, synthetic construct
  REGION 1..978: note = engineered CasX variant
QEIKRISKIRRRLVKDSNTKKAGKTGPMKTLLVRVMTPDLRERLENLRKKPENIPQPISNTSRANLNKLLTDYTEMKKAILHVYWEEFQKDPVGLMSRVAQPASKKIDQNKLKPEMDEKGNLTTAGFACSQCGQPLFVYKLEQVSEKGKAYTNYFGRCNVAEHEKLILLAQLKPEKDSDEAVTYSLGKFGQRALDFYSIHVTKESTHPVKPLAQIAGNRYASGPVGKALSDACMGTIASFLSKYQDIIIEHQKVVKGNQKRLESLRELAGKENLEYPSVTLPPQPHTKEGVDAYNEVIARVRMWVNLNLWQKLKLSRDDAKPLLRLKGFPSFPLVERQANEVDWWDMVCNVKKLINEKKEDGKVFWQNLAGYKRQEALRPYLSSEEDRKKGKKFARYQLGDLLLHLEKKHGEDWGDVYDEAWERIDKKVEGLSKHIKLEEERRSEDAQSKAALTDWLRAKASFVIEGLKEADKDEFCRCELKLQKWYGDLRGKPFAIEAENSILDISGFSKQYNCAFIWQKDGVKKLNLYLIINYFKGGKLRFKKIKPEAFEANRFYTVINKKSGEIVPMEVNFNFDDPNLIILPLAFGKRQGREFIWNDLLSLETGSLKLANGRVIEKTLYNRRTRQDEPALFVALTFERREVLDSSNIKPMNLIGVDRGENIPAVIALTDPEGCPLSRFKDSLGNPTHILRIGESYKEKQRTIQAKKEVEQRRAGGYSRKYASKAKNLADDMVRNTARDLLYYAVTQDAMLIFENLSRGFGRQGKRTFMAERQYTRMEDWLTAKLAYEGLPSKTYLSKTLAQYTSKTCSNCGFTITSADYDRVLEKLKKTATGWMTTINGKELKVEGQITYYNRYKRQNVVKDLSVELDRLSEESVNNDISSWTKGRSGEALSLLKKRFSHRPVQEKFVCLNCGFETHADEQAALNIARSWLFLRSQEYKKYQTNKTTGNTDKRAFVETWQSFYRKKLKEVWKPAV

SEQ ID NO: 29216 - protein, 978 aa, synthetic construct
  REGION 1..978: note = engineered CasX variant
QEIKRISKIRRRLVKDSNTKKAGKTGPMKTLLVRVMTPDLRERLENLRKKPENIPQPISNTSRANLNKLLTDYTEMKKAILHVYWEEFQKDPVGLMSRVAQPASKKIDQNKLKPEMDEKGNLTTAGFACSQCGQPLFVYKLEQVSEKGKAYTNYFGRCNVAEHEKLILLAQLKPEKDSDEAVTYSLGKFGQRALDFYSIHVTKESTHPVKPLAQIAGNRYASGPVGKALSDACMGTIASFLSKYQDIIIEHQKVVKGNQKRLESLRELAGKENLEYPSVTLPPQPHTKEGVDAYNEVIARVRMWVNLNLWQKLKLSRDDAKPLLRLKGFPSFPLVERQANEVDWWDMVCNVKKLINEKKEDGKVFWQNLAGYKRQEALRPYLSSEEDRKKGKKFARYQLGDLLLHLEKKHGEDWGKVYGEAWERIDKKVEGLSKHIKLEEERRSEDAQSKAALTDWLRAKASFVIEGLKEADKDEFCRCELKLQKWYGDLRGKPFAIEAENSILDISGFSKQYNCAFIWQKDGVKKLNLYLIINYFKGGKLRFKKIKPEAFEANRFYTVINKKSGEIVPMEVNFNFDDPNLIILPLAFGKRQGREFIWNDLLSLETGSLKLANGRVIEKTLYNRRTRQDEPALFVALTFERREVLDSSNIKPMNLIGVDRGENIPAVIALTDPEGCPLSRFKDSLGNPTHILRIGESYKEKQRTIQAKKEVEQRRAGGYSRKYASKAKNLADDMVRNTARDLLYYAVTQDAMLIFENLSRGFGRQGKRTFMAERQYTRMEDWLTAKLAYEGLPSKTYLSKTLAQYTSKTCSNCGFTITSADYDRVLEKLKKTATGWMTTINGKELKVEGQITYYNRYKRQNVVKDLSVELDRLSEESVNNDISSWTKGRSGEALSLLKKRFSHRPVQEKFVCLNCGFETHADEQAALNIARSWLFLRSQEYKKYQTNKTTGNTDKRAFVETWQSFYRKKLKEVWKPAV

SEQ ID NO: 29217 - protein, 978 aa, synthetic construct
  REGION 1..978: note = engineered CasX variant
QEIKRISKIRRRLVKDSNTKKAGKTGPMKTLLVRVMTPDLRERLENLRKKPENIPQPISNTSRANLNKLLTDYTEMKKAILHVYWEEFQKDPVGLMSRVAQPASKKIDQNKLKPEMDEKGNLTTAGFACSQCGQPLFVYKLEQVSEKGKAYTNYFGRCNVAEHEKLILLAQLKPEKDSDEAVTYSLGKFGQRALDFYSIHVTKESTHPVKPLAQIAGNRYASGPVGKALSDACMGTIASFLSKYQDIIIEHQKVVKGNQKRLESLRELAGKENLEYPSVTLPPQPHTKEGVDAYNEVIARVRMWVNLNLWQKLKLSRDDAKPLLRLKGFPSFPLVERQANEVDWWDMVCNVKKLINEKKEDGKVFWQNLAGYKRQEALRPYLSSEEDRKKGKKFARYQLGDLLLHLEKKHGEDWGKVYDEAWERIDKKVEGLSKHIKLEEERRSEDAQSKAALTDWLRAKASFVIEGKKEADKDEFCRCELKLQKWYGDLRGKPFAIEAENSILDISGFSKQYNCAFIWQKDGVKKLNLYLIINYFKGGKLRFKKIKPEAFEANRFYTVINKKSGEIVPMEVNFNFDDPNLIILPLAFGKRQGREFIWNDLLSLETGSLKLANGRVIEKTLYNRRTRQDEPALFVALTFERREVLDSSNIKPMNLIGVDRGENIPAVIALTDPEGCPLSRFKDSLGNPTHILRIGESYKEKQRTIQAKKEVEQRRAGGYSRKYASKAKNLADDMVRNTARDLLYYAVTQDAMLIFENLSRGFGRQGKRTFMAERQYTRMEDWLTAKLAYEGLPSKTYLSKTLAQYTSKTCSNCGFTITSADYDRVLEKLKKTATGWMTTINGKELKVEGQITYYNRYKRQNVVKDLSVELDRLSEESVNNDISSWTKGRSGEALSLLKKRFSHRPVQEKFVCLNCGFETHADEQAALNIARSWLFLRSQEYKKYQTNKTTGNTDKRAFVETWQSFYRKKLKEVWKPAV

SEQ ID NO: 29218 - protein, 978 aa, synthetic construct
  REGION 1..978: note = engineered CasX variant
QEIKRISKIRRRLVKDSNTKKAGKTGPMKTLLVRVMTPDLRERLENLRKKPENIPQPISNTSRANLNKLLTDYTEMKKAILHVYWEEFQKDPVGLMSRVAQPASKKIDQNKLKPEMDEKGNLTTAGFACSQCGQPLFVYKLEQVSEKGKAYTNYFGRCNVAEHEKLILLAQLKPEKDSDEAVTYSLGKFGQRALDFYSIHVTKESTHPVKPLAQIAGNRYASGPVGKALSDACMGTIASFLSKYQDIIIEHQKVVKGNQKRLESLRELAGKENLEYPSVTLPPQPHTKEGVDAYNEVIARVRMWVNLNLWQKLKLSRDDAKPLLRLKGFPSFPLVERQANEVDWWDMVCNVKKLINEKKEDGKVFWQNLAGYKRQEALRPYLSSEEDRKKGKKFARYQLGDLLLHLEKKHGEDWGKVYDEAWERIDKKVEGLSKHIKLEEERRSEDAQSKAALTDWLRAKASFVIEGSKEADKDEFCRCELKLQKWYGDLRGKPFAIEAENSILDISGFSKQYNCAFIWQKDGVKKLNLYLIINYFKGGKLRFKKIKPEAFEANRFYTVINKKSGEIVPMEVNFNFDDPNLIILPLAFGKRQGREFIWNDLLSLETGSLKLANGRVIEKTLYNRRTRQDEPALFVALTFERREVLDSSNIKPMNLIGVDRGENIPAVIALTDPEGCPLSRFKDSLGNPTHILRIGESYKEKQRTIQAKKEVEQRRAGGYSRKYASKAKNLADDMVRNTARDLLYYAVTQDAMLIFENLSRGFGRQGKRTFMAERQYTRMEDWLTAKLAYEGLPSKTYLSKTLAQYTSKTCSNCGFTITSADYDRVLEKLKKTATGWMTTINGKELKVEGQITYYNRYKRQNVVKDLSVELDRLSEESVNNDISSWTKGRSGEALSLLKKRFSHRPVQEKFVCLNCGFETHADEQAALNIARSWLFLRSQEYKKYQTNKTTGNTDKRAFVETWQSFYRKKLKEVWKPAV

SEQ ID NO: 29219 - protein, 979 aa, synthetic construct
  REGION 1..979: note = engineered CasX variant
QEIKRISKIRRRLVKDSNTKKAGKTGPMKTLLVRVMTPDLRERLENLRKKPENIPQPISNTSRANLNKLLTDYTEMKKAILHVYWEEFQKDPVGLMSRVAQPASKKIDQNKLKPEMDEKGNLTTAGFACSQCGQPLFVYKLEQVSEKGKAYTNYFGRCNVAEHEKLILLAQLKPEKDSDEAVTYSLGKFGQRALDFYSIHVTKESTHPVKPLAQIAGNRYASGPVGKALSDACMGTIASFLSKYQDIIIEHQKVVKGNQKRLESLRELAGKENLEYPSVTLPPQPHTKEGVDAYNEVIARVRMWVNLNLWQKLKLSRDDAKPLLRLKGFPSFPLVERQANEVDWWDMVCNVKKLINEKKEDGKVFWQNLAGYKRQEALRPYLSSEEDRKKGKKFARYQLGDLLLHLEKKHGEDWGKVYDEAWERIDKKVEGLSKHIKLEEERRSEDAQSKAALTDWLRAKASFVIEGLKEADDKDEFCRCELKLQKWYGDLRGKPFAIEAENSILDISGFSKQYNCAFIWQKDGVKKLNLYLIINYFKGGKLRFKKIKPEAFEANRFYTVINKKSGEIVPMEVNFNFDDPNLIILPLAFGKRQGREFIWNDLLSLETGSLKLANGRVIEKTLYNRRTRQDEPALFVALTFERREVLDSSNIKPMNLIGVDRGENIPAVIALTDPEGCPLSRFKDSLGNPTHILRIGESYKEKQRTIQAKKEVEQRRAGGYSRKYASKAKNLADDMVRNTARDLLYYAVTQDAMLIFENLSRGFGRQGKRTFMAERQYTRMEDWLTAKLAYEGLPSKTYLSKTLAQYTSKTCSNCGFTITSADYDRVLEKLKKTATGWMTTINGKELKVEGQITYYNRYKRQNVVKDLSVELDRLSEESVNNDISSWTKGRSGEALSLLKKRFSHRPVQEKFVCLNCGFETHADEQAALNIARSWLFLRSQEYKKYQTNKTTGNTDKRAFVETWQSFYRKKLKEVWKPAV

SEQ ID NO: 29220 - protein, 979 aa, synthetic construct
  REGION 1..979: note = engineered CasX variant
QEIKRISKIRRRLVKDSNTKKAGKTGPMKTLLVRVMTPDLRERLENLRKKPENIPQPISNTSRANLNKLLTDYTEMKKAILHVYWEEFQKDPVGLMSRVAQPASKKIDQNKLKPEMDEKGNLTTAGFACSQCGQPLFVYKLEQVSEKGKAYTNYFGRCNVAEHEKLILLAQLKPEKDSDEAVTYSLGKFGQRALDFYSIHVTKESTHPVKPLAQIAGNRYASGPVGKALSDACMGTIASFLSKYQDIIIEHQKVVKGNQKRLESLRELAGKENLEYPSVTLPPQPHTKEGVDAYNEVIARVRMWVNLNLWQKLKLSRDDAKPLLRLKGFPSFPLVERQANEVDWWDMVCNVKKLINEKKEDGKVFWQNLAGYKRQEALRPYLSSEEDRKKGKKFARYQLGDLLLHLEKKHGEDWGKVYDEAWERIDKKVEGLSKHIKLEEERRSEDAQSKAALTDWLRAKASFVIEGLKEADKDEFCRCELKLQKWYGDLRGKPFAIEAENSILDISGFSKQYNCAFIWQKDGVKKLNLYLIINYFKGGKLRFKKIKPEAFEANRFYTVINKKSGEIVPMEVNFNFDDPNLIILPLAFGKRQGREFIWNDLLSLETGSLKLANGRVIEKTLYNRRTRQDEPALFVALTFERREVLDSSNIKPMNLIGVDRGENIPAVIALTDPEGCPLSRFKDSLGNPTHILRIGESYKEKQRTIQAKKEVEQRRAGGYSRKYASKAKNLADDMVRNTARDLLYYAVTQDAMLIFENLSRGFGRQGKRTFMAERQYTRMEDWLTAKLAYEGLPSKTYLSKTLAQYTSKTCSNCGFTITSADYDRVLEKLKKTATGWMTTINGKELKVEGQITYYNRYKRQNVVKDLSVELDRLSEESVNNDISSWTKGRSGNEALSLLKKRFSHRPVQEKFVCLNCGFETHADEQAALNIARSWLFLRSQEYKKYQTNKTTGNTDKRAFVETWQSFYRKKLKEVWKPAV

SEQ ID NO: 29221 - protein, 978 aa, synthetic construct
  REGION 1..978: note = engineered CasX variant
QEIKRISKIRRRLVKDSNTKKAGKTGPMKTLLVRVMTPDLRERLENLRKKPENIPQPISNTSRANLNKLLTDYTEMKKAILHVYWEEFQKDPVGLMSRVAQPASKKIDQNKLKPEMDEKGNLTTAGFACSQCGQPLFVYKLEQVSEKGKAYTNYFGRCNVAEHEKLILLAQLKPEKDSDEAVTYSLGKFGQRALDFYSIHVTKESTHPVKPLAQIAGNRYASGPVGKALSDACMGTIASFLSKYQDIIIEHQKVVKGNQKRLESLRELAGKENLEYPSVTLPPQPHTKEGVDAYNEVIARVRMWVNLNLWQKLKLSRDDAKPLLRLKGFPSFPLVERQANEVDWWDMVCNVKKLINEKKEDGKVFWQNLAGYKRQEALRPYLSSEEDRQKGKKFARYQLGDLLLHLEKKHGEDWGKVYDEAWERIDKKVEGLSKHIKLEEERRSEDAQSKAALTDWLRAKASFVIEGLKEADKDEFCRCELKLQKWYGDLRGKPFAIEAENSILDISGFSKQYNCAFIWQKDGVKKLNLYLIINYFKGGKLRFKKIKPEAFEANRFYTVINKKSGEIVPMEVNFNFDDPNLIILPLAFGKRQGREFIWNDLLSLETGSLKLANGRVIEKTLYNRRTRQDEPALFVALTFERREVLDSSNIKPMNLIGVDRGENIPAVIALTDPEGCPLSRFKDSLGNPTHILRIGESYKEKQRTIQAKKEVEQRRAGGYSRKYASKAKNLADDMVRNTARDLLYYAVTQDAMLIFENLSRGFGRQGKRTFMAERQYTRMEDWLTAKLAYEGLPSKTYLSKTLAQYTSKTCSNCGFTITSADYDRVLEKLKKTATGWMTTINGKELKVEGQITYYNRYKRQNVVKDLSVELDRLSEESVNNDISSWTKGRSGEALSLLKKRFSHRPVQEKFVCLNCGFETHADEQAALNIARSWLFLRSQEYKKYQTNKTTGNTDKRAFVETWQSFYRKKLKEVWKPAV

SEQ ID NO: 29222 - protein, 978 aa, synthetic construct
  REGION 1..978: note = engineered CasX variant
QEIKRISKIRRRLVKDSNTKKAGKTGPMKTLLVRVMTPDLRERLENLRKKPENIPQPISNTSRANLNKLLTDYTEMKKAILHVYWEEFQKDPVGLMSRVAQPASKKIDQNKLKPEMDEKGNLTTAGFACSQCGQPLFVYKLEQVSEKGKAYTNYFGRCNVAEHEKLILLAQLKPEKDSDEAVTYSLGKFGQRALDFYSIHVTKESTHPVKPLAQIAGNRYASGPVGKALSDACMGTIASFLSKYQDIIIEHQKVVKGNQKRLESLRELAGKENLEYPSVTLPPQPHTKEGVDAYNEVIARVRMWVNLNLWQKLKLSRDDAKPLLRLKGFPSFPLVERQANEVDWWDMVCNVKKLINEKKEDGKVFWQNLAGYKRQEALRPYLSSEEDRKKGKKFARYQLGDLLLHLEKKHGEDWGKVYDEAWERIDKKVEGLSKHIKLEEERRSEDAQSKAALTDWLRAKASFVIEGLKEADKDEFCRCELKLQKWYGDLRGKPFAIEAENSILDISGFSKQYNCAFIWQKDGVKKLNLYLIINYFKGGKLRFKKIKPEAFEANRFYTVINKKSGEIVPMEVNFNFDDPNLIILPLAFGKRQGREFIWNDLLSLETGSLKLANGRVIEKTLYNRRTRQDEPALFVALTFERREVLDSSNIKPMNLIGVDRGENIPAVIALTDPEGCPLSRFKDSLGNPTHILRIGESYKEKQRTIQAKKEVEQRRAGGYSRKYASKAKNLADDMVRNTARDLLYYAVTQDAMLIFENLSRGFGRQGKRTFMAERQYTRMEDWLTAKLAYEGLPSQTYLSKTLAQYTSKTCSNCGFTITSADYDRVLEKLKKTATGWMTTINGKELKVEGQITYYNRYKRQNVVKDLSVELDRLSEESVNNDISSWTKGRSGEALSLLKKRFSHRPVQEKFVCLNCGFETHADEQAALNIARSWLFLRSQEYKKYQTNKTTGNTDKRAFVETWQSFYRKKLKEVWKPAV

SEQ ID NO: 29223 - protein, 978 aa, synthetic construct
  REGION 1..978: note = engineered CasX variant
QEIKRISKIRRRLVKDSNTKKAGKTGPMKTLLVRVMTPDLRERLENLRKKPENIPQPISNTSRANLNKLLTDYTEMKKAILHVYWEEFQKDPVGLMSRVAQPASKKIDQNKLKPEMDEKGNLTTAGFACSQCGQPLFVYKLEQVSEKGKAYTNYFGRCNVAEHEKLILLAQLKPEKDSDEAVTYSLGKFGQRALDFYSIHVTKESTHPVKPLAQIAGNRYASGPVGKALSDACMGTIASFLSKYQDIIIEHQKVVKGNQKRLESLRELAGKENLEYPSVTLPPQPHTKEGVDAYNEVIARVRMWVNLNLWQKLKLSRDDAKPLLRLKGFPSFPLVERQANEVDWWDMVCNVKKLINEKKEDGKVFWQNLAGYKRQEALRPYLSSEEDRKKGKKFARYQLGDLLLHLEKKHGEDWGKVYDEAWERIDKKVEGLSKHIKLEEERRSEDAQSKAALTDWLRAKASFVIEGLKEADKDEFCRCELKLQKWYGDLRGKPFAIEAENSILDISGFSKQYNCAFIWQKDGVKKLNLYLIINYFKGGKLRFKKIKPEAFEANRFYTVINKKSGEIVPMEVNFNFDDPNLIILPLAFGKRQGREFIWNDLLSLETGSLKLANGRVIEKTLYNRRTRQDEPALFVALTFERREVLDSSNIKPMNLIGVDRGENIPAVIALTDPEGCPLSRFKDSLGNPTHILRIGESYKEKQRTIQAKKEVEQRRAGGYSRKYASKAKNLADDMVRNTARDLLYYAVTQDAMLIFENLSRGFGRQGKRTFMAERQYTRMEDWLTAKLAYNGLPSKTYLSKTLAQYTSKTCSNCGFTITSADYDRVLEKLKKTATGWMTTINGKELKVEGQITYYNRYKRQNVVKDLSVELDRLSEESVNNDISSWTKGRSGEALSLLKKRFSHRPVQEKFVCLNCGFETHADEQAALNIARSWLFLRSQEYKKYQTNKTTGNTDKRAFVETWQSFYRKKLKEVWKPAV

SEQ ID NO: 29224 - protein, 978 aa, synthetic construct
  REGION 1..978: note = engineered CasX variant
QEIKRISKIRRRLVKDSNTKKAGKTGPMKTLLVRVMTPDLRERLENLRKKPENIPQPISNTSRANLNKLLTDYTEMKKAILHVYWEEFQKDPVGLMSRVAQPASKKIDQNKLKPEMDEKGNLTTAGFACSQCGQPLFVYKLEQVSEKGKAYTNYFGRCNVAEHEKLIQLAQLKPEKDSDEAVTYSLGKFGQRALDFYSIHVTKESTHPVKPLAQIAGNRYASGPVGKALSDACMGTIASFLSKYQDIIIEHQKVVKGNQKRLESLRELAGKENLEYPSVTLPPQPHTKEGVDAYNEVIARVRMWVNLNLWQKLKLSRDDAKPLLRLKGFPSFPLVERQANEVDWWDMVCNVKKLINEKKEDGKVFWQNLAGYKRQEALRPYLSSEEDRKKGKKFARYQLGDLLLHLEKKHGEDWGKVYDEAWERIDKKVEGLSKHIKLEEERRSEDAQSKAALTDWLRAKASFVIEGLKEADKDEFCRCELKLQKWYGDLRGKPFAIEAENSILDISGFSKQYNCAFIWQKDGVKKLNLYLIINYFKGGKLRFKKIKPEAFEANRFYTVINKKSGEIVPMEVNFNFDDPNLIILPLAFGKRQGREFIWNDLLSLETGSLKLANGRVIEKTLYNRRTRQDEPALFVALTFERREVLDSSNIKPMNLIGVDRGENIPAVIALTDPEGCPLSRFKDSLGNPTHILRIGESYKEKQRTIQAKKEVEQRRAGGYSRKYASKAKNLADDMVRNTARDLLYYAVTQDAMLIFENLSRGFGRQGKRTFMAERQYTRMEDWLTAKLAYEGLPSKTYLSKTLAQYTSKTCSNCGFTITSADYDRVLEKLKKTATGWMTTINGKELKVEGQITYYNRYKRQNVVKDLSVELDRLSEESVNNDISSWTKGRSGEALSLLKKRFSHRPVQEKFVCLNCGFETHADEQAALNIARSWLFLRSQEYKKYQTNKTTGNTDKRAFVETWQSFYRKKLKEVWKPAV

SEQ ID NO: 29225 - protein, 978 aa, synthetic construct
  REGION 1..978: note = engineered CasX variant
QEIKRISKIRRRLVKDSNTKKAGKTGPMKTLLVRVMTPDLRERLENLRKKPENIPQPISNTSRANLNKLLTDYTEMKKAILHVYWEEFQKDPVGLMSRVAQPASKKIDQNKLKPEMDEKGNLTTAGFACSQCGQPLFVYKLEQVSEKGKAYTNYFGRCNVAEHEKLILLAQLKPEKDSDEAVTYSLGKFGQRALDFYSIHVTKESTHPVKPLAQIAGNRYASGPVGKALSDACMGTIASFLSKYQDIIIEHQKVVKGNQKRLESLRELAGKENLEYPSVTLPPQPHTKEGVDAYNEVIARVRMWVNLNLWQKLKLSRDDAKPLLRLKGFPSFPLVERQANEVDWWDMVCNVKKLINEKKEDGKVFWQNLAIYKRQEALRPYLSSEEDRKKGKKFARYQLGDLLLHLEKKHGEDWGKVYDEAWERIDKKVEGLSKHIKLEEERRSEDAQSKAALTDWLRAKASFVIEGLKEADKDEFCRCELKLQKWYGDLRGKPFAIEAENSILDISGFSKQYNCAFIWQKDGVKKLNLYLIINYFKGGKLRFKKIKPEAFEANRFYTVINKKSGEIVPMEVNFNFDDPNLIILPLAFGKRQGREFIWNDLLSLETGSLKLANGRVIEKTLYNRRTRQDEPALFVALTFERREVLDSSNIKPMNLIGVDRGENIPAVIALTDPEGCPLSRFKDSLGNPTHILRIGESYKEKQRTIQAKKEVEQRRAGGYSRKYASKAKNLADDMVRNTARDLLYYAVTQDAMLIFENLSRGFGRQGKRTFMAERQYTRMEDWLTAKLAYEGLPSKTYLSKTLAQYTSKTCSNCGFTITSADYDRVLEKLKKTATGWMTTINGKELKVEGQITYYNRYKRQNVVKDLSVELDRLSEESVNNDISSWTKGRSGEALSLLKKRFSHRPVQEKFVCLNCGFETHADEQAALNIARSWLFLRSQEYKKYQTNKTTGNTDKRAFVETWQSFYRKKLKEVWKPAV

SEQ ID NO: 29226 - protein, 978 aa, synthetic construct
  REGION 1..978: note = engineered CasX variant
QEIKRISKIRRRLVKDSNTKKAGKTGPMKTLLVRVMTPDLRERLENLRKKPENIPQPISNTSRANLNKLLTDYTEMKKAILHVYWEEFQKDPVGLMSRVAQPASKKIDQNKLKPEMDEKGNLTTAGFACSQCGQPLFVYKLEQVSEKGKAYTNYFGRCNVAEHEKLILLAQLKPEKDSDEAVTYSLGKFGQRALDFYSIHVTKESTHPVKPLAQIAGNRYASGPVGKALSDACMGTIASFLSKYQDIIIEHQKVVKGNQKRLESLRELAGKENLEYPSVTLPPQPHTKEGVDAYNEVIARVRMWVNLNLWQKLKLSRDDAKPLLRLKGFPSFPLVERQANEVDWWDMVCNVKKLINEKKEDGKVFWQNLAGYKRQEALRPYLSSEEDREKGKKFARYQLGDLLLHLEKKHGEDWGKVYDEAWERIDKKVEGLSKHIKLEEERRSEDAQSKAALTDWLRAKASFVIEGLKEADKDEFCRCELKLQKWYGDLRGKPFAIEAENSILDISGFSKQYNCAFIWQKDGVKKLNLYLIINYFKGGKLRFKKIKPEAFEANRFYTVINKKSGEIVPMEVNFNFDDPNLIILPLAFGKRQGREFIWNDLLSLETGSLKLANGRVIEKTLYNRRTRQDEPALFVALTFERREVLDSSNIKPMNLIGVDRGENIPAVIALTDPEGCPLSRFKDSLGNPTHILRIGESYKEKQRTIQAKKEVEQRRAGGYSRKYASKAKNLADDMVRNTARDLLYYAVTQDAMLIFENLSRGFGRQGKRTFMAERQYTRMEDWLTAKLAYEGLPSKTYLSKTLAQYTSKTCSNCGFTITSADYDRVLEKLKKTATGWMTTINGKELKVEGQITYYNRYKRQNVVKDLSVELDRLSEESVNNDISSWTKGRSGEALSLLKKRFSHRPVQEKFVCLNCGFETHADEQAALNIARSWLFLRSQEYKKYQTNKTTGNTDKRAFVETWQSFYRKKLKEVWKPAV

SEQ ID NO: 29227 - protein, 978 aa, synthetic construct
  REGION 1..978: note = engineered CasX variant
QEIKRISKIRRRLVKDSNTKKAGKTGPMKTLLVRVMTPDLRERLENLRKKPENIPQPISNTSRANLNKLLTDYTEMKKAILHVYWEEFQKDPVGLMSRVAQPASKKIDQNKLKPEMDEKGNLTTAGFACSQCGQPLFVYKLEQVSEKGKAYTNYFGRCNVAEHEKLILLAQLKPEKDSDEAVTYSLGKFGQRALDFYSIHVTKESTHPVKPLAQIAGNRYASGPVGKALSDACMGTIASFLSKYQDIIIEHQKVVKGNQKRLESLRELAGKENLEYPSVTLPPQPHTKEGVDAYNEVIARVRMWVNLNLWQKLKLSRDDAKPLLRLKGFPSFPLVERQANEVDWWDMVCNVKKLINEKKEDGKVFWQNLAGYKRQEALRPYLSSEEDRKKGKKFARYQLGDLLLHLEKKHGEDWGKVYDEAWERIDKKVEGLSKHIKLEEERRSEDAQSKAALTDWLRAKASFVIEGLKEADKDEFCRCELKLQKWYGDLRGKPFAIEAENSILDISGFSKQYNCAFIWQKDGVKKLNLYLIINYFKGGKLRFKKIKPEAFEANRFYTVINKKSGEIVIMEVNFNFDDPNLIILPLAFGKRQGREFIWNDLLSLETGSLKLANGRVIEKTLYNRRTRQDEPALFVALTFERREVLDSSNIKPMNLIGVDRGENIPAVIALTDPEGCPLSRFKDSLGNPTHILRIGESYKEKQRTIQAKKEVEQRRAGGYSRKYASKAKNLADDMVRNTARDLLYYAVTQDAMLIFENLSRGFGRQGKRTFMAERQYTRMEDWLTAKLAYEGLPSKTYLSKTLAQYTSKTCSNCGFTITSADYDRVLEKLKKTATGWMTTINGKELKVEGQITYYNRYKRQNVVKDLSVELDRLSEESVNNDISSWTKGRSGEALSLLKKRFSHRPVQEKFVCLNCGFETHADEQAALNIARSWLFLRSQEYKKYQTNKTTGNTDKRAFVETWQSFYRKKLKEVWKPAV

SEQ ID NO: 29228 - protein, 978 aa, synthetic construct
  REGION 1..978: note = engineered CasX variant
QEIKRINGIRRRLVKDSNTKKAGKTGPMKTLLVRVMTPDLRERLENLRKKPENIPQPISNTSRANLNKLLTDYTEMKKAILHVYWEEFQKDPVGLMSRVAQPASKKIDQNKLKPEMDEKGNLTTAGFACSQCGQPLFVYKLEQVSEKGKAYTNYFGRCNVAEHEKLILLAQLKPEKDSDEAVTYSLGKFGQRALDFYSIHVTKESTHPVKPLAQIAGNRYASGPVGKALSGACMGTIASFLSKYQDIIIEHQKVVKGNQKRLESLRELAGKENLEYPSVTLPPQPHTKEGVDAYNEVIARVRMWVNLNLWQKLKLSRDDAKPLLRLKGFPSFPLVERQANEVDWWDMVCNVKKLINEKKEDGKVFWQNLAGYKRQEALRPYLSSEEDRKKGKKFARYQLGDLLLHLEKKHGEDWGKVYDEAWERIDKKVEGLSKHIKLEEERRSEDAQSKAALTDWLRAKASFVIEGLKEADKDEFCRCELKLQKWYGDLRGKPFAIEAENSILDISGFSKQYNCAFIWQKDGVKKLNLYLIINYFKGGKLRFKKIKPEAFEANRFYTVINKKSGEIVPMEVNFNFDDPNLIILPLAFGKRQGREFIWNDLLSLETGSLKLANGRVIEKTLYNRRTRQDEPALFVALTFERREVLDSSNIKPMNLIGVDRGENIPAVIALTDPEGCPLSRFKDSLGNPTHILRIGESYKEKQRTIQAKKEVEQRRAGGYSRKYASKAKNLADDMVRNTARDLLYYAVTQDAMLIFENLSRGFGRQGKRTFMAERQYTRMEDWLTAKLAYEGLPSKTYLSKTLAQYTSKTCSNCGFTITSADYDRVLEKLKKTATGWMTTINGKELKVEGQITYYNRYKRQNVVKDLSVELDRLSEESVNNDISSWTKGRSGEALSLLKKRFSHRPVQEKFVCLNCGFETHADEQAALNIARSWLFLRSQEYKKYQTNKTTGNTDKRAFVETWQSFYRKKLKEVWKPAV

SEQ ID NO: 29229 - protein, 978 aa, synthetic construct
  REGION 1..978: note = engineered CasX variant
QEIKRINGIRRRLVKDSNTKKAGKTGPMKTLLVRVMTPDLRERLENLRKKPENIPQPISNTSRANLNKLLTDYTEMKKAILHVYWEEFQKDPVGLMSRVAQPASKKIDQNKLKPEMDEKGNLTTAGFACSQCGQPLFVYKLEQVSEKGKAYTNYFGRCNVAEHEKLILLAQLKPEKDSDEAVTYSLGKFGQRALDFYSIHVTKESTHPVKPLAQIAGNRYASGPVGKALSDACMGTIASFLSKYQDIIIEHQKVVKGNQKRLESLRELAGKENLEYPSVTLPPQPHTKEGVDAYNEVIARVRMWVNLNLWQKLKLSRDDAKPLLRLKNFPSFPLVERQANEVDWWDMVCNVKKLINEKKEDGKVFWQNLAGYKRQEALRPYLSSEEDRKKGKKFARYQLGDLLLHLEKKHGEDWGKVYDEAWERIDKKVEGLSKHIKLEEERRSEDAQSKAALTDWLRAKASFVIEGLKEADKDEFCRCELKLQKWYGDLRGKPFAIEAENSILDISGFSKQYNCAFIWQKDGVKKLNLYLIINYFKGGKLRFKKIKPEAFEANRFYTVINKKSGEIVPMEVNFNFDDPNLIILPLAFGKRQGREFIWNDLLSLETGSLKLANGRVIEKTLYNRRTRQDEPALFVALTFERREVLDSSNIKPMNLIGVDRGENIPAVIALTDPEGCPLSRFKDSLGNPTHILRIGESYKEKQRTIQAKKEVEQRRAGGYSRKYASKAKNLADDMVRNTARDLLYYAVTQDAMLIFENLSRGFGRQGKRTFMAERQYTRMEDWLTAKLAYEGLPSKTYLSKTLAQYTSKTCSNCGFTITSADYDRVLEKLKKTATGWMTTINGKELKVEGQITYYNRYKRQNVVKDLSVELDRLSEESVNNDISSWTKGRSGEALSLLKKRFSHRPVQEKFVCLNCGFETHADEQAALNIARSWLFLRSQEYKKYQTNKTTGNTDKRAFVETWQSFYRKKLKEVWKPAV

SEQ ID NO: 29230 - protein, 978 aa, synthetic construct
  REGION 1..978: note = engineered CasX variant
QEIKRINGIRRRLVKDSNTKKAGKTGPMKTLLVRVMTPDLRERLENLRKKPENIPQPISNTSRANLNKLLTDYTEMKKAILHVYWEEFQKDPVGLMSRVAQPASKKIDQNKLKPEMDEKGNLTTAGFACSQCGQPLFVYKLEQVSEKGKAYTNYFGRCNVAEHEKLILLAQLKPEKDSDEAVTYSLGKFGQRALDFYSIHVTKESTHPVKPLAQIAGNRYASGPVGKALSDACMGTIASFLSKYQDIIIEHQKVVKGNQKRLESLRELAGKENLEYPSVTLPPQPHTKEGVDAYNEVIARVRMWVNLNLWQKLKLSRDDAKPLLRLKGFPSFPLVERQANEVDWWDMVCNVKKLINEKKEDGKVFWQNLAGYKRQEALRPYLSSEEDRKKGKKFARYQLGDLLNHLEKKHGEDWGKVYDEAWERIDKKVEGLSKHIKLEEERRSEDAQSKAALTDWLRAKASFVIEGLKEADKDEFCRCELKLQKWYGDLRGKPFAIEAENSILDISGFSKQYNCAFIWQKDGVKKLNLYLIINYFKGGKLRFKKIKPEAFEANRFYTVINKKSGEIVPMEVNFNFDDPNLIILPLAFGKRQGREFIWNDLLSLETGSLKLANGRVIEKTLYNRRTRQDEPALFVALTFERREVLDSSNIKPMNLIGVDRGENIPAVIALTDPEGCPLSRFKDSLGNPTHILRIGESYKEKQRTIQAKKEVEQRRAGGYSRKYASKAKNLADDMVRNTARDLLYYAVTQDAMLIFENLSRGFGRQGKRTFMAERQYTRMEDWLTAKLAYEGLPSKTYLSKTLAQYTSKTCSNCGFTITSADYDRVLEKLKKTATGWMTTINGKELKVEGQITYYNRYKRQNVVKDLSVELDRLSEESVNNDISSWTKGRSGEALSLLKKRFSHRPVQEKFVCLNCGFETHADEQAALNIARSWLFLRSQEYKKYQTNKTTGNTDKRAFVETWQSFYRKKLKEVWKPAV

SEQ ID NO: 29231 - protein, 978 aa, synthetic construct
  REGION 1..978: note = engineered CasX variant
QEIKRINGIRRRLVKDSNTKKAGKTGPMKTLLVRVMTPDLRERLENLRKKPENIPQPISNTSRANLNKLLTDYTEMKKAILHVYWEEFQKDPVGLMSRVAQPASKKIDQNKLKPEMDEKGNLTTAGFACSQCGQPLFVYKLEQVSEKGKAYTNYFGRCNVAEHEKLILLAQLKPEKDSDEAVTYSLGKFGQRALDFYSIHVTKESTHPVKPLAQIAGNRYASGPVGKALSDACMGTIASFLSKYQDIIIEHQKVVKGNQKRLESLRELAGKENLEYPSVTLPPQPHTKEGVDAYNEVIARVRMWVNLNLWQKLKLSRDDAKPLLRLKGFPSFPLVERQANEVDWWDMVCNVKKLINEKKEDGKVFWQNLAGYKRQEALRPYLSSEEDRKKGKKFARYQLGDLLWHLEKKHGEDWGKVYDEAWERIDKKVEGLSKHIKLEEERRSEDAQSKAALTDWLRAKASFVIEGLKEADKDEFCRCELKLQKWYGDLRGKPFAIEAENSILDISGFSKQYNCAFIWQKDGVKKLNLYLIINYFKGGKLRFKKIKPEAFEANRFYTVINKKSGEIVPMEVNFNFDDPNLIILPLAFGKRQGREFIWNDLLSLETGSLKLANGRVIEKTLYNRRTRQDEPALFVALTFERREVLDSSNIKPMNLIGVDRGENIPAVIALTDPEGCPLSRFKDSLGNPTHILRIGESYKEKQRTIQAKKEVEQRRAGGYSRKYASKAKNLADDMVRNTARDLLYYAVTQDAMLIFENLSRGFGRQGKRTFMAERQYTRMEDWLTAKLAYEGLPSKTYLSKTLAQYTSKTCSNCGFTITSADYDRVLEKLKKTATGWMTTINGKELKVEGQITYYNRYKRQNVVKDLSVELDRLSEESVNNDISSWTKGRSGEALSLLKKRFSHRPVQEKFVCLNCGFETHADEQAALNIARSWLFLRSQEYKKYQTNKTTGNTDKRAFVETWQSFYRKKLKEVWKPAV

SEQ ID NO: 29232 - protein, 978 aa, synthetic construct
  REGION 1..978: note = engineered CasX variant
QEIKRINGIRRRLVKDSNTKKAGKTGPMKTLLVRVMTPDLRERLENLRKKPENIPQPISNTSRANLNKLLTDYTEMKKAILHVYWEEFQKDPVGLMSRVAQPASKKIDQNKLKPEMDEKGNLTTAGFACSQCGQPLFVYKLEQVSEKGKAYTNYFGRCNVAEHEKLILLAQLKPEKDSDEAVTYSLGKFGQRALDFYSIHVTKESTHPVKPLAQIAGNRYASGPVGKALSDACMGTIASFLSKYQDIIIEHQKVVKGNQKRLESLRELAGKENLEYPSVTLPPQPHTKEGVDAYNEVIARVRMWVNLNLWQKLKLSRDDAKPLLRLKGFPSFPLVERQANEVDWWDMVCNVKKLINEKKEDGKVFWQNLAGYKRQEALRPYLSSEEDRKKGKKFARYQLGDLLLHLYKKHGEDWGKVYDEAWERIDKKVEGLSKHIKLEEERRSEDAQSKAALTDWLRAKASFVIEGLKEADKDEFCRCELKLQKWYGDLRGKPFAIEAENSILDISGFSKQYNCAFIWQKDGVKKLNLYLIINYFKGGKLRFKKIKPEAFEANRFYTVINKKSGEIVPMEVNFNFDDPNLIILPLAFGKRQGREFIWNDLLSLETGSLKLANGRVIEKTLYNRRTRQDEPALFVALTFERREVLDSSNIKPMNLIGVDRGENIPAVIALTDPEGCPLSRFKDSLGNPTHILRIGESYKEKQRTIQAKKEVEQRRAGGYSRKYASKAKNLADDMVRNTARDLLYYAVTQDAMLIFENLSRGFGRQGKRTFMAERQYTRMEDWLTAKLAYEGLPSKTYLSKTLAQYTSKTCSNCGFTITSADYDRVLEKLKKTATGWMTTINGKELKVEGQITYYNRYKRQNVVKDLSVELDRLSEESVNNDISSWTKGRSGEALSLLKKRFSHRPVQEKFVCLNCGFETHADEQAALNIARSWLFLRSQEYKKYQTNKTTGNTDKRAFVETWQSFYRKKLKEVWKPAV

SEQ ID NO: 29233 - protein, 978 aa, synthetic construct
  REGION 1..978: note = engineered CasX variant
QEIKRINGIRRRLVKDSNTKKAGKTGPMKTLLVRVMTPDLRERLENLRKKPENIPQPISNTSRANLNKLLTDYTEMKKAILHVYWEEFQKDPVGLMSRVAQPASKKIDQNKLKPEMDEKGNLTTAGFACSQCGQPLFVYKLEQVSEKGKAYTNYFGRCNVAEHEKLILLAQLKPEKDSDEAVTYSLGKFGQRALDFYSIHVTKESTHPVKPLAQIAGNRYASGPVGKALSDACMGTIASFLSKYQDIIIEHQKVVKGNQKRLESLRELAGKENLEYPSVTLPPQPHTKEGVDAYNEVIARVRMWVNLNLWQKLKLSRDDAKPLLRLKGFPSFPLVERQANEVDWWDMVCNVKKLINEKKEDGKVFWQNLAGYKRQEALRPYLSSEEDRKKGKKFARYQLGDLLLHLEKKHPEDWGKVYDEAWERIDKKVEGLSKHIKLEEERRSEDAQSKAALTDWLRAKASFVIEGLKEADKDEFCRCELKLQKWYGDLRGKPFAIEAENSILDISGFSKQYNCAFIWQKDGVKKLNLYLIINYFKGGKLRFKKIKPEAFEANRFYTVINKKSGEIVPMEVNFNFDDPNLIILPLAFGKRQGREFIWNDLLSLETGSLKLANGRVIEKTLYNRRTRQDEPALFVALTFERREVLDSSNIKPMNLIGVDRGENIPAVIALTDPEGCPLSRFKDSLGNPTHILRIGESYKEKQRTIQAKKEVEQRRAGGYSRKYASKAKNLADDMVRNTARDLLYYAVTQDAMLIFENLSRGFGRQGKRTFMAERQYTRMEDWLTAKLAYEGLPSKTYLSKTLAQYTSKTCSNCGFTITSADYDRVLEKLKKTATGWMTTINGKELKVEGQITYYNRYKRQNVVKDLSVELDRLSEESVNNDISSWTKGRSGEALSLLKKRFSHRPVQEKFVCLNCGFETHADEQAALNIARSWLFLRSQEYKKYQTNKTTGNTDKRAFVETWQSFYRKKLKEVWKPAV

SEQ ID NO: 29234 - protein, 979 aa, synthetic construct
  REGION 1..979: note = engineered CasX variant
QEIKRINGIRRRLVKDSNTKKAGKTGPMKTLLVRVMTPDLRERLENLRKKPENIPQPISNTSRANLNKLLTDYTEMKKAILHVYWEEFQKDPVGLMSRVAQPASKKIDQNKLKPEMDEKGNLTTAGFACSQCGQPLFVYKLEQVSEKGKAYTNYFGRCNVAEHEKLILLAQLKPEKDSDEAVTYSLGKFGQRALDFYSIHVTKESTHPVKPLAQIAGNRYASGPVGKALSDACMGTIASFLSKYQDIIIEHQKVVKGNQKRLESLRELAGKENLEYPSVTLPPQPHTKEGVDAYNEVIARVRMWVNLNLWQKLKLSRDDAKPLLRLKGFPSFPLVERQANEVDWWDMVCNVKKLINEKKEDGKVFWQNLAGYKRQEALRPYLSSEEDRKKGKKFARYQLGDLLLHLEKKHGERDWGKVYDEAWERIDKKVEGLSKHIKLEEERRSEDAQSKAALTDWLRAKASFVIEGLKEADKDEFCRCELKLQKWYGDLRGKPFAIEAENSILDISGFSKQYNCAFIWQKDGVKKLNLYLIINYFKGGKLRFKKIKPEAFEANRFYTVINKKSGEIVPMEVNFNFDDPNLIILPLAFGKRQGREFIWNDLLSLETGSLKLANGRVIEKTLYNRRTRQDEPALFVALTFERREVLDSSNIKPMNLIGVDRGENIPAVIALTDPEGCPLSRFKDSLGNPTHILRIGESYKEKQRTIQAKKEVEQRRAGGYSRKYASKAKNLADDMVRNTARDLLYYAVTQDAMLIFENLSRGFGRQGKRTFMAERQYTRMEDWLTAKLAYEGLPSKTYLSKTLAQYTSKTCSNCGFTITSADYDRVLEKLKKTATGWMTTINGKELKVEGQITYYNRYKRQNVVKDLSVELDRLSEESVNNDISSWTKGRSGEALSLLKKRFSHRPVQEKFVCLNCGFETHADEQAALNIARSWLFLRSQEYKKYQTNKTTGNTDKRAFVETWQSFYRKKLKEVWKPAV

SEQ ID NO: 29235 - protein, 979 aa, synthetic construct
  REGION 1..979: note = engineered CasX variant
QEIKRINGIRRRLVKDSNTKKAGKTGPMKTLLVRVMTPDLRERLENLRKKPENIPQPISNTSRANLNKLLTDYTEMKKAILHVYWEEFQKDPVGLMSRVAQPASKKIDQNKLKPEMDEKGNLTTAGFACSQCGQPLFVYKLEQVSEKGKAYTNYFGRCNVAEHEKLILLAQLKPEKDSDEAVTYSLGKFGQRALDFYSIHVTKESTHPVKPLAQIAGNRYASGPVGKALSDACMGTIASFLSKYQDIIIEHQKVVKGNQKRLESLRELAGKENLEYPSVTLPPQPHTKEGVDAYNEVIARVRMWVNLNLWQKLKLSRDDAKPLLRLKGFPSFPLVERQANEVDWWDMVCNVKKLINEKKEDGKVFWQNLAGYKRQEALRPYLSSEEDRKKGKKFARYQLGDLLLHLEKKHGEYDWGKVYDEAWERIDKKVEGLSKHIKLEEERRSEDAQSKAALTDWLRAKASFVIEGLKEADKDEFCRCELKLQKWYGDLRGKPFAIEAENSILDISGFSKQYNCAFIWQKDGVKKLNLYLIINYFKGGKLRFKKIKPEAFEANRFYTVINKKSGEIVPMEVNFNFDDPNLIILPLAFGKRQGREFIWNDLLSLETGSLKLANGRVIEKTLYNRRTRQDEPALFVALTFERREVLDSSNIKPMNLIGVDRGENIPAVIALTDPEGCPLSRFKDSLGNPTHILRIGESYKEKQRTIQAKKEVEQRRAGGYSRKYASKAKNLADDMVRNTARDLLYYAVTQDAMLIFENLSRGFGRQGKRTFMAERQYTRMEDWLTAKLAYEGLPSKTYLSKTLAQYTSKTCSNCGFTITSADYDRVLEKLKKTATGWMTTINGKELKVEGQITYYNRYKRQNVVKDLSVELDRLSEESVNNDISSWTKGRSGEALSLLKKRFSHRPVQEKFVCLNCGFETHADEQAALNIARSWLFLRSQEYKKYQTNKTTGNTDKRAFVETWQSFYRKKLKEVWKPAV

SEQ ID NO: 29236 - protein, 978 aa, synthetic construct
  REGION 1..978: note = engineered CasX variant
QEIKRINGIRRRLVKDSNTKKAGKTGPMKTLLVRVMTPDLRERLENLRKKPENIPQPISNTSRANLNKLLTDYTEMKKAILHVYWEEFQKDPVGLMSRVAQPASKKIDQNKLKPEMDEKGNLTTAGFACSQCGQPLFVYKLEQVSEKGKAYTNYFGRCNVAEHEKLILLAQLKPEKDSDEAVTYSLGKFGQRALDFYSIHVTKESTHPVKPLAQIAGNRYASGPVGKALSDACMGTIASFLSKYQDIIIEHQKVVKGNQKRLESLRELAGKENLEYPSVTLPPQPHTKEGVDAYNEVIARVRMWVNLNLWQKLKLSRDDAKPLLRLKGFPSFPLVERQANEVDWWDMVCNVKKLINEKKEDGKVFWQNLAGYKRQEALRPYLSSEEDRKKGKKFARYQLGDLLLHLEKKHGEDWGDVYDEAWERIDKKVEGLSKHIKLEEERRSEDAQSKAALTDWLRAKASFVIEGLKEADKDEFCRCELKLQKWYGDLRGKPFAIEAENSILDISGFSKQYNCAFIWQKDGVKKLNLYLIINYFKGGKLRFKKIKPEAFEANRFYTVINKKSGEIVPMEVNFNFDDPNLIILPLAFGKRQGREFIWNDLLSLETGSLKLANGRVIEKTLYNRRTRQDEPALFVALTFERREVLDSSNIKPMNLIGVDRGENIPAVIALTDPEGCPLSRFKDSLGNPTHILRIGESYKEKQRTIQAKKEVEQRRAGGYSRKYASKAKNLADDMVRNTARDLLYYAVTQDAMLIFENLSRGFGRQGKRTFMAERQYTRMEDWLTAKLAYEGLPSKTYLSKTLAQYTSKTCSNCGFTITSADYDRVLEKLKKTATGWMTTINGKELKVEGQITYYNRYKRQNVVKDLSVELDRLSEESVNNDISSWTKGRSGEALSLLKKRFSHRPVQEKFVCLNCGFETHADEQAALNIARSWLFLRSQEYKKYQTNKTTGNTDKRAFVETWQSFYRKKLKEVWKPAV

SEQ ID NO: 29237 - protein, 978 aa, synthetic construct
  REGION 1..978: note = engineered CasX variant
QEIKRINGIRRRLVKDSNTKKAGKTGPMKTLLVRVMTPDLRERLENLRKKPENIPQPISNTSRANLNKLLTDYTEMKKAILHVYWEEFQKDPVGLMSRVAQPASKKIDQNKLKPEMDEKGNLTTAGFACSQCGQPLFVYKLEQVSEKGKAYTNYFGRCNVAEHEKLILLAQLKPEKDSDEAVTYSLGKFGQRALDFYSIHVTKESTHPVKPLAQIAGNRYASGPVGKALSDACMGTIASFLSKYQDIIIEHQKVVKGNQKRLESLRELAGKENLEYPSVTLPPQPHTKEGVDAYNEVIARVRMWVNLNLWQKLKLSRDDAKPLLRLKGFPSFPLVERQANEVDWWDMVCNVKKLINEKKEDGKVFWQNLAGYKRQEALRPYLSSEEDRKKGKKFARYQLGDLLLHLEKKHGEDWGKVYGEAWERIDKKVEGLSKHIKLEEERRSEDAQSKAALTDWLRAKASFVIEGLKEADKDEFCRCELKLQKWYGDLRGKPFAIEAENSILDISGFSKQYNCAFIWQKDGVKKLNLYLIINYFKGGKLRFKKIKPEAFEANRFYTVINKKSGEIVPMEVNFNFDDPNLIILPLAFGKRQGREFIWNDLLSLETGSLKLANGRVIEKTLYNRRTRQDEPALFVALTFERREVLDSSNIKPMNLIGVDRGENIPAVIALTDPEGCPLSRFKDSLGNPTHILRIGESYKEKQRTIQAKKEVEQRRAGGYSRKYASKAKNLADDMVRNTARDLLYYAVTQDAMLIFENLSRGFGRQGKRTFMAERQYTRMEDWLTAKLAYEGLPSKTYLSKTLAQYTSKTCSNCGFTITSADYDRVLEKLKKTATGWMTTINGKELKVEGQITYYNRYKRQNVVKDLSVELDRLSEESVNNDISSWTKGRSGEALSLLKKRFSHRPVQEKFVCLNCGFETHADEQAALNIARSWLFLRSQEYKKYQTNKTTGNTDKRAFVETWQSFYRKKLKEVWKPAV

SEQ ID NO: 29238 - protein, 978 aa, synthetic construct
  REGION 1..978: note = engineered CasX variant
QEIKRINGIRRRLVKDSNTKKAGKTGPMKTLLVRVMTPDLRERLENLRKKPENIPQPISNTSRANLNKLLTDYTEMKKAILHVYWEEFQKDPVGLMSRVAQPASKKIDQNKLKPEMDEKGNLTTAGFACSQCGQPLFVYKLEQVSEKGKAYTNYFGRCNVAEHEKLILLAQLKPEKDSDEAVTYSLGKFGQRALDFYSIHVTKESTHPVKPLAQIAGNRYASGPVGKALSDACMGTIASFLSKYQDIIIEHQKVVKGNQKRLESLRELAGKENLEYPSVTLPPQPHTKEGVDAYNEVIARVRMWVNLNLWQKLKLSRDDAKPLLRLKGFPSFPLVERQANEVDWWDMVCNVKKLINEKKEDGKVFWQNLAGYKRQEALRPYLSSEEDRKKGKKFARYQLGDLLLHLEKKHGEDWGKVYDEAWERIDKKVEGLSKHIKLEEERRSEDAQSKAALTDWLRAKASFVIEGKKEADKDEFCRCELKLQKWYGDLRGKPFAIEAENSILDISGFSKQYNCAFIWQKDGVKKLNLYLIINYFKGGKLRFKKIKPEAFEANRFYTVINKKSGEIVPMEVNFNFDDPNLIILPLAFGKRQGREFIWNDLLSLETGSLKLANGRVIEKTLYNRRTRQDEPALFVALTFERREVLDSSNIKPMNLIGVDRGENIPAVIALTDPEGCPLSRFKDSLGNPTHILRIGESYKEKQRTIQAKKEVEQRRAGGYSRKYASKAKNLADDMVRNTARDLLYYAVTQDAMLIFENLSRGFGRQGKRTFMAERQYTRMEDWLTAKLAYEGLPSKTYLSKTLAQYTSKTCSNCGFTITSADYDRVLEKLKKTATGWMTTINGKELKVEGQITYYNRYKRQNVVKDLSVELDRLSEESVNNDISSWTKGRSGEALSLLKKRFSHRPVQEKFVCLNCGFETHADEQAALNIARSWLFLRSQEYKKYQTNKTTGNTDKRAFVETWQSFYRKKLKEVWKPAV

SEQ ID NO: 29239 - protein, 978 aa, synthetic construct
  REGION 1..978: note = engineered CasX variant
QEIKRINGIRRRLVKDSNTKKAGKTGPMKTLLVRVMTPDLRERLENLRKKPENIPQPISNTSRANLNKLLTDYTEMKKAILHVYWEEFQKDPVGLMSRVAQPASKKIDQNKLKPEMDEKGNLTTAGFACSQCGQPLFVYKLEQVSEKGKAYTNYFGRCNVAEHEKLILLAQLKPEKDSDEAVTYSLGKFGQRALDFYSIHVTKESTHPVKPLAQIAGNRYASGPVGKALSDACMGTIASFLSKYQDIIIEHQKVVKGNQKRLESLRELAGKENLEYPSVTLPPQPHTKEGVDAYNEVIARVRMWVNLNLWQKLKLSRDDAKPLLRLKGFPSFPLVERQANEVDWWDMVCNVKKLINEKKEDGKVFWQNLAGYKRQEALRPYLSSEEDRKKGKKFARYQLGDLLLHLEKKHGEDWGKVYDEAWERIDKKVEGLSKHIKLEEERRSEDAQSKAALTDWLRAKASFVIEGSKEADKDEFCRCELKLQKWYGDLRGKPFAIEAENSILDISGFSKQYNCAFIWQKDGVKKLNLYLIINYFKGGKLRFKKIKPEAFEANRFYTVINKKSGEIVPMEVNFNFDDPNLIILPLAFGKRQGREFIWNDLLSLETGSLKLANGRVIEKTLYNRRTRQDEPALFVALTFERREVLDSSNIKPMNLIGVDRGENIPAVIALTDPEGCPLSRFKDSLGNPTHILRIGESYKEKQRTIQAKKEVEQRRAGGYSRKYASKAKNLADDMVRNTARDLLYYAVTQDAMLIFENLSRGFGRQGKRTFMAERQYTRMEDWLTAKLAYEGLPSKTYLSKTLAQYTSKTCSNCGFTITSADYDRVLEKLKKTATGWMTTINGKELKVEGQITYYNRYKRQNVVKDLSVELDRLSEESVNNDISSWTKGRSGEALSLLKKRFSHRPVQEKFVCLNCGFETHADEQAALNIARSWLFLRSQEYKKYQTNKTTGNTDKRAFVETWQSFYRKKLKEVWKPAV

SEQ ID NO: 29240 - protein, 979 aa, synthetic construct
  REGION 1..979: note = engineered CasX variant
QEIKRINGIRRRLVKDSNTKKAGKTGPMKTLLVRVMTPDLRERLENLRKKPENIPQPISNTSRANLNKLLTDYTEMKKAILHVYWEEFQKDPVGLMSRVAQPASKKIDQNKLKPEMDEKGNLTTAGFACSQCGQPLFVYKLEQVSEKGKAYTNYFGRCNVAEHEKLILLAQLKPEKDSDEAVTYSLGKFGQRALDFYSIHVTKESTHPVKPLAQIAGNRYASGPVGKALSDACMGTIASFLSKYQDIIIEHQKVVKGNQKRLESLRELAGKENLEYPSVTLPPQPHTKEGVDAYNEVIARVRMWVNLNLWQKLKLSRDDAKPLLRLKGFPSFPLVERQANEVDWWDMVCNVKKLINEKKEDGKVFWQNLAGYKRQEALRPYLSSEEDRKKGKKFARYQLGDLLLHLEKKHGEDWGKVYDEAWERIDKKVEGLSKHIKLEEERRSEDAQSKAALTDWLRAKASFVIEGLKEADDKDEFCRCELKLQKWYGDLRGKPFAIEAENSILDISGFSKQYNCAFIWQKDGVKKLNLYLIINYFKGGKLRFKKIKPEAFEANRFYTVINKKSGEIVPMEVNFNFDDPNLIILPLAFGKRQGREFIWNDLLSLETGSLKLANGRVIEKTLYNRRTRQDEPALFVALTFERREVLDSSNIKPMNLIGVDRGENIPAVIALTDPEGCPLSRFKDSLGNPTHILRIGESYKEKQRTIQAKKEVEQRRAGGYSRKYASKAKNLADDMVRNTARDLLYYAVTQDAMLIFENLSRGFGRQGKRTFMAERQYTRMEDWLTAKLAYEGLPSKTYLSKTLAQYTSKTCSNCGFTITSADYDRVLEKLKKTATGWMTTINGKELKVEGQITYYNRYKRQNVVKDLSVELDRLSEESVNNDISSWTKGRSGEALSLLKKRFSHRPVQEKFVCLNCGFETHADEQAALNIARSWLFLRSQEYKKYQTNKTTGNTDKRAFVETWQSFYRKKLKEVWKPAV

SEQ ID NO: 29241 - protein, 979 aa, synthetic construct
  REGION 1..979: note = engineered CasX variant
QEIKRINGIRRRLVKDSNTKKAGKTGPMKTLLVRVMTPDLRERLENLRKKPENIPQPISNTSRANLNKLLTDYTEMKKAILHVYWEEFQKDPVGLMSRVAQPASKKIDQNKLKPEMDEKGNLTTAGFACSQCGQPLFVYKLEQVSEKGKAYTNYFGRCNVAEHEKLILLAQLKPEKDSDEAVTYSLGKFGQRALDFYSIHVTKESTHPVKPLAQIAGNRYASGPVGKALSDACMGTIASFLSKYQDIIIEHQKVVKGNQKRLESLRELAGKENLEYPSVTLPPQPHTKEGVDAYNEVIARVRMWVNLNLWQKLKLSRDDAKPLLRLKGFPSFPLVERQANEVDWWDMVCNVKKLINEKKEDGKVFWQNLAGYKRQEALRPYLSSEEDRKKGKKFARYQLGDLLLHLEKKHGEDWGKVYDEAWERIDKKVEGLSKHIKLEEERRSEDAQSKAALTDWLRAKASFVIEGLKEADKDEFCRCELKLQKWYGDLRGKPFAIEAENSILDISGFSKQYNCAFIWQKDGVKKLNLYLIINYFKGGKLRFKKIKPEAFEANRFYTVINKKSGEIVPMEVNFNFDDPNLIILPLAFGKRQGREFIWNDLLSLETGSLKLANGRVIEKTLYNRRTRQDEPALFVALTFERREVLDSSNIKPMNLIGVDRGENIPAVIALTDPEGCPLSRFKDSLGNPTHILRIGESYKEKQRTIQAKKEVEQRRAGGYSRKYASKAKNLADDMVRNTARDLLYYAVTQDAMLIFENLSRGFGRQGKRTFMAERQYTRMEDWLTAKLAYEGLPSKTYLSKTLAQYTSKTCSNCGFTITSADYDRVLEKLKKTATGWMTTINGKELKVEGQITYYNRYKRQNVVKDLSVELDRLSEESVNNDISSWTKGRSGNEALSLLKKRFSHRPVQEKFVCLNCGFETHADEQAALNIARSWLFLRSQEYKKYQTNKTTGNTDKRAFVETWQSFYRKKLKEVWKPAV

SEQ ID NO: 29242 - protein, 978 aa, synthetic construct
  REGION 1..978: note = engineered CasX variant
QEIKRINGIRRRLVKDSNTKKAGKTGPMKTLLVRVMTPDLRERLENLRKKPENIPQPISNTSRANLNKLLTDYTEMKKAILHVYWEEFQKDPVGLMSRVAQPASKKIDQNKLKPEMDEKGNLTTAGFACSQCGQPLFVYKLEQVSEKGKAYTNYFGRCNVAEHEKLILLAQLKPEKDSDEAVTYSLGKFGQRALDFYSIHVTKESTHPVKPLAQIAGNRYASGPVGKALSDACMGTIASFLSKYQDIIIEHQKVVKGNQKRLESLRELAGKENLEYPSVTLPPQPHTKEGVDAYNEVIARVRMWVNLNLWQKLKLSRDDAKPLLRLKGFPSFPLVERQANEVDWWDMVCNVKKLINEKKEDGKVFWQNLAGYKRQEALRPYLSSEEDRQKGKKFARYQLGDLLLHLEKKHGEDWGKVYDEAWERIDKKVEGLSKHIKLEEERRSEDAQSKAALTDWLRAKASFVIEGLKEADKDEFCRCELKLQKWYGDLRGKPFAIEAENSILDISGFSKQYNCAFIWQKDGVKKLNLYLIINYFKGGKLRFKKIKPEAFEANRFYTVINKKSGEIVPMEVNFNFDDPNLIILPLAFGKRQGREFIWNDLLSLETGSLKLANGRVIEKTLYNRRTRQDEPALFVALTFERREVLDSSNIKPMNLIGVDRGENIPAVIALTDPEGCPLSRFKDSLGNPTHILRIGESYKEKQRTIQAKKEVEQRRAGGYSRKYASKAKNLADDMVRNTARDLLYYAVTQDAMLIFENLSRGFGRQGKRTFMAERQYTRMEDWLTAKLAYEGLPSKTYLSKTLAQYTSKTCSNCGFTITSADYDRVLEKLKKTATGWMTTINGKELKVEGQITYYNRYKRQNVVKDLSVELDRLSEESVNNDISSWTKGRSGEALSLLKKRFSHRPVQEKFVCLNCGFETHADEQAALNIARSWLFLRSQEYKKYQTNKTTGNTDKRAFVETWQSFYRKKLKEVWKPAV

SEQ ID NO: 29243 - protein, 978 aa, synthetic construct
  REGION 1..978: note = engineered CasX variant
QEIKRINGIRRRLVKDSNTKKAGKTGPMKTLLVRVMTPDLRERLENLRKKPENIPQPISNTSRANLNKLLTDYTEMKKAILHVYWEEFQKDPVGLMSRVAQPASKKIDQNKLKPEMDEKGNLTTAGFACSQCGQPLFVYKLEQVSEKGKAYTNYFGRCNVAEHEKLILLAQLKPEKDSDEAVTYSLGKFGQRALDFYSIHVTKESTHPVKPLAQIAGNRYASGPVGKALSDACMGTIASFLSKYQDIIIEHQKVVKGNQKRLESLRELAGKENLEYPSVTLPPQPHTKEGVDAYNEVIARVRMWVNLNLWQKLKLSRDDAKPLLRLKGFPSFPLVERQANEVDWWDMVCNVKKLINEKKEDGKVFWQNLAGYKRQEALRPYLSSEEDRKKGKKFARYQLGDLLLHLEKKHGEDWGKVYDEAWERIDKKVEGLSKHIKLEEERRSEDAQSKAALTDWLRAKASFVIEGLKEADKDEFCRCELKLQKWYGDLRGKPFAIEAENSILDISGFSKQYNCAFIWQKDGVKKLNLYLIINYFKGGKLRFKKIKPEAFEANRFYTVINKKSGEIVPMEVNFNFDDPNLIILPLAFGKRQGREFIWNDLLSLETGSLKLANGRVIEKTLYNRRTRQDEPALFVALTFERREVLDSSNIKPMNLIGVDRGENIPAVIALTDPEGCPLSRFKDSLGNPTHILRIGESYKEKQRTIQAKKEVEQRRAGGYSRKYASKAKNLADDMVRNTARDLLYYAVTQDAMLIFENLSRGFGRQGKRTFMAERQYTRMEDWLTAKLAYEGLPSQTYLSKTLAQYTSKTCSNCGFTITSADYDRVLEKLKKTATGWMTTINGKELKVEGQITYYNRYKRQNVVKDLSVELDRLSEESVNNDISSWTKGRSGEALSLLKKRFSHRPVQEKFVCLNCGFETHADEQAALNIARSWLFLRSQEYKKYQTNKTTGNTDKRAFVETWQSFYRKKLKEVWKPAV

SEQ ID NO: 29244 - protein, 978 aa, synthetic construct
  REGION 1..978: note = engineered CasX variant
QEIKRINGIRRRLVKDSNTKKAGKTGPMKTLLVRVMTPDLRERLENLRKKPENIPQPISNTSRANLNKLLTDYTEMKKAILHVYWEEFQKDPVGLMSRVAQPASKKIDQNKLKPEMDEKGNLTTAGFACSQCGQPLFVYKLEQVSEKGKAYTNYFGRCNVAEHEKLILLAQLKPEKDSDEAVTYSLGKFGQRALDFYSIHVTKESTHPVKPLAQIAGNRYASGPVGKALSDACMGTIASFLSKYQDIIIEHQKVVKGNQKRLESLRELAGKENLEYPSVTLPPQPHTKEGVDAYNEVIARVRMWVNLNLWQKLKLSRDDAKPLLRLKGFPSFPLVERQANEVDWWDMVCNVKKLINEKKEDGKVFWQNLAGYKRQEALRPYLSSEEDRKKGKKFARYQLGDLLLHLEKKHGEDWGKVYDEAWERIDKKVEGLSKHIKLEEERRSEDAQSKAALTDWLRAKASFVIEGLKEADKDEFCRCELKLQKWYGDLRGKPFAIEAENSILDISGFSKQYNCAFIWQKDGVKKLNLYLIINYFKGGKLRFKKIKPEAFEANRFYTVINKKSGEIVPMEVNFNFDDPNLIILPLAFGKRQGREFIWNDLLSLETGSLKLANGRVIEKTLYNRRTRQDEPALFVALTFERREVLDSSNIKPMNLIGVDRGENIPAVIALTDPEGCPLSRFKDSLGNPTHILRIGESYKEKQRTIQAKKEVEQRRAGGYSRKYASKAKNLADDMVRNTARDLLYYAVTQDAMLIFENLSRGFGRQGKRTFMAERQYTRMEDWLTAKLAYNGLPSKTYLSKTLAQYTSKTCSNCGFTITSADYDRVLEKLKKTATGWMTTINGKELKVEGQITYYNRYKRQNVVKDLSVELDRLSEESVNNDISSWTKGRSGEALSLLKKRFSHRPVQEKFVCLNCGFETHADEQAALNIARSWLFLRSQEYKKYQTNKTTGNTDKRAFVETWQSFYRKKLKEVWKPAV

SEQ ID NO: 29245 - protein, 978 aa, synthetic construct
  REGION 1..978: note = engineered CasX variant
QEIKRINGIRRRLVKDSNTKKAGKTGPMKTLLVRVMTPDLRERLENLRKKPENIPQPISNTSRANLNKLLTDYTEMKKAILHVYWEEFQKDPVGLMSRVAQPASKKIDQNKLKPEMDEKGNLTTAGFACSQCGQPLFVYKLEQVSEKGKAYTNYFGRCNVAEHEKLIQLAQLKPEKDSDEAVTYSLGKFGQRALDFYSIHVTKESTHPVKPLAQIAGNRYASGPVGKALSDACMGTIASFLSKYQDIIIEHQKVVKGNQKRLESLRELAGKENLEYPSVTLPPQPHTKEGVDAYNEVIARVRMWVNLNLWQKLKLSRDDAKPLLRLKGFPSFPLVERQANEVDWWDMVCNVKKLINEKKEDGKVFWQNLAGYKRQEALRPYLSSEEDRKKGKKFARYQLGDLLLHLEKKHGEDWGKVYDEAWERIDKKVEGLSKHIKLEEERRSEDAQSKAALTDWLRAKASFVIEGLKEADKDEFCRCELKLQKWYGDLRGKPFAIEAENSILDISGFSKQYNCAFIWQKDGVKKLNLYLIINYFKGGKLRFKKIKPEAFEANRFYTVINKKSGEIVPMEVNFNFDDPNLIILPLAFGKRQGREFIWNDLLSLETGSLKLANGRVIEKTLYNRRTRQDEPALFVALTFERREVLDSSNIKPMNLIGVDRGENIPAVIALTDPEGCPLSRFKDSLGNPTHILRIGESYKEKQRTIQAKKEVEQRRAGGYSRKYASKAKNLADDMVRNTARDLLYYAVTQDAMLIFENLSRGFGRQGKRTFMAERQYTRMEDWLTAKLAYEGLPSKTYLSKTLAQYTSKTCSNCGFTITSADYDRVLEKLKKTATGWMTTINGKELKVEGQITYYNRYKRQNVVKDLSVELDRLSEESVNNDISSWTKGRSGEALSLLKKRFSHRPVQEKFVCLNCGFETHADEQAALNIARSWLFLRSQEYKKYQTNKTTGNTDKRAFVETWQSFYRKKLKEVWKPAV

SEQ ID NO: 29246 - protein, 978 aa, synthetic construct
  REGION 1..978: note = engineered CasX variant
QEIKRINGIRRRLVKDSNTKKAGKTGPMKTLLVRVMTPDLRERLENLRKKPENIPQPISNTSRANLNKLLTDYTEMKKAILHVYWEEFQKDPVGLMSRVAQPASKKIDQNKLKPEMDEKGNLTTAGFACSQCGQPLFVYKLEQVSEKGKAYTNYFGRCNVAEHEKLILLAQLKPEKDSDEAVTYSLGKFGQRALDFYSIHVTKESTHPVKPLAQIAGNRYASGPVGKALSDACMGTIASFLSKYQDIIIEHQKVVKGNQKRLESLRELAGKENLEYPSVTLPPQPHTKEGVDAYNEVIARVRMWVNLNLWQKLKLSRDDAKPLLRLKGFPSFPLVERQANEVDWWDMVCNVKKLINEKKEDGKVFWQNLAIYKRQEALRPYLSSEEDRKKGKKFARYQLGDLLLHLEKKHGEDWGKVYDEAWERIDKKVEGLSKHIKLEEERRSEDAQSKAALTDWLRAKASFVIEGLKEADKDEFCRCELKLQKWYGDLRGKPFAIEAENSILDISGFSKQYNCAFIWQKDGVKKLNLYLIINYFKGGKLRFKKIKPEAFEANRFYTVINKKSGEIVPMEVNFNFDDPNLIILPLAFGKRQGREFIWNDLLSLETGSLKLANGRVIEKTLYNRRTRQDEPALFVALTFERREVLDSSNIKPMNLIGVDRGENIPAVIALTDPEGCPLSRFKDSLGNPTHILRIGESYKEKQRTIQAKKEVEQRRAGGYSRKYASKAKNLADDMVRNTARDLLYYAVTQDAMLIFENLSRGFGRQGKRTFMAERQYTRMEDWLTAKLAYEGLPSKTYLSKTLAQYTSKTCSNCGFTITSADYDRVLEKLKKTATGWMTTINGKELKVEGQITYYNRYKRQNVVKDLSVELDRLSEESVNNDISSWTKGRSGEALSLLKKRFSHRPVQEKFVCLNCGFETHADEQAALNIARSWLFLRSQEYKKYQTNKTTGNTDKRAFVETWQSFYRKKLKEVWKPAV

SEQ ID NO: 29247 - protein, 978 aa, synthetic construct
  REGION 1..978: note = engineered CasX variant
QEIKRINGIRRRLVKDSNTKKAGKTGPMKTLLVRVMTPDLRERLENLRKKPENIPQPISNTSRANLNKLLTDYTEMKKAILHVYWEEFQKDPVGLMSRVAQPASKKIDQNKLKPEMDEKGNLTTAGFACSQCGQPLFVYKLEQVSEKGKAYTNYFGRCNVAEHEKLILLAQLKPEKDSDEAVTYSLGKFGQRALDFYSIHVTKESTHPVKPLAQIAGNRYASGPVGKALSDACMGTIASFLSKYQDIIIEHQKVVKGNQKRLESLRELAGKENLEYPSVTLPPQPHTKEGVDAYNEVIARVRMWVNLNLWQKLKLSRDDAKPLLRLKGFPSFPLVERQANEVDWWDMVCNVKKLINEKKEDGKVFWQNLAGYKRQEALRPYLSSEEDREKGKKFARYQLGDLLLHLEKKHGEDWGKVYDEAWERIDKKVEGLSKHIKLEEERRSEDAQSKAALTDWLRAKASFVIEGLKEADKDEFCRCELKLQKWYGDLRGKPFAIEAENSILDISGFSKQYNCAFIWQKDGVKKLNLYLIINYFKGGKLRFKKIKPEAFEANRFYTVINKKSGEIVPMEVNFNFDDPNLIILPLAFGKRQGREFIWNDLLSLETGSLKLANGRVIEKTLYNRRTRQDEPALFVALTFERREVLDSSNIKPMNLIGVDRGENIPAVIALTDPEGCPLSRFKDSLGNPTHILRIGESYKEKQRTIQAKKEVEQRRAGGYSRKYASKAKNLADDMVRNTARDLLYYAVTQDAMLIFENLSRGFGRQGKRTFMAERQYTRMEDWLTAKLAYEGLPSKTYLSKTLAQYTSKTCSNCGFTITSADYDRVLEKLKKTATGWMTTINGKELKVEGQITYYNRYKRQNVVKDLSVELDRLSEESVNNDISSWTKGRSGEALSLLKKRFSHRPVQEKFVCLNCGFETHADEQAALNIARSWLFLRSQEYKKYQTNKTTGNTDKRAFVETWQSFYRKKLKEVWKPAV

SEQ ID NO: 29248 - protein, 978 aa, synthetic construct
  REGION 1..978: note = engineered CasX variant
QEIKRINGIRRRLVKDSNTKKAGKTGPMKTLLVRVMTPDLRERLENLRKKPENIPQPISNTSRANLNKLLTDYTEMKKAILHVYWEEFQKDPVGLMSRVAQPASKKIDQNKLKPEMDEKGNLTTAGFACSQCGQPLFVYKLEQVSEKGKAYTNYFGRCNVAEHEKLILLAQLKPEKDSDEAVTYSLGKFGQRALDFYSIHVTKESTHPVKPLAQIAGNRYASGPVGKALSDACMGTIASFLSKYQDIIIEHQKVVKGNQKRLESLRELAGKENLEYPSVTLPPQPHTKEGVDAYNEVIARVRMWVNLNLWQKLKLSRDDAKPLLRLKGFPSFPLVERQANEVDWWDMVCNVKKLINEKKEDGKVFWQNLAGYKRQEALRPYLSSEEDRKKGKKFARYQLGDLLLHLEKKHGEDWGKVYDEAWERIDKKVEGLSKHIKLEEERRSEDAQSKAALTDWLRAKASFVIEGLKEADKDEFCRCELKLQKWYGDLRGKPFAIEAENSILDISGFSKQYNCAFIWQKDGVKKLNLYLIINYFKGGKLRFKKIKPEAFEANRFYTVINKKSGEIVIMEVNFNFDDPNLIILPLAFGKRQGREFIWNDLLSLETGSLKLANGRVIEKTLYNRRTRQDEPALFVALTFERREVLDSSNIKPMNLIGVDRGENIPAVIALTDPEGCPLSRFKDSLGNPTHILRIGESYKEKQRTIQAKKEVEQRRAGGYSRKYASKAKNLADDMVRNTARDLLYYAVTQDAMLIFENLSRGFGRQGKRTFMAERQYTRMEDWLTAKLAYEGLPSKTYLSKTLAQYTSKTCSNCGFTITSADYDRVLEKLKKTATGWMTTINGKELKVEGQITYYNRYKRQNVVKDLSVELDRLSEESVNNDISSWTKGRSGEALSLLKKRFSHRPVQEKFVCLNCGFETHADEQAALNIARSWLFLRSQEYKKYQTNKTTGNTDKRAFVETWQSFYRKKLKEVWKPAV

SEQ ID NO: 29249 - protein, 978 aa, synthetic construct
  REGION 1..978: note = engineered CasX variant
QEIKRINKIRRRLVKDSNTKKAGKTGPMKTLLVPVMTPDLRERLENLRKKPENIPQPISNTSRANLNKLLTDYTEMKKAILHVYWEEFQKDPVGLMSRVAQPASKKIDQNKLKPEMDEKGNLTTAGFACSQCGQPLFVYKLEQVSEKGKAYTNYFGRCNVAEHEKLILLAQLKPEKDSDEAVTYSLGKFGQRALDFYSIHVTKESTHPVKPLAQIAGNRYASGPVGKALSGACMGTIASFLSKYQDIIIEHQKVVKGNQKRLESLRELAGKENLEYPSVTLPPQPHTKEGVDAYNEVIARVRMWVNLNLWQKLKLSRDDAKPLLRLKGFPSFPLVERQANEVDWWDMVCNVKKLINEKKEDGKVFWQNLAGYKRQEALRPYLSSEEDRKKGKKFARYQLGDLLLHLEKKHGEDWGKVYDEAWERIDKKVEGLSKHIKLEEERRSEDAQSKAALTDWLRAKASFVIEGLKEADKDEFCRCELKLQKWYGDLRGKPFAIEAENSILDISGFSKQYNCAFIWQKDGVKKLNLYLIINYFKGGKLRFKKIKPEAFEANRFYTVINKKSGEIVPMEVNFNFDDPNLIILPLAFGKRQGREFIWNDLLSLETGSLKLANGRVIEKTLYNRRTRQDEPALFVALTFERREVLDSSNIKPMNLIGVDRGENIPAVIALTDPEGCPLSRFKDSLGNPTHILRIGESYKEKQRTIQAKKEVEQRRAGGYSRKYASKAKNLADDMVRNTARDLLYYAVTQDAMLIFENLSRGFGRQGKRTFMAERQYTRMEDWLTAKLAYEGLPSKTYLSKTLAQYTSKTCSNCGFTITSADYDRVLEKLKKTATGWMTTINGKELKVEGQITYYNRYKRQNVVKDLSVELDRLSEESVNNDISSWTKGRSGEALSLLKKRFSHRPVQEKFVCLNCGFETHADEQAALNIARSWLFLRSQEYKKYQTNKTTGNTDKRAFVETWQSFYRKKLKEVWKPAV

SEQ ID NO: 29250 - protein, 978 aa, synthetic construct
  REGION 1..978: note = engineered CasX variant
QEIKRINKIRRRLVKDSNTKKAGKTGPMKTLLVPVMTPDLRERLENLRKKPENIPQPISNTSRANLNKLLTDYTEMKKAILHVYWEEFQKDPVGLMSRVAQPASKKIDQNKLKPEMDEKGNLTTAGFACSQCGQPLFVYKLEQVSEKGKAYTNYFGRCNVAEHEKLILLAQLKPEKDSDEAVTYSLGKFGQRALDFYSIHVTKESTHPVKPLAQIAGNRYASGPVGKALSDACMGTIASFLSKYQDIIIEHQKVVKGNQKRLESLRELAGKENLEYPSVTLPPQPHTKEGVDAYNEVIARVRMWVNLNLWQKLKLSRDDAKPLLRLKNFPSFPLVERQANEVDWWDMVCNVKKLINEKKEDGKVFWQNLAGYKRQEALRPYLSSEEDRKKGKKFARYQLGDLLLHLEKKHGEDWGKVYDEAWERIDKKVEGLSKHIKLEEERRSEDAQSKAALTDWLRAKASFVIEGLKEADKDEFCRCELKLQKWYGDLRGKPFAIEAENSILDISGFSKQYNCAFIWQKDGVKKLNLYLIINYFKGGKLRFKKIKPEAFEANRFYTVINKKSGEIVPMEVNFNFDDPNLIILPLAFGKRQGREFIWNDLLSLETGSLKLANGRVIEKTLYNRRTRQDEPALFVALTFERREVLDSSNIKPMNLIGVDRGENIPAVIALTDPEGCPLSRFKDSLGNPTHILRIGESYKEKQRTIQAKKEVEQRRAGGYSRKYASKAKNLADDMVRNTARDLLYYAVTQDAMLIFENLSRGFGRQGKRTFMAERQYTRMEDWLTAKLAYEGLPSKTYLSKTLAQYTSKTCSNCGFTITSADYDRVLEKLKKTATGWMTTINGKELKVEGQITYYNRYKRQNVVKDLSVELDRLSEESVNNDISSWTKGRSGEALSLLKKRFSHRPVQEKFVCLNCGFETHADEQAALNIARSWLFLRSQEYKKYQTNKTTGNTDKRAFVETWQSFYRKKLKEVWKPAV

SEQ ID NO: 29251 - protein, 978 aa, synthetic construct
  REGION 1..978: note = engineered CasX variant
QEIKRINKIRRRLVKDSNTKKAGKTGPMKTLLVPVMTPDLRERLENLRKKPENIPQPISNTSRANLNKLLTDYTEMKKAILHVYWEEFQKDPVGLMSRVAQPASKKIDQNKLKPEMDEKGNLTTAGFACSQCGQPLFVYKLEQVSEKGKAYTNYFGRCNVAEHEKLILLAQLKPEKDSDEAVTYSLGKFGQRALDFYSIHVTKESTHPVKPLAQIAGNRYASGPVGKALSDACMGTIASFLSKYQDIIIEHQKVVKGNQKRLESLRELAGKENLEYPSVTLPPQPHTKEGVDAYNEVIARVRMWVNLNLWQKLKLSRDDAKPLLRLKGFPSFPLVERQANEVDWWDMVCNVKKLINEKKEDGKVFWQNLAGYKRQEALRPYLSSEEDRKKGKKFARYQLGDLLNHLEKKHGEDWGKVYDEAWERIDKKVEGLSKHIKLEEERRSEDAQSKAALTDWLRAKASFVIEGLKEADKDEFCRCELKLQKWYGDLRGKPFAIEAENSILDISGFSKQYNCAFIWQKDGVKKLNLYLIINYFKGGKLRFKKIKPEAFEANRFYTVINKKSGEIVPMEVNFNFDDPNLIILPLAFGKRQGREFIWNDLLSLETGSLKLANGRVIEKTLYNRRTRQDEPALFVALTFERREVLDSSNIKPMNLIGVDRGENIPAVIALTDPEGCPLSRFKDSLGNPTHILRIGESYKEKQRTIQAKKEVEQRRAGGYSRKYASKAKNLADDMVRNTARDLLYYAVTQDAMLIFENLSRGFGRQGKRTFMAERQYTRMEDWLTAKLAYEGLPSKTYLSKTLAQYTSKTCSNCGFTITSADYDRVLEKLKKTATGWMTTINGKELKVEGQITYYNRYKRQNVVKDLSVELDRLSEESVNNDISSWTKGRSGEALSLLKKRFSHRPVQEKFVCLNCGFETHADEQAALNIARSWLFLRSQEYKKYQTNKTTGNTDKRAFVETWQSFYRKKLKEVWKPAV

SEQ ID NO: 29252 - protein, 978 aa, synthetic construct
  REGION 1..978: note = engineered CasX variant
QEIKRINKIRRRLVKDSNTKKAGKTGPMKTLLVPVMTPDLRERLENLRKKPENIPQPISNTSRANLNKLLTDYTEMKKAILHVYWEEFQKDPVGLMSRVAQPASKKIDQNKLKPEMDEKGNLTTAGFACSQCGQPLFVYKLEQVSEKGKAYTNYFGRCNVAEHEKLILLAQLKPEKDSDEAVTYSLGKFGQRALDFYSIHVTKESTHPVKPLAQIAGNRYASGPVGKALSDACMGTIASFLSKYQDIIIEHQKVVKGNQKRLESLRELAGKENLEYPSVTLPPQPHTKEGVDAYNEVIARVRMWVNLNLWQKLKLSRDDAKPLLRLKGFPSFPLVERQANEVDWWDMVCNVKKLINEKKEDGKVFWQNLAGYKRQEALRPYLSSEEDRKKGKKFARYQLGDLLWHLEKKHGEDWGKVYDEAWERIDKKVEGLSKHIKLEEERRSEDAQSKAALTDWLRAKASFVIEGLKEADKDEFCRCELKLQKWYGDLRGKPFAIEAENSILDISGFSKQYNCAFIWQKDGVKKLNLYLIINYFKGGKLRFKKIKPEAFEANRFYTVINKKSGEIVPMEVNFNFDDPNLIILPLAFGKRQGREFIWNDLLSLETGSLKLANGRVIEKTLYNRRTRQDEPALFVALTFERREVLDSSNIKPMNLIGVDRGENIPAVIALTDPEGCPLSRFKDSLGNPTHILRIGESYKEKQRTIQAKKEVEQRRAGGYSRKYASKAKNLADDMVRNTARDLLYYAVTQDAMLIFENLSRGFGRQGKRTFMAERQYTRMEDWLTAKLAYEGLPSKTYLSKTLAQYTSKTCSNCGFTITSADYDRVLEKLKKTATGWMTTINGKELKVEGQITYYNRYKRQNVVKDLSVELDRLSEESVNNDISSWTKGRSGEALSLLKKRFSHRPVQEKFVCLNCGFETHADEQAALNIARSWLFLRSQEYKKYQTNKTTGNTDKRAFVETWQSFYRKKLKEVWKPAV

SEQ ID NO: 29253 - protein, 978 aa, synthetic construct
  REGION 1..978: note = engineered CasX variant
QEIKRINKIRRRLVKDSNTKKAGKTGPMKTLLVPVMTPDLRERLENLRKKPENIPQPISNTSRANLNKLLTDYTEMKKAILHVYWEEFQKDPVGLMSRVAQPASKKIDQNKLKPEMDEKGNLTTAGFACSQCGQPLFVYKLEQVSEKGKAYTNYFGRCNVAEHEKLILLAQLKPEKDSDEAVTYSLGKFGQRALDFYSIHVTKESTHPVKPLAQIAGNRYASGPVGKALSDACMGTIASFLSKYQDIIIEHQKVVKGNQKRLESLRELAGKENLEYPSVTLPPQPHTKEGVDAYNEVIARVRMWVNLNLWQKLKLSRDDAKPLLRLKGFPSFPLVERQANEVDWWDMVCNVKKLINEKKEDGKVFWQNLAGYKRQEALRPYLSSEEDRKKGKKFARYQLGDLLLHLYKKHGEDWGKVYDEAWERIDKKVEGLSKHIKLEEERRSEDAQSKAALTDWLRAKASFVIEGLKEADKDEFCRCELKLQKWYGDLRGKPFAIEAENSILDISGFSKQYNCAFIWQKDGVKKLNLYLIINYFKGGKLRFKKIKPEAFEANRFYTVINKKSGEIVPMEVNFNFDDPNLIILPLAFGKRQGREFIWNDLLSLETGSLKLANGRVIEKTLYNRRTRQDEPALFVALTFERREVLDSSNIKPMNLIGVDRGENIPAVIALTDPEGCPLSRFKDSLGNPTHILRIGESYKEKQRTIQAKKEVEQRRAGGYSRKYASKAKNLADDMVRNTARDLLYYAVTQDAMLIFENLSRGFGRQGKRTFMAERQYTRMEDWLTAKLAYEGLPSKTYLSKTLAQYTSKTCSNCGFTITSADYDRVLEKLKKTATGWMTTINGKELKVEGQITYYNRYKRQNVVKDLSVELDRLSEESVNNDISSWTKGRSGEALSLLKKRFSHRPVQEKFVCLNCGFETHADEQAALNIARSWLFLRSQEYKKYQTNKTTGNTDKRAFVETWQSFYRKKLKEVWKPAV

SEQ ID NO: 29254 - protein, 978 aa, synthetic construct
  REGION 1..978: note = engineered CasX variant
QEIKRINKIRRRLVKDSNTKKAGKTGPMKTLLVPVMTPDLRERLENLRKKPENIPQPISNTSRANLNKLLTDYTEMKKAILHVYWEEFQKDPVGLMSRVAQPASKKIDQNKLKPEMDEKGNLTTAGFACSQCGQPLFVYKLEQVSEKGKAYTNYFGRCNVAEHEKLILLAQLKPEKDSDEAVTYSLGKFGQRALDFYSIHVTKESTHPVKPLAQIAGNRYASGPVGKALSDACMGTIASFLSKYQDIIIEHQKVVKGNQKRLESLRELAGKENLEYPSVTLPPQPHTKEGVDAYNEVIARVRMWVNLNLWQKLKLSRDDAKPLLRLKGFPSFPLVERQANEVDWWDMVCNVKKLINEKKEDGKVFWQNLAGYKRQEALRPYLSSEEDRKKGKKFARYQLGDLLLHLEKKHPEDWGKVYDEAWERIDKKVEGLSKHIKLEEERRSEDAQSKAALTDWLRAKASFVIEGLKEADKDEFCRCELKLQKWYGDLRGKPFAIEAENSILDISGFSKQYNCAFIWQKDGVKKLNLYLIINYFKGGKLRFKKIKPEAFEANRFYTVINKKSGEIVPMEVNFNFDDPNLIILPLAFGKRQGREFIWNDLLSLETGSLKLANGRVIEKTLYNRRTRQDEPALFVALTFERREVLDSSNIKPMNLIGVDRGENIPAVIALTDPEGCPLSRFKDSLGNPTHILRIGESYKEKQRTIQAKKEVEQRRAGGYSRKYASKAKNLADDMVRNTARDLLYYAVTQDAMLIFENLSRGFGRQGKRTFMAERQYTRMEDWLTAKLAYEGLPSKTYLSKTLAQYTSKTCSNCGFTITSADYDRVLEKLKKTATGWMTTINGKELKVEGQITYYNRYKRQNVVKDLSVELDRLSEESVNNDISSWTKGRSGEALSLLKKRFSHRPVQEKFVCLNCGFETHADEQAALNIARSWLFLRSQEYKKYQTNKTTGNTDKRAFVETWQSFYRKKLKEVWKPAV

SEQ ID NO: 29255 - protein, 979 aa, synthetic construct
  REGION 1..979: note = engineered CasX variant
QEIKRINKIRRRLVKDSNTKKAGKTGPMKTLLVPVMTPDLRERLENLRKKPENIPQPISNTSRANLNKLLTDYTEMKKAILHVYWEEFQKDPVGLMSRVAQPASKKIDQNKLKPEMDEKGNLTTAGFACSQCGQPLFVYKLEQVSEKGKAYTNYFGRCNVAEHEKLILLAQLKPEKDSDEAVTYSLGKFGQRALDFYSIHVTKESTHPVKPLAQIAGNRYASGPVGKALSDACMGTIASFLSKYQDIIIEHQKVVKGNQKRLESLRELAGKENLEYPSVTLPPQPHTKEGVDAYNEVIARVRMWVNLNLWQKLKLSRDDAKPLLRLKGFPSFPLVERQANEVDWWDMVCNVKKLINEKKEDGKVFWQNLAGYKRQEALRPYLSSEEDRKKGKKFARYQLGDLLLHLEKKHGERDWGKVYDEAWERIDKKVEGLSKHIKLEEERRSEDAQSKAALTDWLRAKASFVIEGLKEADKDEFCRCELKLQKWYGDLRGKPFAIEAENSILDISGFSKQYNCAFIWQKDGVKKLNLYLIINYFKGGKLRFKKIKPEAFEANRFYTVINKKSGEIVPMEVNFNFDDPNLIILPLAFGKRQGREFIWNDLLSLETGSLKLANGRVIEKTLYNRRTRQDEPALFVALTFERREVLDSSNIKPMNLIGVDRGENIPAVIALTDPEGCPLSRFKDSLGNPTHILRIGESYKEKQRTIQAKKEVEQRRAGGYSRKYASKAKNLADDMVRNTARDLLYYAVTQDAMLIFENLSRGFGRQGKRTFMAERQYTRMEDWLTAKLAYEGLPSKTYLSKTLAQYTSKTCSNCGFTITSADYDRVLEKLKKTATGWMTTINGKELKVEGQITYYNRYKRQNVVKDLSVELDRLSEESVNNDISSWTKGRSGEALSLLKKRFSHRPVQEKFVCLNCGFETHADEQAALNIARSWLFLRSQEYKKYQTNKTTGNTDKRAFVETWQSFYRKKLKEVWKPAV

SEQ ID NO: 29256 - protein, 979 aa, synthetic construct
  REGION 1..979: note = engineered CasX variant
QEIKRINKIRRRLVKDSNTKKAGKTGPMKTLLVPVMTPDLRERLENLRKKPENIPQPISNTSRANLNKLLTDYTEMKKAILHVYWEEFQKDPVGLMSRVAQPASKKIDQNKLKPEMDEKGNLTTAGFACSQCGQPLFVYKLEQVSEKGKAYTNYFGRCNVAEHEKLILLAQLKPEKDSDEAVTYSLGKFGQRALDFYSIHVTKESTHPVKPLAQIAGNRYASGPVGKALSDACMGTIASFLSKYQDIIIEHQKVVKGNQKRLESLRELAGKENLEYPSVTLPPQPHTKEGVDAYNEVIARVRMWVNLNLWQKLKLSRDDAKPLLRLKGFPSFPLVERQANEVDWWDMVCNVKKLINEKKEDGKVFWQNLAGYKRQEALRPYLSSEEDRKKGKKFARYQLGDLLLHLEKKHGEYDWGKVYDEAWERIDKKVEGLSKHIKLEEERRSEDAQSKAALTDWLRAKASFVIEGLKEADKDEFCRCELKLQKWYGDLRGKPFAIEAENSILDISGFSKQYNCAFIWQKDGVKKLNLYLIINYFKGGKLRFKKIKPEAFEANRFYTVINKKSGEIVPMEVNFNFDDPNLIILPLAFGKRQGREFIWNDLLSLETGSLKLANGRVIEKTLYNRRTRQDEPALFVALTFERREVLDSSNIKPMNLIGVDRGENIPAVIALTDPEGCPLSRFKDSLGNPTHILRIGESYKEKQRTIQAKKEVEQRRAGGYSRKYASKAKNLADDMVRNTARDLLYYAVTQDAMLIFENLSRGFGRQGKRTFMAERQYTRMEDWLTAKLAYEGLPSKTYLSKTLAQYTSKTCSNCGFTITSADYDRVLEKLKKTATGWMTTINGKELKVEGQITYYNRYKRQNVVKDLSVELDRLSEESVNNDISSWTKGRSGEALSLLKKRFSHRPVQEKFVCLNCGFETHADEQAALNIARSWLFLRSQEYKKYQTNKTTGNTDKRAFVETWQSFYRKKLKEVWKPAV

SEQ ID NO: 29257 - protein, 978 aa, synthetic construct
  REGION 1..978: note = engineered CasX variant
QEIKRINKIRRRLVKDSNTKKAGKTGPMKTLLVPVMTPDLRERLENLRKKPENIPQPISNTSRANLNKLLTDYTEMKKAILHVYWEEFQKDPVGLMSRVAQPASKKIDQNKLKPEMDEKGNLTTAGFACSQCGQPLFVYKLEQVSEKGKAYTNYFGRCNVAEHEKLILLAQLKPEKDSDEAVTYSLGKFGQRALDFYSIHVTKESTHPVKPLAQIAGNRYASGPVGKALSDACMGTIASFLSKYQDIIIEHQKVVKGNQKRLESLRELAGKENLEYPSVTLPPQPHTKEGVDAYNEVIARVRMWVNLNLWQKLKLSRDDAKPLLRLKGFPSFPLVERQANEVDWWDMVCNVKKLINEKKEDGKVFWQNLAGYKRQEALRPYLSSEEDRKKGKKFARYQLGDLLLHLEKKHGEDWGDVYDEAWERIDKKVEGLSKHIKLEEERRSEDAQSKAALTDWLRAKASFVIEGLKEADKDEFCRCELKLQKWYGDLRGKPFAIEAENSILDISGFSKQYNCAFIWQKDGVKKLNLYLIINYFKGGKLRFKKIKPEAFEANRFYTVINKKSGEIVPMEVNFNFDDPNLIILPLAFGKRQGREFIWNDLLSLETGSLKLANGRVIEKTLYNRRTRQDEPALFVALTFERREVLDSSNIKPMNLIGVDRGENIPAVIALTDPEGCPLSRFKDSLGNPTHILRIGESYKEKQRTIQAKKEVEQRRAGGYSRKYASKAKNLADDMVRNTARDLLYYAVTQDAMLIFENLSRGFGRQGKRTFMAERQYTRMEDWLTAKLAYEGLPSKTYLSKTLAQYTSKTCSNCGFTITSADYDRVLEKLKKTATGWMTTINGKELKVEGQITYYNRYKRQNVVKDLSVELDRLSEESVNNDISSWTKGRSGEALSLLKKRFSHRPVQEKFVCLNCGFETHADEQAALNIARSWLFLRSQEYKKYQTNKTTGNTDKRAFVETWQSFYRKKLKEVWKPAV

SEQ ID NO: 29258 - protein, 978 aa, synthetic construct
  REGION 1..978: note = engineered CasX variant
QEIKRINKIRRRLVKDSNTKKAGKTGPMKTLLVPVMTPDLRERLENLRKKPENIPQPISNTSRANLNKLLTDYTEMKKAILHVYWEEFQKDPVGLMSRVAQPASKKIDQNKLKPEMDEKGNLTTAGFACSQCGQPLFVYKLEQVSEKGKAYTNYFGRCNVAEHEKLILLAQLKPEKDSDEAVTYSLGKFGQRALDFYSIHVTKESTHPVKPLAQIAGNRYASGPVGKALSDACMGTIASFLSKYQDIIIEHQKVVKGNQKRLESLRELAGKENLEYPSVTLPPQPHTKEGVDAYNEVIARVRMWVNLNLWQKLKLSRDDAKPLLRLKGFPSFPLVERQANEVDWWDMVCNVKKLINEKKEDGKVFWQNLAGYKRQEALRPYLSSEEDRKKGKKFARYQLGDLLLHLEKKHGEDWGKVYGEAWERIDKKVEGLSKHIKLEEERRSEDAQSKAALTDWLRAKASFVIEGLKEADKDEFCRCELKLQKWYGDLRGKPFAIEAENSILDISGFSKQYNCAFIWQKDGVKKLNLYLIINYFKGGKLRFKKIKPEAFEANRFYTVINKKSGEIVPMEVNFNFDDPNLIILPLAFGKRQGREFIWNDLLSLETGSLKLANGRVIEKTLYNRRTRQDEPALFVALTFERREVLDSSNIKPMNLIGVDRGENIPAVIALTDPEGCPLSRFKDSLGNPTHILRIGESYKEKQRTIQAKKEVEQRRAGGYSRKYASKAKNLADDMVRNTARDLLYYAVTQDAMLIFENLSRGFGRQGKRTFMAERQYTRMEDWLTAKLAYEGLPSKTYLSKTLAQYTSKTCSNCGFTITSADYDRVLEKLKKTATGWMTTINGKELKVEGQITYYNRYKRQNVVKDLSVELDRLSEESVNNDISSWTKGRSGEALSLLKKRFSHRPVQEKFVCLNCGFETHADEQAALNIARSWLFLRSQEYKKYQTNKTTGNTDKRAFVETWQSFYRKKLKEVWKPAV

SEQ ID NO: 29259 - protein, 978 aa, synthetic construct
  REGION 1..978: note = engineered CasX variant
QEIKRINKIRRRLVKDSNTKKAGKTGPMKTLLVPVMTPDLRERLENLRKKPENIPQPISNTSRANLNKLLTDYTEMKKAILHVYWEEFQKDPVGLMSRVAQPASKKIDQNKLKPEMDEKGNLTTAGFACSQCGQPLFVYKLEQVSEKGKAYTNYFGRCNVAEHEKLILLAQLKPEKDSDEAVTYSLGKFGQRALDFYSIHVTKESTHPVKPLAQIAGNRYASGPVGKALSDACMGTIASFLSKYQDIIIEHQKVVKGNQKRLESLRELAGKENLEYPSVTLPPQPHTKEGVDAYNEVIARVRMWVNLNLWQKLKLSRDDAKPLLRLKGFPSFPLVERQANEVDWWDMVCNVKKLINEKKEDGKVFWQNLAGYKRQEALRPYLSSEEDRKKGKKFARYQLGDLLLHLEKKHGEDWGKVYDEAWERIDKKVEGLSKHIKLEEERRSEDAQSKAALTDWLRAKASFVIEGKKEADKDEFCRCELKLQKWYGDLRGKPFAIEAENSILDISGFSKQYNCAFIWQKDGVKKLNLYLIINYFKGGKLRFKKIKPEAFEANRFYTVINKKSGEIVPMEVNFNFDDPNLIILPLAFGKRQGREFIWNDLLSLETGSLKLANGRVIEKTLYNRRTRQDEPALFVALTFERREVLDSSNIKPMNLIGVDRGENIPAVIALTDPEGCPLSRFKDSLGNPTHILRIGESYKEKQRTIQAKKEVEQRRAGGYSRKYASKAKNLADDMVRNTARDLLYYAVTQDAMLIFENLSRGFGRQGKRTFMAERQYTRMEDWLTAKLAYEGLPSKTYLSKTLAQYTSKTCSNCGFTITSADYDRVLEKLKKTATGWMTTINGKELKVEGQITYYNRYKRQNVVKDLSVELDRLSEESVNNDISSWTKGRSGEALSLLKKRFSHRPVQEKFVCLNCGFETHADEQAALNIARSWLFLRSQEYKKYQTNKTTGNTDKRAFVETWQSFYRKKLKEVWKPAV

SEQ ID NO: 29260 - protein, 978 aa, synthetic construct
  REGION 1..978: note = engineered CasX variant
QEIKRINKIRRRLVKDSNTKKAGKTGPMKTLLVPVMTPDLRERLENLRKKPENIPQPISNTSRANLNKLLTDYTEMKKAILHVYWEEFQKDPVGLMSRVAQPASKKIDQNKLKPEMDEKGNLTTAGFACSQCGQPLFVYKLEQVSEKGKAYTNYFGRCNVAEHEKLILLAQLKPEKDSDEAVTYSLGKFGQRALDFYSIHVTKESTHPVKPLAQIAGNRYASGPVGKALSDACMGTIASFLSKYQDIIIEHQKVVKGNQKRLESLRELAGKENLEYPSVTLPPQPHTKEGVDAYNEVIARVRMWVNLNLWQKLKLSRDDAKPLLRLKGFPSFPLVERQANEVDWWDMVCNVKKLINEKKEDGKVFWQNLAGYKRQEALRPYLSSEEDRKKGKKFARYQLGDLLLHLEKKHGEDWGKVYDEAWERIDKKVEGLSKHIKLEEERRSEDAQSKAALTDWLRAKASFVIEGSKEADKDEFCRCELKLQKWYGDLRGKPFAIEAENSILDISGFSKQYNCAFIWQKDGVKKLNLYLIINYFKGGKLRFKKIKPEAFEANRFYTVINKKSGEIVPMEVNFNFDDPNLIILPLAFGKRQGREFIWNDLLSLETGSLKLANGRVIEKTLYNRRTRQDEPALFVALTFERREVLDSSNIKPMNLIGVDRGENIPAVIALTDPEGCPLSRFKDSLGNPTHILRIGESYKEKQRTIQAKKEVEQRRAGGYSRKYASKAKNLADDMVRNTARDLLYYAVTQDAMLIFENLSRGFGRQGKRTFMAERQYTRMEDWLTAKLAYEGLPSKTYLSKTLAQYTSKTCSNCGFTITSADYDRVLEKLKKTATGWMTTINGKELKVEGQITYYNRYKRQNVVKDLSVELDRLSEESVNNDISSWTKGRSGEALSLLKKRFSHRPVQEKFVCLNCGFETHADEQAALNIARSWLFLRSQEYKKYQTNKTTGNTDKRAFVETWQSFYRKKLKEVWKPAV

SEQ ID NO: 29261 - protein, 979 aa, synthetic construct
  REGION 1..979: note = engineered CasX variant
QEIKRINKIRRRLVKDSNTKKAGKTGPMKTLLVPVMTPDLRERLENLRKKPENIPQPISNTSRANLNKLLTDYTEMKKAILHVYWEEFQKDPVGLMSRVAQPASKKIDQNKLKPEMDEKGNLTTAGFACSQCGQPLFVYKLEQVSEKGKAYTNYFGRCNVAEHEKLILLAQLKPEKDSDEAVTYSLGKFGQRALDFYSIHVTKESTHPVKPLAQIAGNRYASGPVGKALSDACMGTIASFLSKYQDIIIEHQKVVKGNQKRLESLRELAGKENLEYPSVTLPPQPHTKEGVDAYNEVIARVRMWVNLNLWQKLKLSRDDAKPLLRLKGFPSFPLVERQANEVDWWDMVCNVKKLINEKKEDGKVFWQNLAGYKRQEALRPYLSSEEDRKKGKKFARYQLGDLLLHLEKKHGEDWGKVYDEAWERIDKKVEGLSKHIKLEEERRSEDAQSKAALTDWLRAKASFVIEGLKEADDKDEFCRCELKLQKWYGDLRGKPFAIEAENSILDISGFSKQYNCAFIWQKDGVKKLNLYLIINYFKGGKLRFKKIKPEAFEANRFYTVINKKSGEIVPMEVNFNFDDPNLIILPLAFGKRQGREFIWNDLLSLETGSLKLANGRVIEKTLYNRRTRQDEPALFVALTFERREVLDSSNIKPMNLIGVDRGENIPAVIALTDPEGCPLSRFKDSLGNPTHILRIGESYKEKQRTIQAKKEVEQRRAGGYSRKYASKAKNLADDMVRNTARDLLYYAVTQDAMLIFENLSRGFGRQGKRTFMAERQYTRMEDWLTAKLAYEGLPSKTYLSKTLAQYTSKTCSNCGFTITSADYDRVLEKLKKTATGWMTTINGKELKVEGQITYYNRYKRQNVVKDLSVELDRLSEESVNNDISSWTKGRSGEALSLLKKRFSHRPVQEKFVCLNCGFETHADEQAALNIARSWLFLRSQEYKKYQTNKTTGNTDKRAFVETWQSFYRKKLKEVWKPAV

SEQ ID NO: 29262 - protein, 979 aa, synthetic construct
  REGION 1..979: note = engineered CasX variant
QEIKRINKIRRRLVKDSNTKKAGKTGPMKTLLVPVMTPDLRERLENLRKKPENIPQPISNTSRANLNKLLTDYTEMKKAILHVYWEEFQKDPVGLMSRVAQPASKKIDQNKLKPEMDEKGNLTTAGFACSQCGQPLFVYKLEQVSEKGKAYTNYFGRCNVAEHEKLILLAQLKPEKDSDEAVTYSLGKFGQRALDFYSIHVTKESTHPVKPLAQIAGNRYASGPVGKALSDACMGTIASFLSKYQDIIIEHQKVVKGNQKRLESLRELAGKENLEYPSVTLPPQPHTKEGVDAYNEVIARVRMWVNLNLWQKLKLSRDDAKPLLRLKGFPSFPLVERQANEVDWWDMVCNVKKLINEKKEDGKVFWQNLAGYKRQEALRPYLSSEEDRKKGKKFARYQLGDLLLHLEKKHGEDWGKVYDEAWERIDKKVEGLSKHIKLEEERRSEDAQSKAALTDWLRAKASFVIEGLKEADKDEFCRCELKLQKWYGDLRGKPFAIEAENSILDISGFSKQYNCAFIWQKDGVKKLNLYLIINYFKGGKLRFKKIKPEAFEANRFYTVINKKSGEIVPMEVNFNFDDPNLIILPLAFGKRQGREFIWNDLLSLETGSLKLANGRVIEKTLYNRRTRQDEPALFVALTFERREVLDSSNIKPMNLIGVDRGENIPAVIALTDPEGCPLSRFKDSLGNPTHILRIGESYKEKQRTIQAKKEVEQRRAGGYSRKYASKAKNLADDMVRNTARDLLYYAVTQDAMLIFENLSRGFGRQGKRTFMAERQYTRMEDWLTAKLAYEGLPSKTYLSKTLAQYTSKTCSNCGFTITSADYDRVLEKLKKTATGWMTTINGKELKVEGQITYYNRYKRQNVVKDLSVELDRLSEESVNNDISSWTKGRSGNEALSLLKKRFSHRPVQEKFVCLNCGFETHADEQAALNIARSWLFLRSQEYKKYQTNKTTGNTDKRAFVETWQSFYRKKLKEVWKPAV

SEQ ID NO: 29263 - protein, 978 aa, synthetic construct
  REGION 1..978: note = engineered CasX variant
QEIKRINKIRRRLVKDSNTKKAGKTGPMKTLLVPVMTPDLRERLENLRKKPENIPQPISNTSRANLNKLLTDYTEMKKAILHVYWEEFQKDPVGLMSRVAQPASKKIDQNKLKPEMDEKGNLTTAGFACSQCGQPLFVYKLEQVSEKGKAYTNYFGRCNVAEHEKLILLAQLKPEKDSDEAVTYSLGKFGQRALDFYSIHVTKESTHPVKPLAQIAGNRYASGPVGKALSDACMGTIASFLSKYQDIIIEHQKVVKGNQKRLESLRELAGKENLEYPSVTLPPQPHTKEGVDAYNEVIARVRMWVNLNLWQKLKLSRDDAKPLLRLKGFPSFPLVERQANEVDWWDMVCNVKKLINEKKEDGKVFWQNLAGYKRQEALRPYLSSEEDRQKGKKFARYQLGDLLLHLEKKHGEDWGKVYDEAWERIDKKVEGLSKHIKLEEERRSEDAQSKAALTDWLRAKASFVIEGLKEADKDEFCRCELKLQKWYGDLRGKPFAIEAENSILDISGFSKQYNCAFIWQKDGVKKLNLYLIINYFKGGKLRFKKIKPEAFEANRFYTVINKKSGEIVPMEVNFNFDDPNLIILPLAFGKRQGREFIWNDLLSLETGSLKLANGRVIEKTLYNRRTRQDEPALFVALTFERREVLDSSNIKPMNLIGVDRGENIPAVIALTDPEGCPLSRFKDSLGNPTHILRIGESYKEKQRTIQAKKEVEQRRAGGYSRKYASKAKNLADDMVRNTARDLLYYAVTQDAMLIFENLSRGFGRQGKRTFMAERQYTRMEDWLTAKLAYEGLPSKTYLSKTLAQYTSKTCSNCGFTITSADYDRVLEKLKKTATGWMTTINGKELKVEGQITYYNRYKRQNVVKDLSVELDRLSEESVNNDISSWTKGRSGEALSLLKKRFSHRPVQEKFVCLNCGFETHADEQAALNIARSWLFLRSQEYKKYQTNKTTGNTDKRAFVETWQSFYRKKLKEVWKPAV

SEQ ID NO: 29264 - protein, 978 aa, synthetic construct
  REGION 1..978: note = engineered CasX variant
QEIKRINKIRRRLVKDSNTKKAGKTGPMKTLLVPVMTPDLRERLENLRKKPENIPQPISNTSRANLNKLLTDYTEMKKAILHVYWEEFQKDPVGLMSRVAQPASKKIDQNKLKPEMDEKGNLTTAGFACSQCGQPLFVYKLEQVSEKGKAYTNYFGRCNVAEHEKLILLAQLKPEKDSDEAVTYSLGKFGQRALDFYSIHVTKESTHPVKPLAQIAGNRYASGPVGKALSDACMGTIASFLSKYQDIIIEHQKVVKGNQKRLESLRELAGKENLEYPSVTLPPQPHTKEGVDAYNEVIARVRMWVNLNLWQKLKLSRDDAKPLLRLKGFPSFPLVERQANEVDWWDMVCNVKKLINEKKEDGKVFWQNLAGYKRQEALRPYLSSEEDRKKGKKFARYQLGDLLLHLEKKHGEDWGKVYDEAWERIDKKVEGLSKHIKLEEERRSEDAQSKAALTDWLRAKASFVIEGLKEADKDEFCRCELKLQKWYGDLRGKPFAIEAENSILDISGFSKQYNCAFIWQKDGVKKLNLYLIINYFKGGKLRFKKIKPEAFEANRFYTVINKKSGEIVPMEVNFNFDDPNLIILPLAFGKRQGREFIWNDLLSLETGSLKLANGRVIEKTLYNRRTRQDEPALFVALTFERREVLDSSNIKPMNLIGVDRGENIPAVIALTDPEGCPLSRFKDSLGNPTHILRIGESYKEKQRTIQAKKEVEQRRAGGYSRKYASKAKNLADDMVRNTARDLLYYAVTQDAMLIFENLSRGFGRQGKRTFMAERQYTRMEDWLTAKLAYEGLPSQTYLSKTLAQYTSKTCSNCGFTITSADYDRVLEKLKKTATGWMTTINGKELKVEGQITYYNRYKRQNVVKDLSVELDRLSEESVNNDISSWTKGRSGEALSLLKKRFSHRPVQEKFVCLNCGFETHADEQAALNIARSWLFLRSQEYKKYQTNKTTGNTDKRAFVETWQSFYRKKLKEVWKPAV

SEQ ID NO: 29265 - protein, 978 aa, synthetic construct
  REGION 1..978: note = engineered CasX variant
QEIKRINKIRRRLVKDSNTKKAGKTGPMKTLLVPVMTPDLRERLENLRKKPENIPQPISNTSRANLNKLLTDYTEMKKAILHVYWEEFQKDPVGLMSRVAQPASKKIDQNKLKPEMDEKGNLTTAGFACSQCGQPLFVYKLEQVSEKGKAYTNYFGRCNVAEHEKLILLAQLKPEKDSDEAVTYSLGKFGQRALDFYSIHVTKESTHPVKPLAQIAGNRYASGPVGKALSDACMGTIASFLSKYQDIIIEHQKVVKGNQKRLESLRELAGKENLEYPSVTLPPQPHTKEGVDAYNEVIARVRMWVNLNLWQKLKLSRDDAKPLLRLKGFPSFPLVERQANEVDWWDMVCNVKKLINEKKEDGKVFWQNLAGYKRQEALRPYLSSEEDRKKGKKFARYQLGDLLLHLEKKHGEDWGKVYDEAWERIDKKVEGLSKHIKLEEERRSEDAQSKAALTDWLRAKASFVIEGLKEADKDEFCRCELKLQKWYGDLRGKPFAIEAENSILDISGFSKQYNCAFIWQKDGVKKLNLYLIINYFKGGKLRFKKIKPEAFEANRFYTVINKKSGEIVPMEVNFNFDDPNLIILPLAFGKRQGREFIWNDLLSLETGSLKLANGRVIEKTLYNRRTRQDEPALFVALTFERREVLDSSNIKPMNLIGVDRGENIPAVIALTDPEGCPLSRFKDSLGNPTHILRIGESYKEKQRTIQAKKEVEQRRAGGYSRKYASKAKNLADDMVRNTARDLLYYAVTQDAMLIFENLSRGFGRQGKRTFMAERQYTRMEDWLTAKLAYNGLPSKTYLSKTLAQYTSKTCSNCGFTITSADYDRVLEKLKKTATGWMTTINGKELKVEGQITYYNRYKRQNVVKDLSVELDRLSEESVNNDISSWTKGRSGEALSLLKKRFSHRPVQEKFVCLNCGFETHADEQAALNIARSWLFLRSQEYKKYQTNKTTGNTDKRAFVETWQSFYRKKLKEVWKPAV

SEQ ID NO: 29266 - protein, 978 aa, synthetic construct
  REGION 1..978: note = engineered CasX variant
QEIKRINKIRRRLVKDSNTKKAGKTGPMKTLLVPVMTPDLRERLENLRKKPENIPQPISNTSRANLNKLLTDYTEMKKAILHVYWEEFQKDPVGLMSRVAQPASKKIDQNKLKPEMDEKGNLTTAGFACSQCGQPLFVYKLEQVSEKGKAYTNYFGRCNVAEHEKLIQLAQLKPEKDSDEAVTYSLGKFGQRALDFYSIHVTKESTHPVKPLAQIAGNRYASGPVGKALSDACMGTIASFLSKYQDIIIEHQKVVKGNQKRLESLRELAGKENLEYPSVTLPPQPHTKEGVDAYNEVIARVRMWVNLNLWQKLKLSRDDAKPLLRLKGFPSFPLVERQANEVDWWDMVCNVKKLINEKKEDGKVFWQNLAGYKRQEALRPYLSSEEDRKKGKKFARYQLGDLLLHLEKKHGEDWGKVYDEAWERIDKKVEGLSKHIKLEEERRSEDAQSKAALTDWLRAKASFVIEGLKEADKDEFCRCELKLQKWYGDLRGKPFAIEAENSILDISGFSKQYNCAFIWQKDGVKKLNLYLIINYFKGGKLRFKKIKPEAFEANRFYTVINKKSGEIVPMEVNFNFDDPNLIILPLAFGKRQGREFIWNDLLSLETGSLKLANGRVIEKTLYNRRTRQDEPALFVALTFERREVLDSSNIKPMNLIGVDRGENIPAVIALTDPEGCPLSRFKDSLGNPTHILRIGESYKEKQRTIQAKKEVEQRRAGGYSRKYASKAKNLADDMVRNTARDLLYYAVTQDAMLIFENLSRGFGRQGKRTFMAERQYTRMEDWLTAKLAYEGLPSKTYLSKTLAQYTSKTCSNCGFTITSADYDRVLEKLKKTATGWMTTINGKELKVEGQITYYNRYKRQNVVKDLSVELDRLSEESVNNDISSWTKGRSGEALSLLKKRFSHRPVQEKFVCLNCGFETHADEQAALNIARSWLFLRSQEYKKYQTNKTTGNTDKRAFVETWQSFYRKKLKEVWKPAV

SEQ ID NO: 29267 - protein, 978 aa, synthetic construct
  REGION 1..978: note = engineered CasX variant
QEIKRINKIRRRLVKDSNTKKAGKTGPMKTLLVPVMTPDLRERLENLRKKPENIPQPISNTSRANLNKLLTDYTEMKKAILHVYWEEFQKDPVGLMSRVAQPASKKIDQNKLKPEMDEKGNLTTAGFACSQCGQPLFVYKLEQVSEKGKAYTNYFGRCNVAEHEKLILLAQLKPEKDSDEAVTYSLGKFGQRALDFYSIHVTKESTHPVKPLAQIAGNRYASGPVGKALSDACMGTIASFLSKYQDIIIEHQKVVKGNQKRLESLRELAGKENLEYPSVTLPPQPHTKEGVDAYNEVIARVRMWVNLNLWQKLKLSRDDAKPLLRLKGFPSFPLVERQANEVDWWDMVCNVKKLINEKKEDGKVFWQNLAIYKRQEALRPYLSSEEDRKKGKKFARYQLGDLLLHLEKKHGEDWGKVYDEAWERIDKKVEGLSKHIKLEEERRSEDAQSKAALTDWLRAKASFVIEGLKEADKDEFCRCELKLQKWYGDLRGKPFAIEAENSILDISGFSKQYNCAFIWQKDGVKKLNLYLIINYFKGGKLRFKKIKPEAFEANRFYTVINKKSGEIVPMEVNFNFDDPNLIILPLAFGKRQGREFIWNDLLSLETGSLKLANGRVIEKTLYNRRTRQDEPALFVALTFERREVLDSSNIKPMNLIGVDRGENIPAVIALTDPEGCPLSRFKDSLGNPTHILRIGESYKEKQRTIQAKKEVEQRRAGGYSRKYASKAKNLADDMVRNTARDLLYYAVTQDAMLIFENLSRGFGRQGKRTFMAERQYTRMEDWLTAKLAYEGLPSKTYLSKTLAQYTSKTCSNCGFTITSADYDRVLEKLKKTATGWMTTINGKELKVEGQITYYNRYKRQNVVKDLSVELDRLSEESVNNDISSWTKGRSGEALSLLKKRFSHRPVQEKFVCLNCGFETHADEQAALNIARSWLFLRSQEYKKYQTNKTTGNTDKRAFVETWQSFYRKKLKEVWKPAV

SEQ ID NO: 29268 - protein, 978 aa, synthetic construct
  REGION 1..978: note = engineered CasX variant
QEIKRINKIRRRLVKDSNTKKAGKTGPMKTLLVPVMTPDLRERLENLRKKPENIPQPISNTSRANLNKLLTDYTEMKKAILHVYWEEFQKDPVGLMSRVAQPASKKIDQNKLKPEMDEKGNLTTAGFACSQCGQPLFVYKLEQVSEKGKAYTNYFGRCNVAEHEKLILLAQLKPEKDSDEAVTYSLGKFGQRALDFYSIHVTKESTHPVKPLAQIAGNRYASGPVGKALSDACMGTIASFLSKYQDIIIEHQKVVKGNQKRLESLRELAGKENLEYPSVTLPPQPHTKEGVDAYNEVIARVRMWVNLNLWQKLKLSRDDAKPLLRLKGFPSFPLVERQANEVDWWDMVCNVKKLINEKKEDGKVFWQNLAGYKRQEALRPYLSSEEDREKGKKFARYQLGDLLLHLEKKHGEDWGKVYDEAWERIDKKVEGLSKHIKLEEERRSEDAQSKAALTDWLRAKASFVIEGLKEADKDEFCRCELKLQKWYGDLRGKPFAIEAENSILDISGFSKQYNCAFIWQKDGVKKLNLYLIINYFKGGKLRFKKIKPEAFEANRFYTVINKKSGEIVPMEVNFNFDDPNLIILPLAFGKRQGREFIWNDLLSLETGSLKLANGRVIEKTLYNRRTRQDEPALFVALTFERREVLDSSNIKPMNLIGVDRGENIPAVIALTDPEGCPLSRFKDSLGNPTHILRIGESYKEKQRTIQAKKEVEQRRAGGYSRKYASKAKNLADDMVRNTARDLLYYAVTQDAMLIFENLSRGFGRQGKRTFMAERQYTRMEDWLTAKLAYEGLPSKTYLSKTLAQYTSKTCSNCGFTITSADYDRVLEKLKKTATGWMTTINGKELKVEGQITYYNRYKRQNVVKDLSVELDRLSEESVNNDISSWTKGRSGEALSLLKKRFSHRPVQEKFVCLNCGFETHADEQAALNIARSWLFLRSQEYKKYQTNKTTGNTDKRAFVETWQSFYRKKLKEVWKPAV

SEQ ID NO: 29269 - protein, 978 aa, synthetic construct
  REGION 1..978: note = engineered CasX variant
QEIKRINKIRRRLVKDSNTKKAGKTGPMKTLLVPVMTPDLRERLENLRKKPENIPQPISNTSRANLNKLLTDYTEMKKAILHVYWEEFQKDPVGLMSRVAQPASKKIDQNKLKPEMDEKGNLTTAGFACSQCGQPLFVYKLEQVSEKGKAYTNYFGRCNVAEHEKLILLAQLKPEKDSDEAVTYSLGKFGQRALDFYSIHVTKESTHPVKPLAQIAGNRYASGPVGKALSDACMGTIASFLSKYQDIIIEHQKVVKGNQKRLESLRELAGKENLEYPSVTLPPQPHTKEGVDAYNEVIARVRMWVNLNLWQKLKLSRDDAKPLLRLKGFPSFPLVERQANEVDWWDMVCNVKKLINEKKEDGKVFWQNLAGYKRQEALRPYLSSEEDRKKGKKFARYQLGDLLLHLEKKHGEDWGKVYDEAWERIDKKVEGLSKHIKLEEERRSEDAQSKAALTDWLRAKASFVIEGLKEADKDEFCRCELKLQKWYGDLRGKPFAIEAENSILDISGFSKQYNCAFIWQKDGVKKLNLYLIINYFKGGKLRFKKIKPEAFEANRFYTVINKKSGEIVIMEVNFNFDDPNLIILPLAFGKRQGREFIWNDLLSLETGSLKLANGRVIEKTLYNRRTRQDEPALFVALTFERREVLDSSNIKPMNLIGVDRGENIPAVIALTDPEGCPLSRFKDSLGNPTHILRIGESYKEKQRTIQAKKEVEQRRAGGYSRKYASKAKNLADDMVRNTARDLLYYAVTQDAMLIFENLSRGFGRQGKRTFMAERQYTRMEDWLTAKLAYEGLPSKTYLSKTLAQYTSKTCSNCGFTITSADYDRVLEKLKKTATGWMTTINGKELKVEGQITYYNRYKRQNVVKDLSVELDRLSEESVNNDISSWTKGRSGEALSLLKKRFSHRPVQEKFVCLNCGFETHADEQAALNIARSWLFLRSQEYKKYQTNKTTGNTDKRAFVETWQSFYRKKLKEVWKPAV

SEQ ID NO: 29270 - protein, 978 aa, synthetic construct
  REGION 1..978: note = engineered CasX variant
QEIKRINKIRRRLVKDSNTKKAGKTGPMKTLLVRVMTPDLRERLENLRKKPPNIPQPISNTSRANLNKLLTDYTEMKKAILHVYWEEFQKDPVGLMSRVAQPASKKIDQNKLKPEMDEKGNLTTAGFACSQCGQPLFVYKLEQVSEKGKAYTNYFGRCNVAEHEKLILLAQLKPEKDSDEAVTYSLGKFGQRALDFYSIHVTKESTHPVKPLAQIAGNRYASGPVGKALSGACMGTIASFLSKYQDIIIEHQKVVKGNQKRLESLRELAGKENLEYPSVTLPPQPHTKEGVDAYNEVIARVRMWVNLNLWQKLKLSRDDAKPLLRLKGFPSFPLVERQANEVDWWDMVCNVKKLINEKKEDGKVFWQNLAGYKRQEALRPYLSSEEDRKKGKKFARYQLGDLLLHLEKKHGEDWGKVYDEAWERIDKKVEGLSKHIKLEEERRSEDAQSKAALTDWLRAKASFVIEGLKEADKDEFCRCELKLQKWYGDLRGKPFAIEAENSILDISGFSKQYNCAFIWQKDGVKKLNLYLIINYFKGGKLRFKKIKPEAFEANRFYTVINKKSGEIVPMEVNFNFDDPNLIILPLAFGKRQGREFIWNDLLSLETGSLKLANGRVIEKTLYNRRTRQDEPALFVALTFERREVLDSSNIKPMNLIGVDRGENIPAVIALTDPEGCPLSRFKDSLGNPTHILRIGESYKEKQRTIQAKKEVEQRRAGGYSRKYASKAKNLADDMVRNTARDLLYYAVTQDAMLIFENLSRGFGRQGKRTFMAERQYTRMEDWLTAKLAYEGLPSKTYLSKTLAQYTSKTCSNCGFTITSADYDRVLEKLKKTATGWMTTINGKELKVEGQITYYNRYKRQNVVKDLSVELDRLSEESVNNDISSWTKGRSGEALSLLKKRFSHRPVQEKFVCLNCGFETHADEQAALNIARSWLFLRSQEYKKYQTNKTTGNTDKRAFVETWQSFYRKKLKEVWKPAV

SEQ ID NO: 29271 - protein, 978 aa, synthetic construct
  REGION 1..978: note = engineered CasX variant
QEIKRINKIRRRLVKDSNTKKAGKTGPMKTLLVRVMTPDLRERLENLRKKPPNIPQPISNTSRANLNKLLTDYTEMKKAILHVYWEEFQKDPVGLMSRVAQPASKKIDQNKLKPEMDEKGNLTTAGFACSQCGQPLFVYKLEQVSEKGKAYTNYFGRCNVAEHEKLILLAQLKPEKDSDEAVTYSLGKFGQRALDFYSIHVTKESTHPVKPLAQIAGNRYASGPVGKALSDACMGTIASFLSKYQDIIIEHQKVVKGNQKRLESLRELAGKENLEYPSVTLPPQPHTKEGVDAYNEVIARVRMWVNLNLWQKLKLSRDDAKPLLRLKNFPSFPLVERQANEVDWWDMVCNVKKLINEKKEDGKVFWQNLAGYKRQEALRPYLSSEEDRKKGKKFARYQLGDLLLHLEKKHGEDWGKVYDEAWERIDKKVEGLSKHIKLEEERRSEDAQSKAALTDWLRAKASFVIEGLKEADKDEFCRCELKLQKWYGDLRGKPFAIEAENSILDISGFSKQYNCAFIWQKDGVKKLNLYLIINYFKGGKLRFKKIKPEAFEANRFYTVINKKSGEIVPMEVNFNFDDPNLIILPLAFGKRQGREFIWNDLLSLETGSLKLANGRVIEKTLYNRRTRQDEPALFVALTFERREVLDSSNIKPMNLIGVDRGENIPAVIALTDPEGCPLSRFKDSLGNPTHILRIGESYKEKQRTIQAKKEVEQRRAGGYSRKYASKAKNLADDMVRNTARDLLYYAVTQDAMLIFENLSRGFGRQGKRTFMAERQYTRMEDWLTAKLAYEGLPSKTYLSKTLAQYTSKTCSNCGFTITSADYDRVLEKLKKTATGWMTTINGKELKVEGQITYYNRYKRQNVVKDLSVELDRLSEESVNNDISSWTKGRSGEALSLLKKRFSHRPVQEKFVCLNCGFETHADEQAALNIARSWLFLRSQEYKKYQTNKTTGNTDKRAFVETWQSFYRKKLKEVWKPAV

SEQ ID NO: 29272 - protein, 978 aa, synthetic construct
  REGION 1..978: note = engineered CasX variant
QEIKRINKIRRRLVKDSNTKKAGKTGPMKTLLVRVMTPDLRERLENLRKKPPNIPQPISNTSRANLNKLLTDYTEMKKAILHVYWEEFQKDPVGLMSRVAQPASKKIDQNKLKPEMDEKGNLTTAGFACSQCGQPLFVYKLEQVSEKGKAYTNYFGRCNVAEHEKLILLAQLKPEKDSDEAVTYSLGKFGQRALDFYSIHVTKESTHPVKPLAQIAGNRYASGPVGKALSDACMGTIASFLSKYQDIIIEHQKVVKGNQKRLESLRELAGKENLEYPSVTLPPQPHTKEGVDAYNEVIARVRMWVNLNLWQKLKLSRDDAKPLLRLKGFPSFPLVERQANEVDWWDMVCNVKKLINEKKEDGKVFWQNLAGYKRQEALRPYLSSEEDRKKGKKFARYQLGDLLNHLEKKHGEDWGKVYDEAWERIDKKVEGLSKHIKLEEERRSEDAQSKAALTDWLRAKASFVIEGLKEADKDEFCRCELKLQKWYGDLRGKPFAIEAENSILDISGFSKQYNCAFIWQKDGVKKLNLYLIINYFKGGKLRFKKIKPEAFEANRFYTVINKKSGEIVPMEVNFNFDDPNLIILPLAFGKRQGREFIWNDLLSLETGSLKLANGRVIEKTLYNRRTRQDEPALFVALTFERREVLDSSNIKPMNLIGVDRGENIPAVIALTDPEGCPLSRFKDSLGNPTHILRIGESYKEKQRTIQAKKEVEQRRAGGYSRKYASKAKNLADDMVRNTARDLLYYAVTQDAMLIFENLSRGFGRQGKRTFMAERQYTRMEDWLTAKLAYEGLPSKTYLSKTLAQYTSKTCSNCGFTITSADYDRVLEKLKKTATGWMTTINGKELKVEGQITYYNRYKRQNVVKDLSVELDRLSEESVNNDISSWTKGRSGEALSLLKKRFSHRPVQEKFVCLNCGFETHADEQAALNIARSWLFLRSQEYKKYQTNKTTGNTDKRAFVETWQSFYRKKLKEVWKPAV

SEQ ID NO: 29273 - protein, 978 aa, synthetic construct
  REGION 1..978: note = engineered CasX variant
QEIKRINKIRRRLVKDSNTKKAGKTGPMKTLLVRVMTPDLRERLENLRKKPPNIPQPISNTSRANLNKLLTDYTEMKKAILHVYWEEFQKDPVGLMSRVAQPASKKIDQNKLKPEMDEKGNLTTAGFACSQCGQPLFVYKLEQVSEKGKAYTNYFGRCNVAEHEKLILLAQLKPEKDSDEAVTYSLGKFGQRALDFYSIHVTKESTHPVKPLAQIAGNRYASGPVGKALSDACMGTIASFLSKYQDIIIEHQKVVKGNQKRLESLRELAGKENLEYPSVTLPPQPHTKEGVDAYNEVIARVRMWVNLNLWQKLKLSRDDAKPLLRLKGFPSFPLVERQANEVDWWDMVCNVKKLINEKKEDGKVFWQNLAGYKRQEALRPYLSSEEDRKKGKKFARYQLGDLLWHLEKKHGEDWGKVYDEAWERIDKKVEGLSKHIKLEEERRSEDAQSKAALTDWLRAKASFVIEGLKEADKDEFCRCELKLQKWYGDLRGKPFAIEAENSILDISGFSKQYNCAFIWQKDGVKKLNLYLIINYFKGGKLRFKKIKPEAFEANRFYTVINKKSGEIVPMEVNFNFDDPNLIILPLAFGKRQGREFIWNDLLSLETGSLKLANGRVIEKTLYNRRTRQDEPALFVALTFERREVLDSSNIKPMNLIGVDRGENIPAVIALTDPEGCPLSRFKDSLGNPTHILRIGESYKEKQRTIQAKKEVEQRRAGGYSRKYASKAKNLADDMVRNTARDLLYYAVTQDAMLIFENLSRGFGRQGKRTFMAERQYTRMEDWLTAKLAYEGLPSKTYLSKTLAQYTSKTCSNCGFTITSADYDRVLEKLKKTATGWMTTINGKELKVEGQITYYNRYKRQNVVKDLSVELDRLSEESVNNDISSWTKGRSGEALSLLKKRFSHRPVQEKFVCLNCGFETHADEQAALNIARSWLFLRSQEYKKYQTNKTTGNTDKRAFVETWQSFYRKKLKEVWKPAV

SEQ ID NO: 29274 - protein, 978 aa, synthetic construct
  REGION 1..978: note = engineered CasX variant
QEIKRINKIRRRLVKDSNTKKAGKTGPMKTLLVRVMTPDLRERLENLRKKPPNIPQPISNTSRANLNKLLTDYTEMKKAILHVYWEEFQKDPVGLMSRVAQPASKKIDQNKLKPEMDEKGNLTTAGFACSQCGQPLFVYKLEQVSEKGKAYTNYFGRCNVAEHEKLILLAQLKPEKDSDEAVTYSLGKFGQRALDFYSIHVTKESTHPVKPLAQIAGNRYASGPVGKALSDACMGTIASFLSKYQDIIIEHQKVVKGNQKRLESLRELAGKENLEYPSVTLPPQPHTKEGVDAYNEVIARVRMWVNLNLWQKLKLSRDDAKPLLRLKGFPSFPLVERQANEVDWWDMVCNVKKLINEKKEDGKVFWQNLAGYKRQEALRPYLSSEEDRKKGKKFARYQLGDLLLHLYKKHGEDWGKVYDEAWERIDKKVEGLSKHIKLEEERRSEDAQSKAALTDWLRAKASFVIEGLKEADKDEFCRCELKLQKWYGDLRGKPFAIEAENSILDISGFSKQYNCAFIWQKDGVKKLNLYLIINYFKGGKLRFKKIKPEAFEANRFYTVINKKSGEIVPMEVNFNFDDPNLIILPLAFGKRQGREFIWNDLLSLETGSLKLANGRVIEKTLYNRRTRQDEPALFVALTFERREVLDSSNIKPMNLIGVDRGENIPAVIALTDPEGCPLSRFKDSLGNPTHILRIGESYKEKQRTIQAKKEVEQRRAGGYSRKYASKAKNLADDMVRNTARDLLYYAVTQDAMLIFENLSRGFGRQGKRTFMAERQYTRMEDWLTAKLAYEGLPSKTYLSKTLAQYTSKTCSNCGFTITSADYDRVLEKLKKTATGWMTTINGKELKVEGQITYYNRYKRQNVVKDLSVELDRLSEESVNNDISSWTKGRSGEALSLLKKRFSHRPVQEKFVCLNCGFETHADEQAALNIARSWLFLRSQEYKKYQTNKTTGNTDKRAFVETWQSFYRKKLKEVWKPAV

SEQ ID NO: 29275 - protein, 978 aa, synthetic construct
  REGION 1..978: note = engineered CasX variant
QEIKRINKIRRRLVKDSNTKKAGKTGPMKTLLVRVMTPDLRERLENLRKKPPNIPQPISNTSRANLNKLLTDYTEMKKAILHVYWEEFQKDPVGLMSRVAQPASKKIDQNKLKPEMDEKGNLTTAGFACSQCGQPLFVYKLEQVSEKGKAYTNYFGRCNVAEHEKLILLAQLKPEKDSDEAVTYSLGKFGQRALDFYSIHVTKESTHPVKPLAQIAGNRYASGPVGKALSDACMGTIASFLSKYQDIIIEHQKVVKGNQKRLESLRELAGKENLEYPSVTLPPQPHTKEGVDAYNEVIARVRMWVNLNLWQKLKLSRDDAKPLLRLKGFPSFPLVERQANEVDWWDMVCNVKKLINEKKEDGKVFWQNLAGYKRQEALRPYLSSEEDRKKGKKFARYQLGDLLLHLEKKHPEDWGKVYDEAWERIDKKVEGLSKHIKLEEERRSEDAQSKAALTDWLRAKASFVIEGLKEADKDEFCRCELKLQKWYGDLRGKPFAIEAENSILDISGFSKQYNCAFIWQKDGVKKLNLYLIINYFKGGKLRFKKIKPEAFEANRFYTVINKKSGEIVPMEVNFNFDDPNLIILPLAFGKRQGREFIWNDLLSLETGSLKLANGRVIEKTLYNRRTRQDEPALFVALTFERREVLDSSNIKPMNLIGVDRGENIPAVIALTDPEGCPLSRFKDSLGNPTHILRIGESYKEKQRTIQAKKEVEQRRAGGYSRKYASKAKNLADDMVRNTARDLLYYAVTQDAMLIFENLSRGFGRQGKRTFMAERQYTRMEDWLTAKLAYEGLPSKTYLSKTLAQYTSKTCSNCGFTITSADYDRVLEKLKKTATGWMTTINGKELKVEGQITYYNRYKRQNVVKDLSVELDRLSEESVNNDISSWTKGRSGEALSLLKKRFSHRPVQEKFVCLNCGFETHADEQAALNIARSWLFLRSQEYKKYQTNKTTGNTDKRAFVETWQSFYRKKLKEVWKPAV

SEQ ID NO: 29276 - protein, 979 aa, synthetic construct
  REGION 1..979: note = engineered CasX variant
QEIKRINKIRRRLVKDSNTKKAGKTGPMKTLLVRVMTPDLRERLENLRKKPPNIPQPISNTSRANLNKLLTDYTEMKKAILHVYWEEFQKDPVGLMSRVAQPASKKIDQNKLKPEMDEKGNLTTAGFACSQCGQPLFVYKLEQVSEKGKAYTNYFGRCNVAEHEKLILLAQLKPEKDSDEAVTYSLGKFGQRALDFYSIHVTKESTHPVKPLAQIAGNRYASGPVGKALSDACMGTIASFLSKYQDIIIEHQKVVKGNQKRLESLRELAGKENLEYPSVTLPPQPHTKEGVDAYNEVIARVRMWVNLNLWQKLKLSRDDAKPLLRLKGFPSFPLVERQANEVDWWDMVCNVKKLINEKKEDGKVFWQNLAGYKRQEALRPYLSSEEDRKKGKKFARYQLGDLLLHLEKKHGERDWGKVYDEAWERIDKKVEGLSKHIKLEEERRSEDAQSKAALTDWLRAKASFVIEGLKEADKDEFCRCELKLQKWYGDLRGKPFAIEAENSILDISGFSKQYNCAFIWQKDGVKKLNLYLIINYFKGGKLRFKKIKPEAFEANRFYTVINKKSGEIVPMEVNFNFDDPNLIILPLAFGKRQGREFIWNDLLSLETGSLKLANGRVIEKTLYNRRTRQDEPALFVALTFERREVLDSSNIKPMNLIGVDRGENIPAVIALTDPEGCPLSRFKDSLGNPTHILRIGESYKEKQRTIQAKKEVEQRRAGGYSRKYASKAKNLADDMVRNTARDLLYYAVTQDAMLIFENLSRGFGRQGKRTFMAERQYTRMEDWLTAKLAYEGLPSKTYLSKTLAQYTSKTCSNCGFTITSADYDRVLEKLKKTATGWMTTINGKELKVEGQITYYNRYKRQNVVKDLSVELDRLSEESVNNDISSWTKGRSGEALSLLKKRFSHRPVQEKFVCLNCGFETHADEQAALNIARSWLFLRSQEYKKYQTNKTTGNTDKRAFVETWQSFYRKKLKEVWKPAV

SEQ ID NO: 29277 - protein, 979 aa, synthetic construct
  REGION 1..979: note = engineered CasX variant
QEIKRINKIRRRLVKDSNTKKAGKTGPMKTLLVRVMTPDLRERLENLRKKPPNIPQPISNTSRANLNKLLTDYTEMKKAILHVYWEEFQKDPVGLMSRVAQPASKKIDQNKLKPEMDEKGNLTTAGFACSQCGQPLFVYKLEQVSEKGKAYTNYFGRCNVAEHEKLILLAQLKPEKDSDEAVTYSLGKFGQRALDFYSIHVTKESTHPVKPLAQIAGNRYASGPVGKALSDACMGTIASFLSKYQDIIIEHQKVVKGNQKRLESLRELAGKENLEYPSVTLPPQPHTKEGVDAYNEVIARVRMWVNLNLWQKLKLSRDDAKPLLRLKGFPSFPLVERQANEVDWWDMVCNVKKLINEKKEDGKVFWQNLAGYKRQEALRPYLSSEEDRKKGKKFARYQLGDLLLHLEKKHGEYDWGKVYDEAWERIDKKVEGLSKHIKLEEERRSEDAQSKAALTDWLRAKASFVIEGLKEADKDEFCRCELKLQKWYGDLRGKPFAIEAENSILDISGFSKQYNCAFIWQKDGVKKLNLYLIINYFKGGKLRFKKIKPEAFEANRFYTVINKKSGEIVPMEVNFNFDDPNLIILPLAFGKRQGREFIWNDLLSLETGSLKLANGRVIEKTLYNRRTRQDEPALFVALTFERREVLDSSNIKPMNLIGVDRGENIPAVIALTDPEGCPLSRFKDSLGNPTHILRIGESYKEKQRTIQAKKEVEQRRAGGYSRKYASKAKNLADDMVRNTARDLLYYAVTQDAMLIFENLSRGFGRQGKRTFMAERQYTRMEDWLTAKLAYEGLPSKTYLSKTLAQYTSKTCSNCGFTITSADYDRVLEKLKKTATGWMTTINGKELKVEGQITYYNRYKRQNVVKDLSVELDRLSEESVNNDISSWTKGRSGEALSLLKKRFSHRPVQEKFVCLNCGFETHADEQAALNIARSWLFLRSQEYKKYQTNKTTGNTDKRAFVETWQSFYRKKLKEVWKPAV

SEQ ID NO: 29278 - protein, 978 aa, synthetic construct
  REGION 1..978: note = engineered CasX variant
QEIKRINKIRRRLVKDSNTKKAGKTGPMKTLLVRVMTPDLRERLENLRKKPPNIPQPISNTSRANLNKLLTDYTEMKKAILHVYWEEFQKDPVGLMSRVAQPASKKIDQNKLKPEMDEKGNLTTAGFACSQCGQPLFVYKLEQVSEKGKAYTNYFGRCNVAEHEKLILLAQLKPEKDSDEAVTYSLGKFGQRALDFYSIHVTKESTHPVKPLAQIAGNRYASGPVGKALSDACMGTIASFLSKYQDIIIEHQKVVKGNQKRLESLRELAGKENLEYPSVTLPPQPHTKEGVDAYNEVIARVRMWVNLNLWQKLKLSRDDAKPLLRLKGFPSFPLVERQANEVDWWDMVCNVKKLINEKKEDGKVFWQNLAGYKRQEALRPYLSSEEDRKKGKKFARYQLGDLLLHLEKKHGEDWGDVYDEAWERIDKKVEGLSKHIKLEEERRSEDAQSKAALTDWLRAKASFVIEGLKEADKDEFCRCELKLQKWYGDLRGKPFAIEAENSILDISGFSKQYNCAFIWQKDGVKKLNLYLIINYFKGGKLRFKKIKPEAFEANRFYTVINKKSGEIVPMEVNFNFDDPNLIILPLAFGKRQGREFIWNDLLSLETGSLKLANGRVIEKTLYNRRTRQDEPALFVALTFERREVLDSSNIKPMNLIGVDRGENIPAVIALTDPEGCPLSRFKDSLGNPTHILRIGESYKEKQRTIQAKKEVEQRRAGGYSRKYASKAKNLADDMVRNTARDLLYYAVTQDAMLIFENLSRGFGRQGKRTFMAERQYTRMEDWLTAKLAYEGLPSKTYLSKTLAQYTSKTCSNCGFTITSADYDRVLEKLKKTATGWMTTINGKELKVEGQITYYNRYKRQNVVKDLSVELDRLSEESVNNDISSWTKGRSGEALSLLKKRFSHRPVQEKFVCLNCGFETHADEQAALNIARSWLFLRSQEYKKYQTNKTTGNTDKRAFVETWQSFYRKKLKEVWKPAV

SEQ ID NO: 29279 - protein, 978 aa, synthetic construct
  REGION 1..978: note = engineered CasX variant
QEIKRINKIRRRLVKDSNTKKAGKTGPMKTLLVRVMTPDLRERLENLRKKPPNIPQPISNTSRANLNKLLTDYTEMKKAILHVYWEEFQKDPVGLMSRVAQPASKKIDQNKLKPEMDEKGNLTTAGFACSQCGQPLFVYKLEQVSEKGKAYTNYFGRCNVAEHEKLILLAQLKPEKDSDEAVTYSLGKFGQRALDFYSIHVTKESTHPVKPLAQIAGNRYASGPVGKALSDACMGTIASFLSKYQDIIIEHQKVVKGNQKRLESLRELAGKENLEYPSVTLPPQPHTKEGVDAYNEVIARVRMWVNLNLWQKLKLSRDDAKPLLRLKGFPSFPLVERQANEVDWWDMVCNVKKLINEKKEDGKVFWQNLAGYKRQEALRPYLSSEEDRKKGKKFARYQLGDLLLHLEKKHGEDWGKVYGEAWERIDKKVEGLSKHIKLEEERRSEDAQSKAALTDWLRAKASFVIEGLKEADKDEFCRCELKLQKWYGDLRGKPFAIEAENSILDISGFSKQYNCAFIWQKDGVKKLNLYLIINYFKGGKLRFKKIKPEAFEANRFYTVINKKSGEIVPMEVNFNFDDPNLIILPLAFGKRQGREFIWNDLLSLETGSLKLANGRVIEKTLYNRRTRQDEPALFVALTFERREVLDSSNIKPMNLIGVDRGENIPAVIALTDPEGCPLSRFKDSLGNPTHILRIGESYKEKQRTIQAKKEVEQRRAGGYSRKYASKAKNLADDMVRNTARDLLYYAVTQDAMLIFENLSRGFGRQGKRTFMAERQYTRMEDWLTAKLAYEGLPSKTYLSKTLAQYTSKTCSNCGFTITSADYDRVLEKLKKTATGWMTTINGKELKVEGQITYYNRYKRQNVVKDLSVELDRLSEESVNNDISSWTKGRSGEALSLLKKRFSHRPVQEKFVCLNCGFETHADEQAALNIARSWLFLRSQEYKKYQTNKTTGNTDKRAFVETWQSFYRKKLKEVWKPAV

SEQ ID NO: 29280 - protein, 978 aa, synthetic construct
  REGION 1..978: note = engineered CasX variant
QEIKRINKIRRRLVKDSNTKKAGKTGPMKTLLVRVMTPDLRERLENLRKKPPNIPQPISNTSRANLNKLLTDYTEMKKAILHVYWEEFQKDPVGLMSRVAQPASKKIDQNKLKPEMDEKGNLTTAGFACSQCGQPLFVYKLEQVSEKGKAYTNYFGRCNVAEHEKLILLAQLKPEKDSDEAVTYSLGKFGQRALDFYSIHVTKESTHPVKPLAQIAGNRYASGPVGKALSDACMGTIASFLSKYQDIIIEHQKVVKGNQKRLESLRELAGKENLEYPSVTLPPQPHTKEGVDAYNEVIARVRMWVNLNLWQKLKLSRDDAKPLLRLKGFPSFPLVERQANEVDWWDMVCNVKKLINEKKEDGKVFWQNLAGYKRQEALRPYLSSEEDRKKGKKFARYQLGDLLLHLEKKHGEDWGKVYDEAWERIDKKVEGLSKHIKLEEERRSEDAQSKAALTDWLRAKASFVIEGKKEADKDEFCRCELKLQKWYGDLRGKPFAIEAENSILDISGFSKQYNCAFIWQKDGVKKLNLYLIINYFKGGKLRFKKIKPEAFEANRFYTVINKKSGEIVPMEVNFNFDDPNLIILPLAFGKRQGREFIWNDLLSLETGSLKLANGRVIEKTLYNRRTRQDEPALFVALTFERREVLDSSNIKPMNLIGVDRGENIPAVIALTDPEGCPLSRFKDSLGNPTHILRIGESYKEKQRTIQAKKEVEQRRAGGYSRKYASKAKNLADDMVRNTARDLLYYAVTQDAMLIFENLSRGFGRQGKRTFMAERQYTRMEDWLTAKLAYEGLPSKTYLSKTLAQYTSKTCSNCGFTITSADYDRVLEKLKKTATGWMTTINGKELKVEGQITYYNRYKRQNVVKDLSVELDRLSEESVNNDISSWTKGRSGEALSLLKKRFSHRPVQEKFVCLNCGFETHADEQAALNIARSWLFLRSQEYKKYQTNKTTGNTDKRAFVETWQSFYRKKLKEVWKPAV

SEQ ID NO: 29281 - protein, 978 aa, synthetic construct
  REGION 1..978: note = engineered CasX variant
QEIKRINKIRRRLVKDSNTKKAGKTGPMKTLLVRVMTPDLRERLENLRKKPPNIPQPISNTSRANLNKLLTDYTEMKKAILHVYWEEFQKDPVGLMSRVAQPASKKIDQNKLKPEMDEKGNLTTAGFACSQCGQPLFVYKLEQVSEKGKAYTNYFGRCNVAEHEKLILLAQLKPEKDSDEAVTYSLGKFGQRALDFYSIHVTKESTHPVKPLAQIAGNRYASGPVGKALSDACMGTIASFLSKYQDIIIEHQKVVKGNQKRLESLRELAGKENLEYPSVTLPPQPHTKEGVDAYNEVIARVRMWVNLNLWQKLKLSRDDAKPLLRLKGFPSFPLVERQANEVDWWDMVCNVKKLINEKKEDGKVFWQNLAGYKRQEALRPYLSSEEDRKKGKKFARYQLGDLLLHLEKKHGEDWGKVYDEAWERIDKKVEGLSKHIKLEEERRSEDAQSKAALTDWLRAKASFVIEGSKEADKDEFCRCELKLQKWYGDLRGKPFAIEAENSILDISGFSKQYNCAFIWQKDGVKKLNLYLIINYFKGGKLRFKKIKPEAFEANRFYTVINKKSGEIVPMEVNFNFDDPNLIILPLAFGKRQGREFIWNDLLSLETGSLKLANGRVIEKTLYNRRTRQDEPALFVALTFERREVLDSSNIKPMNLIGVDRGENIPAVIALTDPEGCPLSRFKDSLGNPTHILRIGESYKEKQRTIQAKKEVEQRRAGGYSRKYASKAKNLADDMVRNTARDLLYYAVTQDAMLIFENLSRGFGRQGKRTFMAERQYTRMEDWLTAKLAYEGLPSKTYLSKTLAQYTSKTCSNCGFTITSADYDRVLEKLKKTATGWMTTINGKELKVEGQITYYNRYKRQNVVKDLSVELDRLSEESVNNDISSWTKGRSGEALSLLKKRFSHRPVQEKFVCLNCGFETHADEQAALNIARSWLFLRSQEYKKYQTNKTTGNTDKRAFVETWQSFYRKKLKEVWKPAV

SEQ ID NO: 29282 - protein, 979 aa, synthetic construct
  REGION 1..979: note = engineered CasX variant
QEIKRINKIRRRLVKDSNTKKAGKTGPMKTLLVRVMTPDLRERLENLRKKPPNIPQPISNTSRANLNKLLTDYTEMKKAILHVYWEEFQKDPVGLMSRVAQPASKKIDQNKLKPEMDEKGNLTTAGFACSQCGQPLFVYKLEQVSEKGKAYTNYFGRCNVAEHEKLILLAQLKPEKDSDEAVTYSLGKFGQRALDFYSIHVTKESTHPVKPLAQIAGNRYASGPVGKALSDACMGTIASFLSKYQDIIIEHQKVVKGNQKRLESLRELAGKENLEYPSVTLPPQPHTKEGVDAYNEVIARVRMWVNLNLWQKLKLSRDDAKPLLRLKGFPSFPLVERQANEVDWWDMVCNVKKLINEKKEDGKVFWQNLAGYKRQEALRPYLSSEEDRKKGKKFARYQLGDLLLHLEKKHGEDWGKVYDEAWERIDKKVEGLSKHIKLEEERRSEDAQSKAALTDWLRAKASFVIEGLKEADDKDEFCRCELKLQKWYGDLRGKPFAIEAENSILDISGFSKQYNCAFIWQKDGVKKLNLYLIINYFKGGKLRFKKIKPEAFEANRFYTVINKKSGEIVPMEVNFNFDDPNLIILPLAFGKRQGREFIWNDLLSLETGSLKLANGRVIEKTLYNRRTRQDEPALFVALTFERREVLDSSNIKPMNLIGVDRGENIPAVIALTDPEGCPLSRFKDSLGNPTHILRIGESYKEKQRTIQAKKEVEQRRAGGYSRKYASKAKNLADDMVRNTARDLLYYAVTQDAMLIFENLSRGFGRQGKRTFMAERQYTRMEDWLTAKLAYEGLPSKTYLSKTLAQYTSKTCSNCGFTITSADYDRVLEKLKKTATGWMTTINGKELKVEGQITYYNRYKRQNVVKDLSVELDRLSEESVNNDISSWTKGRSGEALSLLKKRFSHRPVQEKFVCLNCGFETHADEQAALNIARSWLFLRSQEYKKYQTNKTTGNTDKRAFVETWQSFYRKKLKEVWKPAV

SEQ ID NO: 29283 - protein, 979 aa, synthetic construct
  REGION 1..979: note = engineered CasX variant
QEIKRINKIRRRLVKDSNTKKAGKTGPMKTLLVRVMTPDLRERLENLRKKPPNIPQPISNTSRANLNKLLTDYTEMKKAILHVYWEEFQKDPVGLMSRVAQPASKKIDQNKLKPEMDEKGNLTTAGFACSQCGQPLFVYKLEQVSEKGKAYTNYFGRCNVAEHEKLILLAQLKPEKDSDEAVTYSLGKFGQRALDFYSIHVTKESTHPVKPLAQIAGNRYASGPVGKALSDACMGTIASFLSKYQDIIIEHQKVVKGNQKRLESLRELAGKENLEYPSVTLPPQPHTKEGVDAYNEVIARVRMWVNLNLWQKLKLSRDDAKPLLRLKGFPSFPLVERQANEVDWWDMVCNVKKLINEKKEDGKVFWQNLAGYKRQEALRPYLSSEEDRKKGKKFARYQLGDLLLHLEKKHGEDWGKVYDEAWERIDKKVEGLSKHIKLEEERRSEDAQSKAALTDWLRAKASFVIEGLKEADKDEFCRCELKLQKWYGDLRGKPFAIEAENSILDISGFSKQYNCAFIWQKDGVKKLNLYLIINYFKGGKLRFKKIKPEAFEANRFYTVINKKSGEIVPMEVNFNFDDPNLIILPLAFGKRQGREFIWNDLLSLETGSLKLANGRVIEKTLYNRRTRQDEPALFVALTFERREVLDSSNIKPMNLIGVDRGENIPAVIALTDPEGCPLSRFKDSLGNPTHILRIGESYKEKQRTIQAKKEVEQRRAGGYSRKYASKAKNLADDMVRNTARDLLYYAVTQDAMLIFENLSRGFGRQGKRTFMAERQYTRMEDWLTAKLAYEGLPSKTYLSKTLAQYTSKTCSNCGFTITSADYDRVLEKLKKTATGWMTTINGKELKVEGQITYYNRYKRQNVVKDLSVELDRLSEESVNNDISSWTKGRSGNEALSLLKKRFSHRPVQEKFVCLNCGFETHADEQAALNIARSWLFLRSQEYKKYQTNKTTGNTDKRAFVETWQSFYRKKLKEVWKPAV

SEQ ID NO: 29284 - protein, 978 aa, synthetic construct
  REGION 1..978: note = engineered CasX variant
QEIKRINKIRRRLVKDSNTKKAGKTGPMKTLLVRVMTPDLRERLENLRKKPPNIPQPISNTSRANLNKLLTDYTEMKKAILHVYWEEFQKDPVGLMSRVAQPASKKIDQNKLKPEMDEKGNLTTAGFACSQCGQPLFVYKLEQVSEKGKAYTNYFGRCNVAEHEKLILLAQLKPEKDSDEAVTYSLGKFGQRALDFYSIHVTKESTHPVKPLAQIAGNRYASGPVGKALSDACMGTIASFLSKYQDIIIEHQKVVKGNQKRLESLRELAGKENLEYPSVTLPPQPHTKEGVDAYNEVIARVRMWVNLNLWQKLKLSRDDAKPLLRLKGFPSFPLVERQANEVDWWDMVCNVKKLINEKKEDGKVFWQNLAGYKRQEALRPYLSSEEDRQKGKKFARYQLGDLLLHLEKKHGEDWGKVYDEAWERIDKKVEGLSKHIKLEEERRSEDAQSKAALTDWLRAKASFVIEGLKEADKDEFCRCELKLQKWYGDLRGKPFAIEAENSILDISGFSKQYNCAFIWQKDGVKKLNLYLIINYFKGGKLRFKKIKPEAFEANRFYTVINKKSGEIVPMEVNFNFDDPNLIILPLAFGKRQGREFIWNDLLSLETGSLKLANGRVIEKTLYNRRTRQDEPALFVALTFERREVLDSSNIKPMNLIGVDRGENIPAVIALTDPEGCPLSRFKDSLGNPTHILRIGESYKEKQRTIQAKKEVEQRRAGGYSRKYASKAKNLADDMVRNTARDLLYYAVTQDAMLIFENLSRGFGRQGKRTFMAERQYTRMEDWLTAKLAYEGLPSKTYLSKTLAQYTSKTCSNCGFTITSADYDRVLEKLKKTATGWMTTINGKELKVEGQITYYNRYKRQNVVKDLSVELDRLSEESVNNDISSWTKGRSGEALSLLKKRFSHRPVQEKFVCLNCGFETHADEQAALNIARSWLFLRSQEYKKYQTNKTTGNTDKRAFVETWQSFYRKKLKEVWKPAV

SEQ ID NO: 29285 - protein, 978 aa, synthetic construct
  REGION 1..978: note = engineered CasX variant
QEIKRINKIRRRLVKDSNTKKAGKTGPMKTLLVRVMTPDLRERLENLRKKPPNIPQPISNTSRANLNKLLTDYTEMKKAILHVYWEEFQKDPVGLMSRVAQPASKKIDQNKLKPEMDEKGNLTTAGFACSQCGQPLFVYKLEQVSEKGKAYTNYFGRCNVAEHEKLILLAQLKPEKDSDEAVTYSLGKFGQRALDFYSIHVTKESTHPVKPLAQIAGNRYASGPVGKALSDACMGTIASFLSKYQDIIIEHQKVVKGNQKRLESLRELAGKENLEYPSVTLPPQPHTKEGVDAYNEVIARVRMWVNLNLWQKLKLSRDDAKPLLRLKGFPSFPLVERQANEVDWWDMVCNVKKLINEKKEDGKVFWQNLAGYKRQEALRPYLSSEEDRKKGKKFARYQLGDLLLHLEKKHGEDWGKVYDEAWERIDKKVEGLSKHIKLEEERRSEDAQSKAALTDWLRAKASFVIEGLKEADKDEFCRCELKLQKWYGDLRGKPFAIEAENSILDISGFSKQYNCAFIWQKDGVKKLNLYLIINYFKGGKLRFKKIKPEAFEANRFYTVINKKSGEIVPMEVNFNFDDPNLIILPLAFGKRQGREFIWNDLLSLETGSLKLANGRVIEKTLYNRRTRQDEPALFVALTFERREVLDSSNIKPMNLIGVDRGENIPAVIALTDPEGCPLSRFKDSLGNPTHILRIGESYKEKQRTIQAKKEVEQRRAGGYSRKYASKAKNLADDMVRNTARDLLYYAVTQDAMLIFENLSRGFGRQGKRTFMAERQYTRMEDWLTAKLAYEGLPSQTYLSKTLAQYTSKTCSNCGFTITSADYDRVLEKLKKTATGWMTTINGKELKVEGQITYYNRYKRQNVVKDLSVELDRLSEESVNNDISSWTKGRSGEALSLLKKRFSHRPVQEKFVCLNCGFETHADEQAALNIARSWLFLRSQEYKKYQTNKTTGNTDKRAFVETWQSFYRKKLKEVWKPAV

SEQ ID NO: 29286 - protein, 978 aa, synthetic construct
  REGION 1..978: note = engineered CasX variant
QEIKRINKIRRRLVKDSNTKKAGKTGPMKTLLVRVMTPDLRERLENLRKKPPNIPQPISNTSRANLNKLLTDYTEMKKAILHVYWEEFQKDPVGLMSRVAQPASKKIDQNKLKPEMDEKGNLTTAGFACSQCGQPLFVYKLEQVSEKGKAYTNYFGRCNVAEHEKLILLAQLKPEKDSDEAVTYSLGKFGQRALDFYSIHVTKESTHPVKPLAQIAGNRYASGPVGKALSDACMGTIASFLSKYQDIIIEHQKVVKGNQKRLESLRELAGKENLEYPSVTLPPQPHTKEGVDAYNEVIARVRMWVNLNLWQKLKLSRDDAKPLLRLKGFPSFPLVERQANEVDWWDMVCNVKKLINEKKEDGKVFWQNLAGYKRQEALRPYLSSEEDRKKGKKFARYQLGDLLLHLEKKHGEDWGKVYDEAWERIDKKVEGLSKHIKLEEERRSEDAQSKAALTDWLRAKASFVIEGLKEADKDEFCRCELKLQKWYGDLRGKPFAIEAENSILDISGFSKQYNCAFIWQKDGVKKLNLYLIINYFKGGKLRFKKIKPEAFEANRFYTVINKKSGEIVPMEVNFNFDDPNLIILPLAFGKRQGREFIWNDLLSLETGSLKLANGRVIEKTLYNRRTRQDEPALFVALTFERREVLDSSNIKPMNLIGVDRGENIPAVIALTDPEGCPLSRFKDSLGNPTHILRIGESYKEKQRTIQAKKEVEQRRAGGYSRKYASKAKNLADDMVRNTARDLLYYAVTQDAMLIFENLSRGFGRQGKRTFMAERQYTRMEDWLTAKLAYNGLPSKTYLSKTLAQYTSKTCSNCGFTITSADYDRVLEKLKKTATGWMTTINGKELKVEGQITYYNRYKRQNVVKDLSVELDRLSEESVNNDISSWTKGRSGEALSLLKKRFSHRPVQEKFVCLNCGFETHADEQAALNIARSWLFLRSQEYKKYQTNKTTGNTDKRAFVETWQSFYRKKLKEVWKPAV

SEQ ID NO: 29287 - protein, 978 aa, synthetic construct
  REGION 1..978: note = engineered CasX variant
QEIKRINKIRRRLVKDSNTKKAGKTGPMKTLLVRVMTPDLRERLENLRKKPPNIPQPISNTSRANLNKLLTDYTEMKKAILHVYWEEFQKDPVGLMSRVAQPASKKIDQNKLKPEMDEKGNLTTAGFACSQCGQPLFVYKLEQVSEKGKAYTNYFGRCNVAEHEKLIQLAQLKPEKDSDEAVTYSLGKFGQRALDFYSIHVTKESTHPVKPLAQIAGNRYASGPVGKALSDACMGTIASFLSKYQDIIIEHQKVVKGNQKRLESLRELAGKENLEYPSVTLPPQPHTKEGVDAYNEVIARVRMWVNLNLWQKLKLSRDDAKPLLRLKGFPSFPLVERQANEVDWWDMVCNVKKLINEKKEDGKVFWQNLAGYKRQEALRPYLSSEEDRKKGKKFARYQLGDLLLHLEKKHGEDWGKVYDEAWERIDKKVEGLSKHIKLEEERRSEDAQSKAALTDWLRAKASFVIEGLKEADKDEFCRCELKLQKWYGDLRGKPFAIEAENSILDISGFSKQYNCAFIWQKDGVKKLNLYLIINYFKGGKLRFKKIKPEAFEANRFYTVINKKSGEIVPMEVNFNFDDPNLIILPLAFGKRQGREFIWNDLLSLETGSLKLANGRVIEKTLYNRRTRQDEPALFVALTFERREVLDSSNIKPMNLIGVDRGENIPAVIALTDPEGCPLSRFKDSLGNPTHILRIGESYKEKQRTIQAKKEVEQRRAGGYSRKYASKAKNLADDMVRNTARDLLYYAVTQDAMLIFENLSRGFGRQGKRTFMAERQYTRMEDWLTAKLAYEGLPSKTYLSKTLAQYTSKTCSNCGFTITSADYDRVLEKLKKTATGWMTTINGKELKVEGQITYYNRYKRQNVVKDLSVELDRLSEESVNNDISSWTKGRSGEALSLLKKRFSHRPVQEKFVCLNCGFETHADEQAALNIARSWLFLRSQEYKKYQTNKTTGNTDKRAFVETWQSFYRKKLKEVWKPAV

SEQ ID NO: 29288 - protein, 978 aa, synthetic construct
  REGION 1..978: note = engineered CasX variant
QEIKRINKIRRRLVKDSNTKKAGKTGPMKTLLVRVMTPDLRERLENLRKKPPNIPQPISNTSRANLNKLLTDYTEMKKAILHVYWEEFQKDPVGLMSRVAQPASKKIDQNKLKPEMDEKGNLTTAGFACSQCGQPLFVYKLEQVSEKGKAYTNYFGRCNVAEHEKLILLAQLKPEKDSDEAVTYSLGKFGQRALDFYSIHVTKESTHPVKPLAQIAGNRYASGPVGKALSDACMGTIASFLSKYQDIIIEHQKVVKGNQKRLESLRELAGKENLEYPSVTLPPQPHTKEGVDAYNEVIARVRMWVNLNLWQKLKLSRDDAKPLLRLKGFPSFPLVERQANEVDWWDMVCNVKKLINEKKEDGKVFWQNLAIYKRQEALRPYLSSEEDRKKGKKFARYQLGDLLLHLEKKHGEDWGKVYDEAWERIDKKVEGLSKHIKLEEERRSEDAQSKAALTDWLRAKASFVIEGLKEADKDEFCRCELKLQKWYGDLRGKPFAIEAENSILDISGFSKQYNCAFIWQKDGVKKLNLYLIINYFKGGKLRFKKIKPEAFEANRFYTVINKKSGEIVPMEVNFNFDDPNLIILPLAFGKRQGREFIWNDLLSLETGSLKLANGRVIEKTLYNRRTRQDEPALFVALTFERREVLDSSNIKPMNLIGVDRGENIPAVIALTDPEGCPLSRFKDSLGNPTHILRIGESYKEKQRTIQAKKEVEQRRAGGYSRKYASKAKNLADDMVRNTARDLLYYAVTQDAMLIFENLSRGFGRQGKRTFMAERQYTRMEDWLTAKLAYEGLPSKTYLSKTLAQYTSKTCSNCGFTITSADYDRVLEKLKKTATGWMTTINGKELKVEGQITYYNRYKRQNVVKDLSVELDRLSEESVNNDISSWTKGRSGEALSLLKKRFSHRPVQEKFVCLNCGFETHADEQAALNIARSWLFLRSQEYKKYQTNKTTGNTDKRAFVETWQSFYRKKLKEVWKPAV

SEQ ID NO: 29289 - protein, 978 aa, synthetic construct
  REGION 1..978: note = engineered CasX variant
QEIKRINKIRRRLVKDSNTKKAGKTGPMKTLLVRVMTPDLRERLENLRKKPPNIPQPISNTSRANLNKLLTDYTEMKKAILHVYWEEFQKDPVGLMSRVAQPASKKIDQNKLKPEMDEKGNLTTAGFACSQCGQPLFVYKLEQVSEKGKAYTNYFGRCNVAEHEKLILLAQLKPEKDSDEAVTYSLGKFGQRALDFYSIHVTKESTHPVKPLAQIAGNRYASGPVGKALSDACMGTIASFLSKYQDIIIEHQKVVKGNQKRLESLRELAGKENLEYPSVTLPPQPHTKEGVDAYNEVIARVRMWVNLNLWQKLKLSRDDAKPLLRLKGFPSFPLVERQANEVDWWDMVCNVKKLINEKKEDGKVFWQNLAGYKRQEALRPYLSSEEDREKGKKFARYQLGDLLLHLEKKHGEDWGKVYDEAWERIDKKVEGLSKHIKLEEERRSEDAQSKAALTDWLRAKASFVIEGLKEADKDEFCRCELKLQKWYGDLRGKPFAIEAENSILDISGFSKQYNCAFIWQKDGVKKLNLYLIINYFKGGKLRFKKIKPEAFEANRFYTVINKKSGEIVPMEVNFNFDDPNLIILPLAFGKRQGREFIWNDLLSLETGSLKLANGRVIEKTLYNRRTRQDEPALFVALTFERREVLDSSNIKPMNLIGVDRGENIPAVIALTDPEGCPLSRFKDSLGNPTHILRIGESYKEKQRTIQAKKEVEQRRAGGYSRKYASKAKNLADDMVRNTARDLLYYAVTQDAMLIFENLSRGFGRQGKRTFMAERQYTRMEDWLTAKLAYEGLPSKTYLSKTLAQYTSKTCSNCGFTITSADYDRVLEKLKKTATGWMTTINGKELKVEGQITYYNRYKRQNVVKDLSVELDRLSEESVNNDISSWTKGRSGEALSLLKKRFSHRPVQEKFVCLNCGFETHADEQAALNIARSWLFLRSQEYKKYQTNKTTGNTDKRAFVETWQSFYRKKLKEVWKPAV

SEQ ID NO: 29290 - protein, 978 aa, synthetic construct
  REGION 1..978: note = engineered CasX variant
QEIKRINKIRRRLVKDSNTKKAGKTGPMKTLLVRVMTPDLRERLENLRKKPPNIPQPISNTSRANLNKLLTDYTEMKKAILHVYWEEFQKDPVGLMSRVAQPASKKIDQNKLKPEMDEKGNLTTAGFACSQCGQPLFVYKLEQVSEKGKAYTNYFGRCNVAEHEKLILLAQLKPEKDSDEAVTYSLGKFGQRALDFYSIHVTKESTHPVKPLAQIAGNRYASGPVGKALSDACMGTIASFLSKYQDIIIEHQKVVKGNQKRLESLRELAGKENLEYPSVTLPPQPHTKEGVDAYNEVIARVRMWVNLNLWQKLKLSRDDAKPLLRLKGFPSFPLVERQANEVDWWDMVCNVKKLINEKKEDGKVFWQNLAGYKRQEALRPYLSSEEDRKKGKKFARYQLGDLLLHLEKKHGEDWGKVYDEAWERIDKKVEGLSKHIKLEEERRSEDAQSKAALTDWLRAKASFVIEGLKEADKDEFCRCELKLQKWYGDLRGKPFAIEAENSILDISGFSKQYNCAFIWQKDGVKKLNLYLIINYFKGGKLRFKKIKPEAFEANRFYTVINKKSGEIVIMEVNFNFDDPNLIILPLAFGKRQGREFIWNDLLSLETGSLKLANGRVIEKTLYNRRTRQDEPALFVALTFERREVLDSSNIKPMNLIGVDRGENIPAVIALTDPEGCPLSRFKDSLGNPTHILRIGESYKEKQRTIQAKKEVEQRRAGGYSRKYASKAKNLADDMVRNTARDLLYYAVTQDAMLIFENLSRGFGRQGKRTFMAERQYTRMEDWLTAKLAYEGLPSKTYLSKTLAQYTSKTCSNCGFTITSADYDRVLEKLKKTATGWMTTINGKELKVEGQITYYNRYKRQNVVKDLSVELDRLSEESVNNDISSWTKGRSGEALSLLKKRFSHRPVQEKFVCLNCGFETHADEQAALNIARSWLFLRSQEYKKYQTNKTTGNTDKRAFVETWQSFYRKKLKEVWKPAV

SEQ ID NO: 29291 - protein, 978 aa, synthetic construct
  REGION 1..978: note = engineered CasX variant
QEIKRINKIRRRLVKDSNTKKAGKTGPMKTLLVRVMTPDLRERLENLRKKPENIPQPISNTSQANLNKLLTDYTEMKKAILHVYWEEFQKDPVGLMSRVAQPASKKIDQNKLKPEMDEKGNLTTAGFACSQCGQPLFVYKLEQVSEKGKAYTNYFGRCNVAEHEKLILLAQLKPEKDSDEAVTYSLGKFGQRALDFYSIHVTKESTHPVKPLAQIAGNRYASGPVGKALSGACMGTIASFLSKYQDIIIEHQKVVKGNQKRLESLRELAGKENLEYPSVTLPPQPHTKEGVDAYNEVIARVRMWVNLNLWQKLKLSRDDAKPLLRLKGFPSFPLVERQANEVDWWDMVCNVKKLINEKKEDGKVFWQNLAGYKRQEALRPYLSSEEDRKKGKKFARYQLGDLLLHLEKKHGEDWGKVYDEAWERIDKKVEGLSKHIKLEEERRSEDAQSKAALTDWLRAKASFVIEGLKEADKDEFCRCELKLQKWYGDLRGKPFAIEAENSILDISGFSKQYNCAFIWQKDGVKKLNLYLIINYFKGGKLRFKKIKPEAFEANRFYTVINKKSGEIVPMEVNFNFDDPNLIILPLAFGKRQGREFIWNDLLSLETGSLKLANGRVIEKTLYNRRTRQDEPALFVALTFERREVLDSSNIKPMNLIGVDRGENIPAVIALTDPEGCPLSRFKDSLGNPTHILRIGESYKEKQRTIQAKKEVEQRRAGGYSRKYASKAKNLADDMVRNTARDLLYYAVTQDAMLIFENLSRGFGRQGKRTFMAERQYTRMEDWLTAKLAYEGLPSKTYLSKTLAQYTSKTCSNCGFTITSADYDRVLEKLKKTATGWMTTINGKELKVEGQITYYNRYKRQNVVKDLSVELDRLSEESVNNDISSWTKGRSGEALSLLKKRFSHRPVQEKFVCLNCGFETHADEQAALNIARSWLFLRSQEYKKYQTNKTTGNTDKRAFVETWQSFYRKKLKEVWKPAV

SEQ ID NO: 29292 - protein, 978 aa, synthetic construct
  REGION 1..978: note = engineered CasX variant
QEIKRINKIRRRLVKDSNTKKAGKTGPMKTLLVRVMTPDLRERLENLRKKPENIPQPISNTSQANLNKLLTDYTEMKKAILHVYWEEFQKDPVGLMSRVAQPASKKIDQNKLKPEMDEKGNLTTAGFACSQCGQPLFVYKLEQVSEKGKAYTNYFGRCNVAEHEKLILLAQLKPEKDSDEAVTYSLGKFGQRALDFYSIHVTKESTHPVKPLAQIAGNRYASGPVGKALSDACMGTIASFLSKYQDIIIEHQKVVKGNQKRLESLRELAGKENLEYPSVTLPPQPHTKEGVDAYNEVIARVRMWVNLNLWQKLKLSRDDAKPLLRLKNFPSFPLVERQANEVDWWDMVCNVKKLINEKKEDGKVFWQNLAGYKRQEALRPYLSSEEDRKKGKKFARYQLGDLLLHLEKKHGEDWGKVYDEAWERIDKKVEGLSKHIKLEEERRSEDAQSKAALTDWLRAKASFVIEGLKEADKDEFCRCELKLQKWYGDLRGKPFAIEAENSILDISGFSKQYNCAFIWQKDGVKKLNLYLIINYFKGGKLRFKKIKPEAFEANRFYTVINKKSGEIVPMEVNFNFDDPNLIILPLAFGKRQGREFIWNDLLSLETGSLKLANGRVIEKTLYNRRTRQDEPALFVALTFERREVLDSSNIKPMNLIGVDRGENIPAVIALTDPEGCPLSRFKDSLGNPTHILRIGESYKEKQRTIQAKKEVEQRRAGGYSRKYASKAKNLADDMVRNTARDLLYYAVTQDAMLIFENLSRGFGRQGKRTFMAERQYTRMEDWLTAKLAYEGLPSKTYLSKTLAQYTSKTCSNCGFTITSADYDRVLEKLKKTATGWMTTINGKELKVEGQITYYNRYKRQNVVKDLSVELDRLSEESVNNDISSWTKGRSGEALSLLKKRFSHRPVQEKFVCLNCGFETHADEQAALNIARSWLFLRSQEYKKYQTNKTTGNTDKRAFVETWQSFYRKKLKEVWKPAV

SEQ ID NO: 29293 - protein, 978 aa, synthetic construct
  REGION 1..978: note = engineered CasX variant
QEIKRINKIRRRLVKDSNTKKAGKTGPMKTLLVRVMTPDLRERLENLRKKPENIPQPISNTSQANLNKLLTDYTEMKKAILHVYWEEFQKDPVGLMSRVAQPASKKIDQNKLKPEMDEKGNLTTAGFACSQCGQPLFVYKLEQVSEKGKAYTNYFGRCNVAEHEKLILLAQLKPEKDSDEAVTYSLGKFGQRALDFYSIHVTKESTHPVKPLAQIAGNRYASGPVGKALSDACMGTIASFLSKYQDIIIEHQKVVKGNQKRLESLRELAGKENLEYPSVTLPPQPHTKEGVDAYNEVIARVRMWVNLNLWQKLKLSRDDAKPLLRLKGFPSFPLVERQANEVDWWDMVCNVKKLINEKKEDGKVFWQNLAGYKRQEALRPYLSSEEDRKKGKKFARYQLGDLLNHLEKKHGEDWGKVYDEAWERIDKKVEGLSKHIKLEEERRSEDAQSKAALTDWLRAKASFVIEGLKEADKDEFCRCELKLQKWYGDLRGKPFAIEAENSILDISGFSKQYNCAFIWQKDGVKKLNLYLIINYFKGGKLRFKKIKPEAFEANRFYTVINKKSGEIVPMEVNFNFDDPNLIILPLAFGKRQGREFIWNDLLSLETGSLKLANGRVIEKTLYNRRTRQDEPALFVALTFERREVLDSSNIKPMNLIGVDRGENIPAVIALTDPEGCPLSRFKDSLGNPTHILRIGESYKEKQRTIQAKKEVEQRRAGGYSRKYASKAKNLADDMVRNTARDLLYYAVTQDAMLIFENLSRGFGRQGKRTFMAERQYTRMEDWLTAKLAYEGLPSKTYLSKTLAQYTSKTCSNCGFTITSADYDRVLEKLKKTATGWMTTINGKELKVEGQITYYNRYKRQNVVKDLSVELDRLSEESVNNDISSWTKGRSGEALSLLKKRFSHRPVQEKFVCLNCGFETHADEQAALNIARSWLFLRSQEYKKYQTNKTTGNTDKRAFVETWQSFYRKKLKEVWKPAV

SEQ ID NO: 29294 - protein, 978 aa, synthetic construct
  REGION 1..978: note = engineered CasX variant
QEIKRINKIRRRLVKDSNTKKAGKTGPMKTLLVRVMTPDLRERLENLRKKPENIPQPISNTSQANLNKLLTDYTEMKKAILHVYWEEFQKDPVGLMSRVAQPASKKIDQNKLKPEMDEKGNLTTAGFACSQCGQPLFVYKLEQVSEKGKAYTNYFGRCNVAEHEKLILLAQLKPEKDSDEAVTYSLGKFGQRALDFYSIHVTKESTHPVKPLAQIAGNRYASGPVGKALSDACMGTIASFLSKYQDIIIEHQKVVKGNQKRLESLRELAGKENLEYPSVTLPPQPHTKEGVDAYNEVIARVRMWVNLNLWQKLKLSRDDAKPLLRLKGFPSFPLVERQANEVDWWDMVCNVKKLINEKKEDGKVFWQNLAGYKRQEALRPYLSSEEDRKKGKKFARYQLGDLLWHLEKKHGEDWGKVYDEAWERIDKKVEGLSKHIKLEEERRSEDAQSKAALTDWLRAKASFVIEGLKEADKDEFCRCELKLQKWYGDLRGKPFAIEAENSILDISGFSKQYNCAFIWQKDGVKKLNLYLIINYFKGGKLRFKKIKPEAFEANRFYTVINKKSGEIVPMEVNFNFDDPNLIILPLAFGKRQGREFIWNDLLSLETGSLKLANGRVIEKTLYNRRTRQDEPALFVALTFERREVLDSSNIKPMNLIGVDRGENIPAVIALTDPEGCPLSRFKDSLGNPTHILRIGESYKEKQRTIQAKKEVEQRRAGGYSRKYASKAKNLADDMVRNTARDLLYYAVTQDAMLIFENLSRGFGRQGKRTFMAERQYTRMEDWLTAKLAYEGLPSKTYLSKTLAQYTSKTCSNCGFTITSADYDRVLEKLKKTATGWMTTINGKELKVEGQITYYNRYKRQNVVKDLSVELDRLSEESVNNDISSWTKGRSGEALSLLKKRFSHRPVQEKFVCLNCGFETHADEQAALNIARSWLFLRSQEYKKYQTNKTTGNTDKRAFVETWQSFYRKKLKEVWKPAV

SEQ ID NO: 29295 - protein, 978 aa, synthetic construct
  REGION 1..978: note = engineered CasX variant
QEIKRINKIRRRLVKDSNTKKAGKTGPMKTLLVRVMTPDLRERLENLRKKPENIPQPISNTSQANLNKLLTDYTEMKKAILHVYWEEFQKDPVGLMSRVAQPASKKIDQNKLKPEMDEKGNLTTAGFACSQCGQPLFVYKLEQVSEKGKAYTNYFGRCNVAEHEKLILLAQLKPEKDSDEAVTYSLGKFGQRALDFYSIHVTKESTHPVKPLAQIAGNRYASGPVGKALSDACMGTIASFLSKYQDIIIEHQKVVKGNQKRLESLRELAGKENLEYPSVTLPPQPHTKEGVDAYNEVIARVRMWVNLNLWQKLKLSRDDAKPLLRLKGFPSFPLVERQANEVDWWDMVCNVKKLINEKKEDGKVFWQNLAGYKRQEALRPYLSSEEDRKKGKKFARYQLGDLLLHLYKKHGEDWGKVYDEAWERIDKKVEGLSKHIKLEEERRSEDAQSKAALTDWLRAKASFVIEGLKEADKDEFCRCELKLQKWYGDLRGKPFAIEAENSILDISGFSKQYNCAFIWQKDGVKKLNLYLIINYFKGGKLRFKKIKPEAFEANRFYTVINKKSGEIVPMEVNFNFDDPNLIILPLAFGKRQGREFIWNDLLSLETGSLKLANGRVIEKTLYNRRTRQDEPALFVALTFERREVLDSSNIKPMNLIGVDRGENIPAVIALTDPEGCPLSRFKDSLGNPTHILRIGESYKEKQRTIQAKKEVEQRRAGGYSRKYASKAKNLADDMVRNTARDLLYYAVTQDAMLIFENLSRGFGRQGKRTFMAERQYTRMEDWLTAKLAYEGLPSKTYLSKTLAQYTSKTCSNCGFTITSADYDRVLEKLKKTATGWMTTINGKELKVEGQITYYNRYKRQNVVKDLSVELDRLSEESVNNDISSWTKGRSGEALSLLKKRFSHRPVQEKFVCLNCGFETHADEQAALNIARSWLFLRSQEYKKYQTNKTTGNTDKRAFVETWQSFYRKKLKEVWKPAV

SEQ ID NO: 29296 - protein, 978 aa, synthetic construct
  REGION 1..978: note = engineered CasX variant
QEIKRINKIRRRLVKDSNTKKAGKTGPMKTLLVRVMTPDLRERLENLRKKPENIPQPISNTSQANLNKLLTDYTEMKKAILHVYWEEFQKDPVGLMSRVAQPASKKIDQNKLKPEMDEKGNLTTAGFACSQCGQPLFVYKLEQVSEKGKAYTNYFGRCNVAEHEKLILLAQLKPEKDSDEAVTYSLGKFGQRALDFYSIHVTKESTHPVKPLAQIAGNRYASGPVGKALSDACMGTIASFLSKYQDIIIEHQKVVKGNQKRLESLRELAGKENLEYPSVTLPPQPHTKEGVDAYNEVIARVRMWVNLNLWQKLKLSRDDAKPLLRLKGFPSFPLVERQANEVDWWDMVCNVKKLINEKKEDGKVFWQNLAGYKRQEALRPYLSSEEDRKKGKKFARYQLGDLLLHLEKKHPEDWGKVYDEAWERIDKKVEGLSKHIKLEEERRSEDAQSKAALTDWLRAKASFVIEGLKEADKDEFCRCELKLQKWYGDLRGKPFAIEAENSILDISGFSKQYNCAFIWQKDGVKKLNLYLIINYFKGGKLRFKKIKPEAFEANRFYTVINKKSGEIVPMEVNFNFDDPNLIILPLAFGKRQGREFIWNDLLSLETGSLKLANGRVIEKTLYNRRTRQDEPALFVALTFERREVLDSSNIKPMNLIGVDRGENIPAVIALTDPEGCPLSRFKDSLGNPTHILRIGESYKEKQRTIQAKKEVEQRRAGGYSRKYASKAKNLADDMVRNTARDLLYYAVTQDAMLIFENLSRGFGRQGKRTFMAERQYTRMEDWLTAKLAYEGLPSKTYLSKTLAQYTSKTCSNCGFTITSADYDRVLEKLKKTATGWMTTINGKELKVEGQITYYNRYKRQNVVKDLSVELDRLSEESVNNDISSWTKGRSGEALSLLKKRFSHRPVQEKFVCLNCGFETHADEQAALNIARSWLFLRSQEYKKYQTNKTTGNTDKRAFVETWQSFYRKKLKEVWKPAV

SEQ ID NO: 29297 - protein, 979 aa, synthetic construct
  REGION 1..979: note = engineered CasX variant
QEIKRINKIRRRLVKDSNTKKAGKTGPMKTLLVRVMTPDLRERLENLRKKPENIPQPISNTSQANLNKLLTDYTEMKKAILHVYWEEFQKDPVGLMSRVAQPASKKIDQNKLKPEMDEKGNLTTAGFACSQCGQPLFVYKLEQVSEKGKAYTNYFGRCNVAEHEKLILLAQLKPEKDSDEAVTYSLGKFGQRALDFYSIHVTKESTHPVKPLAQIAGNRYASGPVGKALSDACMGTIASFLSKYQDIIIEHQKVVKGNQKRLESLRELAGKENLEYPSVTLPPQPHTKEGVDAYNEVIARVRMWVNLNLWQKLKLSRDDAKPLLRLKGFPSFPLVERQANEVDWWDMVCNVKKLINEKKEDGKVFWQNLAGYKRQEALRPYLSSEEDRKKGKKFARYQLGDLLLHLEKKHGERDWGKVYDEAWERIDKKVEGLSKHIKLEEERRSEDAQSKAALTDWLRAKASFVIEGLKEADKDEFCRCELKLQKWYGDLRGKPFAIEAENSILDISGFSKQYNCAFIWQKDGVKKLNLYLIINYFKGGKLRFKKIKPEAFEANRFYTVINKKSGEIVPMEVNFNFDDPNLIILPLAFGKRQGREFIWNDLLSLETGSLKLANGRVIEKTLYNRRTRQDEPALFVALTFERREVLDSSNIKPMNLIGVDRGENIPAVIALTDPEGCPLSRFKDSLGNPTHILRIGESYKEKQRTIQAKKEVEQRRAGGYSRKYASKAKNLADDMVRNTARDLLYYAVTQDAMLIFENLSRGFGRQGKRTFMAERQYTRMEDWLTAKLAYEGLPSKTYLSKTLAQYTSKTCSNCGFTITSADYDRVLEKLKKTATGWMTTINGKELKVEGQITYYNRYKRQNVVKDLSVELDRLSEESVNNDISSWTKGRSGEALSLLKKRFSHRPVQEKFVCLNCGFETHADEQAALNIARSWLFLRSQEYKKYQTNKTTGNTDKRAFVETWQSFYRKKLKEVWKPAV

SEQ ID NO: 29298 - protein, 979 aa, synthetic construct
  REGION 1..979: note = engineered CasX variant
QEIKRINKIRRRLVKDSNTKKAGKTGPMKTLLVRVMTPDLRERLENLRKKPENIPQPISNTSQANLNKLLTDYTEMKKAILHVYWEEFQKDPVGLMSRVAQPASKKIDQNKLKPEMDEKGNLTTAGFACSQCGQPLFVYKLEQVSEKGKAYTNYFGRCNVAEHEKLILLAQLKPEKDSDEAVTYSLGKFGQRALDFYSIHVTKESTHPVKPLAQIAGNRYASGPVGKALSDACMGTIASFLSKYQDIIIEHQKVVKGNQKRLESLRELAGKENLEYPSVTLPPQPHTKEGVDAYNEVIARVRMWVNLNLWQKLKLSRDDAKPLLRLKGFPSFPLVERQANEVDWWDMVCNVKKLINEKKEDGKVFWQNLAGYKRQEALRPYLSSEEDRKKGKKFARYQLGDLLLHLEKKHGEYDWGKVYDEAWERIDKKVEGLSKHIKLEEERRSEDAQSKAALTDWLRAKASFVIEGLKEADKDEFCRCELKLQKWYGDLRGKPFAIEAENSILDISGFSKQYNCAFIWQKDGVKKLNLYLIINYFKGGKLRFKKIKPEAFEANRFYTVINKKSGEIVPMEVNFNFDDPNLIILPLAFGKRQGREFIWNDLLSLETGSLKLANGRVIEKTLYNRRTRQDEPALFVALTFERREVLDSSNIKPMNLIGVDRGENIPAVIALTDPEGCPLSRFKDSLGNPTHILRIGESYKEKQRTIQAKKEVEQRRAGGYSRKYASKAKNLADDMVRNTARDLLYYAVTQDAMLIFENLSRGFGRQGKRTFMAERQYTRMEDWLTAKLAYEGLPSKTYLSKTLAQYTSKTCSNCGFTITSADYDRVLEKLKKTATGWMTTINGKELKVEGQITYYNRYKRQNVVKDLSVELDRLSEESVNNDISSWTKGRSGEALSLLKKRFSHRPVQEKFVCLNCGFETHADEQAALNIARSWLFLRSQEYKKYQTNKTTGNTDKRAFVETWQSFYRKKLKEVWKPAV

SEQ ID NO: 29299 - protein, 978 aa, synthetic construct
  REGION 1..978: note = engineered CasX variant
QEIKRINKIRRRLVKDSNTKKAGKTGPMKTLLVRVMTPDLRERLENLRKKPENIPQPISNTSQANLNKLLTDYTEMKKAILHVYWEEFQKDPVGLMSRVAQPASKKIDQNKLKPEMDEKGNLTTAGFACSQCGQPLFVYKLEQVSEKGKAYTNYFGRCNVAEHEKLILLAQLKPEKDSDEAVTYSLGKFGQRALDFYSIHVTKESTHPVKPLAQIAGNRYASGPVGKALSDACMGTIASFLSKYQDIIIEHQKVVKGNQKRLESLRELAGKENLEYPSVTLPPQPHTKEGVDAYNEVIARVRMWVNLNLWQKLKLSRDDAKPLLRLKGFPSFPLVERQANEVDWWDMVCNVKKLINEKKEDGKVFWQNLAGYKRQEALRPYLSSEEDRKKGKKFARYQLGDLLLHLEKKHGEDWGDVYDEAWERIDKKVEGLSKHIKLEEERRSEDAQSKAALTDWLRAKASFVIEGLKEADKDEFCRCELKLQKWYGDLRGKPFAIEAENSILDISGFSKQYNCAFIWQKDGVKKLNLYLIINYFKGGKLRFKKIKPEAFEANRFYTVINKKSGEIVPMEVNFNFDDPNLIILPLAFGKRQGREFIWNDLLSLETGSLKLANGRVIEKTLYNRRTRQDEPALFVALTFERREVLDSSNIKPMNLIGVDRGENIPAVIALTDPEGCPLSRFKDSLGNPTHILRIGESYKEKQRTIQAKKEVEQRRAGGYSRKYASKAKNLADDMVRNTARDLLYYAVTQDAMLIFENLSRGFGRQGKRTFMAERQYTRMEDWLTAKLAYEGLPSKTYLSKTLAQYTSKTCSNCGFTITSADYDRVLEKLKKTATGWMTTINGKELKVEGQITYYNRYKRQNVVKDLSVELDRLSEESVNNDISSWTKGRSGEALSLLKKRFSHRPVQEKFVCLNCGFETHADEQAALNIARSWLFLRSQEYKKYQTNKTTGNTDKRAFVETWQSFYRKKLKEVWKPAV

SEQ ID NO: 29300 - protein, 978 aa, synthetic construct
  REGION 1..978: note = engineered CasX variant
QEIKRINKIRRRLVKDSNTKKAGKTGPMKTLLVRVMTPDLRERLENLRKKPENIPQPISNTSQANLNKLLTDYTEMKKAILHVYWEEFQKDPVGLMSRVAQPASKKIDQNKLKPEMDEKGNLTTAGFACSQCGQPLFVYKLEQVSEKGKAYTNYFGRCNVAEHEKLILLAQLKPEKDSDEAVTYSLGKFGQRALDFYSIHVTKESTHPVKPLAQIAGNRYASGPVGKALSDACMGTIASFLSKYQDIIIEHQKVVKGNQKRLESLRELAGKENLEYPSVTLPPQPHTKEGVDAYNEVIARVRMWVNLNLWQKLKLSRDDAKPLLRLKGFPSFPLVERQANEVDWWDMVCNVKKLINEKKEDGKVFWQNLAGYKRQEALRPYLSSEEDRKKGKKFARYQLGDLLLHLEKKHGEDWGKVYGEAWERIDKKVEGLSKHIKLEEERRSEDAQSKAALTDWLRAKASFVIEGLKEADKDEFCRCELKLQKWYGDLRGKPFAIEAENSILDISGFSKQYNCAFIWQKDGVKKLNLYLIINYFKGGKLRFKKIKPEAFEANRFYTVINKKSGEIVPMEVNFNFDDPNLIILPLAFGKRQGREFIWNDLLSLETGSLKLANGRVIEKTLYNRRTRQDEPALFVALTFERREVLDSSNIKPMNLIGVDRGENIPAVIALTDPEGCPLSRFKDSLGNPTHILRIGESYKEKQRTIQAKKEVEQRRAGGYSRKYASKAKNLADDMVRNTARDLLYYAVTQDAMLIFENLSRGFGRQGKRTFMAERQYTRMEDWLTAKLAYEGLPSKTYLSKTLAQYTSKTCSNCGFTITSADYDRVLEKLKKTATGWMTTINGKELKVEGQITYYNRYKRQNVVKDLSVELDRLSEESVNNDISSWTKGRSGEALSLLKKRFSHRPVQEKFVCLNCGFETHADEQAALNIARSWLFLRSQEYKKYQTNKTTGNTDKRAFVETWQSFYRKKLKEVWKPAV

SEQ ID NO: 29301 - protein, 978 aa, synthetic construct
  REGION 1..978: note = engineered CasX variant
QEIKRINKIRRRLVKDSNTKKAGKTGPMKTLLVRVMTPDLRERLENLRKKPENIPQPISNTSQANLNKLLTDYTEMKKAILHVYWEEFQKDPVGLMSRVAQPASKKIDQNKLKPEMDEKGNLTTAGFACSQCGQPLFVYKLEQVSEKGKAYTNYFGRCNVAEHEKLILLAQLKPEKDSDEAVTYSLGKFGQRALDFYSIHVTKESTHPVKPLAQIAGNRYASGPVGKALSDACMGTIASFLSKYQDIIIEHQKVVKGNQKRLESLRELAGKENLEYPSVTLPPQPHTKEGVDAYNEVIARVRMWVNLNLWQKLKLSRDDAKPLLRLKGFPSFPLVERQANEVDWWDMVCNVKKLINEKKEDGKVFWQNLAGYKRQEALRPYLSSEEDRKKGKKFARYQLGDLLLHLEKKHGEDWGKVYDEAWERIDKKVEGLSKHIKLEEERRSEDAQSKAALTDWLRAKASFVIEGKKEADKDEFCRCELKLQKWYGDLRGKPFAIEAENSILDISGFSKQYNCAFIWQKDGVKKLNLYLIINYFKGGKLRFKKIKPEAFEANRFYTVINKKSGEIVPMEVNFNFDDPNLIILPLAFGKRQGREFIWNDLLSLETGSLKLANGRVIEKTLYNRRTRQDEPALFVALTFERREVLDSSNIKPMNLIGVDRGENIPAVIALTDPEGCPLSRFKDSLGNPTHILRIGESYKEKQRTIQAKKEVEQRRAGGYSRKYASKAKNLADDMVRNTARDLLYYAVTQDAMLIFENLSRGFGRQGKRTFMAERQYTRMEDWLTAKLAYEGLPSKTYLSKTLAQYTSKTCSNCGFTITSADYDRVLEKLKKTATGWMTTINGKELKVEGQITYYNRYKRQNVVKDLSVELDRLSEESVNNDISSWTKGRSGEALSLLKKRFSHRPVQEKFVCLNCGFETHADEQAALNIARSWLFLRSQEYKKYQTNKTTGNTDKRAFVETWQSFYRKKLKEVWKPAV

SEQ ID NO: 29302 - protein, 978 aa, synthetic construct
  REGION 1..978: note = engineered CasX variant
QEIKRINKIRRRLVKDSNTKKAGKTGPMKTLLVRVMTPDLRERLENLRKKPENIPQPISNTSQANLNKLLTDYTEMKKAILHVYWEEFQKDPVGLMSRVAQPASKKIDQNKLKPEMDEKGNLTTAGFACSQCGQPLFVYKLEQVSEKGKAYTNYFGRCNVAEHEKLILLAQLKPEKDSDEAVTYSLGKFGQRALDFYSIHVTKESTHPVKPLAQIAGNRYASGPVGKALSDACMGTIASFLSKYQDIIIEHQKVVKGNQKRLESLRELAGKENLEYPSVTLPPQPHTKEGVDAYNEVIARVRMWVNLNLWQKLKLSRDDAKPLLRLKGFPSFPLVERQANEVDWWDMVCNVKKLINEKKEDGKVFWQNLAGYKRQEALRPYLSSEEDRKKGKKFARYQLGDLLLHLEKKHGEDWGKVYDEAWERIDKKVEGLSKHIKLEEERRSEDAQSKAALTDWLRAKASFVIEGSKEADKDEFCRCELKLQKWYGDLRGKPFAIEAENSILDISGFSKQYNCAFIWQKDGVKKLNLYLIINYFKGGKLRFKKIKPEAFEANRFYTVINKKSGEIVPMEVNFNFDDPNLIILPLAFGKRQGREFIWNDLLSLETGSLKLANGRVIEKTLYNRRTRQDEPALFVALTFERREVLDSSNIKPMNLIGVDRGENIPAVIALTDPEGCPLSRFKDSLGNPTHILRIGESYKEKQRTIQAKKEVEQRRAGGYSRKYASKAKNLADDMVRNTARDLLYYAVTQDAMLIFENLSRGFGRQGKRTFMAERQYTRMEDWLTAKLAYEGLPSKTYLSKTLAQYTSKTCSNCGFTITSADYDRVLEKLKKTATGWMTTINGKELKVEGQITYYNRYKRQNVVKDLSVELDRLSEESVNNDISSWTKGRSGEALSLLKKRFSHRPVQEKFVCLNCGFETHADEQAALNIARSWLFLRSQEYKKYQTNKTTGNTDKRAFVETWQSFYRKKLKEVWKPAV

SEQ ID NO: 29303 - protein, 979 aa, synthetic construct
  REGION 1..979: note = engineered CasX variant
QEIKRINKIRRRLVKDSNTKKAGKTGPMKTLLVRVMTPDLRERLENLRKKPENIPQPISNTSQANLNKLLTDYTEMKKAILHVYWEEFQKDPVGLMSRVAQPASKKIDQNKLKPEMDEKGNLTTAGFACSQCGQPLFVYKLEQVSEKGKAYTNYFGRCNVAEHEKLILLAQLKPEKDSDEAVTYSLGKFGQRALDFYSIHVTKESTHPVKPLAQIAGNRYASGPVGKALSDACMGTIASFLSKYQDIIIEHQKVVKGNQKRLESLRELAGKENLEYPSVTLPPQPHTKEGVDAYNEVIARVRMWVNLNLWQKLKLSRDDAKPLLRLKGFPSFPLVERQANEVDWWDMVCNVKKLINEKKEDGKVFWQNLAGYKRQEALRPYLSSEEDRKKGKKFARYQLGDLLLHLEKKHGEDWGKVYDEAWERIDKKVEGLSKHIKLEEERRSEDAQSKAALTDWLRAKASFVIEGLKEADDKDEFCRCELKLQKWYGDLRGKPFAIEAENSILDISGFSKQYNCAFIWQKDGVKKLNLYLIINYFKGGKLRFKKIKPEAFEANRFYTVINKKSGEIVPMEVNFNFDDPNLIILPLAFGKRQGREFIWNDLLSLETGSLKLANGRVIEKTLYNRRTRQDEPALFVALTFERREVLDSSNIKPMNLIGVDRGENIPAVIALTDPEGCPLSRFKDSLGNPTHILRIGESYKEKQRTIQAKKEVEQRRAGGYSRKYASKAKNLADDMVRNTARDLLYYAVTQDAMLIFENLSRGFGRQGKRTFMAERQYTRMEDWLTAKLAYEGLPSKTYLSKTLAQYTSKTCSNCGFTITSADYDRVLEKLKKTATGWMTTINGKELKVEGQITYYNRYKRQNVVKDLSVELDRLSEESVNNDISSWTKGRSGEALSLLKKRFSHRPVQEKFVCLNCGFETHADEQAALNIARSWLFLRSQEYKKYQTNKTTGNTDKRAFVETWQSFYRKKLKEVWKPAV

SEQ ID NO: 29304 - protein, 979 aa, synthetic construct
  REGION 1..979: note = engineered CasX variant
QEIKRINKIRRRLVKDSNTKKAGKTGPMKTLLVRVMTPDLRERLENLRKKPENIPQPISNTSQANLNKLLTDYTEMKKAILHVYWEEFQKDPVGLMSRVAQPASKKIDQNKLKPEMDEKGNLTTAGFACSQCGQPLFVYKLEQVSEKGKAYTNYFGRCNVAEHEKLILLAQLKPEKDSDEAVTYSLGKFGQRALDFYSIHVTKESTHPVKPLAQIAGNRYASGPVGKALSDACMGTIASFLSKYQDIIIEHQKVVKGNQKRLESLRELAGKENLEYPSVTLPPQPHTKEGVDAYNEVIARVRMWVNLNLWQKLKLSRDDAKPLLRLKGFPSFPLVERQANEVDWWDMVCNVKKLINEKKEDGKVFWQNLAGYKRQEALRPYLSSEEDRKKGKKFARYQLGDLLLHLEKKHGEDWGKVYDEAWERIDKKVEGLSKHIKLEEERRSEDAQSKAALTDWLRAKASFVIEGLKEADKDEFCRCELKLQKWYGDLRGKPFAIEAENSILDISGFSKQYNCAFIWQKDGVKKLNLYLIINYFKGGKLRFKKIKPEAFEANRFYTVINKKSGEIVPMEVNFNFDDPNLIILPLAFGKRQGREFIWNDLLSLETGSLKLANGRVIEKTLYNRRTRQDEPALFVALTFERREVLDSSNIKPMNLIGVDRGENIPAVIALTDPEGCPLSRFKDSLGNPTHILRIGESYKEKQRTIQAKKEVEQRRAGGYSRKYASKAKNLADDMVRNTARDLLYYAVTQDAMLIFENLSRGFGRQGKRTFMAERQYTRMEDWLTAKLAYEGLPSKTYLSKTLAQYTSKTCSNCGFTITSADYDRVLEKLKKTATGWMTTINGKELKVEGQITYYNRYKRQNVVKDLSVELDRLSEESVNNDISSWTKGRSGNEALSLLKKRFSHRPVQEKFVCLNCGFETHADEQAALNIARSWLFLRSQEYKKYQTNKTTGNTDKRAFVETWQSFYRKKLKEVWKPAV

SEQ ID NO: 29305 - protein, 978 aa, synthetic construct
  REGION 1..978: note = engineered CasX variant
QEIKRINKIRRRLVKDSNTKKAGKTGPMKTLLVRVMTPDLRERLENLRKKPENIPQPISNTSQANLNKLLTDYTEMKKAILHVYWEEFQKDPVGLMSRVAQPASKKIDQNKLKPEMDEKGNLTTAGFACSQCGQPLFVYKLEQVSEKGKAYTNYFGRCNVAEHEKLILLAQLKPEKDSDEAVTYSLGKFGQRALDFYSIHVTKESTHPVKPLAQIAGNRYASGPVGKALSDACMGTIASFLSKYQDIIIEHQKVVKGNQKRLESLRELAGKENLEYPSVTLPPQPHTKEGVDAYNEVIARVRMWVNLNLWQKLKLSRDDAKPLLRLKGFPSFPLVERQANEVDWWDMVCNVKKLINEKKEDGKVFWQNLAGYKRQEALRPYLSSEEDRQKGKKFARYQLGDLLLHLEKKHGEDWGKVYDEAWERIDKKVEGLSKHIKLEEERRSEDAQSKAALTDWLRAKASFVIEGLKEADKDEFCRCELKLQKWYGDLRGKPFAIEAENSILDISGFSKQYNCAFIWQKDGVKKLNLYLIINYFKGGKLRFKKIKPEAFEANRFYTVINKKSGEIVPMEVNFNFDDPNLIILPLAFGKRQGREFIWNDLLSLETGSLKLANGRVIEKTLYNRRTRQDEPALFVALTFERREVLDSSNIKPMNLIGVDRGENIPAVIALTDPEGCPLSRFKDSLGNPTHILRIGESYKEKQRTIQAKKEVEQRRAGGYSRKYASKAKNLADDMVRNTARDLLYYAVTQDAMLIFENLSRGFGRQGKRTFMAERQYTRMEDWLTAKLAYEGLPSKTYLSKTLAQYTSKTCSNCGFTITSADYDRVLEKLKKTATGWMTTINGKELKVEGQITYYNRYKRQNVVKDLSVELDRLSEESVNNDISSWTKGRSGEALSLLKKRFSHRPVQEKFVCLNCGFETHADEQAALNIARSWLFLRSQEYKKYQTNKTTGNTDKRAFVETWQSFYRKKLKEVWKPAV

SEQ ID NO: 29306 - protein, 978 aa, synthetic construct
  REGION 1..978: note = engineered CasX variant
QEIKRINKIRRRLVKDSNTKKAGKTGPMKTLLVRVMTPDLRERLENLRKKPENIPQPISNTSQANLNKLLTDYTEMKKAILHVYWEEFQKDPVGLMSRVAQPASKKIDQNKLKPEMDEKGNLTTAGFACSQCGQPLFVYKLEQVSEKGKAYTNYFGRCNVAEHEKLILLAQLKPEKDSDEAVTYSLGKFGQRALDFYSIHVTKESTHPVKPLAQIAGNRYASGPVGKALSDACMGTIASFLSKYQDIIIEHQKVVKGNQKRLESLRELAGKENLEYPSVTLPPQPHTKEGVDAYNEVIARVRMWVNLNLWQKLKLSRDDAKPLLRLKGFPSFPLVERQANEVDWWDMVCNVKKLINEKKEDGKVFWQNLAGYKRQEALRPYLSSEEDRKKGKKFARYQLGDLLLHLEKKHGEDWGKVYDEAWERIDKKVEGLSKHIKLEEERRSEDAQSKAALTDWLRAKASFVIEGLKEADKDEFCRCELKLQKWYGDLRGKPFAIEAENSILDISGFSKQYNCAFIWQKDGVKKLNLYLIINYFKGGKLRFKKIKPEAFEANRFYTVINKKSGEIVPMEVNFNFDDPNLIILPLAFGKRQGREFIWNDLLSLETGSLKLANGRVIEKTLYNRRTRQDEPALFVALTFERREVLDSSNIKPMNLIGVDRGENIPAVIALTDPEGCPLSRFKDSLGNPTHILRIGESYKEKQRTIQAKKEVEQRRAGGYSRKYASKAKNLADDMVRNTARDLLYYAVTQDAMLIFENLSRGFGRQGKRTFMAERQYTRMEDWLTAKLAYEGLPSQTYLSKTLAQYTSKTCSNCGFTITSADYDRVLEKLKKTATGWMTTINGKELKVEGQITYYNRYKRQNVVKDLSVELDRLSEESVNNDISSWTKGRSGEALSLLKKRFSHRPVQEKFVCLNCGFETHADEQAALNIARSWLFLRSQEYKKYQTNKTTGNTDKRAFVETWQSFYRKKLKEVWKPAV

SEQ ID NO: 29307 - protein, 978 aa, synthetic construct
  REGION 1..978: note = engineered CasX variant
QEIKRINKIRRRLVKDSNTKKAGKTGPMKTLLVRVMTPDLRERLENLRKKPENIPQPISNTSQANLNKLLTDYTEMKKAILHVYWEEFQKDPVGLMSRVAQPASKKIDQNKLKPEMDEKGNLTTAGFACSQCGQPLFVYKLEQVSEKGKAYTNYFGRCNVAEHEKLILLAQLKPEKDSDEAVTYSLGKFGQRALDFYSIHVTKESTHPVKPLAQIAGNRYASGPVGKALSDACMGTIASFLSKYQDIIIEHQKVVKGNQKRLESLRELAGKENLEYPSVTLPPQPHTKEGVDAYNEVIARVRMWVNLNLWQKLKLSRDDAKPLLRLKGFPSFPLVERQANEVDWWDMVCNVKKLINEKKEDGKVFWQNLAGYKRQEALRPYLSSEEDRKKGKKFARYQLGDLLLHLEKKHGEDWGKVYDEAWERIDKKVEGLSKHIKLEEERRSEDAQSKAALTDWLRAKASFVIEGLKEADKDEFCRCELKLQKWYGDLRGKPFAIEAENSILDISGFSKQYNCAFIWQKDGVKKLNLYLIINYFKGGKLRFKKIKPEAFEANRFYTVINKKSGEIVPMEVNFNFDDPNLIILPLAFGKRQGREFIWNDLLSLETGSLKLANGRVIEKTLYNRRTRQDEPALFVALTFERREVLDSSNIKPMNLIGVDRGENIPAVIALTDPEGCPLSRFKDSLGNPTHILRIGESYKEKQRTIQAKKEVEQRRAGGYSRKYASKAKNLADDMVRNTARDLLYYAVTQDAMLIFENLSRGFGRQGKRTFMAERQYTRMEDWLTAKLAYNGLPSKTYLSKTLAQYTSKTCSNCGFTITSADYDRVLEKLKKTATGWMTTINGKELKVEGQITYYNRYKRQNVVKDLSVELDRLSEESVNNDISSWTKGRSGEALSLLKKRFSHRPVQEKFVCLNCGFETHADEQAALNIARSWLFLRSQEYKKYQTNKTTGNTDKRAFVETWQSFYRKKLKEVWKPAV

SEQ ID NO: 29308 - protein, 978 aa, synthetic construct
  REGION 1..978: note = engineered CasX variant
QEIKRINKIRRRLVKDSNTKKAGKTGPMKTLLVRVMTPDLRERLENLRKKPENIPQPISNTSQANLNKLLTDYTEMKKAILHVYWEEFQKDPVGLMSRVAQPASKKIDQNKLKPEMDEKGNLTTAGFACSQCGQPLFVYKLEQVSEKGKAYTNYFGRCNVAEHEKLIQLAQLKPEKDSDEAVTYSLGKFGQRALDFYSIHVTKESTHPVKPLAQIAGNRYASGPVGKALSDACMGTIASFLSKYQDIIIEHQKVVKGNQKRLESLRELAGKENLEYPSVTLPPQPHTKEGVDAYNEVIARVRMWVNLNLWQKLKLSRDDAKPLLRLKGFPSFPLVERQANEVDWWDMVCNVKKLINEKKEDGKVFWQNLAGYKRQEALRPYLSSEEDRKKGKKFARYQLGDLLLHLEKKHGEDWGKVYDEAWERIDKKVEGLSKHIKLEEERRSEDAQSKAALTDWLRAKASFVIEGLKEADKDEFCRCELKLQKWYGDLRGKPFAIEAENSILDISGFSKQYNCAFIWQKDGVKKLNLYLIINYFKGGKLRFKKIKPEAFEANRFYTVINKKSGEIVPMEVNFNFDDPNLIILPLAFGKRQGREFIWNDLLSLETGSLKLANGRVIEKTLYNRRTRQDEPALFVALTFERREVLDSSNIKPMNLIGVDRGENIPAVIALTDPEGCPLSRFKDSLGNPTHILRIGESYKEKQRTIQAKKEVEQRRAGGYSRKYASKAKNLADDMVRNTARDLLYYAVTQDAMLIFENLSRGFGRQGKRTFMAERQYTRMEDWLTAKLAYEGLPSKTYLSKTLAQYTSKTCSNCGFTITSADYDRVLEKLKKTATGWMTTINGKELKVEGQITYYNRYKRQNVVKDLSVELDRLSEESVNNDISSWTKGRSGEALSLLKKRFSHRPVQEKFVCLNCGFETHADEQAALNIARSWLFLRSQEYKKYQTNKTTGNTDKRAFVETWQSFYRKKLKEVWKPAV

SEQ ID NO: 29309 - protein, 978 aa, synthetic construct
  REGION 1..978: note = engineered CasX variant
QEIKRINKIRRRLVKDSNTKKAGKTGPMKTLLVRVMTPDLRERLENLRKKPENIPQPISNTSQANLNKLLTDYTEMKKAILHVYWEEFQKDPVGLMSRVAQPASKKIDQNKLKPEMDEKGNLTTAGFACSQCGQPLFVYKLEQVSEKGKAYTNYFGRCNVAEHEKLILLAQLKPEKDSDEAVTYSLGKFGQRALDFYSIHVTKESTHPVKPLAQIAGNRYASGPVGKALSDACMGTIASFLSKYQDIIIEHQKVVKGNQKRLESLRELAGKENLEYPSVTLPPQPHTKEGVDAYNEVIARVRMWVNLNLWQKLKLSRDDAKPLLRLKGFPSFPLVERQANEVDWWDMVCNVKKLINEKKEDGKVFWQNLAIYKRQEALRPYLSSEEDRKKGKKFARYQLGDLLLHLEKKHGEDWGKVYDEAWERIDKKVEGLSKHIKLEEERRSEDAQSKAALTDWLRAKASFVIEGLKEADKDEFCRCELKLQKWYGDLRGKPFAIEAENSILDISGFSKQYNCAFIWQKDGVKKLNLYLIINYFKGGKLRFKKIKPEAFEANRFYTVINKKSGEIVPMEVNFNFDDPNLIILPLAFGKRQGREFIWNDLLSLETGSLKLANGRVIEKTLYNRRTRQDEPALFVALTFERREVLDSSNIKPMNLIGVDRGENIPAVIALTDPEGCPLSRFKDSLGNPTHILRIGESYKEKQRTIQAKKEVEQRRAGGYSRKYASKAKNLADDMVRNTARDLLYYAVTQDAMLIFENLSRGFGRQGKRTFMAERQYTRMEDWLTAKLAYEGLPSKTYLSKTLAQYTSKTCSNCGFTITSADYDRVLEKLKKTATGWMTTINGKELKVEGQITYYNRYKRQNVVKDLSVELDRLSEESVNNDISSWTKGRSGEALSLLKKRFSHRPVQEKFVCLNCGFETHADEQAALNIARSWLFLRSQEYKKYQTNKTTGNTDKRAFVETWQSFYRKKLKEVWKPAV

SEQ ID NO: 29310 - protein, 978 aa, synthetic construct
  REGION 1..978: note = engineered CasX variant
QEIKRINKIRRRLVKDSNTKKAGKTGPMKTLLVRVMTPDLRERLENLRKKPENIPQPISNTSQANLNKLLTDYTEMKKAILHVYWEEFQKDPVGLMSRVAQPASKKIDQNKLKPEMDEKGNLTTAGFACSQCGQPLFVYKLEQVSEKGKAYTNYFGRCNVAEHEKLILLAQLKPEKDSDEAVTYSLGKFGQRALDFYSIHVTKESTHPVKPLAQIAGNRYASGPVGKALSDACMGTIASFLSKYQDIIIEHQKVVKGNQKRLESLRELAGKENLEYPSVTLPPQPHTKEGVDAYNEVIARVRMWVNLNLWQKLKLSRDDAKPLLRLKGFPSFPLVERQANEVDWWDMVCNVKKLINEKKEDGKVFWQNLAGYKRQEALRPYLSSEEDREKGKKFARYQLGDLLLHLEKKHGEDWGKVYDEAWERIDKKVEGLSKHIKLEEERRSEDAQSKAALTDWLRAKASFVIEGLKEADKDEFCRCELKLQKWYGDLRGKPFAIEAENSILDISGFSKQYNCAFIWQKDGVKKLNLYLIINYFKGGKLRFKKIKPEAFEANRFYTVINKKSGEIVPMEVNFNFDDPNLIILPLAFGKRQGREFIWNDLLSLETGSLKLANGRVIEKTLYNRRTRQDEPALFVALTFERREVLDSSNIKPMNLIGVDRGENIPAVIALTDPEGCPLSRFKDSLGNPTHILRIGESYKEKQRTIQAKKEVEQRRAGGYSRKYASKAKNLADDMVRNTARDLLYYAVTQDAMLIFENLSRGFGRQGKRTFMAERQYTRMEDWLTAKLAYEGLPSKTYLSKTLAQYTSKTCSNCGFTITSADYDRVLEKLKKTATGWMTTINGKELKVEGQITYYNRYKRQNVVKDLSVELDRLSEESVNNDISSWTKGRSGEALSLLKKRFSHRPVQEKFVCLNCGFETHADEQAALNIARSWLFLRSQEYKKYQTNKTTGNTDKRAFVETWQSFYRKKLKEVWKPAV

SEQ ID NO: 29311 - protein, 978 aa, synthetic construct
  REGION 1..978: note = engineered CasX variant
QEIKRINKIRRRLVKDSNTKKAGKTGPMKTLLVRVMTPDLRERLENLRKKPENIPQPISNTSQANLNKLLTDYTEMKKAILHVYWEEFQKDPVGLMSRVAQPASKKIDQNKLKPEMDEKGNLTTAGFACSQCGQPLFVYKLEQVSEKGKAYTNYFGRCNVAEHEKLILLAQLKPEKDSDEAVTYSLGKFGQRALDFYSIHVTKESTHPVKPLAQIAGNRYASGPVGKALSDACMGTIASFLSKYQDIIIEHQKVVKGNQKRLESLRELAGKENLEYPSVTLPPQPHTKEGVDAYNEVIARVRMWVNLNLWQKLKLSRDDAKPLLRLKGFPSFPLVERQANEVDWWDMVCNVKKLINEKKEDGKVFWQNLAGYKRQEALRPYLSSEEDRKKGKKFARYQLGDLLLHLEKKHGEDWGKVYDEAWERIDKKVEGLSKHIKLEEERRSEDAQSKAALTDWLRAKASFVIEGLKEADKDEFCRCELKLQKWYGDLRGKPFAIEAENSILDISGFSKQYNCAFIWQKDGVKKLNLYLIINYFKGGKLRFKKIKPEAFEANRFYTVINKKSGEIVIMEVNFNFDDPNLIILPLAFGKRQGREFIWNDLLSLETGSLKLANGRVIEKTLYNRRTRQDEPALFVALTFERREVLDSSNIKPMNLIGVDRGENIPAVIALTDPEGCPLSRFKDSLGNPTHILRIGESYKEKQRTIQAKKEVEQRRAGGYSRKYASKAKNLADDMVRNTARDLLYYAVTQDAMLIFENLSRGFGRQGKRTFMAERQYTRMEDWLTAKLAYEGLPSKTYLSKTLAQYTSKTCSNCGFTITSADYDRVLEKLKKTATGWMTTINGKELKVEGQITYYNRYKRQNVVKDLSVELDRLSEESVNNDISSWTKGRSGEALSLLKKRFSHRPVQEKFVCLNCGFETHADEQAALNIARSWLFLRSQEYKKYQTNKTTGNTDKRAFVETWQSFYRKKLKEVWKPAV

SEQ ID NO: 29312 - protein, 978 aa, synthetic construct
  REGION 1..978: note = engineered CasX variant
QEIKRINKIRRRLVKDSNTKKAGKTGPMKTLLVRVMTPDLRERLENLRKKPENIPQPISNTSRANLNKLLTDYTEMKKAILHVYDEEFQKDPVGLMSRVAQPASKKIDQNKLKPEMDEKGNLTTAGFACSQCGQPLFVYKLEQVSEKGKAYTNYFGRCNVAEHEKLILLAQLKPEKDSDEAVTYSLGKFGQRALDFYSIHVTKESTHPVKPLAQIAGNRYASGPVGKALSGACMGTIASFLSKYQDIIIEHQKVVKGNQKRLESLRELAGKENLEYPSVTLPPQPHTKEGVDAYNEVIARVRMWVNLNLWQKLKLSRDDAKPLLRLKGFPSFPLVERQANEVDWWDMVCNVKKLINEKKEDGKVFWQNLAGYKRQEALRPYLSSEEDRKKGKKFARYQLGDLLLHLEKKHGEDWGKVYDEAWERIDKKVEGLSKHIKLEEERRSEDAQSKAALTDWLRAKASFVIEGLKEADKDEFCRCELKLQKWYGDLRGKPFAIEAENSILDISGFSKQYNCAFIWQKDGVKKLNLYLIINYFKGGKLRFKKIKPEAFEANRFYTVINKKSGEIVPMEVNFNFDDPNLIILPLAFGKRQGREFIWNDLLSLETGSLKLANGRVIEKTLYNRRTRQDEPALFVALTFERREVLDSSNIKPMNLIGVDRGENIPAVIALTDPEGCPLSRFKDSLGNPTHILRIGESYKEKQRTIQAKKEVEQRRAGGYSRKYASKAKNLADDMVRNTARDLLYYAVTQDAMLIFENLSRGFGRQGKRTFMAERQYTRMEDWLTAKLAYEGLPSKTYLSKTLAQYTSKTCSNCGFTITSADYDRVLEKLKKTATGWMTTINGKELKVEGQITYYNRYKRQNVVKDLSVELDRLSEESVNNDISSWTKGRSGEALSLLKKRFSHRPVQEKFVCLNCGFETHADEQAALNIARSWLFLRSQEYKKYQTNKTTGNTDKRAFVETWQSFYRKKLKEVWKPAV

SEQ ID NO: 29313 - protein, 978 aa, synthetic construct
  REGION 1..978: note = engineered CasX variant
QEIKRINKIRRRLVKDSNTKKAGKTGPMKTLLVRVMTPDLRERLENLRKKPENIPQPISNTSRANLNKLLTDYTEMKKAILHVYDEEFQKDPVGLMSRVAQPASKKIDQNKLKPEMDEKGNLTTAGFACSQCGQPLFVYKLEQVSEKGKAYTNYFGRCNVAEHEKLILLAQLKPEKDSDEAVTYSLGKFGQRALDFYSIHVTKESTHPVKPLAQIAGNRYASGPVGKALSDACMGTIASFLSKYQDIIIEHQKVVKGNQKRLESLRELAGKENLEYPSVTLPPQPHTKEGVDAYNEVIARVRMWVNLNLWQKLKLSRDDAKPLLRLKNFPSFPLVERQANEVDWWDMVCNVKKLINEKKEDGKVFWQNLAGYKRQEALRPYLSSEEDRKKGKKFARYQLGDLLLHLEKKHGEDWGKVYDEAWERIDKKVEGLSKHIKLEEERRSEDAQSKAALTDWLRAKASFVIEGLKEADKDEFCRCELKLQKWYGDLRGKPFAIEAENSILDISGFSKQYNCAFIWQKDGVKKLNLYLIINYFKGGKLRFKKIKPEAFEANRFYTVINKKSGEIVPMEVNFNFDDPNLIILPLAFGKRQGREFIWNDLLSLETGSLKLANGRVIEKTLYNRRTRQDEPALFVALTFERREVLDSSNIKPMNLIGVDRGENIPAVIALTDPEGCPLSRFKDSLGNPTHILRIGESYKEKQRTIQAKKEVEQRRAGGYSRKYASKAKNLADDMVRNTARDLLYYAVTQDAMLIFENLSRGFGRQGKRTFMAERQYTRMEDWLTAKLAYEGLPSKTYLSKTLAQYTSKTCSNCGFTITSADYDRVLEKLKKTATGWMTTINGKELKVEGQITYYNRYKRQNVVKDLSVELDRLSEESVNNDISSWTKGRSGEALSLLKKRFSHRPVQEKFVCLNCGFETHADEQAALNIARSWLFLRSQEYKKYQTNKTTGNTDKRAFVETWQSFYRKKLKEVWKPAV

SEQ ID NO: 29314 - protein, 978 aa, synthetic construct
  REGION 1..978: note = engineered CasX variant
QEIKRINKIRRRLVKDSNTKKAGKTGPMKTLLVRVMTPDLRERLENLRKKPENIPQPISNTSRANLNKLLTDYTEMKKAILHVYDEEFQKDPVGLMSRVAQPASKKIDQNKLKPEMDEKGNLTTAGFACSQCGQPLFVYKLEQVSEKGKAYTNYFGRCNVAEHEKLILLAQLKPEKDSDEAVTYSLGKFGQRALDFYSIHVTKESTHPVKPLAQIAGNRYASGPVGKALSDACMGTIASFLSKYQDIIIEHQKVVKGNQKRLESLRELAGKENLEYPSVTLPPQPHTKEGVDAYNEVIARVRMWVNLNLWQKLKLSRDDAKPLLRLKGFPSFPLVERQANEVDWWDMVCNVKKLINEKKEDGKVFWQNLAGYKRQEALRPYLSSEEDRKKGKKFARYQLGDLLNHLEKKHGEDWGKVYDEAWERIDKKVEGLSKHIKLEEERRSEDAQSKAALTDWLRAKASFVIEGLKEADKDEFCRCELKLQKWYGDLRGKPFAIEAENSILDISGFSKQYNCAFIWQKDGVKKLNLYLIINYFKGGKLRFKKIKPEAFEANRFYTVINKKSGEIVPMEVNFNFDDPNLIILPLAFGKRQGREFIWNDLLSLETGSLKLANGRVIEKTLYNRRTRQDEPALFVALTFERREVLDSSNIKPMNLIGVDRGENIPAVIALTDPEGCPLSRFKDSLGNPTHILRIGESYKEKQRTIQAKKEVEQRRAGGYSRKYASKAKNLADDMVRNTARDLLYYAVTQDAMLIFENLSRGFGRQGKRTFMAERQYTRMEDWLTAKLAYEGLPSKTYLSKTLAQYTSKTCSNCGFTITSADYDRVLEKLKKTATGWMTTINGKELKVEGQITYYNRYKRQNVVKDLSVELDRLSEESVNNDISSWTKGRSGEALSLLKKRFSHRPVQEKFVCLNCGFETHADEQAALNIARSWLFLRSQEYKKYQTNKTTGNTDKRAFVETWQSFYRKKLKEVWKPAV

SEQ ID NO: 29315 - protein, 978 aa, synthetic construct
  REGION 1..978: note = engineered CasX variant
QEIKRINKIRRRLVKDSNTKKAGKTGPMKTLLVRVMTPDLRERLENLRKKPENIPQPISNTSRANLNKLLTDYTEMKKAILHVYDEEFQKDPVGLMSRVAQPASKKIDQNKLKPEMDEKGNLTTAGFACSQCGQPLFVYKLEQVSEKGKAYTNYFGRCNVAEHEKLILLAQLKPEKDSDEAVTYSLGKFGQRALDFYSIHVTKESTHPVKPLAQIAGNRYASGPVGKALSDACMGTIASFLSKYQDIIIEHQKVVKGNQKRLESLRELAGKENLEYPSVTLPPQPHTKEGVDAYNEVIARVRMWVNLNLWQKLKLSRDDAKPLLRLKGFPSFPLVERQANEVDWWDMVCNVKKLINEKKEDGKVFWQNLAGYKRQEALRPYLSSEEDRKKGKKFARYQLGDLLWHLEKKHGEDWGKVYDEAWERIDKKVEGLSKHIKLEEERRSEDAQSKAALTDWLRAKASFVIEGLKEADKDEFCRCELKLQKWYGDLRGKPFAIEAENSILDISGFSKQYNCAFIWQKDGVKKLNLYLIINYFKGGKLRFKKIKPEAFEANRFYTVINKKSGEIVPMEVNFNFDDPNLIILPLAFGKRQGREFIWNDLLSLETGSLKLANGRVIEKTLYNRRTRQDEPALFVALTFERREVLDSSNIKPMNLIGVDRGENIPAVIALTDPEGCPLSRFKDSLGNPTHILRIGESYKEKQRTIQAKKEVEQRRAGGYSRKYASKAKNLADDMVRNTARDLLYYAVTQDAMLIFENLSRGFGRQGKRTFMAERQYTRMEDWLTAKLAYEGLPSKTYLSKTLAQYTSKTCSNCGFTITSADYDRVLEKLKKTATGWMTTINGKELKVEGQITYYNRYKRQNVVKDLSVELDRLSEESVNNDISSWTKGRSGEALSLLKKRFSHRPVQEKFVCLNCGFETHADEQAALNIARSWLFLRSQEYKKYQTNKTTGNTDKRAFVETWQSFYRKKLKEVWKPAV

SEQ ID NO: 29316 - protein, 978 aa, synthetic construct
  REGION 1..978: note = engineered CasX variant
QEIKRINKIRRRLVKDSNTKKAGKTGPMKTLLVRVMTPDLRERLENLRKKPENIPQPISNTSRANLNKLLTDYTEMKKAILHVYDEEFQKDPVGLMSRVAQPASKKIDQNKLKPEMDEKGNLTTAGFACSQCGQPLFVYKLEQVSEKGKAYTNYFGRCNVAEHEKLILLAQLKPEKDSDEAVTYSLGKFGQRALDFYSIHVTKESTHPVKPLAQIAGNRYASGPVGKALSDACMGTIASFLSKYQDIIIEHQKVVKGNQKRLESLRELAGKENLEYPSVTLPPQPHTKEGVDAYNEVIARVRMWVNLNLWQKLKLSRDDAKPLLRLKGFPSFPLVERQANEVDWWDMVCNVKKLINEKKEDGKVFWQNLAGYKRQEALRPYLSSEEDRKKGKKFARYQLGDLLLHLYKKHGEDWGKVYDEAWERIDKKVEGLSKHIKLEEERRSEDAQSKAALTDWLRAKASFVIEGLKEADKDEFCRCELKLQKWYGDLRGKPFAIEAENSILDISGFSKQYNCAFIWQKDGVKKLNLYLIINYFKGGKLRFKKIKPEAFEANRFYTVINKKSGEIVPMEVNFNFDDPNLIILPLAFGKRQGREFIWNDLLSLETGSLKLANGRVIEKTLYNRRTRQDEPALFVALTFERREVLDSSNIKPMNLIGVDRGENIPAVIALTDPEGCPLSRFKDSLGNPTHILRIGESYKEKQRTIQAKKEVEQRRAGGYSRKYASKAKNLADDMVRNTARDLLYYAVTQDAMLIFENLSRGFGRQGKRTFMAERQYTRMEDWLTAKLAYEGLPSKTYLSKTLAQYTSKTCSNCGFTITSADYDRVLEKLKKTATGWMTTINGKELKVEGQITYYNRYKRQNVVKDLSVELDRLSEESVNNDISSWTKGRSGEALSLLKKRFSHRPVQEKFVCLNCGFETHADEQAALNIARSWLFLRSQEYKKYQTNKTTGNTDKRAFVETWQSFYRKKLKEVWKPAV

SEQ ID NO: 29317 - protein, 978 aa, synthetic construct
  REGION 1..978: note = engineered CasX variant
QEIKRINKIRRRLVKDSNTKKAGKTGPMKTLLVRVMTPDLRERLENLRKKPENIPQPISNTSRANLNKLLTDYTEMKKAILHVYDEEFQKDPVGLMSRVAQPASKKIDQNKLKPEMDEKGNLTTAGFACSQCGQPLFVYKLEQVSEKGKAYTNYFGRCNVAEHEKLILLAQLKPEKDSDEAVTYSLGKFGQRALDFYSIHVTKESTHPVKPLAQIAGNRYASGPVGKALSDACMGTIASFLSKYQDIIIEHQKVVKGNQKRLESLRELAGKENLEYPSVTLPPQPHTKEGVDAYNEVIARVRMWVNLNLWQKLKLSRDDAKPLLRLKGFPSFPLVERQANEVDWWDMVCNVKKLINEKKEDGKVFWQNLAGYKRQEALRPYLSSEEDRKKGKKFARYQLGDLLLHLEKKHPEDWGKVYDEAWERIDKKVEGLSKHIKLEEERRSEDAQSKAALTDWLRAKASFVIEGLKEADKDEFCRCELKLQKWYGDLRGKPFAIEAENSILDISGFSKQYNCAFIWQKDGVKKLNLYLIINYFKGGKLRFKKIKPEAFEANRFYTVINKKSGEIVPMEVNFNFDDPNLIILPLAFGKRQGREFIWNDLLSLETGSLKLANGRVIEKTLYNRRTRQDEPALFVALTFERREVLDSSNIKPMNLIGVDRGENIPAVIALTDPEGCPLSRFKDSLGNPTHILRIGESYKEKQRTIQAKKEVEQRRAGGYSRKYASKAKNLADDMVRNTARDLLYYAVTQDAMLIFENLSRGFGRQGKRTFMAERQYTRMEDWLTAKLAYEGLPSKTYLSKTLAQYTSKTCSNCGFTITSADYDRVLEKLKKTATGWMTTINGKELKVEGQITYYNRYKRQNVVKDLSVELDRLSEESVNNDISSWTKGRSGEALSLLKKRFSHRPVQEKFVCLNCGFETHADEQAALNIARSWLFLRSQEYKKYQTNKTTGNTDKRAFVETWQSFYRKKLKEVWKPAV

SEQ ID NO: 29318 - protein, 979 aa, synthetic construct
  REGION 1..979: note = engineered CasX variant
QEIKRINKIRRRLVKDSNTKKAGKTGPMKTLLVRVMTPDLRERLENLRKKPENIPQPISNTSRANLNKLLTDYTEMKKAILHVYDEEFQKDPVGLMSRVAQPASKKIDQNKLKPEMDEKGNLTTAGFACSQCGQPLFVYKLEQVSEKGKAYTNYFGRCNVAEHEKLILLAQLKPEKDSDEAVTYSLGKFGQRALDFYSIHVTKESTHPVKPLAQIAGNRYASGPVGKALSDACMGTIASFLSKYQDIIIEHQKVVKGNQKRLESLRELAGKENLEYPSVTLPPQPHTKEGVDAYNEVIARVRMWVNLNLWQKLKLSRDDAKPLLRLKGFPSFPLVERQANEVDWWDMVCNVKKLINEKKEDGKVFWQNLAGYKRQEALRPYLSSEEDRKKGKKFARYQLGDLLLHLEKKHGERDWGKVYDEAWERIDKKVEGLSKHIKLEEERRSEDAQSKAALTDWLRAKASFVIEGLKEADKDEFCRCELKLQKWYGDLRGKPFAIEAENSILDISGFSKQYNCAFIWQKDGVKKLNLYLIINYFKGGKLRFKKIKPEAFEANRFYTVINKKSGEIVPMEVNFNFDDPNLIILPLAFGKRQGREFIWNDLLSLETGSLKLANGRVIEKTLYNRRTRQDEPALFVALTFERREVLDSSNIKPMNLIGVDRGENIPAVIALTDPEGCPLSRFKDSLGNPTHILRIGESYKEKQRTIQAKKEVEQRRAGGYSRKYASKAKNLADDMVRNTARDLLYYAVTQDAMLIFENLSRGFGRQGKRTFMAERQYTRMEDWLTAKLAYEGLPSKTYLSKTLAQYTSKTCSNCGFTITSADYDRVLEKLKKTATGWMTTINGKELKVEGQITYYNRYKRQNVVKDLSVELDRLSEESVNNDISSWTKGRSGEALSLLKKRFSHRPVQEKFVCLNCGFETHADEQAALNIARSWLFLRSQEYKKYQTNKTTGNTDKRAFVETWQSFYRKKLKEVWKPAV

SEQ ID NO: 29319 - protein, 979 aa, synthetic construct
  REGION 1..979: note = engineered CasX variant
QEIKRINKIRRRLVKDSNTKKAGKTGPMKTLLVRVMTPDLRERLENLRKKPENIPQPISNTSRANLNKLLTDYTEMKKAILHVYDEEFQKDPVGLMSRVAQPASKKIDQNKLKPEMDEKGNLTTAGFACSQCGQPLFVYKLEQVSEKGKAYTNYFGRCNVAEHEKLILLAQLKPEKDSDEAVTYSLGKFGQRALDFYSIHVTKESTHPVKPLAQIAGNRYASGPVGKALSDACMGTIASFLSKYQDIIIEHQKVVKGNQKRLESLRELAGKENLEYPSVTLPPQPHTKEGVDAYNEVIARVRMWVNLNLWQKLKLSRDDAKPLLRLKGFPSFPLVERQANEVDWWDMVCNVKKLINEKKEDGKVFWQNLAGYKRQEALRPYLSSEEDRKKGKKFARYQLGDLLLHLEKKHGEYDWGKVYDEAWERIDKKVEGLSKHIKLEEERRSEDAQSKAALTDWLRAKASFVIEGLKEADKDEFCRCELKLQKWYGDLRGKPFAIEAENSILDISGFSKQYNCAFIWQKDGVKKLNLYLIINYFKGGKLRFKKIKPEAFEANRFYTVINKKSGEIVPMEVNFNFDDPNLIILPLAFGKRQGREFIWNDLLSLETGSLKLANGRVIEKTLYNRRTRQDEPALFVALTFERREVLDSSNIKPMNLIGVDRGENIPAVIALTDPEGCPLSRFKDSLGNPTHILRIGESYKEKQRTIQAKKEVEQRRAGGYSRKYASKAKNLADDMVRNTARDLLYYAVTQDAMLIFENLSRGFGRQGKRTFMAERQYTRMEDWLTAKLAYEGLPSKTYLSKTLAQYTSKTCSNCGFTITSADYDRVLEKLKKTATGWMTTINGKELKVEGQITYYNRYKRQNVVKDLSVELDRLSEESVNNDISSWTKGRSGEALSLLKKRFSHRPVQEKFVCLNCGFETHADEQAALNIARSWLFLRSQEYKKYQTNKTTGNTDKRAFVETWQSFYRKKLKEVWKPAV

SEQ ID NO: 29320 - protein, 978 aa, synthetic construct
  REGION 1..978: note = engineered CasX variant
QEIKRINKIRRRLVKDSNTKKAGKTGPMKTLLVRVMTPDLRERLENLRKKPENIPQPISNTSRANLNKLLTDYTEMKKAILHVYDEEFQKDPVGLMSRVAQPASKKIDQNKLKPEMDEKGNLTTAGFACSQCGQPLFVYKLEQVSEKGKAYTNYFGRCNVAEHEKLILLAQLKPEKDSDEAVTYSLGKFGQRALDFYSIHVTKESTHPVKPLAQIAGNRYASGPVGKALSDACMGTIASFLSKYQDIIIEHQKVVKGNQKRLESLRELAGKENLEYPSVTLPPQPHTKEGVDAYNEVIARVRMWVNLNLWQKLKLSRDDAKPLLRLKGFPSFPLVERQANEVDWWDMVCNVKKLINEKKEDGKVFWQNLAGYKRQEALRPYLSSEEDRKKGKKFARYQLGDLLLHLEKKHGEDWGDVYDEAWERIDKKVEGLSKHIKLEEERRSEDAQSKAALTDWLRAKASFVIEGLKEADKDEFCRCELKLQKWYGDLRGKPFAIEAENSILDISGFSKQYNCAFIWQKDGVKKLNLYLIINYFKGGKLRFKKIKPEAFEANRFYTVINKKSGEIVPMEVNFNFDDPNLIILPLAFGKRQGREFIWNDLLSLETGSLKLANGRVIEKTLYNRRTRQDEPALFVALTFERREVLDSSNIKPMNLIGVDRGENIPAVIALTDPEGCPLSRFKDSLGNPTHILRIGESYKEKQRTIQAKKEVEQRRAGGYSRKYASKAKNLADDMVRNTARDLLYYAVTQDAMLIFENLSRGFGRQGKRTFMAERQYTRMEDWLTAKLAYEGLPSKTYLSKTLAQYTSKTCSNCGFTITSADYDRVLEKLKKTATGWMTTINGKELKVEGQITYYNRYKRQNVVKDLSVELDRLSEESVNNDISSWTKGRSGEALSLLKKRFSHRPVQEKFVCLNCGFETHADEQAALNIARSWLFLRSQEYKKYQTNKTTGNTDKRAFVETWQSFYRKKLKEVWKPAV

SEQ ID NO: 29321 - protein, 978 aa, synthetic construct
  REGION 1..978: note = engineered CasX variant
QEIKRINKIRRRLVKDSNTKKAGKTGPMKTLLVRVMTPDLRERLENLRKKPENIPQPISNTSRANLNKLLTDYTEMKKAILHVYDEEFQKDPVGLMSRVAQPASKKIDQNKLKPEMDEKGNLTTAGFACSQCGQPLFVYKLEQVSEKGKAYTNYFGRCNVAEHEKLILLAQLKPEKDSDEAVTYSLGKFGQRALDFYSIHVTKESTHPVKPLAQIAGNRYASGPVGKALSDACMGTIASFLSKYQDIIIEHQKVVKGNQKRLESLRELAGKENLEYPSVTLPPQPHTKEGVDAYNEVIARVRMWVNLNLWQKLKLSRDDAKPLLRLKGFPSFPLVERQANEVDWWDMVCNVKKLINEKKEDGKVFWQNLAGYKRQEALRPYLSSEEDRKKGKKFARYQLGDLLLHLEKKHGEDWGKVYGEAWERIDKKVEGLSKHIKLEEERRSEDAQSKAALTDWLRAKASFVIEGLKEADKDEFCRCELKLQKWYGDLRGKPFAIEAENSILDISGFSKQYNCAFIWQKDGVKKLNLYLIINYFKGGKLRFKKIKPEAFEANRFYTVINKKSGEIVPMEVNFNFDDPNLIILPLAFGKRQGREFIWNDLLSLETGSLKLANGRVIEKTLYNRRTRQDEPALFVALTFERREVLDSSNIKPMNLIGVDRGENIPAVIALTDPEGCPLSRFKDSLGNPTHILRIGESYKEKQRTIQAKKEVEQRRAGGYSRKYASKAKNLADDMVRNTARDLLYYAVTQDAMLIFENLSRGFGRQGKRTFMAERQYTRMEDWLTAKLAYEGLPSKTYLSKTLAQYTSKTCSNCGFTITSADYDRVLEKLKKTATGWMTTINGKELKVEGQITYYNRYKRQNVVKDLSVELDRLSEESVNNDISSWTKGRSGEALSLLKKRFSHRPVQEKFVCLNCGFETHADEQAALNIARSWLFLRSQEYKKYQTNKTTGNTDKRAFVETWQSFYRKKLKEVWKPAV

SEQ ID NO: 29322 - protein, 978 aa, synthetic construct
  REGION 1..978: note = engineered CasX variant
QEIKRINKIRRRLVKDSNTKKAGKTGPMKTLLVRVMTPDLRERLENLRKKPENIPQPISNTSRANLNKLLTDYTEMKKAILHVYDEEFQKDPVGLMSRVAQPASKKIDQNKLKPEMDEKGNLTTAGFACSQCGQPLFVYKLEQVSEKGKAYTNYFGRCNVAEHEKLILLAQLKPEKDSDEAVTYSLGKFGQRALDFYSIHVTKESTHPVKPLAQIAGNRYASGPVGKALSDACMGTIASFLSKYQDIIIEHQKVVKGNQKRLESLRELAGKENLEYPSVTLPPQPHTKEGVDAYNEVIARVRMWVNLNLWQKLKLSRDDAKPLLRLKGFPSFPLVERQANEVDWWDMVCNVKKLINEKKEDGKVFWQNLAGYKRQEALRPYLSSEEDRKKGKKFARYQLGDLLLHLEKKHGEDWGKVYDEAWERIDKKVEGLSKHIKLEEERRSEDAQSKAALTDWLRAKASFVIEGKKEADKDEFCRCELKLQKWYGDLRGKPFAIEAENSILDISGFSKQYNCAFIWQKDGVKKLNLYLIINYFKGGKLRFKKIKPEAFEANRFYTVINKKSGEIVPMEVNFNFDDPNLIILPLAFGKRQGREFIWNDLLSLETGSLKLANGRVIEKTLYNRRTRQDEPALFVALTFERREVLDSSNIKPMNLIGVDRGENIPAVIALTDPEGCPLSRFKDSLGNPTHILRIGESYKEKQRTIQAKKEVEQRRAGGYSRKYASKAKNLADDMVRNTARDLLYYAVTQDAMLIFENLSRGFGRQGKRTFMAERQYTRMEDWLTAKLAYEGLPSKTYLSKTLAQYTSKTCSNCGFTITSADYDRVLEKLKKTATGWMTTINGKELKVEGQITYYNRYKRQNVVKDLSVELDRLSEESVNNDISSWTKGRSGEALSLLKKRFSHRPVQEKFVCLNCGFETHADEQAALNIARSWLFLRSQEYKKYQTNKTTGNTDKRAFVETWQSFYRKKLKEVWKPAV

SEQ ID NO: 29323 - protein, 978 aa, synthetic construct
  REGION 1..978: note = engineered CasX variant
QEIKRINKIRRRLVKDSNTKKAGKTGPMKTLLVRVMTPDLRERLENLRKKPENIPQPISNTSRANLNKLLTDYTEMKKAILHVYDEEFQKDPVGLMSRVAQPASKKIDQNKLKPEMDEKGNLTTAGFACSQCGQPLFVYKLEQVSEKGKAYTNYFGRCNVAEHEKLILLAQLKPEKDSDEAVTYSLGKFGQRALDFYSIHVTKESTHPVKPLAQIAGNRYASGPVGKALSDACMGTIASFLSKYQDIIIEHQKVVKGNQKRLESLRELAGKENLEYPSVTLPPQPHTKEGVDAYNEVIARVRMWVNLNLWQKLKLSRDDAKPLLRLKGFPSFPLVERQANEVDWWDMVCNVKKLINEKKEDGKVFWQNLAGYKRQEALRPYLSSEEDRKKGKKFARYQLGDLLLHLEKKHGEDWGKVYDEAWERIDKKVEGLSKHIKLEEERRSEDAQSKAALTDWLRAKASFVIEGSKEADKDEFCRCELKLQKWYGDLRGKPFAIEAENSILDISGFSKQYNCAFIWQKDGVKKLNLYLIINYFKGGKLRFKKIKPEAFEANRFYTVINKKSGEIVPMEVNFNFDDPNLIILPLAFGKRQGREFIWNDLLSLETGSLKLANGRVIEKTLYNRRTRQDEPALFVALTFERREVLDSSNIKPMNLIGVDRGENIPAVIALTDPEGCPLSRFKDSLGNPTHILRIGESYKEKQRTIQAKKEVEQRRAGGYSRKYASKAKNLADDMVRNTARDLLYYAVTQDAMLIFENLSRGFGRQGKRTFMAERQYTRMEDWLTAKLAYEGLPSKTYLSKTLAQYTSKTCSNCGFTITSADYDRVLEKLKKTATGWMTTINGKELKVEGQITYYNRYKRQNVVKDLSVELDRLSEESVNNDISSWTKGRSGEALSLLKKRFSHRPVQEKFVCLNCGFETHADEQAALNIARSWLFLRSQEYKKYQTNKTTGNTDKRAFVETWQSFYRKKLKEVWKPAV

SEQ ID NO: 29324 - protein, 979 aa, synthetic construct
  REGION 1..979: note = engineered CasX variant
QEIKRINKIRRRLVKDSNTKKAGKTGPMKTLLVRVMTPDLRERLENLRKKPENIPQPISNTSRANLNKLLTDYTEMKKAILHVYDEEFQKDPVGLMSRVAQPASKKIDQNKLKPEMDEKGNLTTAGFACSQCGQPLFVYKLEQVSEKGKAYTNYFGRCNVAEHEKLILLAQLKPEKDSDEAVTYSLGKFGQRALDFYSIHVTKESTHPVKPLAQIAGNRYASGPVGKALSDACMGTIASFLSKYQDIIIEHQKVVKGNQKRLESLRELAGKENLEYPSVTLPPQPHTKEGVDAYNEVIARVRMWVNLNLWQKLKLSRDDAKPLLRLKGFPSFPLVERQANEVDWWDMVCNVKKLINEKKEDGKVFWQNLAGYKRQEALRPYLSSEEDRKKGKKFARYQLGDLLLHLEKKHGEDWGKVYDEAWERIDKKVEGLSKHIKLEEERRSEDAQSKAALTDWLRAKASFVIEGLKEADDKDEFCRCELKLQKWYGDLRGKPFAIEAENSILDISGFSKQYNCAFIWQKDGVKKLNLYLIINYFKGGKLRFKKIKPEAFEANRFYTVINKKSGEIVPMEVNFNFDDPNLIILPLAFGKRQGREFIWNDLLSLETGSLKLANGRVIEKTLYNRRTRQDEPALFVALTFERREVLDSSNIKPMNLIGVDRGENIPAVIALTDPEGCPLSRFKDSLGNPTHILRIGESYKEKQRTIQAKKEVEQRRAGGYSRKYASKAKNLADDMVRNTARDLLYYAVTQDAMLIFENLSRGFGRQGKRTFMAERQYTRMEDWLTAKLAYEGLPSKTYLSKTLAQYTSKTCSNCGFTITSADYDRVLEKLKKTATGWMTTINGKELKVEGQITYYNRYKRQNVVKDLSVELDRLSEESVNNDISSWTKGRSGEALSLLKKRFSHRPVQEKFVCLNCGFETHADEQAALNIARSWLFLRSQEYKKYQTNKTTGNTDKRAFVETWQSFYRKKLKEVWKPAV

SEQ ID NO: 29325 - protein, 979 aa, synthetic construct
  REGION 1..979: note = engineered CasX variant
QEIKRINKIRRRLVKDSNTKKAGKTGPMKTLLVRVMTPDLRERLENLRKKPENIPQPISNTSRANLNKLLTDYTEMKKAILHVYDEEFQKDPVGLMSRVAQPASKKIDQNKLKPEMDEKGNLTTAGFACSQCGQPLFVYKLEQVSEKGKAYTNYFGRCNVAEHEKLILLAQLKPEKDSDEAVTYSLGKFGQRALDFYSIHVTKESTHPVKPLAQIAGNRYASGPVGKALSDACMGTIASFLSKYQDIIIEHQKVVKGNQKRLESLRELAGKENLEYPSVTLPPQPHTKEGVDAYNEVIARVRMWVNLNLWQKLKLSRDDAKPLLRLKGFPSFPLVERQANEVDWWDMVCNVKKLINEKKEDGKVFWQNLAGYKRQEALRPYLSSEEDRKKGKKFARYQLGDLLLHLEKKHGEDWGKVYDEAWERIDKKVEGLSKHIKLEEERRSEDAQSKAALTDWLRAKASFVIEGLKEADKDEFCRCELKLQKWYGDLRGKPFAIEAENSILDISGFSKQYNCAFIWQKDGVKKLNLYLIINYFKGGKLRFKKIKPEAFEANRFYTVINKKSGEIVPMEVNFNFDDPNLIILPLAFGKRQGREFIWNDLLSLETGSLKLANGRVIEKTLYNRRTRQDEPALFVALTFERREVLDSSNIKPMNLIGVDRGENIPAVIALTDPEGCPLSRFKDSLGNPTHILRIGESYKEKQRTIQAKKEVEQRRAGGYSRKYASKAKNLADDMVRNTARDLLYYAVTQDAMLIFENLSRGFGRQGKRTFMAERQYTRMEDWLTAKLAYEGLPSKTYLSKTLAQYTSKTCSNCGFTITSADYDRVLEKLKKTATGWMTTINGKELKVEGQITYYNRYKRQNVVKDLSVELDRLSEESVNNDISSWTKGRSGNEALSLLKKRFSHRPVQEKFVCLNCGFETHADEQAALNIARSWLFLRSQEYKKYQTNKTTGNTDKRAFVETWQSFYRKKLKEVWKPAV

SEQ ID NO: 29326 - protein, 978 aa, synthetic construct
  REGION 1..978: note = engineered CasX variant
QEIKRINKIRRRLVKDSNTKKAGKTGPMKTLLVRVMTPDLRERLENLRKKPENIPQPISNTSRANLNKLLTDYTEMKKAILHVYDEEFQKDPVGLMSRVAQPASKKIDQNKLKPEMDEKGNLTTAGFACSQCGQPLFVYKLEQVSEKGKAYTNYFGRCNVAEHEKLILLAQLKPEKDSDEAVTYSLGKFGQRALDFYSIHVTKESTHPVKPLAQIAGNRYASGPVGKALSDACMGTIASFLSKYQDIIIEHQKVVKGNQKRLESLRELAGKENLEYPSVTLPPQPHTKEGVDAYNEVIARVRMWVNLNLWQKLKLSRDDAKPLLRLKGFPSFPLVERQANEVDWWDMVCNVKKLINEKKEDGKVFWQNLAGYKRQEALRPYLSSEEDRQKGKKFARYQLGDLLLHLEKKHGEDWGKVYDEAWERIDKKVEGLSKHIKLEEERRSEDAQSKAALTDWLRAKASFVIEGLKEADKDEFCRCELKLQKWYGDLRGKPFAIEAENSILDISGFSKQYNCAFIWQKDGVKKLNLYLIINYFKGGKLRFKKIKPEAFEANRFYTVINKKSGEIVPMEVNFNFDDPNLIILPLAFGKRQGREFIWNDLLSLETGSLKLANGRVIEKTLYNRRTRQDEPALFVALTFERREVLDSSNIKPMNLIGVDRGENIPAVIALTDPEGCPLSRFKDSLGNPTHILRIGESYKEKQRTIQAKKEVEQRRAGGYSRKYASKAKNLADDMVRNTARDLLYYAVTQDAMLIFENLSRGFGRQGKRTFMAERQYTRMEDWLTAKLAYEGLPSKTYLSKTLAQYTSKTCSNCGFTITSADYDRVLEKLKKTATGWMTTINGKELKVEGQITYYNRYKRQNVVKDLSVELDRLSEESVNNDISSWTKGRSGEALSLLKKRFSHRPVQEKFVCLNCGFETHADEQAALNIARSWLFLRSQEYKKYQTNKTTGNTDKRAFVETWQSFYRKKLKEVWKPAV

SEQ ID NO: 29327 - protein, 978 aa, synthetic construct
  REGION 1..978: note = engineered CasX variant
QEIKRINKIRRRLVKDSNTKKAGKTGPMKTLLVRVMTPDLRERLENLRKKPENIPQPISNTSRANLNKLLTDYTEMKKAILHVYDEEFQKDPVGLMSRVAQPASKKIDQNKLKPEMDEKGNLTTAGFACSQCGQPLFVYKLEQVSEKGKAYTNYFGRCNVAEHEKLILLAQLKPEKDSDEAVTYSLGKFGQRALDFYSIHVTKESTHPVKPLAQIAGNRYASGPVGKALSDACMGTIASFLSKYQDIIIEHQKVVKGNQKRLESLRELAGKENLEYPSVTLPPQPHTKEGVDAYNEVIARVRMWVNLNLWQKLKLSRDDAKPLLRLKGFPSFPLVERQANEVDWWDMVCNVKKLINEKKEDGKVFWQNLAGYKRQEALRPYLSSEEDRKKGKKFARYQLGDLLLHLEKKHGEDWGKVYDEAWERIDKKVEGLSKHIKLEEERRSEDAQSKAALTDWLRAKASFVIEGLKEADKDEFCRCELKLQKWYGDLRGKPFAIEAENSILDISGFSKQYNCAFIWQKDGVKKLNLYLIINYFKGGKLRFKKIKPEAFEANRFYTVINKKSGEIVPMEVNFNFDDPNLIILPLAFGKRQGREFIWNDLLSLETGSLKLANGRVIEKTLYNRRTRQDEPALFVALTFERREVLDSSNIKPMNLIGVDRGENIPAVIALTDPEGCPLSRFKDSLGNPTHILRIGESYKEKQRTIQAKKEVEQRRAGGYSRKYASKAKNLADDMVRNTARDLLYYAVTQDAMLIFENLSRGFGRQGKRTFMAERQYTRMEDWLTAKLAYEGLPSQTYLSKTLAQYTSKTCSNCGFTITSADYDRVLEKLKKTATGWMTTINGKELKVEGQITYYNRYKRQNVVKDLSVELDRLSEESVNNDISSWTKGRSGEALSLLKKRFSHRPVQEKFVCLNCGFETHADEQAALNIARSWLFLRSQEYKKYQTNKTTGNTDKRAFVETWQSFYRKKLKEVWKPAV

SEQ ID NO: 29328 - protein, 978 aa, synthetic construct
  REGION 1..978: note = engineered CasX variant
QEIKRINKIRRRLVKDSNTKKAGKTGPMKTLLVRVMTPDLRERLENLRKKPENIPQPISNTSRANLNKLLTDYTEMKKAILHVYDEEFQKDPVGLMSRVAQPASKKIDQNKLKPEMDEKGNLTTAGFACSQCGQPLFVYKLEQVSEKGKAYTNYFGRCNVAEHEKLILLAQLKPEKDSDEAVTYSLGKFGQRALDFYSIHVTKESTHPVKPLAQIAGNRYASGPVGKALSDACMGTIASFLSKYQDIIIEHQKVVKGNQKRLESLRELAGKENLEYPSVTLPPQPHTKEGVDAYNEVIARVRMWVNLNLWQKLKLSRDDAKPLLRLKGFPSFPLVERQANEVDWWDMVCNVKKLINEKKEDGKVFWQNLAGYKRQEALRPYLSSEEDRKKGKKFARYQLGDLLLHLEKKHGEDWGKVYDEAWERIDKKVEGLSKHIKLEEERRSEDAQSKAALTDWLRAKASFVIEGLKEADKDEFCRCELKLQKWYGDLRGKPFAIEAENSILDISGFSKQYNCAFIWQKDGVKKLNLYLIINYFKGGKLRFKKIKPEAFEANRFYTVINKKSGEIVPMEVNFNFDDPNLIILPLAFGKRQGREFIWNDLLSLETGSLKLANGRVIEKTLYNRRTRQDEPALFVALTFERREVLDSSNIKPMNLIGVDRGENIPAVIALTDPEGCPLSRFKDSLGNPTHILRIGESYKEKQRTIQAKKEVEQRRAGGYSRKYASKAKNLADDMVRNTARDLLYYAVTQDAMLIFENLSRGFGRQGKRTFMAERQYTRMEDWLTAKLAYNGLPSKTYLSKTLAQYTSKTCSNCGFTITSADYDRVLEKLKKTATGWMTTINGKELKVEGQITYYNRYKRQNVVKDLSVELDRLSEESVNNDISSWTKGRSGEALSLLKKRFSHRPVQEKFVCLNCGFETHADEQAALNIARSWLFLRSQEYKKYQTNKTTGNTDKRAFVETWQSFYRKKLKEVWKPAV

SEQ ID NO: 29329 - protein, 978 aa, synthetic construct
  REGION 1..978: note = engineered CasX variant
QEIKRINKIRRRLVKDSNTKKAGKTGPMKTLLVRVMTPDLRERLENLRKKPENIPQPISNTSRANLNKLLTDYTEMKKAILHVYDEEFQKDPVGLMSRVAQPASKKIDQNKLKPEMDEKGNLTTAGFACSQCGQPLFVYKLEQVSEKGKAYTNYFGRCNVAEHEKLIQLAQLKPEKDSDEAVTYSLGKFGQRALDFYSIHVTKESTHPVKPLAQIAGNRYASGPVGKALSDACMGTIASFLSKYQDIIIEHQKVVKGNQKRLESLRELAGKENLEYPSVTLPPQPHTKEGVDAYNEVIARVRMWVNLNLWQKLKLSRDDAKPLLRLKGFPSFPLVERQANEVDWWDMVCNVKKLINEKKEDGKVFWQNLAGYKRQEALRPYLSSEEDRKKGKKFARYQLGDLLLHLEKKHGEDWGKVYDEAWERIDKKVEGLSKHIKLEEERRSEDAQSKAALTDWLRAKASFVIEGLKEADKDEFCRCELKLQKWYGDLRGKPFAIEAENSILDISGFSKQYNCAFIWQKDGVKKLNLYLIINYFKGGKLRFKKIKPEAFEANRFYTVINKKSGEIVPMEVNFNFDDPNLIILPLAFGKRQGREFIWNDLLSLETGSLKLANGRVIEKTLYNRRTRQDEPALFVALTFERREVLDSSNIKPMNLIGVDRGENIPAVIALTDPEGCPLSRFKDSLGNPTHILRIGESYKEKQRTIQAKKEVEQRRAGGYSRKYASKAKNLADDMVRNTARDLLYYAVTQDAMLIFENLSRGFGRQGKRTFMAERQYTRMEDWLTAKLAYEGLPSKTYLSKTLAQYTSKTCSNCGFTITSADYDRVLEKLKKTATGWMTTINGKELKVEGQITYYNRYKRQNVVKDLSVELDRLSEESVNNDISSWTKGRSGEALSLLKKRFSHRPVQEKFVCLNCGFETHADEQAALNIARSWLFLRSQEYKKYQTNKTTGNTDKRAFVETWQSFYRKKLKEVWKPAV

SEQ ID NO: 29330 - protein, 978 aa, synthetic construct
  REGION 1..978: note = engineered CasX variant
QEIKRINKIRRRLVKDSNTKKAGKTGPMKTLLVRVMTPDLRERLENLRKKPENIPQPISNTSRANLNKLLTDYTEMKKAILHVYDEEFQKDPVGLMSRVAQPASKKIDQNKLKPEMDEKGNLTTAGFACSQCGQPLFVYKLEQVSEKGKAYTNYFGRCNVAEHEKLILLAQLKPEKDSDEAVTYSLGKFGQRALDFYSIHVTKESTHPVKPLAQIAGNRYASGPVGKALSDACMGTIASFLSKYQDIIIEHQKVVKGNQKRLESLRELAGKENLEYPSVTLPPQPHTKEGVDAYNEVIARVRMWVNLNLWQKLKLSRDDAKPLLRLKGFPSFPLVERQANEVDWWDMVCNVKKLINEKKEDGKVFWQNLAIYKRQEALRPYLSSEEDRKKGKKFARYQLGDLLLHLEKKHGEDWGKVYDEAWERIDKKVEGLSKHIKLEEERRSEDAQSKAALTDWLRAKASFVIEGLKEADKDEFCRCELKLQKWYGDLRGKPFAIEAENSILDISGFSKQYNCAFIWQKDGVKKLNLYLIINYFKGGKLRFKKIKPEAFEANRFYTVINKKSGEIVPMEVNFNFDDPNLIILPLAFGKRQGREFIWNDLLSLETGSLKLANGRVIEKTLYNRRTRQDEPALFVALTFERREVLDSSNIKPMNLIGVDRGENIPAVIALTDPEGCPLSRFKDSLGNPTHILRIGESYKEKQRTIQAKKEVEQRRAGGYSRKYASKAKNLADDMVRNTARDLLYYAVTQDAMLIFENLSRGFGRQGKRTFMAERQYTRMEDWLTAKLAYEGLPSKTYLSKTLAQYTSKTCSNCGFTITSADYDRVLEKLKKTATGWMTTINGKELKVEGQITYYNRYKRQNVVKDLSVELDRLSEESVNNDISSWTKGRSGEALSLLKKRFSHRPVQEKFVCLNCGFETHADEQAALNIARSWLFLRSQEYKKYQTNKTTGNTDKRAFVETWQSFYRKKLKEVWKPAV

SEQ ID NO: 29331 - protein, 978 aa, synthetic construct
  REGION 1..978: note = engineered CasX variant
QEIKRINKIRRRLVKDSNTKKAGKTGPMKTLLVRVMTPDLRERLENLRKKPENIPQPISNTSRANLNKLLTDYTEMKKAILHVYDEEFQKDPVGLMSRVAQPASKKIDQNKLKPEMDEKGNLTTAGFACSQCGQPLFVYKLEQVSEKGKAYTNYFGRCNVAEHEKLILLAQLKPEKDSDEAVTYSLGKFGQRALDFYSIHVTKESTHPVKPLAQIAGNRYASGPVGKALSDACMGTIASFLSKYQDIIIEHQKVVKGNQKRLESLRELAGKENLEYPSVTLPPQPHTKEGVDAYNEVIARVRMWVNLNLWQKLKLSRDDAKPLLRLKGFPSFPLVERQANEVDWWDMVCNVKKLINEKKEDGKVFWQNLAGYKRQEALRPYLSSEEDREKGKKFARYQLGDLLLHLEKKHGEDWGKVYDEAWERIDKKVEGLSKHIKLEEERRSEDAQSKAALTDWLRAKASFVIEGLKEADKDEFCRCELKLQKWYGDLRGKPFAIEAENSILDISGFSKQYNCAFIWQKDGVKKLNLYLIINYFKGGKLRFKKIKPEAFEANRFYTVINKKSGEIVPMEVNFNFDDPNLIILPLAFGKRQGREFIWNDLLSLETGSLKLANGRVIEKTLYNRRTRQDEPALFVALTFERREVLDSSNIKPMNLIGVDRGENIPAVIALTDPEGCPLSRFKDSLGNPTHILRIGESYKEKQRTIQAKKEVEQRRAGGYSRKYASKAKNLADDMVRNTARDLLYYAVTQDAMLIFENLSRGFGRQGKRTFMAERQYTRMEDWLTAKLAYEGLPSKTYLSKTLAQYTSKTCSNCGFTITSADYDRVLEKLKKTATGWMTTINGKELKVEGQITYYNRYKRQNVVKDLSVELDRLSEESVNNDISSWTKGRSGEALSLLKKRFSHRPVQEKFVCLNCGFETHADEQAALNIARSWLFLRSQEYKKYQTNKTTGNTDKRAFVETWQSFYRKKLKEVWKPAV

SEQ ID NO: 29332 - protein, 978 aa, synthetic construct
  REGION 1..978: note = engineered CasX variant
QEIKRINKIRRRLVKDSNTKKAGKTGPMKTLLVRVMTPDLRERLENLRKKPENIPQPISNTSRANLNKLLTDYTEMKKAILHVYDEEFQKDPVGLMSRVAQPASKKIDQNKLKPEMDEKGNLTTAGFACSQCGQPLFVYKLEQVSEKGKAYTNYFGRCNVAEHEKLILLAQLKPEKDSDEAVTYSLGKFGQRALDFYSIHVTKESTHPVKPLAQIAGNRYASGPVGKALSDACMGTIASFLSKYQDIIIEHQKVVKGNQKRLESLRELAGKENLEYPSVTLPPQPHTKEGVDAYNEVIARVRMWVNLNLWQKLKLSRDDAKPLLRLKGFPSFPLVERQANEVDWWDMVCNVKKLINEKKEDGKVFWQNLAGYKRQEALRPYLSSEEDRKKGKKFARYQLGDLLLHLEKKHGEDWGKVYDEAWERIDKKVEGLSKHIKLEEERRSEDAQSKAALTDWLRAKASFVIEGLKEADKDEFCRCELKLQKWYGDLRGKPFAIEAENSILDISGFSKQYNCAFIWQKDGVKKLNLYLIINYFKGGKLRFKKIKPEAFEANRFYTVINKKSGEIVIMEVNFNFDDPNLIILPLAFGKRQGREFIWNDLLSLETGSLKLANGRVIEKTLYNRRTRQDEPALFVALTFERREVLDSSNIKPMNLIGVDRGENIPAVIALTDPEGCPLSRFKDSLGNPTHILRIGESYKEKQRTIQAKKEVEQRRAGGYSRKYASKAKNLADDMVRNTARDLLYYAVTQDAMLIFENLSRGFGRQGKRTFMAERQYTRMEDWLTAKLAYEGLPSKTYLSKTLAQYTSKTCSNCGFTITSADYDRVLEKLKKTATGWMTTINGKELKVEGQITYYNRYKRQNVVKDLSVELDRLSEESVNNDISSWTKGRSGEALSLLKKRFSHRPVQEKFVCLNCGFETHADEQAALNIARSWLFLRSQEYKKYQTNKTTGNTDKRAFVETWQSFYRKKLKEVWKPAV

SEQ ID NO: 29333 - protein, 978 aa, synthetic construct
  REGION 1..978: note = engineered CasX variant
QEIKRINKIRRRLVKDSNTKKAGKTGPMKTLLVRVMTPDLRERLENLRKKPENIPQPISNTSRANLNKLLTDYTEMKKAILHVYWEEFQKDPVGLMSRVAQPASKKIDQNKLKPEMDEKGNLTTAGFACSQCGQPLFVYKLEQVSEKGKAYTNYFGRCNVAEHEKLIKLAQLKPEKDSDEAVTYSLGKFGQRALDFYSIHVTKESTHPVKPLAQIAGNRYASGPVGKALSGACMGTIASFLSKYQDIIIEHQKVVKGNQKRLESLRELAGKENLEYPSVTLPPQPHTKEGVDAYNEVIARVRMWVNLNLWQKLKLSRDDAKPLLRLKGFPSFPLVERQANEVDWWDMVCNVKKLINEKKEDGKVFWQNLAGYKRQEALRPYLSSEEDRKKGKKFARYQLGDLLLHLEKKHGEDWGKVYDEAWERIDKKVEGLSKHIKLEEERRSEDAQSKAALTDWLRAKASFVIEGLKEADKDEFCRCELKLQKWYGDLRGKPFAIEAENSILDISGFSKQYNCAFIWQKDGVKKLNLYLIINYFKGGKLRFKKIKPEAFEANRFYTVINKKSGEIVPMEVNFNFDDPNLIILPLAFGKRQGREFIWNDLLSLETGSLKLANGRVIEKTLYNRRTRQDEPALFVALTFERREVLDSSNIKPMNLIGVDRGENIPAVIALTDPEGCPLSRFKDSLGNPTHILRIGESYKEKQRTIQAKKEVEQRRAGGYSRKYASKAKNLADDMVRNTARDLLYYAVTQDAMLIFENLSRGFGRQGKRTFMAERQYTRMEDWLTAKLAYEGLPSKTYLSKTLAQYTSKTCSNCGFTITSADYDRVLEKLKKTATGWMTTINGKELKVEGQITYYNRYKRQNVVKDLSVELDRLSEESVNNDISSWTKGRSGEALSLLKKRFSHRPVQEKFVCLNCGFETHADEQAALNIARSWLFLRSQEYKKYQTNKTTGNTDKRAFVETWQSFYRKKLKEVWKPAV

SEQ ID NO: 29334 - protein, 978 aa, synthetic construct
  REGION 1..978: note = engineered CasX variant
QEIKRINKIRRRLVKDSNTKKAGKTGPMKTLLVRVMTPDLRERLENLRKKPENIPQPISNTSRANLNKLLTDYTEMKKAILHVYWEEFQKDPVGLMSRVAQPASKKIDQNKLKPEMDEKGNLTTAGFACSQCGQPLFVYKLEQVSEKGKAYTNYFGRCNVAEHEKLIKLAQLKPEKDSDEAVTYSLGKFGQRALDFYSIHVTKESTHPVKPLAQIAGNRYASGPVGKALSDACMGTIASFLSKYQDIIIEHQKVVKGNQKRLESLRELAGKENLEYPSVTLPPQPHTKEGVDAYNEVIARVRMWVNLNLWQKLKLSRDDAKPLLRLKNFPSFPLVERQANEVDWWDMVCNVKKLINEKKEDGKVFWQNLAGYKRQEALRPYLSSEEDRKKGKKFARYQLGDLLLHLEKKHGEDWGKVYDEAWERIDKKVEGLSKHIKLEEERRSEDAQSKAALTDWLRAKASFVIEGLKEADKDEFCRCELKLQKWYGDLRGKPFAIEAENSILDISGFSKQYNCAFIWQKDGVKKLNLYLIINYFKGGKLRFKKIKPEAFEANRFYTVINKKSGEIVPMEVNFNFDDPNLIILPLAFGKRQGREFIWNDLLSLETGSLKLANGRVIEKTLYNRRTRQDEPALFVALTFERREVLDSSNIKPMNLIGVDRGENIPAVIALTDPEGCPLSRFKDSLGNPTHILRIGESYKEKQRTIQAKKEVEQRRAGGYSRKYASKAKNLADDMVRNTARDLLYYAVTQDAMLIFENLSRGFGRQGKRTFMAERQYTRMEDWLTAKLAYEGLPSKTYLSKTLAQYTSKTCSNCGFTITSADYDRVLEKLKKTATGWMTTINGKELKVEGQITYYNRYKRQNVVKDLSVELDRLSEESVNNDISSWTKGRSGEALSLLKKRFSHRPVQEKFVCLNCGFETHADEQAALNIARSWLFLRSQEYKKYQTNKTTGNTDKRAFVETWQSFYRKKLKEVWKPAV

SEQ ID NO: 29335 - protein, 978 aa, synthetic construct
  REGION 1..978: note = engineered CasX variant
QEIKRINKIRRRLVKDSNTKKAGKTGPMKTLLVRVMTPDLRERLENLRKKPENIPQPISNTSRANLNKLLTDYTEMKKAILHVYWEEFQKDPVGLMSRVAQPASKKIDQNKLKPEMDEKGNLTTAGFACSQCGQPLFVYKLEQVSEKGKAYTNYFGRCNVAEHEKLIKLAQLKPEKDSDEAVTYSLGKFGQRALDFYSIHVTKESTHPVKPLAQIAGNRYASGPVGKALSDACMGTIASFLSKYQDIIIEHQKVVKGNQKRLESLRELAGKENLEYPSVTLPPQPHTKEGVDAYNEVIARVRMWVNLNLWQKLKLSRDDAKPLLRLKGFPSFPLVERQANEVDWWDMVCNVKKLINEKKEDGKVFWQNLAGYKRQEALRPYLSSEEDRKKGKKFARYQLGDLLNHLEKKHGEDWGKVYDEAWERIDKKVEGLSKHIKLEEERRSEDAQSKAALTDWLRAKASFVIEGLKEADKDEFCRCELKLQKWYGDLRGKPFAIEAENSILDISGFSKQYNCAFIWQKDGVKKLNLYLIINYFKGGKLRFKKIKPEAFEANRFYTVINKKSGEIVPMEVNFNFDDPNLIILPLAFGKRQGREFIWNDLLSLETGSLKLANGRVIEKTLYNRRTRQDEPALFVALTFERREVLDSSNIKPMNLIGVDRGENIPAVIALTDPEGCPLSRFKDSLGNPTHILRIGESYKEKQRTIQAKKEVEQRRAGGYSRKYASKAKNLADDMVRNTARDLLYYAVTQDAMLIFENLSRGFGRQGKRTFMAERQYTRMEDWLTAKLAYEGLPSKTYLSKTLAQYTSKTCSNCGFTITSADYDRVLEKLKKTATGWMTTINGKELKVEGQITYYNRYKRQNVVKDLSVELDRLSEESVNNDISSWTKGRSGEALSLLKKRFSHRPVQEKFVCLNCGFETHADEQAALNIARSWLFLRSQEYKKYQTNKTTGNTDKRAFVETWQSFYRKKLKEVWKPAV

SEQ ID NO: 29336 - protein, 978 aa, synthetic construct
  REGION 1..978: note = engineered CasX variant
QEIKRINKIRRRLVKDSNTKKAGKTGPMKTLLVRVMTPDLRERLENLRKKPENIPQPISNTSRANLNKLLTDYTEMKKAILHVYWEEFQKDPVGLMSRVAQPASKKIDQNKLKPEMDEKGNLTTAGFACSQCGQPLFVYKLEQVSEKGKAYTNYFGRCNVAEHEKLIKLAQLKPEKDSDEAVTYSLGKFGQRALDFYSIHVTKESTHPVKPLAQIAGNRYASGPVGKALSDACMGTIASFLSKYQDIIIEHQKVVKGNQKRLESLRELAGKENLEYPSVTLPPQPHTKEGVDAYNEVIARVRMWVNLNLWQKLKLSRDDAKPLLRLKGFPSFPLVERQANEVDWWDMVCNVKKLINEKKEDGKVFWQNLAGYKRQEALRPYLSSEEDRKKGKKFARYQLGDLLWHLEKKHGEDWGKVYDEAWERIDKKVEGLSKHIKLEEERRSEDAQSKAALTDWLRAKASFVIEGLKEADKDEFCRCELKLQKWYGDLRGKPFAIEAENSILDISGFSKQYNCAFIWQKDGVKKLNLYLIINYFKGGKLRFKKIKPEAFEANRFYTVINKKSGEIVPMEVNFNFDDPNLIILPLAFGKRQGREFIWNDLLSLETGSLKLANGRVIEKTLYNRRTRQDEPALFVALTFERREVLDSSNIKPMNLIGVDRGENIPAVIALTDPEGCPLSRFKDSLGNPTHILRIGESYKEKQRTIQAKKEVEQRRAGGYSRKYASKAKNLADDMVRNTARDLLYYAVTQDAMLIFENLSRGFGRQGKRTFMAERQYTRMEDWLTAKLAYEGLPSKTYLSKTLAQYTSKTCSNCGFTITSADYDRVLEKLKKTATGWMTTINGKELKVEGQITYYNRYKRQNVVKDLSVELDRLSEESVNNDISSWTKGRSGEALSLLKKRFSHRPVQEKFVCLNCGFETHADEQAALNIARSWLFLRSQEYKKYQTNKTTGNTDKRAFVETWQSFYRKKLKEVWKPAV

SEQ ID NO: 29337 - protein, 978 aa, synthetic construct
  REGION 1..978: note = engineered CasX variant
QEIKRINKIRRRLVKDSNTKKAGKTGPMKTLLVRVMTPDLRERLENLRKKPENIPQPISNTSRANLNKLLTDYTEMKKAILHVYWEEFQKDPVGLMSRVAQPASKKIDQNKLKPEMDEKGNLTTAGFACSQCGQPLFVYKLEQVSEKGKAYTNYFGRCNVAEHEKLIKLAQLKPEKDSDEAVTYSLGKFGQRALDFYSIHVTKESTHPVKPLAQIAGNRYASGPVGKALSDACMGTIASFLSKYQDIIIEHQKVVKGNQKRLESLRELAGKENLEYPSVTLPPQPHTKEGVDAYNEVIARVRMWVNLNLWQKLKLSRDDAKPLLRLKGFPSFPLVERQANEVDWWDMVCNVKKLINEKKEDGKVFWQNLAGYKRQEALRPYLSSEEDRKKGKKFARYQLGDLLLHLYKKHGEDWGKVYDEAWERIDKKVEGLSKHIKLEEERRSEDAQSKAALTDWLRAKASFVIEGLKEADKDEFCRCELKLQKWYGDLRGKPFAIEAENSILDISGFSKQYNCAFIWQKDGVKKLNLYLIINYFKGGKLRFKKIKPEAFEANRFYTVINKKSGEIVPMEVNFNFDDPNLIILPLAFGKRQGREFIWNDLLSLETGSLKLANGRVIEKTLYNRRTRQDEPALFVALTFERREVLDSSNIKPMNLIGVDRGENIPAVIALTDPEGCPLSRFKDSLGNPTHILRIGESYKEKQRTIQAKKEVEQRRAGGYSRKYASKAKNLADDMVRNTARDLLYYAVTQDAMLIFENLSRGFGRQGKRTFMAERQYTRMEDWLTAKLAYEGLPSKTYLSKTLAQYTSKTCSNCGFTITSADYDRVLEKLKKTATGWMTTINGKELKVEGQITYYNRYKRQNVVKDLSVELDRLSEESVNNDISSWTKGRSGEALSLLKKRFSHRPVQEKFVCLNCGFETHADEQAALNIARSWLFLRSQEYKKYQTNKTTGNTDKRAFVETWQSFYRKKLKEVWKPAV

SEQ ID NO: 29338 - protein, 978 aa, synthetic construct
  REGION 1..978: note = engineered CasX variant
QEIKRINKIRRRLVKDSNTKKAGKTGPMKTLLVRVMTPDLRERLENLRKKPENIPQPISNTSRANLNKLLTDYTEMKKAILHVYWEEFQKDPVGLMSRVAQPASKKIDQNKLKPEMDEKGNLTTAGFACSQCGQPLFVYKLEQVSEKGKAYTNYFGRCNVAEHEKLIKLAQLKPEKDSDEAVTYSLGKFGQRALDFYSIHVTKESTHPVKPLAQIAGNRYASGPVGKALSDACMGTIASFLSKYQDIIIEHQKVVKGNQKRLESLRELAGKENLEYPSVTLPPQPHTKEGVDAYNEVIARVRMWVNLNLWQKLKLSRDDAKPLLRLKGFPSFPLVERQANEVDWWDMVCNVKKLINEKKEDGKVFWQNLAGYKRQEALRPYLSSEEDRKKGKKFARYQLGDLLLHLEKKHPEDWGKVYDEAWERIDKKVEGLSKHIKLEEERRSEDAQSKAALTDWLRAKASFVIEGLKEADKDEFCRCELKLQKWYGDLRGKPFAIEAENSILDISGFSKQYNCAFIWQKDGVKKLNLYLIINYFKGGKLRFKKIKPEAFEANRFYTVINKKSGEIVPMEVNFNFDDPNLIILPLAFGKRQGREFIWNDLLSLETGSLKLANGRVIEKTLYNRRTRQDEPALFVALTFERREVLDSSNIKPMNLIGVDRGENIPAVIALTDPEGCPLSRFKDSLGNPTHILRIGESYKEKQRTIQAKKEVEQRRAGGYSRKYASKAKNLADDMVRNTARDLLYYAVTQDAMLIFENLSRGFGRQGKRTFMAERQYTRMEDWLTAKLAYEGLPSKTYLSKTLAQYTSKTCSNCGFTITSADYDRVLEKLKKTATGWMTTINGKELKVEGQITYYNRYKRQNVVKDLSVELDRLSEESVNNDISSWTKGRSGEALSLLKKRFSHRPVQEKFVCLNCGFETHADEQAALNIARSWLFLRSQEYKKYQTNKTTGNTDKRAFVETWQSFYRKKLKEVWKPAV

SEQ ID NO: 29339 - protein, 979 aa, synthetic construct
  REGION 1..979: note = engineered CasX variant
QEIKRINKIRRRLVKDSNTKKAGKTGPMKTLLVRVMTPDLRERLENLRKKPENIPQPISNTSRANLNKLLTDYTEMKKAILHVYWEEFQKDPVGLMSRVAQPASKKIDQNKLKPEMDEKGNLTTAGFACSQCGQPLFVYKLEQVSEKGKAYTNYFGRCNVAEHEKLIKLAQLKPEKDSDEAVTYSLGKFGQRALDFYSIHVTKESTHPVKPLAQIAGNRYASGPVGKALSDACMGTIASFLSKYQDIIIEHQKVVKGNQKRLESLRELAGKENLEYPSVTLPPQPHTKEGVDAYNEVIARVRMWVNLNLWQKLKLSRDDAKPLLRLKGFPSFPLVERQANEVDWWDMVCNVKKLINEKKEDGKVFWQNLAGYKRQEALRPYLSSEEDRKKGKKFARYQLGDLLLHLEKKHGERDWGKVYDEAWERIDKKVEGLSKHIKLEEERRSEDAQSKAALTDWLRAKASFVIEGLKEADKDEFCRCELKLQKWYGDLRGKPFAIEAENSILDISGFSKQYNCAFIWQKDGVKKLNLYLIINYFKGGKLRFKKIKPEAFEANRFYTVINKKSGEIVPMEVNFNFDDPNLIILPLAFGKRQGREFIWNDLLSLETGSLKLANGRVIEKTLYNRRTRQDEPALFVALTFERREVLDSSNIKPMNLIGVDRGENIPAVIALTDPEGCPLSRFKDSLGNPTHILRIGESYKEKQRTIQAKKEVEQRRAGGYSRKYASKAKNLADDMVRNTARDLLYYAVTQDAMLIFENLSRGFGRQGKRTFMAERQYTRMEDWLTAKLAYEGLPSKTYLSKTLAQYTSKTCSNCGFTITSADYDRVLEKLKKTATGWMTTINGKELKVEGQITYYNRYKRQNVVKDLSVELDRLSEESVNNDISSWTKGRSGEALSLLKKRFSHRPVQEKFVCLNCGFETHADEQAALNIARSWLFLRSQEYKKYQTNKTTGNTDKRAFVETWQSFYRKKLKEVWKPAV

SEQ ID NO: 29340 - protein, 979 aa, synthetic construct
  REGION 1..979: note = engineered CasX variant
QEIKRINKIRRRLVKDSNTKKAGKTGPMKTLLVRVMTPDLRERLENLRKKPENIPQPISNTSRANLNKLLTDYTEMKKAILHVYWEEFQKDPVGLMSRVAQPASKKIDQNKLKPEMDEKGNLTTAGFACSQCGQPLFVYKLEQVSEKGKAYTNYFGRCNVAEHEKLIKLAQLKPEKDSDEAVTYSLGKFGQRALDFYSIHVTKESTHPVKPLAQIAGNRYASGPVGKALSDACMGTIASFLSKYQDIIIEHQKVVKGNQKRLESLRELAGKENLEYPSVTLPPQPHTKEGVDAYNEVIARVRMWVNLNLWQKLKLSRDDAKPLLRLKGFPSFPLVERQANEVDWWDMVCNVKKLINEKKEDGKVFWQNLAGYKRQEALRPYLSSEEDRKKGKKFARYQLGDLLLHLEKKHGEYDWGKVYDEAWERIDKKVEGLSKHIKLEEERRSEDAQSKAALTDWLRAKASFVIEGLKEADKDEFCRCELKLQKWYGDLRGKPFAIEAENSILDISGFSKQYNCAFIWQKDGVKKLNLYLIINYFKGGKLRFKKIKPEAFEANRFYTVINKKSGEIVPMEVNFNFDDPNLIILPLAFGKRQGREFIWNDLLSLETGSLKLANGRVIEKTLYNRRTRQDEPALFVALTFERREVLDSSNIKPMNLIGVDRGENIPAVIALTDPEGCPLSRFKDSLGNPTHILRIGESYKEKQRTIQAKKEVEQRRAGGYSRKYASKAKNLADDMVRNTARDLLYYAVTQDAMLIFENLSRGFGRQGKRTFMAERQYTRMEDWLTAKLAYEGLPSKTYLSKTLAQYTSKTCSNCGFTITSADYDRVLEKLKKTATGWMTTINGKELKVEGQITYYNRYKRQNVVKDLSVELDRLSEESVNNDISSWTKGRSGEALSLLKKRFSHRPVQEKFVCLNCGFETHADEQAALNIARSWLFLRSQEYKKYQTNKTTGNTDKRAFVETWQSFYRKKLKEVWKPAV

SEQ ID NO: 29341 - protein, 978 aa, synthetic construct
  REGION 1..978: note = engineered CasX variant
QEIKRINKIRRRLVKDSNTKKAGKTGPMKTLLVRVMTPDLRERLENLRKKPENIPQPISNTSRANLNKLLTDYTEMKKAILHVYWEEFQKDPVGLMSRVAQPASKKIDQNKLKPEMDEKGNLTTAGFACSQCGQPLFVYKLEQVSEKGKAYTNYFGRCNVAEHEKLIKLAQLKPEKDSDEAVTYSLGKFGQRALDFYSIHVTKESTHPVKPLAQIAGNRYASGPVGKALSDACMGTIASFLSKYQDIIIEHQKVVKGNQKRLESLRELAGKENLEYPSVTLPPQPHTKEGVDAYNEVIARVRMWVNLNLWQKLKLSRDDAKPLLRLKGFPSFPLVERQANEVDWWDMVCNVKKLINEKKEDGKVFWQNLAGYKRQEALRPYLSSEEDRKKGKKFARYQLGDLLLHLEKKHGEDWGDVYDEAWERIDKKVEGLSKHIKLEEERRSEDAQSKAALTDWLRAKASFVIEGLKEADKDEFCRCELKLQKWYGDLRGKPFAIEAENSILDISGFSKQYNCAFIWQKDGVKKLNLYLIINYFKGGKLRFKKIKPEAFEANRFYTVINKKSGEIVPMEVNFNFDDPNLIILPLAFGKRQGREFIWNDLLSLETGSLKLANGRVIEKTLYNRRTRQDEPALFVALTFERREVLDSSNIKPMNLIGVDRGENIPAVIALTDPEGCPLSRFKDSLGNPTHILRIGESYKEKQRTIQAKKEVEQRRAGGYSRKYASKAKNLADDMVRNTARDLLYYAVTQDAMLIFENLSRGFGRQGKRTFMAERQYTRMEDWLTAKLAYEGLPSKTYLSKTLAQYTSKTCSNCGFTITSADYDRVLEKLKKTATGWMTTINGKELKVEGQITYYNRYKRQNVVKDLSVELDRLSEESVNNDISSWTKGRSGEALSLLKKRFSHRPVQEKFVCLNCGFETHADEQAALNIARSWLFLRSQEYKKYQTNKTTGNTDKRAFVETWQSFYRKKLKEVWKPAV

SEQ ID NO: 29342 - protein, 978 aa, synthetic construct
  REGION 1..978: note = engineered CasX variant
QEIKRINKIRRRLVKDSNTKKAGKTGPMKTLLVRVMTPDLRERLENLRKKPENIPQPISNTSRANLNKLLTDYTEMKKAILHVYWEEFQKDPVGLMSRVAQPASKKIDQNKLKPEMDEKGNLTTAGFACSQCGQPLFVYKLEQVSEKGKAYTNYFGRCNVAEHEKLIKLAQLKPEKDSDEAVTYSLGKFGQRALDFYSIHVTKESTHPVKPLAQIAGNRYASGPVGKALSDACMGTIASFLSKYQDIIIEHQKVVKGNQKRLESLRELAGKENLEYPSVTLPPQPHTKEGVDAYNEVIARVRMWVNLNLWQKLKLSRDDAKPLLRLKGFPSFPLVERQANEVDWWDMVCNVKKLINEKKEDGKVFWQNLAGYKRQEALRPYLSSEEDRKKGKKFARYQLGDLLLHLEKKHGEDWGKVYGEAWERIDKKVEGLSKHIKLEEERRSEDAQSKAALTDWLRAKASFVIEGLKEADKDEFCRCELKLQKWYGDLRGKPFAIEAENSILDISGFSKQYNCAFIWQKDGVKKLNLYLIINYFKGGKLRFKKIKPEAFEANRFYTVINKKSGEIVPMEVNFNFDDPNLIILPLAFGKRQGREFIWNDLLSLETGSLKLANGRVIEKTLYNRRTRQDEPALFVALTFERREVLDSSNIKPMNLIGVDRGENIPAVIALTDPEGCPLSRFKDSLGNPTHILRIGESYKEKQRTIQAKKEVEQRRAGGYSRKYASKAKNLADDMVRNTARDLLYYAVTQDAMLIFENLSRGFGRQGKRTFMAERQYTRMEDWLTAKLAYEGLPSKTYLSKTLAQYTSKTCSNCGFTITSADYDRVLEKLKKTATGWMTTINGKELKVEGQITYYNRYKRQNVVKDLSVELDRLSEESVNNDISSWTKGRSGEALSLLKKRFSHRPVQEKFVCLNCGFETHADEQAALNIARSWLFLRSQEYKKYQTNKTTGNTDKRAFVETWQSFYRKKLKEVWKPAV

SEQ ID NO: 29343 - protein, 978 aa, synthetic construct
  REGION 1..978: note = engineered CasX variant
QEIKRINKIRRRLVKDSNTKKAGKTGPMKTLLVRVMTPDLRERLENLRKKPENIPQPISNTSRANLNKLLTDYTEMKKAILHVYWEEFQKDPVGLMSRVAQPASKKIDQNKLKPEMDEKGNLTTAGFACSQCGQPLFVYKLEQVSEKGKAYTNYFGRCNVAEHEKLIKLAQLKPEKDSDEAVTYSLGKFGQRALDFYSIHVTKESTHPVKPLAQIAGNRYASGPVGKALSDACMGTIASFLSKYQDIIIEHQKVVKGNQKRLESLRELAGKENLEYPSVTLPPQPHTKEGVDAYNEVIARVRMWVNLNLWQKLKLSRDDAKPLLRLKGFPSFPLVERQANEVDWWDMVCNVKKLINEKKEDGKVFWQNLAGYKRQEALRPYLSSEEDRKKGKKFARYQLGDLLLHLEKKHGEDWGKVYDEAWERIDKKVEGLSKHIKLEEERRSEDAQSKAALTDWLRAKASFVIEGKKEADKDEFCRCELKLQKWYGDLRGKPFAIEAENSILDISGFSKQYNCAFIWQKDGVKKLNLYLIINYFKGGKLRFKKIKPEAFEANRFYTVINKKSGEIVPMEVNFNFDDPNLIILPLAFGKRQGREFIWNDLLSLETGSLKLANGRVIEKTLYNRRTRQDEPALFVALTFERREVLDSSNIKPMNLIGVDRGENIPAVIALTDPEGCPLSRFKDSLGNPTHILRIGESYKEKQRTIQAKKEVEQRRAGGYSRKYASKAKNLADDMVRNTARDLLYYAVTQDAMLIFENLSRGFGRQGKRTFMAERQYTRMEDWLTAKLAYEGLPSKTYLSKTLAQYTSKTCSNCGFTITSADYDRVLEKLKKTATGWMTTINGKELKVEGQITYYNRYKRQNVVKDLSVELDRLSEESVNNDISSWTKGRSGEALSLLKKRFSHRPVQEKFVCLNCGFETHADEQAALNIARSWLFLRSQEYKKYQTNKTTGNTDKRAFVETWQSFYRKKLKEVWKPAV

SEQ ID NO: 29344 - protein, 978 aa, synthetic construct
  REGION 1..978: note = engineered CasX variant
QEIKRINKIRRRLVKDSNTKKAGKTGPMKTLLVRVMTPDLRERLENLRKKPENIPQPISNTSRANLNKLLTDYTEMKKAILHVYWEEFQKDPVGLMSRVAQPASKKIDQNKLKPEMDEKGNLTTAGFACSQCGQPLFVYKLEQVSEKGKAYTNYFGRCNVAEHEKLIKLAQLKPEKDSDEAVTYSLGKFGQRALDFYSIHVTKESTHPVKPLAQIAGNRYASGPVGKALSDACMGTIASFLSKYQDIIIEHQKVVKGNQKRLESLRELAGKENLEYPSVTLPPQPHTKEGVDAYNEVIARVRMWVNLNLWQKLKLSRDDAKPLLRLKGFPSFPLVERQANEVDWWDMVCNVKKLINEKKEDGKVFWQNLAGYKRQEALRPYLSSEEDRKKGKKFARYQLGDLLLHLEKKHGEDWGKVYDEAWERIDKKVEGLSKHIKLEEERRSEDAQSKAALTDWLRAKASFVIEGSKEADKDEFCRCELKLQKWYGDLRGKPFAIEAENSILDISGFSKQYNCAFIWQKDGVKKLNLYLIINYFKGGKLRFKKIKPEAFEANRFYTVINKKSGEIVPMEVNFNFDDPNLIILPLAFGKRQGREFIWNDLLSLETGSLKLANGRVIEKTLYNRRTRQDEPALFVALTFERREVLDSSNIKPMNLIGVDRGENIPAVIALTDPEGCPLSRFKDSLGNPTHILRIGESYKEKQRTIQAKKEVEQRRAGGYSRKYASKAKNLADDMVRNTARDLLYYAVTQDAMLIFENLSRGFGRQGKRTFMAERQYTRMEDWLTAKLAYEGLPSKTYLSKTLAQYTSKTCSNCGFTITSADYDRVLEKLKKTATGWMTTINGKELKVEGQITYYNRYKRQNVVKDLSVELDRLSEESVNNDISSWTKGRSGEALSLLKKRFSHRPVQEKFVCLNCGFETHADEQAALNIARSWLFLRSQEYKKYQTNKTTGNTDKRAFVETWQSFYRKKLKEVWKPAV

SEQ ID NO: 29345 - protein, 979 aa, synthetic construct
  REGION 1..979: note = engineered CasX variant
QEIKRINKIRRRLVKDSNTKKAGKTGPMKTLLVRVMTPDLRERLENLRKKPENIPQPISNTSRANLNKLLTDYTEMKKAILHVYWEEFQKDPVGLMSRVAQPASKKIDQNKLKPEMDEKGNLTTAGFACSQCGQPLFVYKLEQVSEKGKAYTNYFGRCNVAEHEKLIKLAQLKPEKDSDEAVTYSLGKFGQRALDFYSIHVTKESTHPVKPLAQIAGNRYASGPVGKALSDACMGTIASFLSKYQDIIIEHQKVVKGNQKRLESLRELAGKENLEYPSVTLPPQPHTKEGVDAYNEVIARVRMWVNLNLWQKLKLSRDDAKPLLRLKGFPSFPLVERQANEVDWWDMVCNVKKLINEKKEDGKVFWQNLAGYKRQEALRPYLSSEEDRKKGKKFARYQLGDLLLHLEKKHGEDWGKVYDEAWERIDKKVEGLSKHIKLEEERRSEDAQSKAALTDWLRAKASFVIEGLKEADDKDEFCRCELKLQKWYGDLRGKPFAIEAENSILDISGFSKQYNCAFIWQKDGVKKLNLYLIINYFKGGKLRFKKIKPEAFEANRFYTVINKKSGEIVPMEVNFNFDDPNLIILPLAFGKRQGREFIWNDLLSLETGSLKLANGRVIEKTLYNRRTRQDEPALFVALTFERREVLDSSNIKPMNLIGVDRGENIPAVIALTDPEGCPLSRFKDSLGNPTHILRIGESYKEKQRTIQAKKEVEQRRAGGYSRKYASKAKNLADDMVRNTARDLLYYAVTQDAMLIFENLSRGFGRQGKRTFMAERQYTRMEDWLTAKLAYEGLPSKTYLSKTLAQYTSKTCSNCGFTITSADYDRVLEKLKKTATGWMTTINGKELKVEGQITYYNRYKRQNVVKDLSVELDRLSEESVNNDISSWTKGRSGEALSLLKKRFSHRPVQEKFVCLNCGFETHADEQAALNIARSWLFLRSQEYKKYQTNKTTGNTDKRAFVETWQSFYRKKLKEVWKPAV

SEQ ID NO: 29346 - protein, 979 aa, synthetic construct
  REGION 1..979: note = engineered CasX variant
QEIKRINKIRRRLVKDSNTKKAGKTGPMKTLLVRVMTPDLRERLENLRKKPENIPQPISNTSRANLNKLLTDYTEMKKAILHVYWEEFQKDPVGLMSRVAQPASKKIDQNKLKPEMDEKGNLTTAGFACSQCGQPLFVYKLEQVSEKGKAYTNYFGRCNVAEHEKLIKLAQLKPEKDSDEAVTYSLGKFGQRALDFYSIHVTKESTHPVKPLAQIAGNRYASGPVGKALSDACMGTIASFLSKYQDIIIEHQKVVKGNQKRLESLRELAGKENLEYPSVTLPPQPHTKEGVDAYNEVIARVRMWVNLNLWQKLKLSRDDAKPLLRLKGFPSFPLVERQANEVDWWDMVCNVKKLINEKKEDGKVFWQNLAGYKRQEALRPYLSSEEDRKKGKKFARYQLGDLLLHLEKKHGEDWGKVYDEAWERIDKKVEGLSKHIKLEEERRSEDAQSKAALTDWLRAKASFVIEGLKEADKDEFCRCELKLQKWYGDLRGKPFAIEAENSILDISGFSKQYNCAFIWQKDGVKKLNLYLIINYFKGGKLRFKKIKPEAFEANRFYTVINKKSGEIVPMEVNFNFDDPNLIILPLAFGKRQGREFIWNDLLSLETGSLKLANGRVIEKTLYNRRTRQDEPALFVALTFERREVLDSSNIKPMNLIGVDRGENIPAVIALTDPEGCPLSRFKDSLGNPTHILRIGESYKEKQRTIQAKKEVEQRRAGGYSRKYASKAKNLADDMVRNTARDLLYYAVTQDAMLIFENLSRGFGRQGKRTFMAERQYTRMEDWLTAKLAYEGLPSKTYLSKTLAQYTSKTCSNCGFTITSADYDRVLEKLKKTATGWMTTINGKELKVEGQITYYNRYKRQNVVKDLSVELDRLSEESVNNDISSWTKGRSGNEALSLLKKRFSHRPVQEKFVCLNCGFETHADEQAALNIARSWLFLRSQEYKKYQTNKTTGNTDKRAFVETWQSFYRKKLKEVWKPAV

SEQ ID NO: 29347 - protein, 978 aa, synthetic construct
  REGION 1..978: note = engineered CasX variant
QEIKRINKIRRRLVKDSNTKKAGKTGPMKTLLVRVMTPDLRERLENLRKKPENIPQPISNTSRANLNKLLTDYTEMKKAILHVYWEEFQKDPVGLMSRVAQPASKKIDQNKLKPEMDEKGNLTTAGFACSQCGQPLFVYKLEQVSEKGKAYTNYFGRCNVAEHEKLIKLAQLKPEKDSDEAVTYSLGKFGQRALDFYSIHVTKESTHPVKPLAQIAGNRYASGPVGKALSDACMGTIASFLSKYQDIIIEHQKVVKGNQKRLESLRELAGKENLEYPSVTLPPQPHTKEGVDAYNEVIARVRMWVNLNLWQKLKLSRDDAKPLLRLKGFPSFPLVERQANEVDWWDMVCNVKKLINEKKEDGKVFWQNLAGYKRQEALRPYLSSEEDRQKGKKFARYQLGDLLLHLEKKHGEDWGKVYDEAWERIDKKVEGLSKHIKLEEERRSEDAQSKAALTDWLRAKASFVIEGLKEADKDEFCRCELKLQKWYGDLRGKPFAIEAENSILDISGFSKQYNCAFIWQKDGVKKLNLYLIINYFKGGKLRFKKIKPEAFEANRFYTVINKKSGEIVPMEVNFNFDDPNLIILPLAFGKRQGREFIWNDLLSLETGSLKLANGRVIEKTLYNRRTRQDEPALFVALTFERREVLDSSNIKPMNLIGVDRGENIPAVIALTDPEGCPLSRFKDSLGNPTHILRIGESYKEKQRTIQAKKEVEQRRAGGYSRKYASKAKNLADDMVRNTARDLLYYAVTQDAMLIFENLSRGFGRQGKRTFMAERQYTRMEDWLTAKLAYEGLPSKTYLSKTLAQYTSKTCSNCGFTITSADYDRVLEKLKKTATGWMTTINGKELKVEGQITYYNRYKRQNVVKDLSVELDRLSEESVNNDISSWTKGRSGEALSLLKKRFSHRPVQEKFVCLNCGFETHADEQAALNIARSWLFLRSQEYKKYQTNKTTGNTDKRAFVETWQSFYRKKLKEVWKPAV

SEQ ID NO: 29348 - protein, 978 aa, synthetic construct
  REGION 1..978: note = engineered CasX variant
QEIKRINKIRRRLVKDSNTKKAGKTGPMKTLLVRVMTPDLRERLENLRKKPENIPQPISNTSRANLNKLLTDYTEMKKAILHVYWEEFQKDPVGLMSRVAQPASKKIDQNKLKPEMDEKGNLTTAGFACSQCGQPLFVYKLEQVSEKGKAYTNYFGRCNVAEHEKLIKLAQLKPEKDSDEAVTYSLGKFGQRALDFYSIHVTKESTHPVKPLAQIAGNRYASGPVGKALSDACMGTIASFLSKYQDIIIEHQKVVKGNQKRLESLRELAGKENLEYPSVTLPPQPHTKEGVDAYNEVIARVRMWVNLNLWQKLKLSRDDAKPLLRLKGFPSFPLVERQANEVDWWDMVCNVKKLINEKKEDGKVFWQNLAGYKRQEALRPYLSSEEDRKKGKKFARYQLGDLLLHLEKKHGEDWGKVYDEAWERIDKKVEGLSKHIKLEEERRSEDAQSKAALTDWLRAKASFVIEGLKEADKDEFCRCELKLQKWYGDLRGKPFAIEAENSILDISGFSKQYNCAFIWQKDGVKKLNLYLIINYFKGGKLRFKKIKPEAFEANRFYTVINKKSGEIVPMEVNFNFDDPNLIILPLAFGKRQGREFIWNDLLSLETGSLKLANGRVIEKTLYNRRTRQDEPALFVALTFERREVLDSSNIKPMNLIGVDRGENIPAVIALTDPEGCPLSRFKDSLGNPTHILRIGESYKEKQRTIQAKKEVEQRRAGGYSRKYASKAKNLADDMVRNTARDLLYYAVTQDAMLIFENLSRGFGRQGKRTFMAERQYTRMEDWLTAKLAYEGLPSQTYLSKTLAQYTSKTCSNCGFTITSADYDRVLEKLKKTATGWMTTINGKELKVEGQITYYNRYKRQNVVKDLSVELDRLSEESVNNDISSWTKGRSGEALSLLKKRFSHRPVQEKFVCLNCGFETHADEQAALNIARSWLFLRSQEYKKYQTNKTTGNTDKRAFVETWQSFYRKKLKEVWKPAV

SEQ ID NO: 29349 - protein, 978 aa, synthetic construct
  REGION 1..978: note = engineered CasX variant
QEIKRINKIRRRLVKDSNTKKAGKTGPMKTLLVRVMTPDLRERLENLRKKPENIPQPISNTSRANLNKLLTDYTEMKKAILHVYWEEFQKDPVGLMSRVAQPASKKIDQNKLKPEMDEKGNLTTAGFACSQCGQPLFVYKLEQVSEKGKAYTNYFGRCNVAEHEKLIKLAQLKPEKDSDEAVTYSLGKFGQRALDFYSIHVTKESTHPVKPLAQIAGNRYASGPVGKALSDACMGTIASFLSKYQDIIIEHQKVVKGNQKRLESLRELAGKENLEYPSVTLPPQPHTKEGVDAYNEVIARVRMWVNLNLWQKLKLSRDDAKPLLRLKGFPSFPLVERQANEVDWWDMVCNVKKLINEKKEDGKVFWQNLAGYKRQEALRPYLSSEEDRKKGKKFARYQLGDLLLHLEKKHGEDWGKVYDEAWERIDKKVEGLSKHIKLEEERRSEDAQSKAALTDWLRAKASFVIEGLKEADKDEFCRCELKLQKWYGDLRGKPFAIEAENSILDISGFSKQYNCAFIWQKDGVKKLNLYLIINYFKGGKLRFKKIKPEAFEANRFYTVINKKSGEIVPMEVNFNFDDPNLIILPLAFGKRQGREFIWNDLLSLETGSLKLANGRVIEKTLYNRRTRQDEPALFVALTFERREVLDSSNIKPMNLIGVDRGENIPAVIALTDPEGCPLSRFKDSLGNPTHILRIGESYKEKQRTIQAKKEVEQRRAGGYSRKYASKAKNLADDMVRNTARDLLYYAVTQDAMLIFENLSRGFGRQGKRTFMAERQYTRMEDWLTAKLAYNGLPSKTYLSKTLAQYTSKTCSNCGFTITSADYDRVLEKLKKTATGWMTTINGKELKVEGQITYYNRYKRQNVVKDLSVELDRLSEESVNNDISSWTKGRSGEALSLLKKRFSHRPVQEKFVCLNCGFETHADEQAALNIARSWLFLRSQEYKKYQTNKTTGNTDKRAFVETWQSFYRKKLKEVWKPAV

SEQ ID NO: 29350 - protein, 979 aa, synthetic construct
  REGION 1..979: note = engineered CasX variant
QEIKRINKIRRRLVKDSNTKKAGKTGPMKTLLVRVMTPDLRERLENLRKKPENIPQPISNTSRANLNKLLTDYTEMKKAILHVYWEEFQKDPVGLMSRVAQPASKKIDQNKLKPEMDEKGNLTTAGFACSQCGQPLFVYKLEQVSEKGKAYTNYFGRCNVAEHEKLIKQLAQLKPEKDSDEAVTYSLGKFGQRALDFYSIHVTKESTHPVKPLAQIAGNRYASGPVGKALSDACMGTIASFLSKYQDIIIEHQKVVKGNQKRLESLRELAGKENLEYPSVTLPPQPHTKEGVDAYNEVIARVRMWVNLNLWQKLKLSRDDAKPLLRLKGFPSFPLVERQANEVDWWDMVCNVKKLINEKKEDGKVFWQNLAGYKRQEALRPYLSSEEDRKKGKKFARYQLGDLLLHLEKKHGEDWGKVYDEAWERIDKKVEGLSKHIKLEEERRSEDAQSKAALTDWLRAKASFVIEGLKEADKDEFCRCELKLQKWYGDLRGKPFAIEAENSILDISGFSKQYNCAFIWQKDGVKKLNLYLIINYFKGGKLRFKKIKPEAFEANRFYTVINKKSGEIVPMEVNFNFDDPNLIILPLAFGKRQGREFIWNDLLSLETGSLKLANGRVIEKTLYNRRTRQDEPALFVALTFERREVLDSSNIKPMNLIGVDRGENIPAVIALTDPEGCPLSRFKDSLGNPTHILRIGESYKEKQRTIQAKKEVEQRRAGGYSRKYASKAKNLADDMVRNTARDLLYYAVTQDAMLIFENLSRGFGRQGKRTFMAERQYTRMEDWLTAKLAYEGLPSKTYLSKTLAQYTSKTCSNCGFTITSADYDRVLEKLKKTATGWMTTINGKELKVEGQITYYNRYKRQNVVKDLSVELDRLSEESVNNDISSWTKGRSGEALSLLKKRFSHRPVQEKFVCLNCGFETHADEQAALNIARSWLFLRSQEYKKYQTNKTTGNTDKRAFVETWQSFYRKKLKEVWKPAV

SEQ ID NO: 29351 - protein, 978 aa, synthetic construct
  REGION 1..978: note = engineered CasX variant
QEIKRINKIRRRLVKDSNTKKAGKTGPMKTLLVRVMTPDLRERLENLRKKPENIPQPISNTSRANLNKLLTDYTEMKKAILHVYWEEFQKDPVGLMSRVAQPASKKIDQNKLKPEMDEKGNLTTAGFACSQCGQPLFVYKLEQVSEKGKAYTNYFGRCNVAEHEKLIKLAQLKPEKDSDEAVTYSLGKFGQRALDFYSIHVTKESTHPVKPLAQIAGNRYASGPVGKALSDACMGTIASFLSKYQDIIIEHQKVVKGNQKRLESLRELAGKENLEYPSVTLPPQPHTKEGVDAYNEVIARVRMWVNLNLWQKLKLSRDDAKPLLRLKGFPSFPLVERQANEVDWWDMVCNVKKLINEKKEDGKVFWQNLAIYKRQEALRPYLSSEEDRKKGKKFARYQLGDLLLHLEKKHGEDWGKVYDEAWERIDKKVEGLSKHIKLEEERRSEDAQSKAALTDWLRAKASFVIEGLKEADKDEFCRCELKLQKWYGDLRGKPFAIEAENSILDISGFSKQYNCAFIWQKDGVKKLNLYLIINYFKGGKLRFKKIKPEAFEANRFYTVINKKSGEIVPMEVNFNFDDPNLIILPLAFGKRQGREFIWNDLLSLETGSLKLANGRVIEKTLYNRRTRQDEPALFVALTFERREVLDSSNIKPMNLIGVDRGENIPAVIALTDPEGCPLSRFKDSLGNPTHILRIGESYKEKQRTIQAKKEVEQRRAGGYSRKYASKAKNLADDMVRNTARDLLYYAVTQDAMLIFENLSRGFGRQGKRTFMAERQYTRMEDWLTAKLAYEGLPSKTYLSKTLAQYTSKTCSNCGFTITSADYDRVLEKLKKTATGWMTTINGKELKVEGQITYYNRYKRQNVVKDLSVELDRLSEESVNNDISSWTKGRSGEALSLLKKRFSHRPVQEKFVCLNCGFETHADEQAALNIARSWLFLRSQEYKKYQTNKTTGNTDKRAFVETWQSFYRKKLKEVWKPAV

SEQ ID NO: 29352 - protein, 978 aa, synthetic construct
  REGION 1..978: note = engineered CasX variant
QEIKRINKIRRRLVKDSNTKKAGKTGPMKTLLVRVMTPDLRERLENLRKKPENIPQPISNTSRANLNKLLTDYTEMKKAILHVYWEEFQKDPVGLMSRVAQPASKKIDQNKLKPEMDEKGNLTTAGFACSQCGQPLFVYKLEQVSEKGKAYTNYFGRCNVAEHEKLIKLAQLKPEKDSDEAVTYSLGKFGQRALDFYSIHVTKESTHPVKPLAQIAGNRYASGPVGKALSDACMGTIASFLSKYQDIIIEHQKVVKGNQKRLESLRELAGKENLEYPSVTLPPQPHTKEGVDAYNEVIARVRMWVNLNLWQKLKLSRDDAKPLLRLKGFPSFPLVERQANEVDWWDMVCNVKKLINEKKEDGKVFWQNLAGYKRQEALRPYLSSEEDREKGKKFARYQLGDLLLHLEKKHGEDWGKVYDEAWERIDKKVEGLSKHIKLEEERRSEDAQSKAALTDWLRAKASFVIEGLKEADKDEFCRCELKLQKWYGDLRGKPFAIEAENSILDISGFSKQYNCAFIWQKDGVKKLNLYLIINYFKGGKLRFKKIKPEAFEANRFYTVINKKSGEIVPMEVNFNFDDPNLIILPLAFGKRQGREFIWNDLLSLETGSLKLANGRVIEKTLYNRRTRQDEPALFVALTFERREVLDSSNIKPMNLIGVDRGENIPAVIALTDPEGCPLSRFKDSLGNPTHILRIGESYKEKQRTIQAKKEVEQRRAGGYSRKYASKAKNLADDMVRNTARDLLYYAVTQDAMLIFENLSRGFGRQGKRTFMAERQYTRMEDWLTAKLAYEGLPSKTYLSKTLAQYTSKTCSNCGFTITSADYDRVLEKLKKTATGWMTTINGKELKVEGQITYYNRYKRQNVVKDLSVELDRLSEESVNNDISSWTKGRSGEALSLLKKRFSHRPVQEKFVCLNCGFETHADEQAALNIARSWLFLRSQEYKKYQTNKTTGNTDKRAFVETWQSFYRKKLKEVWKPAV

SEQ ID NO: 29353 - protein, 978 aa, synthetic construct
  REGION 1..978: note = engineered CasX variant
QEIKRINKIRRRLVKDSNTKKAGKTGPMKTLLVRVMTPDLRERLENLRKKPENIPQPISNTSRANLNKLLTDYTEMKKAILHVYWEEFQKDPVGLMSRVAQPASKKIDQNKLKPEMDEKGNLTTAGFACSQCGQPLFVYKLEQVSEKGKAYTNYFGRCNVAEHEKLIKLAQLKPEKDSDEAVTYSLGKFGQRALDFYSIHVTKESTHPVKPLAQIAGNRYASGPVGKALSDACMGTIASFLSKYQDIIIEHQKVVKGNQKRLESLRELAGKENLEYPSVTLPPQPHTKEGVDAYNEVIARVRMWVNLNLWQKLKLSRDDAKPLLRLKGFPSFPLVERQANEVDWWDMVCNVKKLINEKKEDGKVFWQNLAGYKRQEALRPYLSSEEDRKKGKKFARYQLGDLLLHLEKKHGEDWGKVYDEAWERIDKKVEGLSKHIKLEEERRSEDAQSKAALTDWLRAKASFVIEGLKEADKDEFCRCELKLQKWYGDLRGKPFAIEAENSILDISGFSKQYNCAFIWQKDGVKKLNLYLIINYFKGGKLRFKKIKPEAFEANRFYTVINKKSGEIVIMEVNFNFDDPNLIILPLAFGKRQGREFIWNDLLSLETGSLKLANGRVIEKTLYNRRTRQDEPALFVALTFERREVLDSSNIKPMNLIGVDRGENIPAVIALTDPEGCPLSRFKDSLGNPTHILRIGESYKEKQRTIQAKKEVEQRRAGGYSRKYASKAKNLADDMVRNTARDLLYYAVTQDAMLIFENLSRGFGRQGKRTFMAERQYTRMEDWLTAKLAYEGLPSKTYLSKTLAQYTSKTCSNCGFTITSADYDRVLEKLKKTATGWMTTINGKELKVEGQITYYNRYKRQNVVKDLSVELDRLSEESVNNDISSWTKGRSGEALSLLKKRFSHRPVQEKFVCLNCGFETHADEQAALNIARSWLFLRSQEYKKYQTNKTTGNTDKRAFVETWQSFYRKKLKEVWKPAV

SEQ ID NO: 29354 - protein, 978 aa, synthetic construct
  REGION 1..978: note = engineered CasX variant
QEIKRINKIRRRLVKDSNTKKAGKTGPMKTLLVRVMTPDLRERLENLRKKPENIPQPISNTSRANLNKLLTDYTEMKKAILHVYWEEFQKDPVGLMSRVAQPASKKIDQNKLKPEMDEKGNLTTAGFACSQCGQPLFVYKLEQVSEKGKAYTNYFGRCNVAEHEKLILLYQLKPEKDSDEAVTYSLGKFGQRALDFYSIHVTKESTHPVKPLAQIAGNRYASGPVGKALSGACMGTIASFLSKYQDIIIEHQKVVKGNQKRLESLRELAGKENLEYPSVTLPPQPHTKEGVDAYNEVIARVRMWVNLNLWQKLKLSRDDAKPLLRLKGFPSFPLVERQANEVDWWDMVCNVKKLINEKKEDGKVFWQNLAGYKRQEALRPYLSSEEDRKKGKKFARYQLGDLLLHLEKKHGEDWGKVYDEAWERIDKKVEGLSKHIKLEEERRSEDAQSKAALTDWLRAKASFVIEGLKEADKDEFCRCELKLQKWYGDLRGKPFAIEAENSILDISGFSKQYNCAFIWQKDGVKKLNLYLIINYFKGGKLRFKKIKPEAFEANRFYTVINKKSGEIVPMEVNFNFDDPNLIILPLAFGKRQGREFIWNDLLSLETGSLKLANGRVIEKTLYNRRTRQDEPALFVALTFERREVLDSSNIKPMNLIGVDRGENIPAVIALTDPEGCPLSRFKDSLGNPTHILRIGESYKEKQRTIQAKKEVEQRRAGGYSRKYASKAKNLADDMVRNTARDLLYYAVTQDAMLIFENLSRGFGRQGKRTFMAERQYTRMEDWLTAKLAYEGLPSKTYLSKTLAQYTSKTCSNCGFTITSADYDRVLEKLKKTATGWMTTINGKELKVEGQITYYNRYKRQNVVKDLSVELDRLSEESVNNDISSWTKGRSGEALSLLKKRFSHRPVQEKFVCLNCGFETHADEQAALNIARSWLFLRSQEYKKYQTNKTTGNTDKRAFVETWQSFYRKKLKEVWKPAV

SEQ ID NO: 29355 - protein, 978 aa, synthetic construct
  REGION 1..978: note = engineered CasX variant
QEIKRINKIRRRLVKDSNTKKAGKTGPMKTLLVRVMTPDLRERLENLRKKPENIPQPISNTSRANLNKLLTDYTEMKKAILHVYWEEFQKDPVGLMSRVAQPASKKIDQNKLKPEMDEKGNLTTAGFACSQCGQPLFVYKLEQVSEKGKAYTNYFGRCNVAEHEKLILLYQLKPEKDSDEAVTYSLGKFGQRALDFYSIHVTKESTHPVKPLAQIAGNRYASGPVGKALSDACMGTIASFLSKYQDIIIEHQKVVKGNQKRLESLRELAGKENLEYPSVTLPPQPHTKEGVDAYNEVIARVRMWVNLNLWQKLKLSRDDAKPLLRLKNFPSFPLVERQANEVDWWDMVCNVKKLINEKKEDGKVFWQNLAGYKRQEALRPYLSSEEDRKKGKKFARYQLGDLLLHLEKKHGEDWGKVYDEAWERIDKKVEGLSKHIKLEEERRSEDAQSKAALTDWLRAKASFVIEGLKEADKDEFCRCELKLQKWYGDLRGKPFAIEAENSILDISGFSKQYNCAFIWQKDGVKKLNLYLIINYFKGGKLRFKKIKPEAFEANRFYTVINKKSGEIVPMEVNFNFDDPNLIILPLAFGKRQGREFIWNDLLSLETGSLKLANGRVIEKTLYNRRTRQDEPALFVALTFERREVLDSSNIKPMNLIGVDRGENIPAVIALTDPEGCPLSRFKDSLGNPTHILRIGESYKEKQRTIQAKKEVEQRRAGGYSRKYASKAKNLADDMVRNTARDLLYYAVTQDAMLIFENLSRGFGRQGKRTFMAERQYTRMEDWLTAKLAYEGLPSKTYLSKTLAQYTSKTCSNCGFTITSADYDRVLEKLKKTATGWMTTINGKELKVEGQITYYNRYKRQNVVKDLSVELDRLSEESVNNDISSWTKGRSGEALSLLKKRFSHRPVQEKFVCLNCGFETHADEQAALNIARSWLFLRSQEYKKYQTNKTTGNTDKRAFVETWQSFYRKKLKEVWKPAV

SEQ ID NO: 29356 - protein, 978 aa, synthetic construct
  REGION 1..978: note = engineered CasX variant
QEIKRINKIRRRLVKDSNTKKAGKTGPMKTLLVRVMTPDLRERLENLRKKPENIPQPISNTSRANLNKLLTDYTEMKKAILHVYWEEFQKDPVGLMSRVAQPASKKIDQNKLKPEMDEKGNLTTAGFACSQCGQPLFVYKLEQVSEKGKAYTNYFGRCNVAEHEKLILLYQLKPEKDSDEAVTYSLGKFGQRALDFYSIHVTKESTHPVKPLAQIAGNRYASGPVGKALSDACMGTIASFLSKYQDIIIEHQKVVKGNQKRLESLRELAGKENLEYPSVTLPPQPHTKEGVDAYNEVIARVRMWVNLNLWQKLKLSRDDAKPLLRLKGFPSFPLVERQANEVDWWDMVCNVKKLINEKKEDGKVFWQNLAGYKRQEALRPYLSSEEDRKKGKKFARYQLGDLLNHLEKKHGEDWGKVYDEAWERIDKKVEGLSKHIKLEEERRSEDAQSKAALTDWLRAKASFVIEGLKEADKDEFCRCELKLQKWYGDLRGKPFAIEAENSILDISGFSKQYNCAFIWQKDGVKKLNLYLIINYFKGGKLRFKKIKPEAFEANRFYTVINKKSGEIVPMEVNFNFDDPNLIILPLAFGKRQGREFIWNDLLSLETGSLKLANGRVIEKTLYNRRTRQDEPALFVALTFERREVLDSSNIKPMNLIGVDRGENIPAVIALTDPEGCPLSRFKDSLGNPTHILRIGESYKEKQRTIQAKKEVEQRRAGGYSRKYASKAKNLADDMVRNTARDLLYYAVTQDAMLIFENLSRGFGRQGKRTFMAERQYTRMEDWLTAKLAYEGLPSKTYLSKTLAQYTSKTCSNCGFTITSADYDRVLEKLKKTATGWMTTINGKELKVEGQITYYNRYKRQNVVKDLSVELDRLSEESVNNDISSWTKGRSGEALSLLKKRFSHRPVQEKFVCLNCGFETHADEQAALNIARSWLFLRSQEYKKYQTNKTTGNTDKRAFVETWQSFYRKKLKEVWKPAV

SEQ ID NO: 29357 - protein, 978 aa, synthetic construct
  REGION 1..978: note = engineered CasX variant
QEIKRINKIRRRLVKDSNTKKAGKTGPMKTLLVRVMTPDLRERLENLRKKPENIPQPISNTSRANLNKLLTDYTEMKKAILHVYWEEFQKDPVGLMSRVAQPASKKIDQNKLKPEMDEKGNLTTAGFACSQCGQPLFVYKLEQVSEKGKAYTNYFGRCNVAEHEKLILLYQLKPEKDSDEAVTYSLGKFGQRALDFYSIHVTKESTHPVKPLAQIAGNRYASGPVGKALSDACMGTIASFLSKYQDIIIEHQKVVKGNQKRLESLRELAGKENLEYPSVTLPPQPHTKEGVDAYNEVIARVRMWVNLNLWQKLKLSRDDAKPLLRLKGFPSFPLVERQANEVDWWDMVCNVKKLINEKKEDGKVFWQNLAGYKRQEALRPYLSSEEDRKKGKKFARYQLGDLLWHLEKKHGEDWGKVYDEAWERIDKKVEGLSKHIKLEEERRSEDAQSKAALTDWLRAKASFVIEGLKEADKDEFCRCELKLQKWYGDLRGKPFAIEAENSILDISGFSKQYNCAFIWQKDGVKKLNLYLIINYFKGGKLRFKKIKPEAFEANRFYTVINKKSGEIVPMEVNFNFDDPNLIILPLAFGKRQGREFIWNDLLSLETGSLKLANGRVIEKTLYNRRTRQDEPALFVALTFERREVLDSSNIKPMNLIGVDRGENIPAVIALTDPEGCPLSRFKDSLGNPTHILRIGESYKEKQRTIQAKKEVEQRRAGGYSRKYASKAKNLADDMVRNTARDLLYYAVTQDAMLIFENLSRGFGRQGKRTFMAERQYTRMEDWLTAKLAYEGLPSKTYLSKTLAQYTSKTCSNCGFTITSADYDRVLEKLKKTATGWMTTINGKELKVEGQITYYNRYKRQNVVKDLSVELDRLSEESVNNDISSWTKGRSGEALSLLKKRFSHRPVQEKFVCLNCGFETHADEQAALNIARSWLFLRSQEYKKYQTNKTTGNTDKRAFVETWQSFYRKKLKEVWKPAV

SEQ ID NO: 29358 - protein, 978 aa, synthetic construct
  REGION 1..978: note = engineered CasX variant
QEIKRINKIRRRLVKDSNTKKAGKTGPMKTLLVRVMTPDLRERLENLRKKPENIPQPISNTSRANLNKLLTDYTEMKKAILHVYWEEFQKDPVGLMSRVAQPASKKIDQNKLKPEMDEKGNLTTAGFACSQCGQPLFVYKLEQVSEKGKAYTNYFGRCNVAEHEKLILLYQLKPEKDSDEAVTYSLGKFGQRALDFYSIHVTKESTHPVKPLAQIAGNRYASGPVGKALSDACMGTIASFLSKYQDIIIEHQKVVKGNQKRLESLRELAGKENLEYPSVTLPPQPHTKEGVDAYNEVIARVRMWVNLNLWQKLKLSRDDAKPLLRLKGFPSFPLVERQANEVDWWDMVCNVKKLINEKKEDGKVFWQNLAGYKRQEALRPYLSSEEDRKKGKKFARYQLGDLLLHLYKKHGEDWGKVYDEAWERIDKKVEGLSKHIKLEEERRSEDAQSKAALTDWLRAKASFVIEGLKEADKDEFCRCELKLQKWYGDLRGKPFAIEAENSILDISGFSKQYNCAFIWQKDGVKKLNLYLIINYFKGGKLRFKKIKPEAFEANRFYTVINKKSGEIVPMEVNFNFDDPNLIILPLAFGKRQGREFIWNDLLSLETGSLKLANGRVIEKTLYNRRTRQDEPALFVALTFERREVLDSSNIKPMNLIGVDRGENIPAVIALTDPEGCPLSRFKDSLGNPTHILRIGESYKEKQRTIQAKKEVEQRRAGGYSRKYASKAKNLADDMVRNTARDLLYYAVTQDAMLIFENLSRGFGRQGKRTFMAERQYTRMEDWLTAKLAYEGLPSKTYLSKTLAQYTSKTCSNCGFTITSADYDRVLEKLKKTATGWMTTINGKELKVEGQITYYNRYKRQNVVKDLSVELDRLSEESVNNDISSWTKGRSGEALSLLKKRFSHRPVQEKFVCLNCGFETHADEQAALNIARSWLFLRSQEYKKYQTNKTTGNTDKRAFVETWQSFYRKKLKEVWKPAV

SEQ ID NO: 29359 - protein, 978 aa, synthetic construct
  REGION 1..978: note = engineered CasX variant
QEIKRINKIRRRLVKDSNTKKAGKTGPMKTLLVRVMTPDLRERLENLRKKPENIPQPISNTSRANLNKLLTDYTEMKKAILHVYWEEFQKDPVGLMSRVAQPASKKIDQNKLKPEMDEKGNLTTAGFACSQCGQPLFVYKLEQVSEKGKAYTNYFGRCNVAEHEKLILLYQLKPEKDSDEAVTYSLGKFGQRALDFYSIHVTKESTHPVKPLAQIAGNRYASGPVGKALSDACMGTIASFLSKYQDIIIEHQKVVKGNQKRLESLRELAGKENLEYPSVTLPPQPHTKEGVDAYNEVIARVRMWVNLNLWQKLKLSRDDAKPLLRLKGFPSFPLVERQANEVDWWDMVCNVKKLINEKKEDGKVFWQNLAGYKRQEALRPYLSSEEDRKKGKKFARYQLGDLLLHLEKKHPEDWGKVYDEAWERIDKKVEGLSKHIKLEEERRSEDAQSKAALTDWLRAKASFVIEGLKEADKDEFCRCELKLQKWYGDLRGKPFAIEAENSILDISGFSKQYNCAFIWQKDGVKKLNLYLIINYFKGGKLRFKKIKPEAFEANRFYTVINKKSGEIVPMEVNFNFDDPNLIILPLAFGKRQGREFIWNDLLSLETGSLKLANGRVIEKTLYNRRTRQDEPALFVALTFERREVLDSSNIKPMNLIGVDRGENIPAVIALTDPEGCPLSRFKDSLGNPTHILRIGESYKEKQRTIQAKKEVEQRRAGGYSRKYASKAKNLADDMVRNTARDLLYYAVTQDAMLIFENLSRGFGRQGKRTFMAERQYTRMEDWLTAKLAYEGLPSKTYLSKTLAQYTSKTCSNCGFTITSADYDRVLEKLKKTATGWMTTINGKELKVEGQITYYNRYKRQNVVKDLSVELDRLSEESVNNDISSWTKGRSGEALSLLKKRFSHRPVQEKFVCLNCGFETHADEQAALNIARSWLFLRSQEYKKYQTNKTTGNTDKRAFVETWQSFYRKKLKEVWKPAV

SEQ ID NO: 29360 - protein, 979 aa, synthetic construct
  REGION 1..979: note = engineered CasX variant
QEIKRINKIRRRLVKDSNTKKAGKTGPMKTLLVRVMTPDLRERLENLRKKPENIPQPISNTSRANLNKLLTDYTEMKKAILHVYWEEFQKDPVGLMSRVAQPASKKIDQNKLKPEMDEKGNLTTAGFACSQCGQPLFVYKLEQVSEKGKAYTNYFGRCNVAEHEKLILLYQLKPEKDSDEAVTYSLGKFGQRALDFYSIHVTKESTHPVKPLAQIAGNRYASGPVGKALSDACMGTIASFLSKYQDIIIEHQKVVKGNQKRLESLRELAGKENLEYPSVTLPPQPHTKEGVDAYNEVIARVRMWVNLNLWQKLKLSRDDAKPLLRLKGFPSFPLVERQANEVDWWDMVCNVKKLINEKKEDGKVFWQNLAGYKRQEALRPYLSSEEDRKKGKKFARYQLGDLLLHLEKKHGERDWGKVYDEAWERIDKKVEGLSKHIKLEEERRSEDAQSKAALTDWLRAKASFVIEGLKEADKDEFCRCELKLQKWYGDLRGKPFAIEAENSILDISGFSKQYNCAFIWQKDGVKKLNLYLIINYFKGGKLRFKKIKPEAFEANRFYTVINKKSGEIVPMEVNFNFDDPNLIILPLAFGKRQGREFIWNDLLSLETGSLKLANGRVIEKTLYNRRTRQDEPALFVALTFERREVLDSSNIKPMNLIGVDRGENIPAVIALTDPEGCPLSRFKDSLGNPTHILRIGESYKEKQRTIQAKKEVEQRRAGGYSRKYASKAKNLADDMVRNTARDLLYYAVTQDAMLIFENLSRGFGRQGKRTFMAERQYTRMEDWLTAKLAYEGLPSKTYLSKTLAQYTSKTCSNCGFTITSADYDRVLEKLKKTATGWMTTINGKELKVEGQITYYNRYKRQNVVKDLSVELDRLSEESVNNDISSWTKGRSGEALSLLKKRFSHRPVQEKFVCLNCGFETHADEQAALNIARSWLFLRSQEYKKYQTNKTTGNTDKRAFVETWQSFYRKKLKEVWKPAV

SEQ ID NO: 29361 - protein, 979 aa, synthetic construct
  REGION 1..979: note = engineered CasX variant
QEIKRINKIRRRLVKDSNTKKAGKTGPMKTLLVRVMTPDLRERLENLRKKPENIPQPISNTSRANLNKLLTDYTEMKKAILHVYWEEFQKDPVGLMSRVAQPASKKIDQNKLKPEMDEKGNLTTAGFACSQCGQPLFVYKLEQVSEKGKAYTNYFGRCNVAEHEKLILLYQLKPEKDSDEAVTYSLGKFGQRALDFYSIHVTKESTHPVKPLAQIAGNRYASGPVGKALSDACMGTIASFLSKYQDIIIEHQKVVKGNQKRLESLRELAGKENLEYPSVTLPPQPHTKEGVDAYNEVIARVRMWVNLNLWQKLKLSRDDAKPLLRLKGFPSFPLVERQANEVDWWDMVCNVKKLINEKKEDGKVFWQNLAGYKRQEALRPYLSSEEDRKKGKKFARYQLGDLLLHLEKKHGEYDWGKVYDEAWERIDKKVEGLSKHIKLEEERRSEDAQSKAALTDWLRAKASFVIEGLKEADKDEFCRCELKLQKWYGDLRGKPFAIEAENSILDISGFSKQYNCAFIWQKDGVKKLNLYLIINYFKGGKLRFKKIKPEAFEANRFYTVINKKSGEIVPMEVNFNFDDPNLIILPLAFGKRQGREFIWNDLLSLETGSLKLANGRVIEKTLYNRRTRQDEPALFVALTFERREVLDSSNIKPMNLIGVDRGENIPAVIALTDPEGCPLSRFKDSLGNPTHILRIGESYKEKQRTIQAKKEVEQRRAGGYSRKYASKAKNLADDMVRNTARDLLYYAVTQDAMLIFENLSRGFGRQGKRTFMAERQYTRMEDWLTAKLAYEGLPSKTYLSKTLAQYTSKTCSNCGFTITSADYDRVLEKLKKTATGWMTTINGKELKVEGQITYYNRYKRQNVVKDLSVELDRLSEESVNNDISSWTKGRSGEALSLLKKRFSHRPVQEKFVCLNCGFETHADEQAALNIARSWLFLRSQEYKKYQTNKTTGNTDKRAFVETWQSFYRKKLKEVWKPAV

SEQ ID NO: 29362 - protein, 978 aa, synthetic construct
  REGION 1..978: note = engineered CasX variant
QEIKRINKIRRRLVKDSNTKKAGKTGPMKTLLVRVMTPDLRERLENLRKKPENIPQPISNTSRANLNKLLTDYTEMKKAILHVYWEEFQKDPVGLMSRVAQPASKKIDQNKLKPEMDEKGNLTTAGFACSQCGQPLFVYKLEQVSEKGKAYTNYFGRCNVAEHEKLILLYQLKPEKDSDEAVTYSLGKFGQRALDFYSIHVTKESTHPVKPLAQIAGNRYASGPVGKALSDACMGTIASFLSKYQDIIIEHQKVVKGNQKRLESLRELAGKENLEYPSVTLPPQPHTKEGVDAYNEVIARVRMWVNLNLWQKLKLSRDDAKPLLRLKGFPSFPLVERQANEVDWWDMVCNVKKLINEKKEDGKVFWQNLAGYKRQEALRPYLSSEEDRKKGKKFARYQLGDLLLHLEKKHGEDWGDVYDEAWERIDKKVEGLSKHIKLEEERRSEDAQSKAALTDWLRAKASFVIEGLKEADKDEFCRCELKLQKWYGDLRGKPFAIEAENSILDISGFSKQYNCAFIWQKDGVKKLNLYLIINYFKGGKLRFKKIKPEAFEANRFYTVINKKSGEIVPMEVNFNFDDPNLIILPLAFGKRQGREFIWNDLLSLETGSLKLANGRVIEKTLYNRRTRQDEPALFVALTFERREVLDSSNIKPMNLIGVDRGENIPAVIALTDPEGCPLSRFKDSLGNPTHILRIGESYKEKQRTIQAKKEVEQRRAGGYSRKYASKAKNLADDMVRNTARDLLYYAVTQDAMLIFENLSRGFGRQGKRTFMAERQYTRMEDWLTAKLAYEGLPSKTYLSKTLAQYTSKTCSNCGFTITSADYDRVLEKLKKTATGWMTTINGKELKVEGQITYYNRYKRQNVVKDLSVELDRLSEESVNNDISSWTKGRSGEALSLLKKRFSHRPVQEKFVCLNCGFETHADEQAALNIARSWLFLRSQEYKKYQTNKTTGNTDKRAFVETWQSFYRKKLKEVWKPAV

SEQ ID NO: 29363 - protein, 978 aa, synthetic construct
  REGION 1..978: note = engineered CasX variant
QEIKRINKIRRRLVKDSNTKKAGKTGPMKTLLVRVMTPDLRERLENLRKKPENIPQPISNTSRANLNKLLTDYTEMKKAILHVYWEEFQKDPVGLMSRVAQPASKKIDQNKLKPEMDEKGNLTTAGFACSQCGQPLFVYKLEQVSEKGKAYTNYFGRCNVAEHEKLILLYQLKPEKDSDEAVTYSLGKFGQRALDFYSIHVTKESTHPVKPLAQIAGNRYASGPVGKALSDACMGTIASFLSKYQDIIIEHQKVVKGNQKRLESLRELAGKENLEYPSVTLPPQPHTKEGVDAYNEVIARVRMWVNLNLWQKLKLSRDDAKPLLRLKGFPSFPLVERQANEVDWWDMVCNVKKLINEKKEDGKVFWQNLAGYKRQEALRPYLSSEEDRKKGKKFARYQLGDLLLHLEKKHGEDWGKVYGEAWERIDKKVEGLSKHIKLEEERRSEDAQSKAALTDWLRAKASFVIEGLKEADKDEFCRCELKLQKWYGDLRGKPFAIEAENSILDISGFSKQYNCAFIWQKDGVKKLNLYLIINYFKGGKLRFKKIKPEAFEANRFYTVINKKSGEIVPMEVNFNFDDPNLIILPLAFGKRQGREFIWNDLLSLETGSLKLANGRVIEKTLYNRRTRQDEPALFVALTFERREVLDSSNIKPMNLIGVDRGENIPAVIALTDPEGCPLSRFKDSLGNPTHILRIGESYKEKQRTIQAKKEVEQRRAGGYSRKYASKAKNLADDMVRNTARDLLYYAVTQDAMLIFENLSRGFGRQGKRTFMAERQYTRMEDWLTAKLAYEGLPSKTYLSKTLAQYTSKTCSNCGFTITSADYDRVLEKLKKTATGWMTTINGKELKVEGQITYYNRYKRQNVVKDLSVELDRLSEESVNNDISSWTKGRSGEALSLLKKRFSHRPVQEKFVCLNCGFETHADEQAALNIARSWLFLRSQEYKKYQTNKTTGNTDKRAFVETWQSFYRKKLKEVWKPAV

SEQ ID NO: 29364 - protein, 978 aa, synthetic construct
  REGION 1..978: note = engineered CasX variant
QEIKRINKIRRRLVKDSNTKKAGKTGPMKTLLVRVMTPDLRERLENLRKKPENIPQPISNTSRANLNKLLTDYTEMKKAILHVYWEEFQKDPVGLMSRVAQPASKKIDQNKLKPEMDEKGNLTTAGFACSQCGQPLFVYKLEQVSEKGKAYTNYFGRCNVAEHEKLILLYQLKPEKDSDEAVTYSLGKFGQRALDFYSIHVTKESTHPVKPLAQIAGNRYASGPVGKALSDACMGTIASFLSKYQDIIIEHQKVVKGNQKRLESLRELAGKENLEYPSVTLPPQPHTKEGVDAYNEVIARVRMWVNLNLWQKLKLSRDDAKPLLRLKGFPSFPLVERQANEVDWWDMVCNVKKLINEKKEDGKVFWQNLAGYKRQEALRPYLSSEEDRKKGKKFARYQLGDLLLHLEKKHGEDWGKVYDEAWERIDKKVEGLSKHIKLEEERRSEDAQSKAALTDWLRAKASFVIEGKKEADKDEFCRCELKLQKWYGDLRGKPFAIEAENSILDISGFSKQYNCAFIWQKDGVKKLNLYLIINYFKGGKLRFKKIKPEAFEANRFYTVINKKSGEIVPMEVNFNFDDPNLIILPLAFGKRQGREFIWNDLLSLETGSLKLANGRVIEKTLYNRRTRQDEPALFVALTFERREVLDSSNIKPMNLIGVDRGENIPAVIALTDPEGCPLSRFKDSLGNPTHILRIGESYKEKQRTIQAKKEVEQRRAGGYSRKYASKAKNLADDMVRNTARDLLYYAVTQDAMLIFENLSRGFGRQGKRTFMAERQYTRMEDWLTAKLAYEGLPSKTYLSKTLAQYTSKTCSNCGFTITSADYDRVLEKLKKTATGWMTTINGKELKVEGQITYYNRYKRQNVVKDLSVELDRLSEESVNNDISSWTKGRSGEALSLLKKRFSHRPVQEKFVCLNCGFETHADEQAALNIARSWLFLRSQEYKKYQTNKTTGNTDKRAFVETWQSFYRKKLKEVWKPAV

SEQ ID NO: 29365 - protein, 978 aa, synthetic construct
  REGION 1..978: note = engineered CasX variant
QEIKRINKIRRRLVKDSNTKKAGKTGPMKTLLVRVMTPDLRERLENLRKKPENIPQPISNTSRANLNKLLTDYTEMKKAILHVYWEEFQKDPVGLMSRVAQPASKKIDQNKLKPEMDEKGNLTTAGFACSQCGQPLFVYKLEQVSEKGKAYTNYFGRCNVAEHEKLILLYQLKPEKDSDEAVTYSLGKFGQRALDFYSIHVTKESTHPVKPLAQIAGNRYASGPVGKALSDACMGTIASFLSKYQDIIIEHQKVVKGNQKRLESLRELAGKENLEYPSVTLPPQPHTKEGVDAYNEVIARVRMWVNLNLWQKLKLSRDDAKPLLRLKGFPSFPLVERQANEVDWWDMVCNVKKLINEKKEDGKVFWQNLAGYKRQEALRPYLSSEEDRKKGKKFARYQLGDLLLHLEKKHGEDWGKVYDEAWERIDKKVEGLSKHIKLEEERRSEDAQSKAALTDWLRAKASFVIEGSKEADKDEFCRCELKLQKWYGDLRGKPFAIEAENSILDISGFSKQYNCAFIWQKDGVKKLNLYLIINYFKGGKLRFKKIKPEAFEANRFYTVINKKSGEIVPMEVNFNFDDPNLIILPLAFGKRQGREFIWNDLLSLETGSLKLANGRVIEKTLYNRRTRQDEPALFVALTFERREVLDSSNIKPMNLIGVDRGENIPAVIALTDPEGCPLSRFKDSLGNPTHILRIGESYKEKQRTIQAKKEVEQRRAGGYSRKYASKAKNLADDMVRNTARDLLYYAVTQDAMLIFENLSRGFGRQGKRTFMAERQYTRMEDWLTAKLAYEGLPSKTYLSKTLAQYTSKTCSNCGFTITSADYDRVLEKLKKTATGWMTTINGKELKVEGQITYYNRYKRQNVVKDLSVELDRLSEESVNNDISSWTKGRSGEALSLLKKRFSHRPVQEKFVCLNCGFETHADEQAALNIARSWLFLRSQEYKKYQTNKTTGNTDKRAFVETWQSFYRKKLKEVWKPAV

SEQ ID NO: 29366 - protein, 979 aa, synthetic construct
  REGION 1..979: note = engineered CasX variant
QEIKRINKIRRRLVKDSNTKKAGKTGPMKTLLVRVMTPDLRERLENLRKKPENIPQPISNTSRANLNKLLTDYTEMKKAILHVYWEEFQKDPVGLMSRVAQPASKKIDQNKLKPEMDEKGNLTTAGFACSQCGQPLFVYKLEQVSEKGKAYTNYFGRCNVAEHEKLILLYQLKPEKDSDEAVTYSLGKFGQRALDFYSIHVTKESTHPVKPLAQIAGNRYASGPVGKALSDACMGTIASFLSKYQDIIIEHQKVVKGNQKRLESLRELAGKENLEYPSVTLPPQPHTKEGVDAYNEVIARVRMWVNLNLWQKLKLSRDDAKPLLRLKGFPSFPLVERQANEVDWWDMVCNVKKLINEKKEDGKVFWQNLAGYKRQEALRPYLSSEEDRKKGKKFARYQLGDLLLHLEKKHGEDWGKVYDEAWERIDKKVEGLSKHIKLEEERRSEDAQSKAALTDWLRAKASFVIEGLKEADDKDEFCRCELKLQKWYGDLRGKPFAIEAENSILDISGFSKQYNCAFIWQKDGVKKLNLYLIINYFKGGKLRFKKIKPEAFEANRFYTVINKKSGEIVPMEVNFNFDDPNLIILPLAFGKRQGREFIWNDLLSLETGSLKLANGRVIEKTLYNRRTRQDEPALFVALTFERREVLDSSNIKPMNLIGVDRGENIPAVIALTDPEGCPLSRFKDSLGNPTHILRIGESYKEKQRTIQAKKEVEQRRAGGYSRKYASKAKNLADDMVRNTARDLLYYAVTQDAMLIFENLSRGFGRQGKRTFMAERQYTRMEDWLTAKLAYEGLPSKTYLSKTLAQYTSKTCSNCGFTITSADYDRVLEKLKKTATGWMTTINGKELKVEGQITYYNRYKRQNVVKDLSVELDRLSEESVNNDISSWTKGRSGEALSLLKKRFSHRPVQEKFVCLNCGFETHADEQAALNIARSWLFLRSQEYKKYQTNKTTGNTDKRAFVETWQSFYRKKLKEVWKPAV

SEQ ID NO: 29367 - protein, 979 aa, synthetic construct
  REGION 1..979: note = engineered CasX variant
QEIKRINKIRRRLVKDSNTKKAGKTGPMKTLLVRVMTPDLRERLENLRKKPENIPQPISNTSRANLNKLLTDYTEMKKAILHVYWEEFQKDPVGLMSRVAQPASKKIDQNKLKPEMDEKGNLTTAGFACSQCGQPLFVYKLEQVSEKGKAYTNYFGRCNVAEHEKLILLYQLKPEKDSDEAVTYSLGKFGQRALDFYSIHVTKESTHPVKPLAQIAGNRYASGPVGKALSDACMGTIASFLSKYQDIIIEHQKVVKGNQKRLESLRELAGKENLEYPSVTLPPQPHTKEGVDAYNEVIARVRMWVNLNLWQKLKLSRDDAKPLLRLKGFPSFPLVERQANEVDWWDMVCNVKKLINEKKEDGKVFWQNLAGYKRQEALRPYLSSEEDRKKGKKFARYQLGDLLLHLEKKHGEDWGKVYDEAWERIDKKVEGLSKHIKLEEERRSEDAQSKAALTDWLRAKASFVIEGLKEADKDEFCRCELKLQKWYGDLRGKPFAIEAENSILDISGFSKQYNCAFIWQKDGVKKLNLYLIINYFKGGKLRFKKIKPEAFEANRFYTVINKKSGEIVPMEVNFNFDDPNLIILPLAFGKRQGREFIWNDLLSLETGSLKLANGRVIEKTLYNRRTRQDEPALFVALTFERREVLDSSNIKPMNLIGVDRGENIPAVIALTDPEGCPLSRFKDSLGNPTHILRIGESYKEKQRTIQAKKEVEQRRAGGYSRKYASKAKNLADDMVRNTARDLLYYAVTQDAMLIFENLSRGFGRQGKRTFMAERQYTRMEDWLTAKLAYEGLPSKTYLSKTLAQYTSKTCSNCGFTITSADYDRVLEKLKKTATGWMTTINGKELKVEGQITYYNRYKRQNVVKDLSVELDRLSEESVNNDISSWTKGRSGNEALSLLKKRFSHRPVQEKFVCLNCGFETHADEQAALNIARSWLFLRSQEYKKYQTNKTTGNTDKRAFVETWQSFYRKKLKEVWKPAV

SEQ ID NO: 29368 - protein, 978 aa, synthetic construct
  REGION 1..978: note = engineered CasX variant
QEIKRINKIRRRLVKDSNTKKAGKTGPMKTLLVRVMTPDLRERLENLRKKPENIPQPISNTSRANLNKLLTDYTEMKKAILHVYWEEFQKDPVGLMSRVAQPASKKIDQNKLKPEMDEKGNLTTAGFACSQCGQPLFVYKLEQVSEKGKAYTNYFGRCNVAEHEKLILLYQLKPEKDSDEAVTYSLGKFGQRALDFYSIHVTKESTHPVKPLAQIAGNRYASGPVGKALSDACMGTIASFLSKYQDIIIEHQKVVKGNQKRLESLRELAGKENLEYPSVTLPPQPHTKEGVDAYNEVIARVRMWVNLNLWQKLKLSRDDAKPLLRLKGFPSFPLVERQANEVDWWDMVCNVKKLINEKKEDGKVFWQNLAGYKRQEALRPYLSSEEDRQKGKKFARYQLGDLLLHLEKKHGEDWGKVYDEAWERIDKKVEGLSKHIKLEEERRSEDAQSKAALTDWLRAKASFVIEGLKEADKDEFCRCELKLQKWYGDLRGKPFAIEAENSILDISGFSKQYNCAFIWQKDGVKKLNLYLIINYFKGGKLRFKKIKPEAFEANRFYTVINKKSGEIVPMEVNFNFDDPNLIILPLAFGKRQGREFIWNDLLSLETGSLKLANGRVIEKTLYNRRTRQDEPALFVALTFERREVLDSSNIKPMNLIGVDRGENIPAVIALTDPEGCPLSRFKDSLGNPTHILRIGESYKEKQRTIQAKKEVEQRRAGGYSRKYASKAKNLADDMVRNTARDLLYYAVTQDAMLIFENLSRGFGRQGKRTFMAERQYTRMEDWLTAKLAYEGLPSKTYLSKTLAQYTSKTCSNCGFTITSADYDRVLEKLKKTATGWMTTINGKELKVEGQITYYNRYKRQNVVKDLSVELDRLSEESVNNDISSWTKGRSGEALSLLKKRFSHRPVQEKFVCLNCGFETHADEQAALNIARSWLFLRSQEYKKYQTNKTTGNTDKRAFVETWQSFYRKKLKEVWKPAV

SEQ ID NO: 29369 - protein, 978 aa, synthetic construct
  REGION 1..978: note = engineered CasX variant
QEIKRINKIRRRLVKDSNTKKAGKTGPMKTLLVRVMTPDLRERLENLRKKPENIPQPISNTSRANLNKLLTDYTEMKKAILHVYWEEFQKDPVGLMSRVAQPASKKIDQNKLKPEMDEKGNLTTAGFACSQCGQPLFVYKLEQVSEKGKAYTNYFGRCNVAEHEKLILLYQLKPEKDSDEAVTYSLGKFGQRALDFYSIHVTKESTHPVKPLAQIAGNRYASGPVGKALSDACMGTIASFLSKYQDIIIEHQKVVKGNQKRLESLRELAGKENLEYPSVTLPPQPHTKEGVDAYNEVIARVRMWVNLNLWQKLKLSRDDAKPLLRLKGFPSFPLVERQANEVDWWDMVCNVKKLINEKKEDGKVFWQNLAGYKRQEALRPYLSSEEDRKKGKKFARYQLGDLLLHLEKKHGEDWGKVYDEAWERIDKKVEGLSKHIKLEEERRSEDAQSKAALTDWLRAKASFVIEGLKEADKDEFCRCELKLQKWYGDLRGKPFAIEAENSILDISGFSKQYNCAFIWQKDGVKKLNLYLIINYFKGGKLRFKKIKPEAFEANRFYTVINKKSGEIVPMEVNFNFDDPNLIILPLAFGKRQGREFIWNDLLSLETGSLKLANGRVIEKTLYNRRTRQDEPALFVALTFERREVLDSSNIKPMNLIGVDRGENIPAVIALTDPEGCPLSRFKDSLGNPTHILRIGESYKEKQRTIQAKKEVEQRRAGGYSRKYASKAKNLADDMVRNTARDLLYYAVTQDAMLIFENLSRGFGRQGKRTFMAERQYTRMEDWLTAKLAYEGLPSQTYLSKTLAQYTSKTCSNCGFTITSADYDRVLEKLKKTATGWMTTINGKELKVEGQITYYNRYKRQNVVKDLSVELDRLSEESVNNDISSWTKGRSGEALSLLKKRFSHRPVQEKFVCLNCGFETHADEQAALNIARSWLFLRSQEYKKYQTNKTTGNTDKRAFVETWQSFYRKKLKEVWKPAV

SEQ ID NO: 29370 - protein, 978 aa, synthetic construct
  REGION 1..978: note = engineered CasX variant
QEIKRINKIRRRLVKDSNTKKAGKTGPMKTLLVRVMTPDLRERLENLRKKPENIPQPISNTSRANLNKLLTDYTEMKKAILHVYWEEFQKDPVGLMSRVAQPASKKIDQNKLKPEMDEKGNLTTAGFACSQCGQPLFVYKLEQVSEKGKAYTNYFGRCNVAEHEKLILLYQLKPEKDSDEAVTYSLGKFGQRALDFYSIHVTKESTHPVKPLAQIAGNRYASGPVGKALSDACMGTIASFLSKYQDIIIEHQKVVKGNQKRLESLRELAGKENLEYPSVTLPPQPHTKEGVDAYNEVIARVRMWVNLNLWQKLKLSRDDAKPLLRLKGFPSFPLVERQANEVDWWDMVCNVKKLINEKKEDGKVFWQNLAGYKRQEALRPYLSSEEDRKKGKKFARYQLGDLLLHLEKKHGEDWGKVYDEAWERIDKKVEGLSKHIKLEEERRSEDAQSKAALTDWLRAKASFVIEGLKEADKDEFCRCELKLQKWYGDLRGKPFAIEAENSILDISGFSKQYNCAFIWQKDGVKKLNLYLIINYFKGGKLRFKKIKPEAFEANRFYTVINKKSGEIVPMEVNFNFDDPNLIILPLAFGKRQGREFIWNDLLSLETGSLKLANGRVIEKTLYNRRTRQDEPALFVALTFERREVLDSSNIKPMNLIGVDRGENIPAVIALTDPEGCPLSRFKDSLGNPTHILRIGESYKEKQRTIQAKKEVEQRRAGGYSRKYASKAKNLADDMVRNTARDLLYYAVTQDAMLIFENLSRGFGRQGKRTFMAERQYTRMEDWLTAKLAYNGLPSKTYLSKTLAQYTSKTCSNCGFTITSADYDRVLEKLKKTATGWMTTINGKELKVEGQITYYNRYKRQNVVKDLSVELDRLSEESVNNDISSWTKGRSGEALSLLKKRFSHRPVQEKFVCLNCGFETHADEQAALNIARSWLFLRSQEYKKYQTNKTTGNTDKRAFVETWQSFYRKKLKEVWKPAV

SEQ ID NO: 29371 - protein, 978 aa, synthetic construct
  REGION 1..978: note = engineered CasX variant
QEIKRINKIRRRLVKDSNTKKAGKTGPMKTLLVRVMTPDLRERLENLRKKPENIPQPISNTSRANLNKLLTDYTEMKKAILHVYWEEFQKDPVGLMSRVAQPASKKIDQNKLKPEMDEKGNLTTAGFACSQCGQPLFVYKLEQVSEKGKAYTNYFGRCNVAEHEKLIQLYQLKPEKDSDEAVTYSLGKFGQRALDFYSIHVTKESTHPVKPLAQIAGNRYASGPVGKALSDACMGTIASFLSKYQDIIIEHQKVVKGNQKRLESLRELAGKENLEYPSVTLPPQPHTKEGVDAYNEVIARVRMWVNLNLWQKLKLSRDDAKPLLRLKGFPSFPLVERQANEVDWWDMVCNVKKLINEKKEDGKVFWQNLAGYKRQEALRPYLSSEEDRKKGKKFARYQLGDLLLHLEKKHGEDWGKVYDEAWERIDKKVEGLSKHIKLEEERRSEDAQSKAALTDWLRAKASFVIEGLKEADKDEFCRCELKLQKWYGDLRGKPFAIEAENSILDISGFSKQYNCAFIWQKDGVKKLNLYLIINYFKGGKLRFKKIKPEAFEANRFYTVINKKSGEIVPMEVNFNFDDPNLIILPLAFGKRQGREFIWNDLLSLETGSLKLANGRVIEKTLYNRRTRQDEPALFVALTFERREVLDSSNIKPMNLIGVDRGENIPAVIALTDPEGCPLSRFKDSLGNPTHILRIGESYKEKQRTIQAKKEVEQRRAGGYSRKYASKAKNLADDMVRNTARDLLYYAVTQDAMLIFENLSRGFGRQGKRTFMAERQYTRMEDWLTAKLAYEGLPSKTYLSKTLAQYTSKTCSNCGFTITSADYDRVLEKLKKTATGWMTTINGKELKVEGQITYYNRYKRQNVVKDLSVELDRLSEESVNNDISSWTKGRSGEALSLLKKRFSHRPVQEKFVCLNCGFETHADEQAALNIARSWLFLRSQEYKKYQTNKTTGNTDKRAFVETWQSFYRKKLKEVWKPAV

SEQ ID NO: 29372 - protein, 978 aa, synthetic construct
  REGION 1..978: note = engineered CasX variant
QEIKRINKIRRRLVKDSNTKKAGKTGPMKTLLVRVMTPDLRERLENLRKKPENIPQPISNTSRANLNKLLTDYTEMKKAILHVYWEEFQKDPVGLMSRVAQPASKKIDQNKLKPEMDEKGNLTTAGFACSQCGQPLFVYKLEQVSEKGKAYTNYFGRCNVAEHEKLILLYQLKPEKDSDEAVTYSLGKFGQRALDFYSIHVTKESTHPVKPLAQIAGNRYASGPVGKALSDACMGTIASFLSKYQDIIIEHQKVVKGNQKRLESLRELAGKENLEYPSVTLPPQPHTKEGVDAYNEVIARVRMWVNLNLWQKLKLSRDDAKPLLRLKGFPSFPLVERQANEVDWWDMVCNVKKLINEKKEDGKVFWQNLAIYKRQEALRPYLSSEEDRKKGKKFARYQLGDLLLHLEKKHGEDWGKVYDEAWERIDKKVEGLSKHIKLEEERRSEDAQSKAALTDWLRAKASFVIEGLKEADKDEFCRCELKLQKWYGDLRGKPFAIEAENSILDISGFSKQYNCAFIWQKDGVKKLNLYLIINYFKGGKLRFKKIKPEAFEANRFYTVINKKSGEIVPMEVNFNFDDPNLIILPLAFGKRQGREFIWNDLLSLETGSLKLANGRVIEKTLYNRRTRQDEPALFVALTFERREVLDSSNIKPMNLIGVDRGENIPAVIALTDPEGCPLSRFKDSLGNPTHILRIGESYKEKQRTIQAKKEVEQRRAGGYSRKYASKAKNLADDMVRNTARDLLYYAVTQDAMLIFENLSRGFGRQGKRTFMAERQYTRMEDWLTAKLAYEGLPSKTYLSKTLAQYTSKTCSNCGFTITSADYDRVLEKLKKTATGWMTTINGKELKVEGQITYYNRYKRQNVVKDLSVELDRLSEESVNNDISSWTKGRSGEALSLLKKRFSHRPVQEKFVCLNCGFETHADEQAALNIARSWLFLRSQEYKKYQTNKTTGNTDKRAFVETWQSFYRKKLKEVWKPAV

SEQ ID NO: 29373 - protein, 978 aa, synthetic construct
  REGION 1..978: note = engineered CasX variant
QEIKRINKIRRRLVKDSNTKKAGKTGPMKTLLVRVMTPDLRERLENLRKKPENIPQPISNTSRANLNKLLTDYTEMKKAILHVYWEEFQKDPVGLMSRVAQPASKKIDQNKLKPEMDEKGNLTTAGFACSQCGQPLFVYKLEQVSEKGKAYTNYFGRCNVAEHEKLILLYQLKPEKDSDEAVTYSLGKFGQRALDFYSIHVTKESTHPVKPLAQIAGNRYASGPVGKALSDACMGTIASFLSKYQDIIIEHQKVVKGNQKRLESLRELAGKENLEYPSVTLPPQPHTKEGVDAYNEVIARVRMWVNLNLWQKLKLSRDDAKPLLRLKGFPSFPLVERQANEVDWWDMVCNVKKLINEKKEDGKVFWQNLAGYKRQEALRPYLSSEEDREKGKKFARYQLGDLLLHLEKKHGEDWGKVYDEAWERIDKKVEGLSKHIKLEEERRSEDAQSKAALTDWLRAKASFVIEGLKEADKDEFCRCELKLQKWYGDLRGKPFAIEAENSILDISGFSKQYNCAFIWQKDGVKKLNLYLIINYFKGGKLRFKKIKPEAFEANRFYTVINKKSGEIVPMEVNFNFDDPNLIILPLAFGKRQGREFIWNDLLSLETGSLKLANGRVIEKTLYNRRTRQDEPALFVALTFERREVLDSSNIKPMNLIGVDRGENIPAVIALTDPEGCPLSRFKDSLGNPTHILRIGESYKEKQRTIQAKKEVEQRRAGGYSRKYASKAKNLADDMVRNTARDLLYYAVTQDAMLIFENLSRGFGRQGKRTFMAERQYTRMEDWLTAKLAYEGLPSKTYLSKTLAQYTSKTCSNCGFTITSADYDRVLEKLKKTATGWMTTINGKELKVEGQITYYNRYKRQNVVKDLSVELDRLSEESVNNDISSWTKGRSGEALSLLKKRFSHRPVQEKFVCLNCGFETHADEQAALNIARSWLFLRSQEYKKYQTNKTTGNTDKRAFVETWQSFYRKKLKEVWKPAV

SEQ ID NO: 29374 - protein, 978 aa, synthetic construct
  REGION 1..978: note = engineered CasX variant
QEIKRINKIRRRLVKDSNTKKAGKTGPMKTLLVRVMTPDLRERLENLRKKPENIPQPISNTSRANLNKLLTDYTEMKKAILHVYWEEFQKDPVGLMSRVAQPASKKIDQNKLKPEMDEKGNLTTAGFACSQCGQPLFVYKLEQVSEKGKAYTNYFGRCNVAEHEKLILLYQLKPEKDSDEAVTYSLGKFGQRALDFYSIHVTKESTHPVKPLAQIAGNRYASGPVGKALSDACMGTIASFLSKYQDIIIEHQKVVKGNQKRLESLRELAGKENLEYPSVTLPPQPHTKEGVDAYNEVIARVRMWVNLNLWQKLKLSRDDAKPLLRLKGFPSFPLVERQANEVDWWDMVCNVKKLINEKKEDGKVFWQNLAGYKRQEALRPYLSSEEDRKKGKKFARYQLGDLLLHLEKKHGEDWGKVYDEAWERIDKKVEGLSKHIKLEEERRSEDAQSKAALTDWLRAKASFVIEGLKEADKDEFCRCELKLQKWYGDLRGKPFAIEAENSILDISGFSKQYNCAFIWQKDGVKKLNLYLIINYFKGGKLRFKKIKPEAFEANRFYTVINKKSGEIVIMEVNFNFDDPNLIILPLAFGKRQGREFIWNDLLSLETGSLKLANGRVIEKTLYNRRTRQDEPALFVALTFERREVLDSSNIKPMNLIGVDRGENIPAVIALTDPEGCPLSRFKDSLGNPTHILRIGESYKEKQRTIQAKKEVEQRRAGGYSRKYASKAKNLADDMVRNTARDLLYYAVTQDAMLIFENLSRGFGRQGKRTFMAERQYTRMEDWLTAKLAYEGLPSKTYLSKTLAQYTSKTCSNCGFTITSADYDRVLEKLKKTATGWMTTINGKELKVEGQITYYNRYKRQNVVKDLSVELDRLSEESVNNDISSWTKGRSGEALSLLKKRFSHRPVQEKFVCLNCGFETHADEQAALNIARSWLFLRSQEYKKYQTNKTTGNTDKRAFVETWQSFYRKKLKEVWKPAV

SEQ ID NO: 29375 - protein, 978 aa, synthetic construct
  REGION 1..978: note = engineered CasX variant
QEIKRINKIRRRLVKDSNTKKAGKTGPMKTLLVRVMTPDLRERLENLRKKPENIPQPISNTSRANLNKLLTDYTEMKKAILHVYWEEFQKDPVGLMSRVAQPASKKIDQNKLKPEMDEKGNLTTAGFACSQCGQPLFVYKLEQVSEKGKAYTNYFGRCNVAEHEKLILLSQLKPEKDSDEAVTYSLGKFGQRALDFYSIHVTKESTHPVKPLAQIAGNRYASGPVGKALSGACMGTIASFLSKYQDIIIEHQKVVKGNQKRLESLRELAGKENLEYPSVTLPPQPHTKEGVDAYNEVIARVRMWVNLNLWQKLKLSRDDAKPLLRLKGFPSFPLVERQANEVDWWDMVCNVKKLINEKKEDGKVFWQNLAGYKRQEALRPYLSSEEDRKKGKKFARYQLGDLLLHLEKKHGEDWGKVYDEAWERIDKKVEGLSKHIKLEEERRSEDAQSKAALTDWLRAKASFVIEGLKEADKDEFCRCELKLQKWYGDLRGKPFAIEAENSILDISGFSKQYNCAFIWQKDGVKKLNLYLIINYFKGGKLRFKKIKPEAFEANRFYTVINKKSGEIVPMEVNFNFDDPNLIILPLAFGKRQGREFIWNDLLSLETGSLKLANGRVIEKTLYNRRTRQDEPALFVALTFERREVLDSSNIKPMNLIGVDRGENIPAVIALTDPEGCPLSRFKDSLGNPTHILRIGESYKEKQRTIQAKKEVEQRRAGGYSRKYASKAKNLADDMVRNTARDLLYYAVTQDAMLIFENLSRGFGRQGKRTFMAERQYTRMEDWLTAKLAYEGLPSKTYLSKTLAQYTSKTCSNCGFTITSADYDRVLEKLKKTATGWMTTINGKELKVEGQITYYNRYKRQNVVKDLSVELDRLSEESVNNDISSWTKGRSGEALSLLKKRFSHRPVQEKFVCLNCGFETHADEQAALNIARSWLFLRSQEYKKYQTNKTTGNTDKRAFVETWQSFYRKKLKEVWKPAV

SEQ ID NO: 29376 - protein, 978 aa, synthetic construct
  REGION 1..978: note = engineered CasX variant
QEIKRINKIRRRLVKDSNTKKAGKTGPMKTLLVRVMTPDLRERLENLRKKPENIPQPISNTSRANLNKLLTDYTEMKKAILHVYWEEFQKDPVGLMSRVAQPASKKIDQNKLKPEMDEKGNLTTAGFACSQCGQPLFVYKLEQVSEKGKAYTNYFGRCNVAEHEKLILLSQLKPEKDSDEAVTYSLGKFGQRALDFYSIHVTKESTHPVKPLAQIAGNRYASGPVGKALSDACMGTIASFLSKYQDIIIEHQKVVKGNQKRLESLRELAGKENLEYPSVTLPPQPHTKEGVDAYNEVIARVRMWVNLNLWQKLKLSRDDAKPLLRLKNFPSFPLVERQANEVDWWDMVCNVKKLINEKKEDGKVFWQNLAGYKRQEALRPYLSSEEDRKKGKKFARYQLGDLLLHLEKKHGEDWGKVYDEAWERIDKKVEGLSKHIKLEEERRSEDAQSKAALTDWLRAKASFVIEGLKEADKDEFCRCELKLQKWYGDLRGKPFAIEAENSILDISGFSKQYNCAFIWQKDGVKKLNLYLIINYFKGGKLRFKKIKPEAFEANRFYTVINKKSGEIVPMEVNFNFDDPNLIILPLAFGKRQGREFIWNDLLSLETGSLKLANGRVIEKTLYNRRTRQDEPALFVALTFERREVLDSSNIKPMNLIGVDRGENIPAVIALTDPEGCPLSRFKDSLGNPTHILRIGESYKEKQRTIQAKKEVEQRRAGGYSRKYASKAKNLADDMVRNTARDLLYYAVTQDAMLIFENLSRGFGRQGKRTFMAERQYTRMEDWLTAKLAYEGLPSKTYLSKTLAQYTSKTCSNCGFTITSADYDRVLEKLKKTATGWMTTINGKELKVEGQITYYNRYKRQNVVKDLSVELDRLSEESVNNDISSWTKGRSGEALSLLKKRFSHRPVQEKFVCLNCGFETHADEQAALNIARSWLFLRSQEYKKYQTNKTTGNTDKRAFVETWQSFYRKKLKEVWKPAV

SEQ ID NO: 29377 - protein, 978 aa, synthetic construct
  REGION 1..978: note = engineered CasX variant
QEIKRINKIRRRLVKDSNTKKAGKTGPMKTLLVRVMTPDLRERLENLRKKPENIPQPISNTSRANLNKLLTDYTEMKKAILHVYWEEFQKDPVGLMSRVAQPASKKIDQNKLKPEMDEKGNLTTAGFACSQCGQPLFVYKLEQVSEKGKAYTNYFGRCNVAEHEKLILLSQLKPEKDSDEAVTYSLGKFGQRALDFYSIHVTKESTHPVKPLAQIAGNRYASGPVGKALSDACMGTIASFLSKYQDIIIEHQKVVKGNQKRLESLRELAGKENLEYPSVTLPPQPHTKEGVDAYNEVIARVRMWVNLNLWQKLKLSRDDAKPLLRLKGFPSFPLVERQANEVDWWDMVCNVKKLINEKKEDGKVFWQNLAGYKRQEALRPYLSSEEDRKKGKKFARYQLGDLLNHLEKKHGEDWGKVYDEAWERIDKKVEGLSKHIKLEEERRSEDAQSKAALTDWLRAKASFVIEGLKEADKDEFCRCELKLQKWYGDLRGKPFAIEAENSILDISGFSKQYNCAFIWQKDGVKKLNLYLIINYFKGGKLRFKKIKPEAFEANRFYTVINKKSGEIVPMEVNFNFDDPNLIILPLAFGKRQGREFIWNDLLSLETGSLKLANGRVIEKTLYNRRTRQDEPALFVALTFERREVLDSSNIKPMNLIGVDRGENIPAVIALTDPEGCPLSRFKDSLGNPTHILRIGESYKEKQRTIQAKKEVEQRRAGGYSRKYASKAKNLADDMVRNTARDLLYYAVTQDAMLIFENLSRGFGRQGKRTFMAERQYTRMEDWLTAKLAYEGLPSKTYLSKTLAQYTSKTCSNCGFTITSADYDRVLEKLKKTATGWMTTINGKELKVEGQITYYNRYKRQNVVKDLSVELDRLSEESVNNDISSWTKGRSGEALSLLKKRFSHRPVQEKFVCLNCGFETHADEQAALNIARSWLFLRSQEYKKYQTNKTTGNTDKRAFVETWQSFYRKKLKEVWKPAV

SEQ ID NO: 29378 - protein, 978 aa, synthetic construct
  REGION 1..978: note = engineered CasX variant
QEIKRINKIRRRLVKDSNTKKAGKTGPMKTLLVRVMTPDLRERLENLRKKPENIPQPISNTSRANLNKLLTDYTEMKKAILHVYWEEFQKDPVGLMSRVAQPASKKIDQNKLKPEMDEKGNLTTAGFACSQCGQPLFVYKLEQVSEKGKAYTNYFGRCNVAEHEKLILLSQLKPEKDSDEAVTYSLGKFGQRALDFYSIHVTKESTHPVKPLAQIAGNRYASGPVGKALSDACMGTIASFLSKYQDIIIEHQKVVKGNQKRLESLRELAGKENLEYPSVTLPPQPHTKEGVDAYNEVIARVRMWVNLNLWQKLKLSRDDAKPLLRLKGFPSFPLVERQANEVDWWDMVCNVKKLINEKKEDGKVFWQNLAGYKRQEALRPYLSSEEDRKKGKKFARYQLGDLLWHLEKKHGEDWGKVYDEAWERIDKKVEGLSKHIKLEEERRSEDAQSKAALTDWLRAKASFVIEGLKEADKDEFCRCELKLQKWYGDLRGKPFAIEAENSILDISGFSKQYNCAFIWQKDGVKKLNLYLIINYFKGGKLRFKKIKPEAFEANRFYTVINKKSGEIVPMEVNFNFDDPNLIILPLAFGKRQGREFIWNDLLSLETGSLKLANGRVIEKTLYNRRTRQDEPALFVALTFERREVLDSSNIKPMNLIGVDRGENIPAVIALTDPEGCPLSRFKDSLGNPTHILRIGESYKEKQRTIQAKKEVEQRRAGGYSRKYASKAKNLADDMVRNTARDLLYYAVTQDAMLIFENLSRGFGRQGKRTFMAERQYTRMEDWLTAKLAYEGLPSKTYLSKTLAQYTSKTCSNCGFTITSADYDRVLEKLKKTATGWMTTINGKELKVEGQITYYNRYKRQNVVKDLSVELDRLSEESVNNDISSWTKGRSGEALSLLKKRFSHRPVQEKFVCLNCGFETHADEQAALNIARSWLFLRSQEYKKYQTNKTTGNTDKRAFVETWQSFYRKKLKEVWKPAV

SEQ ID NO: 29379 - protein, 978 aa, synthetic construct
  REGION 1..978: note = engineered CasX variant
QEIKRINKIRRRLVKDSNTKKAGKTGPMKTLLVRVMTPDLRERLENLRKKPENIPQPISNTSRANLNKLLTDYTEMKKAILHVYWEEFQKDPVGLMSRVAQPASKKIDQNKLKPEMDEKGNLTTAGFACSQCGQPLFVYKLEQVSEKGKAYTNYFGRCNVAEHEKLILLSQLKPEKDSDEAVTYSLGKFGQRALDFYSIHVTKESTHPVKPLAQIAGNRYASGPVGKALSDACMGTIASFLSKYQDIIIEHQKVVKGNQKRLESLRELAGKENLEYPSVTLPPQPHTKEGVDAYNEVIARVRMWVNLNLWQKLKLSRDDAKPLLRLKGFPSFPLVERQANEVDWWDMVCNVKKLINEKKEDGKVFWQNLAGYKRQEALRPYLSSEEDRKKGKKFARYQLGDLLLHLYKKHGEDWGKVYDEAWERIDKKVEGLSKHIKLEEERRSEDAQSKAALTDWLRAKASFVIEGLKEADKDEFCRCELKLQKWYGDLRGKPFAIEAENSILDISGFSKQYNCAFIWQKDGVKKLNLYLIINYFKGGKLRFKKIKPEAFEANRFYTVINKKSGEIVPMEVNFNFDDPNLIILPLAFGKRQGREFIWNDLLSLETGSLKLANGRVIEKTLYNRRTRQDEPALFVALTFERREVLDSSNIKPMNLIGVDRGENIPAVIALTDPEGCPLSRFKDSLGNPTHILRIGESYKEKQRTIQAKKEVEQRRAGGYSRKYASKAKNLADDMVRNTARDLLYYAVTQDAMLIFENLSRGFGRQGKRTFMAERQYTRMEDWLTAKLAYEGLPSKTYLSKTLAQYTSKTCSNCGFTITSADYDRVLEKLKKTATGWMTTINGKELKVEGQITYYNRYKRQNVVKDLSVELDRLSEESVNNDISSWTKGRSGEALSLLKKRFSHRPVQEKFVCLNCGFETHADEQAALNIARSWLFLRSQEYKKYQTNKTTGNTDKRAFVETWQSFYRKKLKEVWKPAV

SEQ ID NO: 29380 - protein, 978 aa, synthetic construct
  REGION 1..978: note = engineered CasX variant
QEIKRINKIRRRLVKDSNTKKAGKTGPMKTLLVRVMTPDLRERLENLRKKPENIPQPISNTSRANLNKLLTDYTEMKKAILHVYWEEFQKDPVGLMSRVAQPASKKIDQNKLKPEMDEKGNLTTAGFACSQCGQPLFVYKLEQVSEKGKAYTNYFGRCNVAEHEKLILLSQLKPEKDSDEAVTYSLGKFGQRALDFYSIHVTKESTHPVKPLAQIAGNRYASGPVGKALSDACMGTIASFLSKYQDIIIEHQKVVKGNQKRLESLRELAGKENLEYPSVTLPPQPHTKEGVDAYNEVIARVRMWVNLNLWQKLKLSRDDAKPLLRLKGFPSFPLVERQANEVDWWDMVCNVKKLINEKKEDGKVFWQNLAGYKRQEALRPYLSSEEDRKKGKKFARYQLGDLLLHLEKKHPEDWGKVYDEAWERIDKKVEGLSKHIKLEEERRSEDAQSKAALTDWLRAKASFVIEGLKEADKDEFCRCELKLQKWYGDLRGKPFAIEAENSILDISGFSKQYNCAFIWQKDGVKKLNLYLIINYFKGGKLRFKKIKPEAFEANRFYTVINKKSGEIVPMEVNFNFDDPNLIILPLAFGKRQGREFIWNDLLSLETGSLKLANGRVIEKTLYNRRTRQDEPALFVALTFERREVLDSSNIKPMNLIGVDRGENIPAVIALTDPEGCPLSRFKDSLGNPTHILRIGESYKEKQRTIQAKKEVEQRRAGGYSRKYASKAKNLADDMVRNTARDLLYYAVTQDAMLIFENLSRGFGRQGKRTFMAERQYTRMEDWLTAKLAYEGLPSKTYLSKTLAQYTSKTCSNCGFTITSADYDRVLEKLKKTATGWMTTINGKELKVEGQITYYNRYKRQNVVKDLSVELDRLSEESVNNDISSWTKGRSGEALSLLKKRFSHRPVQEKFVCLNCGFETHADEQAALNIARSWLFLRSQEYKKYQTNKTTGNTDKRAFVETWQSFYRKKLKEVWKPAV

SEQ ID NO: 29381 - protein, 979 aa, synthetic construct
  REGION 1..979: note = engineered CasX variant
QEIKRINKIRRRLVKDSNTKKAGKTGPMKTLLVRVMTPDLRERLENLRKKPENIPQPISNTSRANLNKLLTDYTEMKKAILHVYWEEFQKDPVGLMSRVAQPASKKIDQNKLKPEMDEKGNLTTAGFACSQCGQPLFVYKLEQVSEKGKAYTNYFGRCNVAEHEKLILLSQLKPEKDSDEAVTYSLGKFGQRALDFYSIHVTKESTHPVKPLAQIAGNRYASGPVGKALSDACMGTIASFLSKYQDIIIEHQKVVKGNQKRLESLRELAGKENLEYPSVTLPPQPHTKEGVDAYNEVIARVRMWVNLNLWQKLKLSRDDAKPLLRLKGFPSFPLVERQANEVDWWDMVCNVKKLINEKKEDGKVFWQNLAGYKRQEALRPYLSSEEDRKKGKKFARYQLGDLLLHLEKKHGERDWGKVYDEAWERIDKKVEGLSKHIKLEEERRSEDAQSKAALTDWLRAKASFVIEGLKEADKDEFCRCELKLQKWYGDLRGKPFAIEAENSILDISGFSKQYNCAFIWQKDGVKKLNLYLIINYFKGGKLRFKKIKPEAFEANRFYTVINKKSGEIVPMEVNFNFDDPNLIILPLAFGKRQGREFIWNDLLSLETGSLKLANGRVIEKTLYNRRTRQDEPALFVALTFERREVLDSSNIKPMNLIGVDRGENIPAVIALTDPEGCPLSRFKDSLGNPTHILRIGESYKEKQRTIQAKKEVEQRRAGGYSRKYASKAKNLADDMVRNTARDLLYYAVTQDAMLIFENLSRGFGRQGKRTFMAERQYTRMEDWLTAKLAYEGLPSKTYLSKTLAQYTSKTCSNCGFTITSADYDRVLEKLKKTATGWMTTINGKELKVEGQITYYNRYKRQNVVKDLSVELDRLSEESVNNDISSWTKGRSGEALSLLKKRFSHRPVQEKFVCLNCGFETHADEQAALNIARSWLFLRSQEYKKYQTNKTTGNTDKRAFVETWQSFYRKKLKEVWKPAV

SEQ ID NO: 29382 - protein, 979 aa, synthetic construct
  REGION 1..979: note = engineered CasX variant
QEIKRINKIRRRLVKDSNTKKAGKTGPMKTLLVRVMTPDLRERLENLRKKPENIPQPISNTSRANLNKLLTDYTEMKKAILHVYWEEFQKDPVGLMSRVAQPASKKIDQNKLKPEMDEKGNLTTAGFACSQCGQPLFVYKLEQVSEKGKAYTNYFGRCNVAEHEKLILLSQLKPEKDSDEAVTYSLGKFGQRALDFYSIHVTKESTHPVKPLAQIAGNRYASGPVGKALSDACMGTIASFLSKYQDIIIEHQKVVKGNQKRLESLRELAGKENLEYPSVTLPPQPHTKEGVDAYNEVIARVRMWVNLNLWQKLKLSRDDAKPLLRLKGFPSFPLVERQANEVDWWDMVCNVKKLINEKKEDGKVFWQNLAGYKRQEALRPYLSSEEDRKKGKKFARYQLGDLLLHLEKKHGEYDWGKVYDEAWERIDKKVEGLSKHIKLEEERRSEDAQSKAALTDWLRAKASFVIEGLKEADKDEFCRCELKLQKWYGDLRGKPFAIEAENSILDISGFSKQYNCAFIWQKDGVKKLNLYLIINYFKGGKLRFKKIKPEAFEANRFYTVINKKSGEIVPMEVNFNFDDPNLIILPLAFGKRQGREFIWNDLLSLETGSLKLANGRVIEKTLYNRRTRQDEPALFVALTFERREVLDSSNIKPMNLIGVDRGENIPAVIALTDPEGCPLSRFKDSLGNPTHILRIGESYKEKQRTIQAKKEVEQRRAGGYSRKYASKAKNLADDMVRNTARDLLYYAVTQDAMLIFENLSRGFGRQGKRTFMAERQYTRMEDWLTAKLAYEGLPSKTYLSKTLAQYTSKTCSNCGFTITSADYDRVLEKLKKTATGWMTTINGKELKVEGQITYYNRYKRQNVVKDLSVELDRLSEESVNNDISSWTKGRSGEALSLLKKRFSHRPVQEKFVCLNCGFETHADEQAALNIARSWLFLRSQEYKKYQTNKTTGNTDKRAFVETWQSFYRKKLKEVWKPAV

SEQ ID NO: 29383 - protein, 978 aa, synthetic construct
  REGION 1..978: note = engineered CasX variant
QEIKRINKIRRRLVKDSNTKKAGKTGPMKTLLVRVMTPDLRERLENLRKKPENIPQPISNTSRANLNKLLTDYTEMKKAILHVYWEEFQKDPVGLMSRVAQPASKKIDQNKLKPEMDEKGNLTTAGFACSQCGQPLFVYKLEQVSEKGKAYTNYFGRCNVAEHEKLILLSQLKPEKDSDEAVTYSLGKFGQRALDFYSIHVTKESTHPVKPLAQIAGNRYASGPVGKALSDACMGTIASFLSKYQDIIIEHQKVVKGNQKRLESLRELAGKENLEYPSVTLPPQPHTKEGVDAYNEVIARVRMWVNLNLWQKLKLSRDDAKPLLRLKGFPSFPLVERQANEVDWWDMVCNVKKLINEKKEDGKVFWQNLAGYKRQEALRPYLSSEEDRKKGKKFARYQLGDLLLHLEKKHGEDWGDVYDEAWERIDKKVEGLSKHIKLEEERRSEDAQSKAALTDWLRAKASFVIEGLKEADKDEFCRCELKLQKWYGDLRGKPFAIEAENSILDISGFSKQYNCAFIWQKDGVKKLNLYLIINYFKGGKLRFKKIKPEAFEANRFYTVINKKSGEIVPMEVNFNFDDPNLIILPLAFGKRQGREFIWNDLLSLETGSLKLANGRVIEKTLYNRRTRQDEPALFVALTFERREVLDSSNIKPMNLIGVDRGENIPAVIALTDPEGCPLSRFKDSLGNPTHILRIGESYKEKQRTIQAKKEVEQRRAGGYSRKYASKAKNLADDMVRNTARDLLYYAVTQDAMLIFENLSRGFGRQGKRTFMAERQYTRMEDWLTAKLAYEGLPSKTYLSKTLAQYTSKTCSNCGFTITSADYDRVLEKLKKTATGWMTTINGKELKVEGQITYYNRYKRQNVVKDLSVELDRLSEESVNNDISSWTKGRSGEALSLLKKRFSHRPVQEKFVCLNCGFETHADEQAALNIARSWLFLRSQEYKKYQTNKTTGNTDKRAFVETWQSFYRKKLKEVWKPAV

SEQ ID NO: 29384 - protein, 978 aa, synthetic construct
  REGION 1..978: note = engineered CasX variant
QEIKRINKIRRRLVKDSNTKKAGKTGPMKTLLVRVMTPDLRERLENLRKKPENIPQPISNTSRANLNKLLTDYTEMKKAILHVYWEEFQKDPVGLMSRVAQPASKKIDQNKLKPEMDEKGNLTTAGFACSQCGQPLFVYKLEQVSEKGKAYTNYFGRCNVAEHEKLILLSQLKPEKDSDEAVTYSLGKFGQRALDFYSIHVTKESTHPVKPLAQIAGNRYASGPVGKALSDACMGTIASFLSKYQDIIIEHQKVVKGNQKRLESLRELAGKENLEYPSVTLPPQPHTKEGVDAYNEVIARVRMWVNLNLWQKLKLSRDDAKPLLRLKGFPSFPLVERQANEVDWWDMVCNVKKLINEKKEDGKVFWQNLAGYKRQEALRPYLSSEEDRKKGKKFARYQLGDLLLHLEKKHGEDWGKVYGEAWERIDKKVEGLSKHIKLEEERRSEDAQSKAALTDWLRAKASFVIEGLKEADKDEFCRCELKLQKWYGDLRGKPFAIEAENSILDISGFSKQYNCAFIWQKDGVKKLNLYLIINYFKGGKLRFKKIKPEAFEANRFYTVINKKSGEIVPMEVNFNFDDPNLIILPLAFGKRQGREFIWNDLLSLETGSLKLANGRVIEKTLYNRRTRQDEPALFVALTFERREVLDSSNIKPMNLIGVDRGENIPAVIALTDPEGCPLSRFKDSLGNPTHILRIGESYKEKQRTIQAKKEVEQRRAGGYSRKYASKAKNLADDMVRNTARDLLYYAVTQDAMLIFENLSRGFGRQGKRTFMAERQYTRMEDWLTAKLAYEGLPSKTYLSKTLAQYTSKTCSNCGFTITSADYDRVLEKLKKTATGWMTTINGKELKVEGQITYYNRYKRQNVVKDLSVELDRLSEESVNNDISSWTKGRSGEALSLLKKRFSHRPVQEKFVCLNCGFETHADEQAALNIARSWLFLRSQEYKKYQTNKTTGNTDKRAFVETWQSFYRKKLKEVWKPAV

SEQ ID NO: 29385 - protein, 978 aa, synthetic construct
  REGION 1..978: note = engineered CasX variant
QEIKRINKIRRRLVKDSNTKKAGKTGPMKTLLVRVMTPDLRERLENLRKKPENIPQPISNTSRANLNKLLTDYTEMKKAILHVYWEEFQKDPVGLMSRVAQPASKKIDQNKLKPEMDEKGNLTTAGFACSQCGQPLFVYKLEQVSEKGKAYTNYFGRCNVAEHEKLILLSQLKPEKDSDEAVTYSLGKFGQRALDFYSIHVTKESTHPVKPLAQIAGNRYASGPVGKALSDACMGTIASFLSKYQDIIIEHQKVVKGNQKRLESLRELAGKENLEYPSVTLPPQPHTKEGVDAYNEVIARVRMWVNLNLWQKLKLSRDDAKPLLRLKGFPSFPLVERQANEVDWWDMVCNVKKLINEKKEDGKVFWQNLAGYKRQEALRPYLSSEEDRKKGKKFARYQLGDLLLHLEKKHGEDWGKVYDEAWERIDKKVEGLSKHIKLEEERRSEDAQSKAALTDWLRAKASFVIEGKKEADKDEFCRCELKLQKWYGDLRGKPFAIEAENSILDISGFSKQYNCAFIWQKDGVKKLNLYLIINYFKGGKLRFKKIKPEAFEANRFYTVINKKSGEIVPMEVNFNFDDPNLIILPLAFGKRQGREFIWNDLLSLETGSLKLANGRVIEKTLYNRRTRQDEPALFVALTFERREVLDSSNIKPMNLIGVDRGENIPAVIALTDPEGCPLSRFKDSLGNPTHILRIGESYKEKQRTIQAKKEVEQRRAGGYSRKYASKAKNLADDMVRNTARDLLYYAVTQDAMLIFENLSRGFGRQGKRTFMAERQYTRMEDWLTAKLAYEGLPSKTYLSKTLAQYTSKTCSNCGFTITSADYDRVLEKLKKTATGWMTTINGKELKVEGQITYYNRYKRQNVVKDLSVELDRLSEESVNNDISSWTKGRSGEALSLLKKRFSHRPVQEKFVCLNCGFETHADEQAALNIARSWLFLRSQEYKKYQTNKTTGNTDKRAFVETWQSFYRKKLKEVWKPAV

SEQ ID NO: 29386 - protein, 978 aa, synthetic construct
  REGION 1..978: note = engineered CasX variant
QEIKRINKIRRRLVKDSNTKKAGKTGPMKTLLVRVMTPDLRERLENLRKKPENIPQPISNTSRANLNKLLTDYTEMKKAILHVYWEEFQKDPVGLMSRVAQPASKKIDQNKLKPEMDEKGNLTTAGFACSQCGQPLFVYKLEQVSEKGKAYTNYFGRCNVAEHEKLILLSQLKPEKDSDEAVTYSLGKFGQRALDFYSIHVTKESTHPVKPLAQIAGNRYASGPVGKALSDACMGTIASFLSKYQDIIIEHQKVVKGNQKRLESLRELAGKENLEYPSVTLPPQPHTKEGVDAYNEVIARVRMWVNLNLWQKLKLSRDDAKPLLRLKGFPSFPLVERQANEVDWWDMVCNVKKLINEKKEDGKVFWQNLAGYKRQEALRPYLSSEEDRKKGKKFARYQLGDLLLHLEKKHGEDWGKVYDEAWERIDKKVEGLSKHIKLEEERRSEDAQSKAALTDWLRAKASFVIEGSKEADKDEFCRCELKLQKWYGDLRGKPFAIEAENSILDISGFSKQYNCAFIWQKDGVKKLNLYLIINYFKGGKLRFKKIKPEAFEANRFYTVINKKSGEIVPMEVNFNFDDPNLIILPLAFGKRQGREFIWNDLLSLETGSLKLANGRVIEKTLYNRRTRQDEPALFVALTFERREVLDSSNIKPMNLIGVDRGENIPAVIALTDPEGCPLSRFKDSLGNPTHILRIGESYKEKQRTIQAKKEVEQRRAGGYSRKYASKAKNLADDMVRNTARDLLYYAVTQDAMLIFENLSRGFGRQGKRTFMAERQYTRMEDWLTAKLAYEGLPSKTYLSKTLAQYTSKTCSNCGFTITSADYDRVLEKLKKTATGWMTTINGKELKVEGQITYYNRYKRQNVVKDLSVELDRLSEESVNNDISSWTKGRSGEALSLLKKRFSHRPVQEKFVCLNCGFETHADEQAALNIARSWLFLRSQEYKKYQTNKTTGNTDKRAFVETWQSFYRKKLKEVWKPAV

SEQ ID NO: 29387 - protein, 979 aa, synthetic construct
  REGION 1..979: note = engineered CasX variant
QEIKRINKIRRRLVKDSNTKKAGKTGPMKTLLVRVMTPDLRERLENLRKKPENIPQPISNTSRANLNKLLTDYTEMKKAILHVYWEEFQKDPVGLMSRVAQPASKKIDQNKLKPEMDEKGNLTTAGFACSQCGQPLFVYKLEQVSEKGKAYTNYFGRCNVAEHEKLILLSQLKPEKDSDEAVTYSLGKFGQRALDFYSIHVTKESTHPVKPLAQIAGNRYASGPVGKALSDACMGTIASFLSKYQDIIIEHQKVVKGNQKRLESLRELAGKENLEYPSVTLPPQPHTKEGVDAYNEVIARVRMWVNLNLWQKLKLSRDDAKPLLRLKGFPSFPLVERQANEVDWWDMVCNVKKLINEKKEDGKVFWQNLAGYKRQEALRPYLSSEEDRKKGKKFARYQLGDLLLHLEKKHGEDWGKVYDEAWERIDKKVEGLSKHIKLEEERRSEDAQSKAALTDWLRAKASFVIEGLKEADDKDEFCRCELKLQKWYGDLRGKPFAIEAENSILDISGFSKQYNCAFIWQKDGVKKLNLYLIINYFKGGKLRFKKIKPEAFEANRFYTVINKKSGEIVPMEVNFNFDDPNLIILPLAFGKRQGREFIWNDLLSLETGSLKLANGRVIEKTLYNRRTRQDEPALFVALTFERREVLDSSNIKPMNLIGVDRGENIPAVIALTDPEGCPLSRFKDSLGNPTHILRIGESYKEKQRTIQAKKEVEQRRAGGYSRKYASKAKNLADDMVRNTARDLLYYAVTQDAMLIFENLSRGFGRQGKRTFMAERQYTRMEDWLTAKLAYEGLPSKTYLSKTLAQYTSKTCSNCGFTITSADYDRVLEKLKKTATGWMTTINGKELKVEGQITYYNRYKRQNVVKDLSVELDRLSEESVNNDISSWTKGRSGEALSLLKKRFSHRPVQEKFVCLNCGFETHADEQAALNIARSWLFLRSQEYKKYQTNKTTGNTDKRAFVETWQSFYRKKLKEVWKPAV

SEQ ID NO: 29388 - protein, 979 aa, synthetic construct
  REGION 1..979: note = engineered CasX variant
QEIKRINKIRRRLVKDSNTKKAGKTGPMKTLLVRVMTPDLRERLENLRKKPENIPQPISNTSRANLNKLLTDYTEMKKAILHVYWEEFQKDPVGLMSRVAQPASKKIDQNKLKPEMDEKGNLTTAGFACSQCGQPLFVYKLEQVSEKGKAYTNYFGRCNVAEHEKLILLSQLKPEKDSDEAVTYSLGKFGQRALDFYSIHVTKESTHPVKPLAQIAGNRYASGPVGKALSDACMGTIASFLSKYQDIIIEHQKVVKGNQKRLESLRELAGKENLEYPSVTLPPQPHTKEGVDAYNEVIARVRMWVNLNLWQKLKLSRDDAKPLLRLKGFPSFPLVERQANEVDWWDMVCNVKKLINEKKEDGKVFWQNLAGYKRQEALRPYLSSEEDRKKGKKFARYQLGDLLLHLEKKHGEDWGKVYDEAWERIDKKVEGLSKHIKLEEERRSEDAQSKAALTDWLRAKASFVIEGLKEADKDEFCRCELKLQKWYGDLRGKPFAIEAENSILDISGFSKQYNCAFIWQKDGVKKLNLYLIINYFKGGKLRFKKIKPEAFEANRFYTVINKKSGEIVPMEVNFNFDDPNLIILPLAFGKRQGREFIWNDLLSLETGSLKLANGRVIEKTLYNRRTRQDEPALFVALTFERREVLDSSNIKPMNLIGVDRGENIPAVIALTDPEGCPLSRFKDSLGNPTHILRIGESYKEKQRTIQAKKEVEQRRAGGYSRKYASKAKNLADDMVRNTARDLLYYAVTQDAMLIFENLSRGFGRQGKRTFMAERQYTRMEDWLTAKLAYEGLPSKTYLSKTLAQYTSKTCSNCGFTITSADYDRVLEKLKKTATGWMTTINGKELKVEGQITYYNRYKRQNVVKDLSVELDRLSEESVNNDISSWTKGRSGNEALSLLKKRFSHRPVQEKFVCLNCGFETHADEQAALNIARSWLFLRSQEYKKYQTNKTTGNTDKRAFVETWQSFYRKKLKEVWKPAV

SEQ ID NO: 29389 - protein, 978 aa, synthetic construct
  REGION 1..978: note = engineered CasX variant
QEIKRINKIRRRLVKDSNTKKAGKTGPMKTLLVRVMTPDLRERLENLRKKPENIPQPISNTSRANLNKLLTDYTEMKKAILHVYWEEFQKDPVGLMSRVAQPASKKIDQNKLKPEMDEKGNLTTAGFACSQCGQPLFVYKLEQVSEKGKAYTNYFGRCNVAEHEKLILLSQLKPEKDSDEAVTYSLGKFGQRALDFYSIHVTKESTHPVKPLAQIAGNRYASGPVGKALSDACMGTIASFLSKYQDIIIEHQKVVKGNQKRLESLRELAGKENLEYPSVTLPPQPHTKEGVDAYNEVIARVRMWVNLNLWQKLKLSRDDAKPLLRLKGFPSFPLVERQANEVDWWDMVCNVKKLINEKKEDGKVFWQNLAGYKRQEALRPYLSSEEDRQKGKKFARYQLGDLLLHLEKKHGEDWGKVYDEAWERIDKKVEGLSKHIKLEEERRSEDAQSKAALTDWLRAKASFVIEGLKEADKDEFCRCELKLQKWYGDLRGKPFAIEAENSILDISGFSKQYNCAFIWQKDGVKKLNLYLIINYFKGGKLRFKKIKPEAFEANRFYTVINKKSGEIVPMEVNFNFDDPNLIILPLAFGKRQGREFIWNDLLSLETGSLKLANGRVIEKTLYNRRTRQDEPALFVALTFERREVLDSSNIKPMNLIGVDRGENIPAVIALTDPEGCPLSRFKDSLGNPTHILRIGESYKEKQRTIQAKKEVEQRRAGGYSRKYASKAKNLADDMVRNTARDLLYYAVTQDAMLIFENLSRGFGRQGKRTFMAERQYTRMEDWLTAKLAYEGLPSKTYLSKTLAQYTSKTCSNCGFTITSADYDRVLEKLKKTATGWMTTINGKELKVEGQITYYNRYKRQNVVKDLSVELDRLSEESVNNDISSWTKGRSGEALSLLKKRFSHRPVQEKFVCLNCGFETHADEQAALNIARSWLFLRSQEYKKYQTNKTTGNTDKRAFVETWQSFYRKKLKEVWKPAV

SEQ ID NO: 29390 - protein, 978 aa, synthetic construct
  REGION 1..978: note = engineered CasX variant
QEIKRINKIRRRLVKDSNTKKAGKTGPMKTLLVRVMTPDLRERLENLRKKPENIPQPISNTSRANLNKLLTDYTEMKKAILHVYWEEFQKDPVGLMSRVAQPASKKIDQNKLKPEMDEKGNLTTAGFACSQCGQPLFVYKLEQVSEKGKAYTNYFGRCNVAEHEKLILLSQLKPEKDSDEAVTYSLGKFGQRALDFYSIHVTKESTHPVKPLAQIAGNRYASGPVGKALSDACMGTIASFLSKYQDIIIEHQKVVKGNQKRLESLRELAGKENLEYPSVTLPPQPHTKEGVDAYNEVIARVRMWVNLNLWQKLKLSRDDAKPLLRLKGFPSFPLVERQANEVDWWDMVCNVKKLINEKKEDGKVFWQNLAGYKRQEALRPYLSSEEDRKKGKKFARYQLGDLLLHLEKKHGEDWGKVYDEAWERIDKKVEGLSKHIKLEEERRSEDAQSKAALTDWLRAKASFVIEGLKEADKDEFCRCELKLQKWYGDLRGKPFAIEAENSILDISGFSKQYNCAFIWQKDGVKKLNLYLIINYFKGGKLRFKKIKPEAFEANRFYTVINKKSGEIVPMEVNFNFDDPNLIILPLAFGKRQGREFIWNDLLSLETGSLKLANGRVIEKTLYNRRTRQDEPALFVALTFERREVLDSSNIKPMNLIGVDRGENIPAVIALTDPEGCPLSRFKDSLGNPTHILRIGESYKEKQRTIQAKKEVEQRRAGGYSRKYASKAKNLADDMVRNTARDLLYYAVTQDAMLIFENLSRGFGRQGKRTFMAERQYTRMEDWLTAKLAYEGLPSQTYLSKTLAQYTSKTCSNCGFTITSADYDRVLEKLKKTATGWMTTINGKELKVEGQITYYNRYKRQNVVKDLSVELDRLSEESVNNDISSWTKGRSGEALSLLKKRFSHRPVQEKFVCLNCGFETHADEQAALNIARSWLFLRSQEYKKYQTNKTTGNTDKRAFVETWQSFYRKKLKEVWKPAV

SEQ ID NO: 29391 - protein, 978 aa, synthetic construct
  REGION 1..978: note = engineered CasX variant
QEIKRINKIRRRLVKDSNTKKAGKTGPMKTLLVRVMTPDLRERLENLRKKPENIPQPISNTSRANLNKLLTDYTEMKKAILHVYWEEFQKDPVGLMSRVAQPASKKIDQNKLKPEMDEKGNLTTAGFACSQCGQPLFVYKLEQVSEKGKAYTNYFGRCNVAEHEKLILLSQLKPEKDSDEAVTYSLGKFGQRALDFYSIHVTKESTHPVKPLAQIAGNRYASGPVGKALSDACMGTIASFLSKYQDIIIEHQKVVKGNQKRLESLRELAGKENLEYPSVTLPPQPHTKEGVDAYNEVIARVRMWVNLNLWQKLKLSRDDAKPLLRLKGFPSFPLVERQANEVDWWDMVCNVKKLINEKKEDGKVFWQNLAGYKRQEALRPYLSSEEDRKKGKKFARYQLGDLLLHLEKKHGEDWGKVYDEAWERIDKKVEGLSKHIKLEEERRSEDAQSKAALTDWLRAKASFVIEGLKEADKDEFCRCELKLQKWYGDLRGKPFAIEAENSILDISGFSKQYNCAFIWQKDGVKKLNLYLIINYFKGGKLRFKKIKPEAFEANRFYTVINKKSGEIVPMEVNFNFDDPNLIILPLAFGKRQGREFIWNDLLSLETGSLKLANGRVIEKTLYNRRTRQDEPALFVALTFERREVLDSSNIKPMNLIGVDRGENIPAVIALTDPEGCPLSRFKDSLGNPTHILRIGESYKEKQRTIQAKKEVEQRRAGGYSRKYASKAKNLADDMVRNTARDLLYYAVTQDAMLIFENLSRGFGRQGKRTFMAERQYTRMEDWLTAKLAYNGLPSKTYLSKTLAQYTSKTCSNCGFTITSADYDRVLEKLKKTATGWMTTINGKELKVEGQITYYNRYKRQNVVKDLSVELDRLSEESVNNDISSWTKGRSGEALSLLKKRFSHRPVQEKFVCLNCGFETHADEQAALNIARSWLFLRSQEYKKYQTNKTTGNTDKRAFVETWQSFYRKKLKEVWKPAV

SEQ ID NO: 29392 - protein, 978 aa, synthetic construct
  REGION 1..978: note = engineered CasX variant
QEIKRINKIRRRLVKDSNTKKAGKTGPMKTLLVRVMTPDLRERLENLRKKPENIPQPISNTSRANLNKLLTDYTEMKKAILHVYWEEFQKDPVGLMSRVAQPASKKIDQNKLKPEMDEKGNLTTAGFACSQCGQPLFVYKLEQVSEKGKAYTNYFGRCNVAEHEKLIQLSQLKPEKDSDEAVTYSLGKFGQRALDFYSIHVTKESTHPVKPLAQIAGNRYASGPVGKALSDACMGTIASFLSKYQDIIIEHQKVVKGNQKRLESLRELAGKENLEYPSVTLPPQPHTKEGVDAYNEVIARVRMWVNLNLWQKLKLSRDDAKPLLRLKGFPSFPLVERQANEVDWWDMVCNVKKLINEKKEDGKVFWQNLAGYKRQEALRPYLSSEEDRKKGKKFARYQLGDLLLHLEKKHGEDWGKVYDEAWERIDKKVEGLSKHIKLEEERRSEDAQSKAALTDWLRAKASFVIEGLKEADKDEFCRCELKLQKWYGDLRGKPFAIEAENSILDISGFSKQYNCAFIWQKDGVKKLNLYLIINYFKGGKLRFKKIKPEAFEANRFYTVINKKSGEIVPMEVNFNFDDPNLIILPLAFGKRQGREFIWNDLLSLETGSLKLANGRVIEKTLYNRRTRQDEPALFVALTFERREVLDSSNIKPMNLIGVDRGENIPAVIALTDPEGCPLSRFKDSLGNPTHILRIGESYKEKQRTIQAKKEVEQRRAGGYSRKYASKAKNLADDMVRNTARDLLYYAVTQDAMLIFENLSRGFGRQGKRTFMAERQYTRMEDWLTAKLAYEGLPSKTYLSKTLAQYTSKTCSNCGFTITSADYDRVLEKLKKTATGWMTTINGKELKVEGQITYYNRYKRQNVVKDLSVELDRLSEESVNNDISSWTKGRSGEALSLLKKRFSHRPVQEKFVCLNCGFETHADEQAALNIARSWLFLRSQEYKKYQTNKTTGNTDKRAFVETWQSFYRKKLKEVWKPAV

SEQ ID NO: 29393 - protein, 978 aa, synthetic construct
  REGION 1..978: note = engineered CasX variant
QEIKRINKIRRRLVKDSNTKKAGKTGPMKTLLVRVMTPDLRERLENLRKKPENIPQPISNTSRANLNKLLTDYTEMKKAILHVYWEEFQKDPVGLMSRVAQPASKKIDQNKLKPEMDEKGNLTTAGFACSQCGQPLFVYKLEQVSEKGKAYTNYFGRCNVAEHEKLILLSQLKPEKDSDEAVTYSLGKFGQRALDFYSIHVTKESTHPVKPLAQIAGNRYASGPVGKALSDACMGTIASFLSKYQDIIIEHQKVVKGNQKRLESLRELAGKENLEYPSVTLPPQPHTKEGVDAYNEVIARVRMWVNLNLWQKLKLSRDDAKPLLRLKGFPSFPLVERQANEVDWWDMVCNVKKLINEKKEDGKVFWQNLAIYKRQEALRPYLSSEEDRKKGKKFARYQLGDLLLHLEKKHGEDWGKVYDEAWERIDKKVEGLSKHIKLEEERRSEDAQSKAALTDWLRAKASFVIEGLKEADKDEFCRCELKLQKWYGDLRGKPFAIEAENSILDISGFSKQYNCAFIWQKDGVKKLNLYLIINYFKGGKLRFKKIKPEAFEANRFYTVINKKSGEIVPMEVNFNFDDPNLIILPLAFGKRQGREFIWNDLLSLETGSLKLANGRVIEKTLYNRRTRQDEPALFVALTFERREVLDSSNIKPMNLIGVDRGENIPAVIALTDPEGCPLSRFKDSLGNPTHILRIGESYKEKQRTIQAKKEVEQRRAGGYSRKYASKAKNLADDMVRNTARDLLYYAVTQDAMLIFENLSRGFGRQGKRTFMAERQYTRMEDWLTAKLAYEGLPSKTYLSKTLAQYTSKTCSNCGFTITSADYDRVLEKLKKTATGWMTTINGKELKVEGQITYYNRYKRQNVVKDLSVELDRLSEESVNNDISSWTKGRSGEALSLLKKRFSHRPVQEKFVCLNCGFETHADEQAALNIARSWLFLRSQEYKKYQTNKTTGNTDKRAFVETWQSFYRKKLKEVWKPAV

SEQ ID NO: 29394 - protein, 978 aa, synthetic construct
  REGION 1..978: note = engineered CasX variant
QEIKRINKIRRRLVKDSNTKKAGKTGPMKTLLVRVMTPDLRERLENLRKKPENIPQPISNTSRANLNKLLTDYTEMKKAILHVYWEEFQKDPVGLMSRVAQPASKKIDQNKLKPEMDEKGNLTTAGFACSQCGQPLFVYKLEQVSEKGKAYTNYFGRCNVAEHEKLILLSQLKPEKDSDEAVTYSLGKFGQRALDFYSIHVTKESTHPVKPLAQIAGNRYASGPVGKALSDACMGTIASFLSKYQDIIIEHQKVVKGNQKRLESLRELAGKENLEYPSVTLPPQPHTKEGVDAYNEVIARVRMWVNLNLWQKLKLSRDDAKPLLRLKGFPSFPLVERQANEVDWWDMVCNVKKLINEKKEDGKVFWQNLAGYKRQEALRPYLSSEEDREKGKKFARYQLGDLLLHLEKKHGEDWGKVYDEAWERIDKKVEGLSKHIKLEEERRSEDAQSKAALTDWLRAKASFVIEGLKEADKDEFCRCELKLQKWYGDLRGKPFAIEAENSILDISGFSKQYNCAFIWQKDGVKKLNLYLIINYFKGGKLRFKKIKPEAFEANRFYTVINKKSGEIVPMEVNFNFDDPNLIILPLAFGKRQGREFIWNDLLSLETGSLKLANGRVIEKTLYNRRTRQDEPALFVALTFERREVLDSSNIKPMNLIGVDRGENIPAVIALTDPEGCPLSRFKDSLGNPTHILRIGESYKEKQRTIQAKKEVEQRRAGGYSRKYASKAKNLADDMVRNTARDLLYYAVTQDAMLIFENLSRGFGRQGKRTFMAERQYTRMEDWLTAKLAYEGLPSKTYLSKTLAQYTSKTCSNCGFTITSADYDRVLEKLKKTATGWMTTINGKELKVEGQITYYNRYKRQNVVKDLSVELDRLSEESVNNDISSWTKGRSGEALSLLKKRFSHRPVQEKFVCLNCGFETHADEQAALNIARSWLFLRSQEYKKYQTNKTTGNTDKRAFVETWQSFYRKKLKEVWKPAV

SEQ ID NO: 29395 - protein, 978 aa, synthetic construct
  REGION 1..978: note = engineered CasX variant
QEIKRINKIRRRLVKDSNTKKAGKTGPMKTLLVRVMTPDLRERLENLRKKPENIPQPISNTSRANLNKLLTDYTEMKKAILHVYWEEFQKDPVGLMSRVAQPASKKIDQNKLKPEMDEKGNLTTAGFACSQCGQPLFVYKLEQVSEKGKAYTNYFGRCNVAEHEKLILLSQLKPEKDSDEAVTYSLGKFGQRALDFYSIHVTKESTHPVKPLAQIAGNRYASGPVGKALSDACMGTIASFLSKYQDIIIEHQKVVKGNQKRLESLRELAGKENLEYPSVTLPPQPHTKEGVDAYNEVIARVRMWVNLNLWQKLKLSRDDAKPLLRLKGFPSFPLVERQANEVDWWDMVCNVKKLINEKKEDGKVFWQNLAGYKRQEALRPYLSSEEDRKKGKKFARYQLGDLLLHLEKKHGEDWGKVYDEAWERIDKKVEGLSKHIKLEEERRSEDAQSKAALTDWLRAKASFVIEGLKEADKDEFCRCELKLQKWYGDLRGKPFAIEAENSILDISGFSKQYNCAFIWQKDGVKKLNLYLIINYFKGGKLRFKKIKPEAFEANRFYTVINKKSGEIVIMEVNFNFDDPNLIILPLAFGKRQGREFIWNDLLSLETGSLKLANGRVIEKTLYNRRTRQDEPALFVALTFERREVLDSSNIKPMNLIGVDRGENIPAVIALTDPEGCPLSRFKDSLGNPTHILRIGESYKEKQRTIQAKKEVEQRRAGGYSRKYASKAKNLADDMVRNTARDLLYYAVTQDAMLIFENLSRGFGRQGKRTFMAERQYTRMEDWLTAKLAYEGLPSKTYLSKTLAQYTSKTCSNCGFTITSADYDRVLEKLKKTATGWMTTINGKELKVEGQITYYNRYKRQNVVKDLSVELDRLSEESVNNDISSWTKGRSGEALSLLKKRFSHRPVQEKFVCLNCGFETHADEQAALNIARSWLFLRSQEYKKYQTNKTTGNTDKRAFVETWQSFYRKKLKEVWKPAV

SEQ ID NO: 29396 - protein, 977 aa, synthetic construct
  REGION 1..977: note = engineered CasX variant
QEIKRINKIRRRLVKDSNTKKAGKTGPMKTLLVRVMTPDLRERLENLRKKPENIPQPISNTSRANLNKLLTDYTEMKKAILHVYWEEFQKDPVGLMSRVAQPASKKIDQNKLKPEMDEKGNLTTAGFACSQCGQPLFVYKLEQVSEKGKAYTNYFGRCNVAEHEKLILLAQLKPEKDSDEAVTYSLGKFGQRALDFYSIHVTKESTHPVKPLAQIAGNRYASPVGKALSGACMGTIASFLSKYQDIIIEHQKVVKGNQKRLESLRELAGKENLEYPSVTLPPQPHTKEGVDAYNEVIARVRMWVNLNLWQKLKLSRDDAKPLLRLKGFPSFPLVERQANEVDWWDMVCNVKKLINEKKEDGKVFWQNLAGYKRQEALRPYLSSEEDRKKGKKFARYQLGDLLLHLEKKHGEDWGKVYDEAWERIDKKVEGLSKHIKLEEERRSEDAQSKAALTDWLRAKASFVIEGLKEADKDEFCRCELKLQKWYGDLRGKPFAIEAENSILDISGFSKQYNCAFIWQKDGVKKLNLYLIINYFKGGKLRFKKIKPEAFEANRFYTVINKKSGEIVPMEVNFNFDDPNLIILPLAFGKRQGREFIWNDLLSLETGSLKLANGRVIEKTLYNRRTRQDEPALFVALTFERREVLDSSNIKPMNLIGVDRGENIPAVIALTDPEGCPLSRFKDSLGNPTHILRIGESYKEKQRTIQAKKEVEQRRAGGYSRKYASKAKNLADDMVRNTARDLLYYAVTQDAMLIFENLSRGFGRQGKRTFMAERQYTRMEDWLTAKLAYEGLPSKTYLSKTLAQYTSKTCSNCGFTITSADYDRVLEKLKKTATGWMTTINGKELKVEGQITYYNRYKRQNVVKDLSVELDRLSEESVNNDISSWTKGRSGEALSLLKKRFSHRPVQEKFVCLNCGFETHADEQAALNIARSWLFLRSQEYKKYQTNKTTGNTDKRAFVETWQSFYRKKLKEVWKPAV

SEQ ID NO: 29397 - protein, 977 aa, synthetic construct
  REGION 1..977: note = engineered CasX variant
QEIKRINKIRRRLVKDSNTKKAGKTGPMKTLLVRVMTPDLRERLENLRKKPENIPQPISNTSRANLNKLLTDYTEMKKAILHVYWEEFQKDPVGLMSRVAQPASKKIDQNKLKPEMDEKGNLTTAGFACSQCGQPLFVYKLEQVSEKGKAYTNYFGRCNVAEHEKLILLAQLKPEKDSDEAVTYSLGKFGQRALDFYSIHVTKESTHPVKPLAQIAGNRYASPVGKALSDACMGTIASFLSKYQDIIIEHQKVVKGNQKRLESLRELAGKENLEYPSVTLPPQPHTKEGVDAYNEVIARVRMWVNLNLWQKLKLSRDDAKPLLRLKNFPSFPLVERQANEVDWWDMVCNVKKLINEKKEDGKVFWQNLAGYKRQEALRPYLSSEEDRKKGKKFARYQLGDLLLHLEKKHGEDWGKVYDEAWERIDKKVEGLSKHIKLEEERRSEDAQSKAALTDWLRAKASFVIEGLKEADKDEFCRCELKLQKWYGDLRGKPFAIEAENSILDISGFSKQYNCAFIWQKDGVKKLNLYLIINYFKGGKLRFKKIKPEAFEANRFYTVINKKSGEIVPMEVNFNFDDPNLIILPLAFGKRQGREFIWNDLLSLETGSLKLANGRVIEKTLYNRRTRQDEPALFVALTFERREVLDSSNIKPMNLIGVDRGENIPAVIALTDPEGCPLSRFKDSLGNPTHILRIGESYKEKQRTIQAKKEVEQRRAGGYSRKYASKAKNLADDMVRNTARDLLYYAVTQDAMLIFENLSRGFGRQGKRTFMAERQYTRMEDWLTAKLAYEGLPSKTYLSKTLAQYTSKTCSNCGFTITSADYDRVLEKLKKTATGWMTTINGKELKVEGQITYYNRYKRQNVVKDLSVELDRLSEESVNNDISSWTKGRSGEALSLLKKRFSHRPVQEKFVCLNCGFETHADEQAALNIARSWLFLRSQEYKKYQTNKTTGNTDKRAFVETWQSFYRKKLKEVWKPAV

SEQ ID NO: 29398 - protein, 977 aa, synthetic construct
  REGION 1..977: note = engineered CasX variant
QEIKRINKIRRRLVKDSNTKKAGKTGPMKTLLVRVMTPDLRERLENLRKKPENIPQPISNTSRANLNKLLTDYTEMKKAILHVYWEEFQKDPVGLMSRVAQPASKKIDQNKLKPEMDEKGNLTTAGFACSQCGQPLFVYKLEQVSEKGKAYTNYFGRCNVAEHEKLILLAQLKPEKDSDEAVTYSLGKFGQRALDFYSIHVTKESTHPVKPLAQIAGNRYASPVGKALSDACMGTIASFLSKYQDIIIEHQKVVKGNQKRLESLRELAGKENLEYPSVTLPPQPHTKEGVDAYNEVIARVRMWVNLNLWQKLKLSRDDAKPLLRLKGFPSFPLVERQANEVDWWDMVCNVKKLINEKKEDGKVFWQNLAGYKRQEALRPYLSSEEDRKKGKKFARYQLGDLLNHLEKKHGEDWGKVYDEAWERIDKKVEGLSKHIKLEEERRSEDAQSKAALTDWLRAKASFVIEGLKEADKDEFCRCELKLQKWYGDLRGKPFAIEAENSILDISGFSKQYNCAFIWQKDGVKKLNLYLIINYFKGGKLRFKKIKPEAFEANRFYTVINKKSGEIVPMEVNFNFDDPNLIILPLAFGKRQGREFIWNDLLSLETGSLKLANGRVIEKTLYNRRTRQDEPALFVALTFERREVLDSSNIKPMNLIGVDRGENIPAVIALTDPEGCPLSRFKDSLGNPTHILRIGESYKEKQRTIQAKKEVEQRRAGGYSRKYASKAKNLADDMVRNTARDLLYYAVTQDAMLIFENLSRGFGRQGKRTFMAERQYTRMEDWLTAKLAYEGLPSKTYLSKTLAQYTSKTCSNCGFTITSADYDRVLEKLKKTATGWMTTINGKELKVEGQITYYNRYKRQNVVKDLSVELDRLSEESVNNDISSWTKGRSGEALSLLKKRFSHRPVQEKFVCLNCGFETHADEQAALNIARSWLFLRSQEYKKYQTNKTTGNTDKRAFVETWQSFYRKKLKEVWKPAV

SEQ ID NO: 29399 - protein, 977 aa, synthetic construct
  REGION 1..977: note = engineered CasX variant
QEIKRINKIRRRLVKDSNTKKAGKTGPMKTLLVRVMTPDLRERLENLRKKPENIPQPISNTSRANLNKLLTDYTEMKKAILHVYWEEFQKDPVGLMSRVAQPASKKIDQNKLKPEMDEKGNLTTAGFACSQCGQPLFVYKLEQVSEKGKAYTNYFGRCNVAEHEKLILLAQLKPEKDSDEAVTYSLGKFGQRALDFYSIHVTKESTHPVKPLAQIAGNRYASPVGKALSDACMGTIASFLSKYQDIIIEHQKVVKGNQKRLESLRELAGKENLEYPSVTLPPQPHTKEGVDAYNEVIARVRMWVNLNLWQKLKLSRDDAKPLLRLKGFPSFPLVERQANEVDWWDMVCNVKKLINEKKEDGKVFWQNLAGYKRQEALRPYLSSEEDRKKGKKFARYQLGDLLWHLEKKHGEDWGKVYDEAWERIDKKVEGLSKHIKLEEERRSEDAQSKAALTDWLRAKASFVIEGLKEADKDEFCRCELKLQKWYGDLRGKPFAIEAENSILDISGFSKQYNCAFIWQKDGVKKLNLYLIINYFKGGKLRFKKIKPEAFEANRFYTVINKKSGEIVPMEVNFNFDDPNLIILPLAFGKRQGREFIWNDLLSLETGSLKLANGRVIEKTLYNRRTRQDEPALFVALTFERREVLDSSNIKPMNLIGVDRGENIPAVIALTDPEGCPLSRFKDSLGNPTHILRIGESYKEKQRTIQAKKEVEQRRAGGYSRKYASKAKNLADDMVRNTARDLLYYAVTQDAMLIFENLSRGFGRQGKRTFMAERQYTRMEDWLTAKLAYEGLPSKTYLSKTLAQYTSKTCSNCGFTITSADYDRVLEKLKKTATGWMTTINGKELKVEGQITYYNRYKRQNVVKDLSVELDRLSEESVNNDISSWTKGRSGEALSLLKKRFSHRPVQEKFVCLNCGFETHADEQAALNIARSWLFLRSQEYKKYQTNKTTGNTDKRAFVETWQSFYRKKLKEVWKPAV

SEQ ID NO: 29400 - protein, 977 aa, synthetic construct
  REGION 1..977: note = engineered CasX variant
QEIKRINKIRRRLVKDSNTKKAGKTGPMKTLLVRVMTPDLRERLENLRKKPENIPQPISNTSRANLNKLLTDYTEMKKAILHVYWEEFQKDPVGLMSRVAQPASKKIDQNKLKPEMDEKGNLTTAGFACSQCGQPLFVYKLEQVSEKGKAYTNYFGRCNVAEHEKLILLAQLKPEKDSDEAVTYSLGKFGQRALDFYSIHVTKESTHPVKPLAQIAGNRYASPVGKALSDACMGTIASFLSKYQDIIIEHQKVVKGNQKRLESLRELAGKENLEYPSVTLPPQPHTKEGVDAYNEVIARVRMWVNLNLWQKLKLSRDDAKPLLRLKGFPSFPLVERQANEVDWWDMVCNVKKLINEKKEDGKVFWQNLAGYKRQEALRPYLSSEEDRKKGKKFARYQLGDLLLHLYKKHGEDWGKVYDEAWERIDKKVEGLSKHIKLEEERRSEDAQSKAALTDWLRAKASFVIEGLKEADKDEFCRCELKLQKWYGDLRGKPFAIEAENSILDISGFSKQYNCAFIWQKDGVKKLNLYLIINYFKGGKLRFKKIKPEAFEANRFYTVINKKSGEIVPMEVNFNFDDPNLIILPLAFGKRQGREFIWNDLLSLETGSLKLANGRVIEKTLYNRRTRQDEPALFVALTFERREVLDSSNIKPMNLIGVDRGENIPAVIALTDPEGCPLSRFKDSLGNPTHILRIGESYKEKQRTIQAKKEVEQRRAGGYSRKYASKAKNLADDMVRNTARDLLYYAVTQDAMLIFENLSRGFGRQGKRTFMAERQYTRMEDWLTAKLAYEGLPSKTYLSKTLAQYTSKTCSNCGFTITSADYDRVLEKLKKTATGWMTTINGKELKVEGQITYYNRYKRQNVVKDLSVELDRLSEESVNNDISSWTKGRSGEALSLLKKRFSHRPVQEKFVCLNCGFETHADEQAALNIARSWLFLRSQEYKKYQTNKTTGNTDKRAFVETWQSFYRKKLKEVWKPAV

SEQ ID NO: 29401 - protein, 977 aa, synthetic construct
  REGION 1..977: note = engineered CasX variant
QEIKRINKIRRRLVKDSNTKKAGKTGPMKTLLVRVMTPDLRERLENLRKKPENIPQPISNTSRANLNKLLTDYTEMKKAILHVYWEEFQKDPVGLMSRVAQPASKKIDQNKLKPEMDEKGNLTTAGFACSQCGQPLFVYKLEQVSEKGKAYTNYFGRCNVAEHEKLILLAQLKPEKDSDEAVTYSLGKFGQRALDFYSIHVTKESTHPVKPLAQIAGNRYASPVGKALSDACMGTIASFLSKYQDIIIEHQKVVKGNQKRLESLRELAGKENLEYPSVTLPPQPHTKEGVDAYNEVIARVRMWVNLNLWQKLKLSRDDAKPLLRLKGFPSFPLVERQANEVDWWDMVCNVKKLINEKKEDGKVFWQNLAGYKRQEALRPYLSSEEDRKKGKKFARYQLGDLLLHLEKKHPEDWGKVYDEAWERIDKKVEGLSKHIKLEEERRSEDAQSKAALTDWLRAKASFVIEGLKEADKDEFCRCELKLQKWYGDLRGKPFAIEAENSILDISGFSKQYNCAFIWQKDGVKKLNLYLIINYFKGGKLRFKKIKPEAFEANRFYTVINKKSGEIVPMEVNFNFDDPNLIILPLAFGKRQGREFIWNDLLSLETGSLKLANGRVIEKTLYNRRTRQDEPALFVALTFERREVLDSSNIKPMNLIGVDRGENIPAVIALTDPEGCPLSRFKDSLGNPTHILRIGESYKEKQRTIQAKKEVEQRRAGGYSRKYASKAKNLADDMVRNTARDLLYYAVTQDAMLIFENLSRGFGRQGKRTFMAERQYTRMEDWLTAKLAYEGLPSKTYLSKTLAQYTSKTCSNCGFTITSADYDRVLEKLKKTATGWMTTINGKELKVEGQITYYNRYKRQNVVKDLSVELDRLSEESVNNDISSWTKGRSGEALSLLKKRFSHRPVQEKFVCLNCGFETHADEQAALNIARSWLFLRSQEYKKYQTNKTTGNTDKRAFVETWQSFYRKKLKEVWKPAV

SEQ ID NO: 29402 - protein, 978 aa, synthetic construct
  REGION 1..978: note = engineered CasX variant
QEIKRINKIRRRLVKDSNTKKAGKTGPMKTLLVRVMTPDLRERLENLRKKPENIPQPISNTSRANLNKLLTDYTEMKKAILHVYWEEFQKDPVGLMSRVAQPASKKIDQNKLKPEMDEKGNLTTAGFACSQCGQPLFVYKLEQVSEKGKAYTNYFGRCNVAEHEKLILLAQLKPEKDSDEAVTYSLGKFGQRALDFYSIHVTKESTHPVKPLAQIAGNRYASPVGKALSDACMGTIASFLSKYQDIIIEHQKVVKGNQKRLESLRELAGKENLEYPSVTLPPQPHTKEGVDAYNEVIARVRMWVNLNLWQKLKLSRDDAKPLLRLKGFPSFPLVERQANEVDWWDMVCNVKKLINEKKEDGKVFWQNLAGYKRQEALRPYLSSEEDRKKGKKFARYQLGDLLLHLEKKHGERDWGKVYDEAWERIDKKVEGLSKHIKLEEERRSEDAQSKAALTDWLRAKASFVIEGLKEADKDEFCRCELKLQKWYGDLRGKPFAIEAENSILDISGFSKQYNCAFIWQKDGVKKLNLYLIINYFKGGKLRFKKIKPEAFEANRFYTVINKKSGEIVPMEVNFNFDDPNLIILPLAFGKRQGREFIWNDLLSLETGSLKLANGRVIEKTLYNRRTRQDEPALFVALTFERREVLDSSNIKPMNLIGVDRGENIPAVIALTDPEGCPLSRFKDSLGNPTHILRIGESYKEKQRTIQAKKEVEQRRAGGYSRKYASKAKNLADDMVRNTARDLLYYAVTQDAMLIFENLSRGFGRQGKRTFMAERQYTRMEDWLTAKLAYEGLPSKTYLSKTLAQYTSKTCSNCGFTITSADYDRVLEKLKKTATGWMTTINGKELKVEGQITYYNRYKRQNVVKDLSVELDRLSEESVNNDISSWTKGRSGEALSLLKKRFSHRPVQEKFVCLNCGFETHADEQAALNIARSWLFLRSQEYKKYQTNKTTGNTDKRAFVETWQSFYRKKLKEVWKPAV

SEQ ID NO: 29403 - protein, 978 aa, synthetic construct
  REGION 1..978: note = engineered CasX variant
QEIKRINKIRRRLVKDSNTKKAGKTGPMKTLLVRVMTPDLRERLENLRKKPENIPQPISNTSRANLNKLLTDYTEMKKAILHVYWEEFQKDPVGLMSRVAQPASKKIDQNKLKPEMDEKGNLTTAGFACSQCGQPLFVYKLEQVSEKGKAYTNYFGRCNVAEHEKLILLAQLKPEKDSDEAVTYSLGKFGQRALDFYSIHVTKESTHPVKPLAQIAGNRYASPVGKALSDACMGTIASFLSKYQDIIIEHQKVVKGNQKRLESLRELAGKENLEYPSVTLPPQPHTKEGVDAYNEVIARVRMWVNLNLWQKLKLSRDDAKPLLRLKGFPSFPLVERQANEVDWWDMVCNVKKLINEKKEDGKVFWQNLAGYKRQEALRPYLSSEEDRKKGKKFARYQLGDLLLHLEKKHGEYDWGKVYDEAWERIDKKVEGLSKHIKLEEERRSEDAQSKAALTDWLRAKASFVIEGLKEADKDEFCRCELKLQKWYGDLRGKPFAIEAENSILDISGFSKQYNCAFIWQKDGVKKLNLYLIINYFKGGKLRFKKIKPEAFEANRFYTVINKKSGEIVPMEVNFNFDDPNLIILPLAFGKRQGREFIWNDLLSLETGSLKLANGRVIEKTLYNRRTRQDEPALFVALTFERREVLDSSNIKPMNLIGVDRGENIPAVIALTDPEGCPLSRFKDSLGNPTHILRIGESYKEKQRTIQAKKEVEQRRAGGYSRKYASKAKNLADDMVRNTARDLLYYAVTQDAMLIFENLSRGFGRQGKRTFMAERQYTRMEDWLTAKLAYEGLPSKTYLSKTLAQYTSKTCSNCGFTITSADYDRVLEKLKKTATGWMTTINGKELKVEGQITYYNRYKRQNVVKDLSVELDRLSEESVNNDISSWTKGRSGEALSLLKKRFSHRPVQEKFVCLNCGFETHADEQAALNIARSWLFLRSQEYKKYQTNKTTGNTDKRAFVETWQSFYRKKLKEVWKPAV

SEQ ID NO: 29404 - protein, 977 aa, synthetic construct
  REGION 1..977: note = engineered CasX variant
QEIKRINKIRRRLVKDSNTKKAGKTGPMKTLLVRVMTPDLRERLENLRKKPENIPQPISNTSRANLNKLLTDYTEMKKAILHVYWEEFQKDPVGLMSRVAQPASKKIDQNKLKPEMDEKGNLTTAGFACSQCGQPLFVYKLEQVSEKGKAYTNYFGRCNVAEHEKLILLAQLKPEKDSDEAVTYSLGKFGQRALDFYSIHVTKESTHPVKPLAQIAGNRYASPVGKALSDACMGTIASFLSKYQDIIIEHQKVVKGNQKRLESLRELAGKENLEYPSVTLPPQPHTKEGVDAYNEVIARVRMWVNLNLWQKLKLSRDDAKPLLRLKGFPSFPLVERQANEVDWWDMVCNVKKLINEKKEDGKVFWQNLAGYKRQEALRPYLSSEEDRKKGKKFARYQLGDLLLHLEKKHGEDWGDVYDEAWERIDKKVEGLSKHIKLEEERRSEDAQSKAALTDWLRAKASFVIEGLKEADKDEFCRCELKLQKWYGDLRGKPFAIEAENSILDISGFSKQYNCAFIWQKDGVKKLNLYLIINYFKGGKLRFKKIKPEAFEANRFYTVINKKSGEIVPMEVNFNFDDPNLIILPLAFGKRQGREFIWNDLLSLETGSLKLANGRVIEKTLYNRRTRQDEPALFVALTFERREVLDSSNIKPMNLIGVDRGENIPAVIALTDPEGCPLSRFKDSLGNPTHILRIGESYKEKQRTIQAKKEVEQRRAGGYSRKYASKAKNLADDMVRNTARDLLYYAVTQDAMLIFENLSRGFGRQGKRTFMAERQYTRMEDWLTAKLAYEGLPSKTYLSKTLAQYTSKTCSNCGFTITSADYDRVLEKLKKTATGWMTTINGKELKVEGQITYYNRYKRQNVVKDLSVELDRLSEESVNNDISSWTKGRSGEALSLLKKRFSHRPVQEKFVCLNCGFETHADEQAALNIARSWLFLRSQEYKKYQTNKTTGNTDKRAFVETWQSFYRKKLKEVWKPAV

SEQ ID NO: 29405 - protein, 977 aa, synthetic construct
  REGION 1..977: note = engineered CasX variant
QEIKRINKIRRRLVKDSNTKKAGKTGPMKTLLVRVMTPDLRERLENLRKKPENIPQPISNTSRANLNKLLTDYTEMKKAILHVYWEEFQKDPVGLMSRVAQPASKKIDQNKLKPEMDEKGNLTTAGFACSQCGQPLFVYKLEQVSEKGKAYTNYFGRCNVAEHEKLILLAQLKPEKDSDEAVTYSLGKFGQRALDFYSIHVTKESTHPVKPLAQIAGNRYASPVGKALSDACMGTIASFLSKYQDIIIEHQKVVKGNQKRLESLRELAGKENLEYPSVTLPPQPHTKEGVDAYNEVIARVRMWVNLNLWQKLKLSRDDAKPLLRLKGFPSFPLVERQANEVDWWDMVCNVKKLINEKKEDGKVFWQNLAGYKRQEALRPYLSSEEDRKKGKKFARYQLGDLLLHLEKKHGEDWGKVYGEAWERIDKKVEGLSKHIKLEEERRSEDAQSKAALTDWLRAKASFVIEGLKEADKDEFCRCELKLQKWYGDLRGKPFAIEAENSILDISGFSKQYNCAFIWQKDGVKKLNLYLIINYFKGGKLRFKKIKPEAFEANRFYTVINKKSGEIVPMEVNFNFDDPNLIILPLAFGKRQGREFIWNDLLSLETGSLKLANGRVIEKTLYNRRTRQDEPALFVALTFERREVLDSSNIKPMNLIGVDRGENIPAVIALTDPEGCPLSRFKDSLGNPTHILRIGESYKEKQRTIQAKKEVEQRRAGGYSRKYASKAKNLADDMVRNTARDLLYYAVTQDAMLIFENLSRGFGRQGKRTFMAERQYTRMEDWLTAKLAYEGLPSKTYLSKTLAQYTSKTCSNCGFTITSADYDRVLEKLKKTATGWMTTINGKELKVEGQITYYNRYKRQNVVKDLSVELDRLSEESVNNDISSWTKGRSGEALSLLKKRFSHRPVQEKFVCLNCGFETHADEQAALNIARSWLFLRSQEYKKYQTNKTTGNTDKRAFVETWQSFYRKKLKEVWKPAV

SEQ ID NO: 29406 - protein, 977 aa, synthetic construct
  REGION 1..977: note = engineered CasX variant
QEIKRINKIRRRLVKDSNTKKAGKTGPMKTLLVRVMTPDLRERLENLRKKPENIPQPISNTSRANLNKLLTDYTEMKKAILHVYWEEFQKDPVGLMSRVAQPASKKIDQNKLKPEMDEKGNLTTAGFACSQCGQPLFVYKLEQVSEKGKAYTNYFGRCNVAEHEKLILLAQLKPEKDSDEAVTYSLGKFGQRALDFYSIHVTKESTHPVKPLAQIAGNRYASPVGKALSDACMGTIASFLSKYQDIIIEHQKVVKGNQKRLESLRELAGKENLEYPSVTLPPQPHTKEGVDAYNEVIARVRMWVNLNLWQKLKLSRDDAKPLLRLKGFPSFPLVERQANEVDWWDMVCNVKKLINEKKEDGKVFWQNLAGYKRQEALRPYLSSEEDRKKGKKFARYQLGDLLLHLEKKHGEDWGKVYDEAWERIDKKVEGLSKHIKLEEERRSEDAQSKAALTDWLRAKASFVIEGKKEADKDEFCRCELKLQKWYGDLRGKPFAIEAENSILDISGFSKQYNCAFIWQKDGVKKLNLYLIINYFKGGKLRFKKIKPEAFEANRFYTVINKKSGEIVPMEVNFNFDDPNLIILPLAFGKRQGREFIWNDLLSLETGSLKLANGRVIEKTLYNRRTRQDEPALFVALTFERREVLDSSNIKPMNLIGVDRGENIPAVIALTDPEGCPLSRFKDSLGNPTHILRIGESYKEKQRTIQAKKEVEQRRAGGYSRKYASKAKNLADDMVRNTARDLLYYAVTQDAMLIFENLSRGFGRQGKRTFMAERQYTRMEDWLTAKLAYEGLPSKTYLSKTLAQYTSKTCSNCGFTITSADYDRVLEKLKKTATGWMTTINGKELKVEGQITYYNRYKRQNVVKDLSVELDRLSEESVNNDISSWTKGRSGEALSLLKKRFSHRPVQEKFVCLNCGFETHADEQAALNIARSWLFLRSQEYKKYQTNKTTGNTDKRAFVETWQSFYRKKLKEVWKPAV

SEQ ID NO: 29407 - protein, 977 aa, synthetic construct
  REGION 1..977: note = engineered CasX variant
QEIKRINKIRRRLVKDSNTKKAGKTGPMKTLLVRVMTPDLRERLENLRKKPENIPQPISNTSRANLNKLLTDYTEMKKAILHVYWEEFQKDPVGLMSRVAQPASKKIDQNKLKPEMDEKGNLTTAGFACSQCGQPLFVYKLEQVSEKGKAYTNYFGRCNVAEHEKLILLAQLKPEKDSDEAVTYSLGKFGQRALDFYSIHVTKESTHPVKPLAQIAGNRYASPVGKALSDACMGTIASFLSKYQDIIIEHQKVVKGNQKRLESLRELAGKENLEYPSVTLPPQPHTKEGVDAYNEVIARVRMWVNLNLWQKLKLSRDDAKPLLRLKGFPSFPLVERQANEVDWWDMVCNVKKLINEKKEDGKVFWQNLAGYKRQEALRPYLSSEEDRKKGKKFARYQLGDLLLHLEKKHGEDWGKVYDEAWERIDKKVEGLSKHIKLEEERRSEDAQSKAALTDWLRAKASFVIEGSKEADKDEFCRCELKLQKWYGDLRGKPFAIEAENSILDISGFSKQYNCAFIWQKDGVKKLNLYLIINYFKGGKLRFKKIKPEAFEANRFYTVINKKSGEIVPMEVNFNFDDPNLIILPLAFGKRQGREFIWNDLLSLETGSLKLANGRVIEKTLYNRRTRQDEPALFVALTFERREVLDSSNIKPMNLIGVDRGENIPAVIALTDPEGCPLSRFKDSLGNPTHILRIGESYKEKQRTIQAKKEVEQRRAGGYSRKYASKAKNLADDMVRNTARDLLYYAVTQDAMLIFENLSRGFGRQGKRTFMAERQYTRMEDWLTAKLAYEGLPSKTYLSKTLAQYTSKTCSNCGFTITSADYDRVLEKLKKTATGWMTTINGKELKVEGQITYYNRYKRQNVVKDLSVELDRLSEESVNNDISSWTKGRSGEALSLLKKRFSHRPVQEKFVCLNCGFETHADEQAALNIARSWLFLRSQEYKKYQTNKTTGNTDKRAFVETWQSFYRKKLKEVWKPAV

SEQ ID NO: 29408 - protein, 978 aa, synthetic construct
  REGION 1..978: note = engineered CasX variant
QEIKRINKIRRRLVKDSNTKKAGKTGPMKTLLVRVMTPDLRERLENLRKKPENIPQPISNTSRANLNKLLTDYTEMKKAILHVYWEEFQKDPVGLMSRVAQPASKKIDQNKLKPEMDEKGNLTTAGFACSQCGQPLFVYKLEQVSEKGKAYTNYFGRCNVAEHEKLILLAQLKPEKDSDEAVTYSLGKFGQRALDFYSIHVTKESTHPVKPLAQIAGNRYASPVGKALSDACMGTIASFLSKYQDIIIEHQKVVKGNQKRLESLRELAGKENLEYPSVTLPPQPHTKEGVDAYNEVIARVRMWVNLNLWQKLKLSRDDAKPLLRLKGFPSFPLVERQANEVDWWDMVCNVKKLINEKKEDGKVFWQNLAGYKRQEALRPYLSSEEDRKKGKKFARYQLGDLLLHLEKKHGEDWGKVYDEAWERIDKKVEGLSKHIKLEEERRSEDAQSKAALTDWLRAKASFVIEGLKEADDKDEFCRCELKLQKWYGDLRGKPFAIEAENSILDISGFSKQYNCAFIWQKDGVKKLNLYLIINYFKGGKLRFKKIKPEAFEANRFYTVINKKSGEIVPMEVNFNFDDPNLIILPLAFGKRQGREFIWNDLLSLETGSLKLANGRVIEKTLYNRRTRQDEPALFVALTFERREVLDSSNIKPMNLIGVDRGENIPAVIALTDPEGCPLSRFKDSLGNPTHILRIGESYKEKQRTIQAKKEVEQRRAGGYSRKYASKAKNLADDMVRNTARDLLYYAVTQDAMLIFENLSRGFGRQGKRTFMAERQYTRMEDWLTAKLAYEGLPSKTYLSKTLAQYTSKTCSNCGFTITSADYDRVLEKLKKTATGWMTTINGKELKVEGQITYYNRYKRQNVVKDLSVELDRLSEESVNNDISSWTKGRSGEALSLLKKRFSHRPVQEKFVCLNCGFETHADEQAALNIARSWLFLRSQEYKKYQTNKTTGNTDKRAFVETWQSFYRKKLKEVWKPAV

SEQ ID NO: 29409 - protein, 978 aa, synthetic construct
  REGION 1..978: note = engineered CasX variant
QEIKRINKIRRRLVKDSNTKKAGKTGPMKTLLVRVMTPDLRERLENLRKKPENIPQPISNTSRANLNKLLTDYTEMKKAILHVYWEEFQKDPVGLMSRVAQPASKKIDQNKLKPEMDEKGNLTTAGFACSQCGQPLFVYKLEQVSEKGKAYTNYFGRCNVAEHEKLILLAQLKPEKDSDEAVTYSLGKFGQRALDFYSIHVTKESTHPVKPLAQIAGNRYASPVGKALSDACMGTIASFLSKYQDIIIEHQKVVKGNQKRLESLRELAGKENLEYPSVTLPPQPHTKEGVDAYNEVIARVRMWVNLNLWQKLKLSRDDAKPLLRLKGFPSFPLVERQANEVDWWDMVCNVKKLINEKKEDGKVFWQNLAGYKRQEALRPYLSSEEDRKKGKKFARYQLGDLLLHLEKKHGEDWGKVYDEAWERIDKKVEGLSKHIKLEEERRSEDAQSKAALTDWLRAKASFVIEGLKEADKDEFCRCELKLQKWYGDLRGKPFAIEAENSILDISGFSKQYNCAFIWQKDGVKKLNLYLIINYFKGGKLRFKKIKPEAFEANRFYTVINKKSGEIVPMEVNFNFDDPNLIILPLAFGKRQGREFIWNDLLSLETGSLKLANGRVIEKTLYNRRTRQDEPALFVALTFERREVLDSSNIKPMNLIGVDRGENIPAVIALTDPEGCPLSRFKDSLGNPTHILRIGESYKEKQRTIQAKKEVEQRRAGGYSRKYASKAKNLADDMVRNTARDLLYYAVTQDAMLIFENLSRGFGRQGKRTFMAERQYTRMEDWLTAKLAYEGLPSKTYLSKTLAQYTSKTCSNCGFTITSADYDRVLEKLKKTATGWMTTINGKELKVEGQITYYNRYKRQNVVKDLSVELDRLSEESVNNDISSWTKGRSGNEALSLLKKRFSHRPVQEKFVCLNCGFETHADEQAALNIARSWLFLRSQEYKKYQTNKTTGNTDKRAFVETWQSFYRKKLKEVWKPAV

SEQ ID NO: 29410 - protein, 977 aa, synthetic construct
  REGION 1..977: note = engineered CasX variant
QEIKRINKIRRRLVKDSNTKKAGKTGPMKTLLVRVMTPDLRERLENLRKKPENIPQPISNTSRANLNKLLTDYTEMKKAILHVYWEEFQKDPVGLMSRVAQPASKKIDQNKLKPEMDEKGNLTTAGFACSQCGQPLFVYKLEQVSEKGKAYTNYFGRCNVAEHEKLILLAQLKPEKDSDEAVTYSLGKFGQRALDFYSIHVTKESTHPVKPLAQIAGNRYASPVGKALSDACMGTIASFLSKYQDIIIEHQKVVKGNQKRLESLRELAGKENLEYPSVTLPPQPHTKEGVDAYNEVIARVRMWVNLNLWQKLKLSRDDAKPLLRLKGFPSFPLVERQANEVDWWDMVCNVKKLINEKKEDGKVFWQNLAGYKRQEALRPYLSSEEDRQKGKKFARYQLGDLLLHLEKKHGEDWGKVYDEAWERIDKKVEGLSKHIKLEEERRSEDAQSKAALTDWLRAKASFVIEGLKEADKDEFCRCELKLQKWYGDLRGKPFAIEAENSILDISGFSKQYNCAFIWQKDGVKKLNLYLIINYFKGGKLRFKKIKPEAFEANRFYTVINKKSGEIVPMEVNFNFDDPNLIILPLAFGKRQGREFIWNDLLSLETGSLKLANGRVIEKTLYNRRTRQDEPALFVALTFERREVLDSSNIKPMNLIGVDRGENIPAVIALTDPEGCPLSRFKDSLGNPTHILRIGESYKEKQRTIQAKKEVEQRRAGGYSRKYASKAKNLADDMVRNTARDLLYYAVTQDAMLIFENLSRGFGRQGKRTFMAERQYTRMEDWLTAKLAYEGLPSKTYLSKTLAQYTSKTCSNCGFTITSADYDRVLEKLKKTATGWMTTINGKELKVEGQITYYNRYKRQNVVKDLSVELDRLSEESVNNDISSWTKGRSGEALSLLKKRFSHRPVQEKFVCLNCGFETHADEQAALNIARSWLFLRSQEYKKYQTNKTTGNTDKRAFVETWQSFYRKKLKEVWKPAV

SEQ ID NO: 29411 - protein, 977 aa, synthetic construct
  REGION 1..977: note = engineered CasX variant
QEIKRINKIRRRLVKDSNTKKAGKTGPMKTLLVRVMTPDLRERLENLRKKPENIPQPISNTSRANLNKLLTDYTEMKKAILHVYWEEFQKDPVGLMSRVAQPASKKIDQNKLKPEMDEKGNLTTAGFACSQCGQPLFVYKLEQVSEKGKAYTNYFGRCNVAEHEKLILLAQLKPEKDSDEAVTYSLGKFGQRALDFYSIHVTKESTHPVKPLAQIAGNRYASPVGKALSDACMGTIASFLSKYQDIIIEHQKVVKGNQKRLESLRELAGKENLEYPSVTLPPQPHTKEGVDAYNEVIARVRMWVNLNLWQKLKLSRDDAKPLLRLKGFPSFPLVERQANEVDWWDMVCNVKKLINEKKEDGKVFWQNLAGYKRQEALRPYLSSEEDRKKGKKFARYQLGDLLLHLEKKHGEDWGKVYDEAWERIDKKVEGLSKHIKLEEERRSEDAQSKAALTDWLRAKASFVIEGLKEADKDEFCRCELKLQKWYGDLRGKPFAIEAENSILDISGFSKQYNCAFIWQKDGVKKLNLYLIINYFKGGKLRFKKIKPEAFEANRFYTVINKKSGEIVPMEVNFNFDDPNLIILPLAFGKRQGREFIWNDLLSLETGSLKLANGRVIEKTLYNRRTRQDEPALFVALTFERREVLDSSNIKPMNLIGVDRGENIPAVIALTDPEGCPLSRFKDSLGNPTHILRIGESYKEKQRTIQAKKEVEQRRAGGYSRKYASKAKNLADDMVRNTARDLLYYAVTQDAMLIFENLSRGFGRQGKRTFMAERQYTRMEDWLTAKLAYEGLPSQTYLSKTLAQYTSKTCSNCGFTITSADYDRVLEKLKKTATGWMTTINGKELKVEGQITYYNRYKRQNVVKDLSVELDRLSEESVNNDISSWTKGRSGEALSLLKKRFSHRPVQEKFVCLNCGFETHADEQAALNIARSWLFLRSQEYKKYQTNKTTGNTDKRAFVETWQSFYRKKLKEVWKPAV

SEQ ID NO: 29412 - protein, 977 aa, synthetic construct
  REGION 1..977: note = engineered CasX variant
QEIKRINKIRRRLVKDSNTKKAGKTGPMKTLLVRVMTPDLRERLENLRKKPENIPQPISNTSRANLNKLLTDYTEMKKAILHVYWEEFQKDPVGLMSRVAQPASKKIDQNKLKPEMDEKGNLTTAGFACSQCGQPLFVYKLEQVSEKGKAYTNYFGRCNVAEHEKLILLAQLKPEKDSDEAVTYSLGKFGQRALDFYSIHVTKESTHPVKPLAQIAGNRYASPVGKALSDACMGTIASFLSKYQDIIIEHQKVVKGNQKRLESLRELAGKENLEYPSVTLPPQPHTKEGVDAYNEVIARVRMWVNLNLWQKLKLSRDDAKPLLRLKGFPSFPLVERQANEVDWWDMVCNVKKLINEKKEDGKVFWQNLAGYKRQEALRPYLSSEEDRKKGKKFARYQLGDLLLHLEKKHGEDWGKVYDEAWERIDKKVEGLSKHIKLEEERRSEDAQSKAALTDWLRAKASFVIEGLKEADKDEFCRCELKLQKWYGDLRGKPFAIEAENSILDISGFSKQYNCAFIWQKDGVKKLNLYLIINYFKGGKLRFKKIKPEAFEANRFYTVINKKSGEIVPMEVNFNFDDPNLIILPLAFGKRQGREFIWNDLLSLETGSLKLANGRVIEKTLYNRRTRQDEPALFVALTFERREVLDSSNIKPMNLIGVDRGENIPAVIALTDPEGCPLSRFKDSLGNPTHILRIGESYKEKQRTIQAKKEVEQRRAGGYSRKYASKAKNLADDMVRNTARDLLYYAVTQDAMLIFENLSRGFGRQGKRTFMAERQYTRMEDWLTAKLAYNGLPSKTYLSKTLAQYTSKTCSNCGFTITSADYDRVLEKLKKTATGWMTTINGKELKVEGQITYYNRYKRQNVVKDLSVELDRLSEESVNNDISSWTKGRSGEALSLLKKRFSHRPVQEKFVCLNCGFETHADEQAALNIARSWLFLRSQEYKKYQTNKTTGNTDKRAFVETWQSFYRKKLKEVWKPAV

SEQ ID NO: 29413 - protein, 977 aa, synthetic construct
  REGION 1..977: note = engineered CasX variant
QEIKRINKIRRRLVKDSNTKKAGKTGPMKTLLVRVMTPDLRERLENLRKKPENIPQPISNTSRANLNKLLTDYTEMKKAILHVYWEEFQKDPVGLMSRVAQPASKKIDQNKLKPEMDEKGNLTTAGFACSQCGQPLFVYKLEQVSEKGKAYTNYFGRCNVAEHEKLIQLAQLKPEKDSDEAVTYSLGKFGQRALDFYSIHVTKESTHPVKPLAQIAGNRYASPVGKALSDACMGTIASFLSKYQDIIIEHQKVVKGNQKRLESLRELAGKENLEYPSVTLPPQPHTKEGVDAYNEVIARVRMWVNLNLWQKLKLSRDDAKPLLRLKGFPSFPLVERQANEVDWWDMVCNVKKLINEKKEDGKVFWQNLAGYKRQEALRPYLSSEEDRKKGKKFARYQLGDLLLHLEKKHGEDWGKVYDEAWERIDKKVEGLSKHIKLEEERRSEDAQSKAALTDWLRAKASFVIEGLKEADKDEFCRCELKLQKWYGDLRGKPFAIEAENSILDISGFSKQYNCAFIWQKDGVKKLNLYLIINYFKGGKLRFKKIKPEAFEANRFYTVINKKSGEIVPMEVNFNFDDPNLIILPLAFGKRQGREFIWNDLLSLETGSLKLANGRVIEKTLYNRRTRQDEPALFVALTFERREVLDSSNIKPMNLIGVDRGENIPAVIALTDPEGCPLSRFKDSLGNPTHILRIGESYKEKQRTIQAKKEVEQRRAGGYSRKYASKAKNLADDMVRNTARDLLYYAVTQDAMLIFENLSRGFGRQGKRTFMAERQYTRMEDWLTAKLAYEGLPSKTYLSKTLAQYTSKTCSNCGFTITSADYDRVLEKLKKTATGWMTTINGKELKVEGQITYYNRYKRQNVVKDLSVELDRLSEESVNNDISSWTKGRSGEALSLLKKRFSHRPVQEKFVCLNCGFETHADEQAALNIARSWLFLRSQEYKKYQTNKTTGNTDKRAFVETWQSFYRKKLKEVWKPAV

SEQ ID NO: 29414 - protein, 977 aa, synthetic construct
  REGION 1..977: note = engineered CasX variant
QEIKRINKIRRRLVKDSNTKKAGKTGPMKTLLVRVMTPDLRERLENLRKKPENIPQPISNTSRANLNKLLTDYTEMKKAILHVYWEEFQKDPVGLMSRVAQPASKKIDQNKLKPEMDEKGNLTTAGFACSQCGQPLFVYKLEQVSEKGKAYTNYFGRCNVAEHEKLILLAQLKPEKDSDEAVTYSLGKFGQRALDFYSIHVTKESTHPVKPLAQIAGNRYASPVGKALSDACMGTIASFLSKYQDIIIEHQKVVKGNQKRLESLRELAGKENLEYPSVTLPPQPHTKEGVDAYNEVIARVRMWVNLNLWQKLKLSRDDAKPLLRLKGFPSFPLVERQANEVDWWDMVCNVKKLINEKKEDGKVFWQNLAIYKRQEALRPYLSSEEDRKKGKKFARYQLGDLLLHLEKKHGEDWGKVYDEAWERIDKKVEGLSKHIKLEEERRSEDAQSKAALTDWLRAKASFVIEGLKEADKDEFCRCELKLQKWYGDLRGKPFAIEAENSILDISGFSKQYNCAFIWQKDGVKKLNLYLIINYFKGGKLRFKKIKPEAFEANRFYTVINKKSGEIVPMEVNFNFDDPNLIILPLAFGKRQGREFIWNDLLSLETGSLKLANGRVIEKTLYNRRTRQDEPALFVALTFERREVLDSSNIKPMNLIGVDRGENIPAVIALTDPEGCPLSRFKDSLGNPTHILRIGESYKEKQRTIQAKKEVEQRRAGGYSRKYASKAKNLADDMVRNTARDLLYYAVTQDAMLIFENLSRGFGRQGKRTFMAERQYTRMEDWLTAKLAYEGLPSKTYLSKTLAQYTSKTCSNCGFTITSADYDRVLEKLKKTATGWMTTINGKELKVEGQITYYNRYKRQNVVKDLSVELDRLSEESVNNDISSWTKGRSGEALSLLKKRFSHRPVQEKFVCLNCGFETHADEQAALNIARSWLFLRSQEYKKYQTNKTTGNTDKRAFVETWQSFYRKKLKEVWKPAV

SEQ ID NO: 29415 - protein, 977 aa, synthetic construct
  REGION 1..977: note = engineered CasX variant
QEIKRINKIRRRLVKDSNTKKAGKTGPMKTLLVRVMTPDLRERLENLRKKPENIPQPISNTSRANLNKLLTDYTEMKKAILHVYWEEFQKDPVGLMSRVAQPASKKIDQNKLKPEMDEKGNLTTAGFACSQCGQPLFVYKLEQVSEKGKAYTNYFGRCNVAEHEKLILLAQLKPEKDSDEAVTYSLGKFGQRALDFYSIHVTKESTHPVKPLAQIAGNRYASPVGKALSDACMGTIASFLSKYQDIIIEHQKVVKGNQKRLESLRELAGKENLEYPSVTLPPQPHTKEGVDAYNEVIARVRMWVNLNLWQKLKLSRDDAKPLLRLKGFPSFPLVERQANEVDWWDMVCNVKKLINEKKEDGKVFWQNLAGYKRQEALRPYLSSEEDREKGKKFARYQLGDLLLHLEKKHGEDWGKVYDEAWERIDKKVEGLSKHIKLEEERRSEDAQSKAALTDWLRAKASFVIEGLKEADKDEFCRCELKLQKWYGDLRGKPFAIEAENSILDISGFSKQYNCAFIWQKDGVKKLNLYLIINYFKGGKLRFKKIKPEAFEANRFYTVINKKSGEIVPMEVNFNFDDPNLIILPLAFGKRQGREFIWNDLLSLETGSLKLANGRVIEKTLYNRRTRQDEPALFVALTFERREVLDSSNIKPMNLIGVDRGENIPAVIALTDPEGCPLSRFKDSLGNPTHILRIGESYKEKQRTIQAKKEVEQRRAGGYSRKYASKAKNLADDMVRNTARDLLYYAVTQDAMLIFENLSRGFGRQGKRTFMAERQYTRMEDWLTAKLAYEGLPSKTYLSKTLAQYTSKTCSNCGFTITSADYDRVLEKLKKTATGWMTTINGKELKVEGQITYYNRYKRQNVVKDLSVELDRLSEESVNNDISSWTKGRSGEALSLLKKRFSHRPVQEKFVCLNCGFETHADEQAALNIARSWLFLRSQEYKKYQTNKTTGNTDKRAFVETWQSFYRKKLKEVWKPAV

SEQ ID NO: 29416 - protein, 977 aa, synthetic construct
  REGION 1..977: note = engineered CasX variant
QEIKRINKIRRRLVKDSNTKKAGKTGPMKTLLVRVMTPDLRERLENLRKKPENIPQPISNTSRANLNKLLTDYTEMKKAILHVYWEEFQKDPVGLMSRVAQPASKKIDQNKLKPEMDEKGNLTTAGFACSQCGQPLFVYKLEQVSEKGKAYTNYFGRCNVAEHEKLILLAQLKPEKDSDEAVTYSLGKFGQRALDFYSIHVTKESTHPVKPLAQIAGNRYASPVGKALSDACMGTIASFLSKYQDIIIEHQKVVKGNQKRLESLRELAGKENLEYPSVTLPPQPHTKEGVDAYNEVIARVRMWVNLNLWQKLKLSRDDAKPLLRLKGFPSFPLVERQANEVDWWDMVCNVKKLINEKKEDGKVFWQNLAGYKRQEALRPYLSSEEDRKKGKKFARYQLGDLLLHLEKKHGEDWGKVYDEAWERIDKKVEGLSKHIKLEEERRSEDAQSKAALTDWLRAKASFVIEGLKEADKDEFCRCELKLQKWYGDLRGKPFAIEAENSILDISGFSKQYNCAFIWQKDGVKKLNLYLIINYFKGGKLRFKKIKPEAFEANRFYTVINKKSGEIVIMEVNFNFDDPNLIILPLAFGKRQGREFIWNDLLSLETGSLKLANGRVIEKTLYNRRTRQDEPALFVALTFERREVLDSSNIKPMNLIGVDRGENIPAVIALTDPEGCPLSRFKDSLGNPTHILRIGESYKEKQRTIQAKKEVEQRRAGGYSRKYASKAKNLADDMVRNTARDLLYYAVTQDAMLIFENLSRGFGRQGKRTFMAERQYTRMEDWLTAKLAYEGLPSKTYLSKTLAQYTSKTCSNCGFTITSADYDRVLEKLKKTATGWMTTINGKELKVEGQITYYNRYKRQNVVKDLSVELDRLSEESVNNDISSWTKGRSGEALSLLKKRFSHRPVQEKFVCLNCGFETHADEQAALNIARSWLFLRSQEYKKYQTNKTTGNTDKRAFVETWQSFYRKKLKEVWKPAV

SEQ ID NO: 29417 - protein, 978 aa, synthetic construct
  REGION 1..978: note = engineered CasX variant
QEIKRINKIRRRLVKDSNTKKAGKTGPMKTLLVRVMTPDLRERLENLRKKPENIPQPISNTSRANLNKLLTDYTEMKKAILHVYWEEFQKDPVGLMSRVAQPASKKIDQNKLKPEMDEKGNLTTAGFACSQCGQPLFVYKLEQVSEKGKAYTNYFGRCNVAEHEKLILLAQLKPEKDSDEAVTYSLGKFGQRALDFYSIHVTKESTHPVKPLAQIAGNRYASGPVGKALSGACMGTIASFLSKYQDIIIEHQKVVKGNQKRLESLRELAGKENLEYPSVTLPPQPHTSEGVDAYNEVIARVRMWVNLNLWQKLKLSRDDAKPLLRLKGFPSFPLVERQANEVDWWDMVCNVKKLINEKKEDGKVFWQNLAGYKRQEALRPYLSSEEDRKKGKKFARYQLGDLLLHLEKKHGEDWGKVYDEAWERIDKKVEGLSKHIKLEEERRSEDAQSKAALTDWLRAKASFVIEGLKEADKDEFCRCELKLQKWYGDLRGKPFAIEAENSILDISGFSKQYNCAFIWQKDGVKKLNLYLIINYFKGGKLRFKKIKPEAFEANRFYTVINKKSGEIVPMEVNFNFDDPNLIILPLAFGKRQGREFIWNDLLSLETGSLKLANGRVIEKTLYNRRTRQDEPALFVALTFERREVLDSSNIKPMNLIGVDRGENIPAVIALTDPEGCPLSRFKDSLGNPTHILRIGESYKEKQRTIQAKKEVEQRRAGGYSRKYASKAKNLADDMVRNTARDLLYYAVTQDAMLIFENLSRGFGRQGKRTFMAERQYTRMEDWLTAKLAYEGLPSKTYLSKTLAQYTSKTCSNCGFTITSADYDRVLEKLKKTATGWMTTINGKELKVEGQITYYNRYKRQNVVKDLSVELDRLSEESVNNDISSWTKGRSGEALSLLKKRFSHRPVQEKFVCLNCGFETHADEQAALNIARSWLFLRSQEYKKYQTNKTTGNTDKRAFVETWQSFYRKKLKEVWKPAV

SEQ ID NO: 29418 - protein, 978 aa, synthetic construct
  REGION 1..978: note = engineered CasX variant
QEIKRINKIRRRLVKDSNTKKAGKTGPMKTLLVRVMTPDLRERLENLRKKPENIPQPISNTSRANLNKLLTDYTEMKKAILHVYWEEFQKDPVGLMSRVAQPASKKIDQNKLKPEMDEKGNLTTAGFACSQCGQPLFVYKLEQVSEKGKAYTNYFGRCNVAEHEKLILLAQLKPEKDSDEAVTYSLGKFGQRALDFYSIHVTKESTHPVKPLAQIAGNRYASGPVGKALSDACMGTIASFLSKYQDIIIEHQKVVKGNQKRLESLRELAGKENLEYPSVTLPPQPHTSEGVDAYNEVIARVRMWVNLNLWQKLKLSRDDAKPLLRLKNFPSFPLVERQANEVDWWDMVCNVKKLINEKKEDGKVFWQNLAGYKRQEALRPYLSSEEDRKKGKKFARYQLGDLLLHLEKKHGEDWGKVYDEAWERIDKKVEGLSKHIKLEEERRSEDAQSKAALTDWLRAKASFVIEGLKEADKDEFCRCELKLQKWYGDLRGKPFAIEAENSILDISGFSKQYNCAFIWQKDGVKKLNLYLIINYFKGGKLRFKKIKPEAFEANRFYTVINKKSGEIVPMEVNFNFDDPNLIILPLAFGKRQGREFIWNDLLSLETGSLKLANGRVIEKTLYNRRTRQDEPALFVALTFERREVLDSSNIKPMNLIGVDRGENIPAVIALTDPEGCPLSRFKDSLGNPTHILRIGESYKEKQRTIQAKKEVEQRRAGGYSRKYASKAKNLADDMVRNTARDLLYYAVTQDAMLIFENLSRGFGRQGKRTFMAERQYTRMEDWLTAKLAYEGLPSKTYLSKTLAQYTSKTCSNCGFTITSADYDRVLEKLKKTATGWMTTINGKELKVEGQITYYNRYKRQNVVKDLSVELDRLSEESVNNDISSWTKGRSGEALSLLKKRFSHRPVQEKFVCLNCGFETHADEQAALNIARSWLFLRSQEYKKYQTNKTTGNTDKRAFVETWQSFYRKKLKEVWKPAV

SEQ ID NO: 29419 - protein, 978 aa, synthetic construct
  REGION 1..978: note = engineered CasX variant
QEIKRINKIRRRLVKDSNTKKAGKTGPMKTLLVRVMTPDLRERLENLRKKPENIPQPISNTSRANLNKLLTDYTEMKKAILHVYWEEFQKDPVGLMSRVAQPASKKIDQNKLKPEMDEKGNLTTAGFACSQCGQPLFVYKLEQVSEKGKAYTNYFGRCNVAEHEKLILLAQLKPEKDSDEAVTYSLGKFGQRALDFYSIHVTKESTHPVKPLAQIAGNRYASGPVGKALSDACMGTIASFLSKYQDIIIEHQKVVKGNQKRLESLRELAGKENLEYPSVTLPPQPHTSEGVDAYNEVIARVRMWVNLNLWQKLKLSRDDAKPLLRLKGFPSFPLVERQANEVDWWDMVCNVKKLINEKKEDGKVFWQNLAGYKRQEALRPYLSSEEDRKKGKKFARYQLGDLLNHLEKKHGEDWGKVYDEAWERIDKKVEGLSKHIKLEEERRSEDAQSKAALTDWLRAKASFVIEGLKEADKDEFCRCELKLQKWYGDLRGKPFAIEAENSILDISGFSKQYNCAFIWQKDGVKKLNLYLIINYFKGGKLRFKKIKPEAFEANRFYTVINKKSGEIVPMEVNFNFDDPNLIILPLAFGKRQGREFIWNDLLSLETGSLKLANGRVIEKTLYNRRTRQDEPALFVALTFERREVLDSSNIKPMNLIGVDRGENIPAVIALTDPEGCPLSRFKDSLGNPTHILRIGESYKEKQRTIQAKKEVEQRRAGGYSRKYASKAKNLADDMVRNTARDLLYYAVTQDAMLIFENLSRGFGRQGKRTFMAERQYTRMEDWLTAKLAYEGLPSKTYLSKTLAQYTSKTCSNCGFTITSADYDRVLEKLKKTATGWMTTINGKELKVEGQITYYNRYKRQNVVKDLSVELDRLSEESVNNDISSWTKGRSGEALSLLKKRFSHRPVQEKFVCLNCGFETHADEQAALNIARSWLFLRSQEYKKYQTNKTTGNTDKRAFVETWQSFYRKKLKEVWKPAV

SEQ ID NO: 29420 - protein, 978 aa, synthetic construct
  REGION 1..978: note = engineered CasX variant
QEIKRINKIRRRLVKDSNTKKAGKTGPMKTLLVRVMTPDLRERLENLRKKPENIPQPISNTSRANLNKLLTDYTEMKKAILHVYWEEFQKDPVGLMSRVAQPASKKIDQNKLKPEMDEKGNLTTAGFACSQCGQPLFVYKLEQVSEKGKAYTNYFGRCNVAEHEKLILLAQLKPEKDSDEAVTYSLGKFGQRALDFYSIHVTKESTHPVKPLAQIAGNRYASGPVGKALSDACMGTIASFLSKYQDIIIEHQKVVKGNQKRLESLRELAGKENLEYPSVTLPPQPHTSEGVDAYNEVIARVRMWVNLNLWQKLKLSRDDAKPLLRLKGFPSFPLVERQANEVDWWDMVCNVKKLINEKKEDGKVFWQNLAGYKRQEALRPYLSSEEDRKKGKKFARYQLGDLLWHLEKKHGEDWGKVYDEAWERIDKKVEGLSKHIKLEEERRSEDAQSKAALTDWLRAKASFVIEGLKEADKDEFCRCELKLQKWYGDLRGKPFAIEAENSILDISGFSKQYNCAFIWQKDGVKKLNLYLIINYFKGGKLRFKKIKPEAFEANRFYTVINKKSGEIVPMEVNFNFDDPNLIILPLAFGKRQGREFIWNDLLSLETGSLKLANGRVIEKTLYNRRTRQDEPALFVALTFERREVLDSSNIKPMNLIGVDRGENIPAVIALTDPEGCPLSRFKDSLGNPTHILRIGESYKEKQRTIQAKKEVEQRRAGGYSRKYASKAKNLADDMVRNTARDLLYYAVTQDAMLIFENLSRGFGRQGKRTFMAERQYTRMEDWLTAKLAYEGLPSKTYLSKTLAQYTSKTCSNCGFTITSADYDRVLEKLKKTATGWMTTINGKELKVEGQITYYNRYKRQNVVKDLSVELDRLSEESVNNDISSWTKGRSGEALSLLKKRFSHRPVQEKFVCLNCGFETHADEQAALNIARSWLFLRSQEYKKYQTNKTTGNTDKRAFVETWQSFYRKKLKEVWKPAV

SEQ ID NO: 29421 - protein, 978 aa, synthetic construct
  REGION 1..978: note = engineered CasX variant
QEIKRINKIRRRLVKDSNTKKAGKTGPMKTLLVRVMTPDLRERLENLRKKPENIPQPISNTSRANLNKLLTDYTEMKKAILHVYWEEFQKDPVGLMSRVAQPASKKIDQNKLKPEMDEKGNLTTAGFACSQCGQPLFVYKLEQVSEKGKAYTNYFGRCNVAEHEKLILLAQLKPEKDSDEAVTYSLGKFGQRALDFYSIHVTKESTHPVKPLAQIAGNRYASGPVGKALSDACMGTIASFLSKYQDIIIEHQKVVKGNQKRLESLRELAGKENLEYPSVTLPPQPHTSEGVDAYNEVIARVRMWVNLNLWQKLKLSRDDAKPLLRLKGFPSFPLVERQANEVDWWDMVCNVKKLINEKKEDGKVFWQNLAGYKRQEALRPYLSSEEDRKKGKKFARYQLGDLLLHLYKKHGEDWGKVYDEAWERIDKKVEGLSKHIKLEEERRSEDAQSKAALTDWLRAKASFVIEGLKEADKDEFCRCELKLQKWYGDLRGKPFAIEAENSILDISGFSKQYNCAFIWQKDGVKKLNLYLIINYFKGGKLRFKKIKPEAFEANRFYTVINKKSGEIVPMEVNFNFDDPNLIILPLAFGKRQGREFIWNDLLSLETGSLKLANGRVIEKTLYNRRTRQDEPALFVALTFERREVLDSSNIKPMNLIGVDRGENIPAVIALTDPEGCPLSRFKDSLGNPTHILRIGESYKEKQRTIQAKKEVEQRRAGGYSRKYASKAKNLADDMVRNTARDLLYYAVTQDAMLIFENLSRGFGRQGKRTFMAERQYTRMEDWLTAKLAYEGLPSKTYLSKTLAQYTSKTCSNCGFTITSADYDRVLEKLKKTATGWMTTINGKELKVEGQITYYNRYKRQNVVKDLSVELDRLSEESVNNDISSWTKGRSGEALSLLKKRFSHRPVQEKFVCLNCGFETHADEQAALNIARSWLFLRSQEYKKYQTNKTTGNTDKRAFVETWQSFYRKKLKEVWKPAV

SEQ ID NO: 29422 - protein, 978 aa, synthetic construct
  REGION 1..978: note = engineered CasX variant
QEIKRINKIRRRLVKDSNTKKAGKTGPMKTLLVRVMTPDLRERLENLRKKPENIPQPISNTSRANLNKLLTDYTEMKKAILHVYWEEFQKDPVGLMSRVAQPASKKIDQNKLKPEMDEKGNLTTAGFACSQCGQPLFVYKLEQVSEKGKAYTNYFGRCNVAEHEKLILLAQLKPEKDSDEAVTYSLGKFGQRALDFYSIHVTKESTHPVKPLAQIAGNRYASGPVGKALSDACMGTIASFLSKYQDIIIEHQKVVKGNQKRLESLRELAGKENLEYPSVTLPPQPHTSEGVDAYNEVIARVRMWVNLNLWQKLKLSRDDAKPLLRLKGFPSFPLVERQANEVDWWDMVCNVKKLINEKKEDGKVFWQNLAGYKRQEALRPYLSSEEDRKKGKKFARYQLGDLLLHLEKKHPEDWGKVYDEAWERIDKKVEGLSKHIKLEEERRSEDAQSKAALTDWLRAKASFVIEGLKEADKDEFCRCELKLQKWYGDLRGKPFAIEAENSILDISGFSKQYNCAFIWQKDGVKKLNLYLIINYFKGGKLRFKKIKPEAFEANRFYTVINKKSGEIVPMEVNFNFDDPNLIILPLAFGKRQGREFIWNDLLSLETGSLKLANGRVIEKTLYNRRTRQDEPALFVALTFERREVLDSSNIKPMNLIGVDRGENIPAVIALTDPEGCPLSRFKDSLGNPTHILRIGESYKEKQRTIQAKKEVEQRRAGGYSRKYASKAKNLADDMVRNTARDLLYYAVTQDAMLIFENLSRGFGRQGKRTFMAERQYTRMEDWLTAKLAYEGLPSKTYLSKTLAQYTSKTCSNCGFTITSADYDRVLEKLKKTATGWMTTINGKELKVEGQITYYNRYKRQNVVKDLSVELDRLSEESVNNDISSWTKGRSGEALSLLKKRFSHRPVQEKFVCLNCGFETHADEQAALNIARSWLFLRSQEYKKYQTNKTTGNTDKRAFVETWQSFYRKKLKEVWKPAV

SEQ ID NO: 29423 - protein, 979 aa, synthetic construct
  REGION 1..979: note = engineered CasX variant
QEIKRINKIRRRLVKDSNTKKAGKTGPMKTLLVRVMTPDLRERLENLRKKPENIPQPISNTSRANLNKLLTDYTEMKKAILHVYWEEFQKDPVGLMSRVAQPASKKIDQNKLKPEMDEKGNLTTAGFACSQCGQPLFVYKLEQVSEKGKAYTNYFGRCNVAEHEKLILLAQLKPEKDSDEAVTYSLGKFGQRALDFYSIHVTKESTHPVKPLAQIAGNRYASGPVGKALSDACMGTIASFLSKYQDIIIEHQKVVKGNQKRLESLRELAGKENLEYPSVTLPPQPHTSEGVDAYNEVIARVRMWVNLNLWQKLKLSRDDAKPLLRLKGFPSFPLVERQANEVDWWDMVCNVKKLINEKKEDGKVFWQNLAGYKRQEALRPYLSSEEDRKKGKKFARYQLGDLLLHLEKKHGERDWGKVYDEAWERIDKKVEGLSKHIKLEEERRSEDAQSKAALTDWLRAKASFVIEGLKEADKDEFCRCELKLQKWYGDLRGKPFAIEAENSILDISGFSKQYNCAFIWQKDGVKKLNLYLIINYFKGGKLRFKKIKPEAFEANRFYTVINKKSGEIVPMEVNFNFDDPNLIILPLAFGKRQGREFIWNDLLSLETGSLKLANGRVIEKTLYNRRTRQDEPALFVALTFERREVLDSSNIKPMNLIGVDRGENIPAVIALTDPEGCPLSRFKDSLGNPTHILRIGESYKEKQRTIQAKKEVEQRRAGGYSRKYASKAKNLADDMVRNTARDLLYYAVTQDAMLIFENLSRGFGRQGKRTFMAERQYTRMEDWLTAKLAYEGLPSKTYLSKTLAQYTSKTCSNCGFTITSADYDRVLEKLKKTATGWMTTINGKELKVEGQITYYNRYKRQNVVKDLSVELDRLSEESVNNDISSWTKGRSGEALSLLKKRFSHRPVQEKFVCLNCGFETHADEQAALNIARSWLFLRSQEYKKYQTNKTTGNTDKRAFVETWQSFYRKKLKEVWKPAV

SEQ ID NO: 29424 - protein, 979 aa, synthetic construct
  REGION 1..979: note = engineered CasX variant
QEIKRINKIRRRLVKDSNTKKAGKTGPMKTLLVRVMTPDLRERLENLRKKPENIPQPISNTSRANLNKLLTDYTEMKKAILHVYWEEFQKDPVGLMSRVAQPASKKIDQNKLKPEMDEKGNLTTAGFACSQCGQPLFVYKLEQVSEKGKAYTNYFGRCNVAEHEKLILLAQLKPEKDSDEAVTYSLGKFGQRALDFYSIHVTKESTHPVKPLAQIAGNRYASGPVGKALSDACMGTIASFLSKYQDIIIEHQKVVKGNQKRLESLRELAGKENLEYPSVTLPPQPHTSEGVDAYNEVIARVRMWVNLNLWQKLKLSRDDAKPLLRLKGFPSFPLVERQANEVDWWDMVCNVKKLINEKKEDGKVFWQNLAGYKRQEALRPYLSSEEDRKKGKKFARYQLGDLLLHLEKKHGEYDWGKVYDEAWERIDKKVEGLSKHIKLEEERRSEDAQSKAALTDWLRAKASFVIEGLKEADKDEFCRCELKLQKWYGDLRGKPFAIEAENSILDISGFSKQYNCAFIWQKDGVKKLNLYLIINYFKGGKLRFKKIKPEAFEANRFYTVINKKSGEIVPMEVNFNFDDPNLIILPLAFGKRQGREFIWNDLLSLETGSLKLANGRVIEKTLYNRRTRQDEPALFVALTFERREVLDSSNIKPMNLIGVDRGENIPAVIALTDPEGCPLSRFKDSLGNPTHILRIGESYKEKQRTIQAKKEVEQRRAGGYSRKYASKAKNLADDMVRNTARDLLYYAVTQDAMLIFENLSRGFGRQGKRTFMAERQYTRMEDWLTAKLAYEGLPSKTYLSKTLAQYTSKTCSNCGFTITSADYDRVLEKLKKTATGWMTTINGKELKVEGQITYYNRYKRQNVVKDLSVELDRLSEESVNNDISSWTKGRSGEALSLLKKRFSHRPVQEKFVCLNCGFETHADEQAALNIARSWLFLRSQEYKKYQTNKTTGNTDKRAFVETWQSFYRKKLKEVWKPAV

SEQ ID NO: 29425 - protein, 978 aa, synthetic construct
  REGION 1..978: note = engineered CasX variant
QEIKRINKIRRRLVKDSNTKKAGKTGPMKTLLVRVMTPDLRERLENLRKKPENIPQPISNTSRANLNKLLTDYTEMKKAILHVYWEEFQKDPVGLMSRVAQPASKKIDQNKLKPEMDEKGNLTTAGFACSQCGQPLFVYKLEQVSEKGKAYTNYFGRCNVAEHEKLILLAQLKPEKDSDEAVTYSLGKFGQRALDFYSIHVTKESTHPVKPLAQIAGNRYASGPVGKALSDACMGTIASFLSKYQDIIIEHQKVVKGNQKRLESLRELAGKENLEYPSVTLPPQPHTSEGVDAYNEVIARVRMWVNLNLWQKLKLSRDDAKPLLRLKGFPSFPLVERQANEVDWWDMVCNVKKLINEKKEDGKVFWQNLAGYKRQEALRPYLSSEEDRKKGKKFARYQLGDLLLHLEKKHGEDWGDVYDEAWERIDKKVEGLSKHIKLEEERRSEDAQSKAALTDWLRAKASFVIEGLKEADKDEFCRCELKLQKWYGDLRGKPFAIEAENSILDISGFSKQYNCAFIWQKDGVKKLNLYLIINYFKGGKLRFKKIKPEAFEANRFYTVINKKSGEIVPMEVNFNFDDPNLIILPLAFGKRQGREFIWNDLLSLETGSLKLANGRVIEKTLYNRRTRQDEPALFVALTFERREVLDSSNIKPMNLIGVDRGENIPAVIALTDPEGCPLSRFKDSLGNPTHILRIGESYKEKQRTIQAKKEVEQRRAGGYSRKYASKAKNLADDMVRNTARDLLYYAVTQDAMLIFENLSRGFGRQGKRTFMAERQYTRMEDWLTAKLAYEGLPSKTYLSKTLAQYTSKTCSNCGFTITSADYDRVLEKLKKTATGWMTTINGKELKVEGQITYYNRYKRQNVVKDLSVELDRLSEESVNNDISSWTKGRSGEALSLLKKRFSHRPVQEKFVCLNCGFETHADEQAALNIARSWLFLRSQEYKKYQTNKTTGNTDKRAFVETWQSFYRKKLKEVWKPAV

SEQ ID NO: 29426 - protein, 978 aa, synthetic construct
  REGION 1..978: note = engineered CasX variant
QEIKRINKIRRRLVKDSNTKKAGKTGPMKTLLVRVMTPDLRERLENLRKKPENIPQPISNTSRANLNKLLTDYTEMKKAILHVYWEEFQKDPVGLMSRVAQPASKKIDQNKLKPEMDEKGNLTTAGFACSQCGQPLFVYKLEQVSEKGKAYTNYFGRCNVAEHEKLILLAQLKPEKDSDEAVTYSLGKFGQRALDFYSIHVTKESTHPVKPLAQIAGNRYASGPVGKALSDACMGTIASFLSKYQDIIIEHQKVVKGNQKRLESLRELAGKENLEYPSVTLPPQPHTSEGVDAYNEVIARVRMWVNLNLWQKLKLSRDDAKPLLRLKGFPSFPLVERQANEVDWWDMVCNVKKLINEKKEDGKVFWQNLAGYKRQEALRPYLSSEEDRKKGKKFARYQLGDLLLHLEKKHGEDWGKVYGEAWERIDKKVEGLSKHIKLEEERRSEDAQSKAALTDWLRAKASFVIEGLKEADKDEFCRCELKLQKWYGDLRGKPFAIEAENSILDISGFSKQYNCAFIWQKDGVKKLNLYLIINYFKGGKLRFKKIKPEAFEANRFYTVINKKSGEIVPMEVNFNFDDPNLIILPLAFGKRQGREFIWNDLLSLETGSLKLANGRVIEKTLYNRRTRQDEPALFVALTFERREVLDSSNIKPMNLIGVDRGENIPAVIALTDPEGCPLSRFKDSLGNPTHILRIGESYKEKQRTIQAKKEVEQRRAGGYSRKYASKAKNLADDMVRNTARDLLYYAVTQDAMLIFENLSRGFGRQGKRTFMAERQYTRMEDWLTAKLAYEGLPSKTYLSKTLAQYTSKTCSNCGFTITSADYDRVLEKLKKTATGWMTTINGKELKVEGQITYYNRYKRQNVVKDLSVELDRLSEESVNNDISSWTKGRSGEALSLLKKRFSHRPVQEKFVCLNCGFETHADEQAALNIARSWLFLRSQEYKKYQTNKTTGNTDKRAFVETWQSFYRKKLKEVWKPAV

SEQ ID NO: 29427 - protein, 978 aa, synthetic construct
  REGION 1..978: note = engineered CasX variant
QEIKRINKIRRRLVKDSNTKKAGKTGPMKTLLVRVMTPDLRERLENLRKKPENIPQPISNTSRANLNKLLTDYTEMKKAILHVYWEEFQKDPVGLMSRVAQPASKKIDQNKLKPEMDEKGNLTTAGFACSQCGQPLFVYKLEQVSEKGKAYTNYFGRCNVAEHEKLILLAQLKPEKDSDEAVTYSLGKFGQRALDFYSIHVTKESTHPVKPLAQIAGNRYASGPVGKALSDACMGTIASFLSKYQDIIIEHQKVVKGNQKRLESLRELAGKENLEYPSVTLPPQPHTSEGVDAYNEVIARVRMWVNLNLWQKLKLSRDDAKPLLRLKGFPSFPLVERQANEVDWWDMVCNVKKLINEKKEDGKVFWQNLAGYKRQEALRPYLSSEEDRKKGKKFARYQLGDLLLHLEKKHGEDWGKVYDEAWERIDKKVEGLSKHIKLEEERRSEDAQSKAALTDWLRAKASFVIEGKKEADKDEFCRCELKLQKWYGDLRGKPFAIEAENSILDISGFSKQYNCAFIWQKDGVKKLNLYLIINYFKGGKLRFKKIKPEAFEANRFYTVINKKSGEIVPMEVNFNFDDPNLIILPLAFGKRQGREFIWNDLLSLETGSLKLANGRVIEKTLYNRRTRQDEPALFVALTFERREVLDSSNIKPMNLIGVDRGENIPAVIALTDPEGCPLSRFKDSLGNPTHILRIGESYKEKQRTIQAKKEVEQRRAGGYSRKYASKAKNLADDMVRNTARDLLYYAVTQDAMLIFENLSRGFGRQGKRTFMAERQYTRMEDWLTAKLAYEGLPSKTYLSKTLAQYTSKTCSNCGFTITSADYDRVLEKLKKTATGWMTTINGKELKVEGQITYYNRYKRQNVVKDLSVELDRLSEESVNNDISSWTKGRSGEALSLLKKRFSHRPVQEKFVCLNCGFETHADEQAALNIARSWLFLRSQEYKKYQTNKTTGNTDKRAFVETWQSFYRKKLKEVWKPAV

SEQ ID NO: 29428 - protein, 978 aa, synthetic construct
  REGION 1..978: note = engineered CasX variant
QEIKRINKIRRRLVKDSNTKKAGKTGPMKTLLVRVMTPDLRERLENLRKKPENIPQPISNTSRANLNKLLTDYTEMKKAILHVYWEEFQKDPVGLMSRVAQPASKKIDQNKLKPEMDEKGNLTTAGFACSQCGQPLFVYKLEQVSEKGKAYTNYFGRCNVAEHEKLILLAQLKPEKDSDEAVTYSLGKFGQRALDFYSIHVTKESTHPVKPLAQIAGNRYASGPVGKALSDACMGTIASFLSKYQDIIIEHQKVVKGNQKRLESLRELAGKENLEYPSVTLPPQPHTSEGVDAYNEVIARVRMWVNLNLWQKLKLSRDDAKPLLRLKGFPSFPLVERQANEVDWWDMVCNVKKLINEKKEDGKVFWQNLAGYKRQEALRPYLSSEEDRKKGKKFARYQLGDLLLHLEKKHGEDWGKVYDEAWERIDKKVEGLSKHIKLEEERRSEDAQSKAALTDWLRAKASFVIEGSKEADKDEFCRCELKLQKWYGDLRGKPFAIEAENSILDISGFSKQYNCAFIWQKDGVKKLNLYLIINYFKGGKLRFKKIKPEAFEANRFYTVINKKSGEIVPMEVNFNFDDPNLIILPLAFGKRQGREFIWNDLLSLETGSLKLANGRVIEKTLYNRRTRQDEPALFVALTFERREVLDSSNIKPMNLIGVDRGENIPAVIALTDPEGCPLSRFKDSLGNPTHILRIGESYKEKQRTIQAKKEVEQRRAGGYSRKYASKAKNLADDMVRNTARDLLYYAVTQDAMLIFENLSRGFGRQGKRTFMAERQYTRMEDWLTAKLAYEGLPSKTYLSKTLAQYTSKTCSNCGFTITSADYDRVLEKLKKTATGWMTTINGKELKVEGQITYYNRYKRQNVVKDLSVELDRLSEESVNNDISSWTKGRSGEALSLLKKRFSHRPVQEKFVCLNCGFETHADEQAALNIARSWLFLRSQEYKKYQTNKTTGNTDKRAFVETWQSFYRKKLKEVWKPAV

SEQ ID NO: 29429 - protein, 979 aa, synthetic construct
  REGION 1..979: note = engineered CasX variant
QEIKRINKIRRRLVKDSNTKKAGKTGPMKTLLVRVMTPDLRERLENLRKKPENIPQPISNTSRANLNKLLTDYTEMKKAILHVYWEEFQKDPVGLMSRVAQPASKKIDQNKLKPEMDEKGNLTTAGFACSQCGQPLFVYKLEQVSEKGKAYTNYFGRCNVAEHEKLILLAQLKPEKDSDEAVTYSLGKFGQRALDFYSIHVTKESTHPVKPLAQIAGNRYASGPVGKALSDACMGTIASFLSKYQDIIIEHQKVVKGNQKRLESLRELAGKENLEYPSVTLPPQPHTSEGVDAYNEVIARVRMWVNLNLWQKLKLSRDDAKPLLRLKGFPSFPLVERQANEVDWWDMVCNVKKLINEKKEDGKVFWQNLAGYKRQEALRPYLSSEEDRKKGKKFARYQLGDLLLHLEKKHGEDWGKVYDEAWERIDKKVEGLSKHIKLEEERRSEDAQSKAALTDWLRAKASFVIEGLKEADDKDEFCRCELKLQKWYGDLRGKPFAIEAENSILDISGFSKQYNCAFIWQKDGVKKLNLYLIINYFKGGKLRFKKIKPEAFEANRFYTVINKKSGEIVPMEVNFNFDDPNLIILPLAFGKRQGREFIWNDLLSLETGSLKLANGRVIEKTLYNRRTRQDEPALFVALTFERREVLDSSNIKPMNLIGVDRGENIPAVIALTDPEGCPLSRFKDSLGNPTHILRIGESYKEKQRTIQAKKEVEQRRAGGYSRKYASKAKNLADDMVRNTARDLLYYAVTQDAMLIFENLSRGFGRQGKRTFMAERQYTRMEDWLTAKLAYEGLPSKTYLSKTLAQYTSKTCSNCGFTITSADYDRVLEKLKKTATGWMTTINGKELKVEGQITYYNRYKRQNVVKDLSVELDRLSEESVNNDISSWTKGRSGEALSLLKKRFSHRPVQEKFVCLNCGFETHADEQAALNIARSWLFLRSQEYKKYQTNKTTGNTDKRAFVETWQSFYRKKLKEVWKPAV

SEQ ID NO: 29430 - protein, 979 aa, synthetic construct
  REGION 1..979: note = engineered CasX variant
QEIKRINKIRRRLVKDSNTKKAGKTGPMKTLLVRVMTPDLRERLENLRKKPENIPQPISNTSRANLNKLLTDYTEMKKAILHVYWEEFQKDPVGLMSRVAQPASKKIDQNKLKPEMDEKGNLTTAGFACSQCGQPLFVYKLEQVSEKGKAYTNYFGRCNVAEHEKLILLAQLKPEKDSDEAVTYSLGKFGQRALDFYSIHVTKESTHPVKPLAQIAGNRYASGPVGKALSDACMGTIASFLSKYQDIIIEHQKVVKGNQKRLESLRELAGKENLEYPSVTLPPQPHTSEGVDAYNEVIARVRMWVNLNLWQKLKLSRDDAKPLLRLKGFPSFPLVERQANEVDWWDMVCNVKKLINEKKEDGKVFWQNLAGYKRQEALRPYLSSEEDRKKGKKFARYQLGDLLLHLEKKHGEDWGKVYDEAWERIDKKVEGLSKHIKLEEERRSEDAQSKAALTDWLRAKASFVIEGLKEADKDEFCRCELKLQKWYGDLRGKPFAIEAENSILDISGFSKQYNCAFIWQKDGVKKLNLYLIINYFKGGKLRFKKIKPEAFEANRFYTVINKKSGEIVPMEVNFNFDDPNLIILPLAFGKRQGREFIWNDLLSLETGSLKLANGRVIEKTLYNRRTRQDEPALFVALTFERREVLDSSNIKPMNLIGVDRGENIPAVIALTDPEGCPLSRFKDSLGNPTHILRIGESYKEKQRTIQAKKEVEQRRAGGYSRKYASKAKNLADDMVRNTARDLLYYAVTQDAMLIFENLSRGFGRQGKRTFMAERQYTRMEDWLTAKLAYEGLPSKTYLSKTLAQYTSKTCSNCGFTITSADYDRVLEKLKKTATGWMTTINGKELKVEGQITYYNRYKRQNVVKDLSVELDRLSEESVNNDISSWTKGRSGNEALSLLKKRFSHRPVQEKFVCLNCGFETHADEQAALNIARSWLFLRSQEYKKYQTNKTTGNTDKRAFVETWQSFYRKKLKEVWKPAV

SEQ ID NO: 29431 - protein, 978 aa, synthetic construct
  REGION 1..978: note = engineered CasX variant
QEIKRINKIRRRLVKDSNTKKAGKTGPMKTLLVRVMTPDLRERLENLRKKPENIPQPISNTSRANLNKLLTDYTEMKKAILHVYWEEFQKDPVGLMSRVAQPASKKIDQNKLKPEMDEKGNLTTAGFACSQCGQPLFVYKLEQVSEKGKAYTNYFGRCNVAEHEKLILLAQLKPEKDSDEAVTYSLGKFGQRALDFYSIHVTKESTHPVKPLAQIAGNRYASGPVGKALSDACMGTIASFLSKYQDIIIEHQKVVKGNQKRLESLRELAGKENLEYPSVTLPPQPHTSEGVDAYNEVIARVRMWVNLNLWQKLKLSRDDAKPLLRLKGFPSFPLVERQANEVDWWDMVCNVKKLINEKKEDGKVFWQNLAGYKRQEALRPYLSSEEDRQKGKKFARYQLGDLLLHLEKKHGEDWGKVYDEAWERIDKKVEGLSKHIKLEEERRSEDAQSKAALTDWLRAKASFVIEGLKEADKDEFCRCELKLQKWYGDLRGKPFAIEAENSILDISGFSKQYNCAFIWQKDGVKKLNLYLIINYFKGGKLRFKKIKPEAFEANRFYTVINKKSGEIVPMEVNFNFDDPNLIILPLAFGKRQGREFIWNDLLSLETGSLKLANGRVIEKTLYNRRTRQDEPALFVALTFERREVLDSSNIKPMNLIGVDRGENIPAVIALTDPEGCPLSRFKDSLGNPTHILRIGESYKEKQRTIQAKKEVEQRRAGGYSRKYASKAKNLADDMVRNTARDLLYYAVTQDAMLIFENLSRGFGRQGKRTFMAERQYTRMEDWLTAKLAYEGLPSKTYLSKTLAQYTSKTCSNCGFTITSADYDRVLEKLKKTATGWMTTINGKELKVEGQITYYNRYKRQNVVKDLSVELDRLSEESVNNDISSWTKGRSGEALSLLKKRFSHRPVQEKFVCLNCGFETHADEQAALNIARSWLFLRSQEYKKYQTNKTTGNTDKRAFVETWQSFYRKKLKEVWKPAV

SEQ ID NO: 29432 - protein, 978 aa, synthetic construct
  REGION 1..978: note = engineered CasX variant
QEIKRINKIRRRLVKDSNTKKAGKTGPMKTLLVRVMTPDLRERLENLRKKPENIPQPISNTSRANLNKLLTDYTEMKKAILHVYWEEFQKDPVGLMSRVAQPASKKIDQNKLKPEMDEKGNLTTAGFACSQCGQPLFVYKLEQVSEKGKAYTNYFGRCNVAEHEKLILLAQLKPEKDSDEAVTYSLGKFGQRALDFYSIHVTKESTHPVKPLAQIAGNRYASGPVGKALSDACMGTIASFLSKYQDIIIEHQKVVKGNQKRLESLRELAGKENLEYPSVTLPPQPHTSEGVDAYNEVIARVRMWVNLNLWQKLKLSRDDAKPLLRLKGFPSFPLVERQANEVDWWDMVCNVKKLINEKKEDGKVFWQNLAGYKRQEALRPYLSSEEDRKKGKKFARYQLGDLLLHLEKKHGEDWGKVYDEAWERIDKKVEGLSKHIKLEEERRSEDAQSKAALTDWLRAKASFVIEGLKEADKDEFCRCELKLQKWYGDLRGKPFAIEAENSILDISGFSKQYNCAFIWQKDGVKKLNLYLIINYFKGGKLRFKKIKPEAFEANRFYTVINKKSGEIVPMEVNFNFDDPNLIILPLAFGKRQGREFIWNDLLSLETGSLKLANGRVIEKTLYNRRTRQDEPALFVALTFERREVLDSSNIKPMNLIGVDRGENIPAVIALTDPEGCPLSRFKDSLGNPTHILRIGESYKEKQRTIQAKKEVEQRRAGGYSRKYASKAKNLADDMVRNTARDLLYYAVTQDAMLIFENLSRGFGRQGKRTFMAERQYTRMEDWLTAKLAYEGLPSQTYLSKTLAQYTSKTCSNCGFTITSADYDRVLEKLKKTATGWMTTINGKELKVEGQITYYNRYKRQNVVKDLSVELDRLSEESVNNDISSWTKGRSGEALSLLKKRFSHRPVQEKFVCLNCGFETHADEQAALNIARSWLFLRSQEYKKYQTNKTTGNTDKRAFVETWQSFYRKKLKEVWKPAV

SEQ ID NO: 29433 - protein, 978 aa, synthetic construct
  REGION 1..978: note = engineered CasX variant
QEIKRINKIRRRLVKDSNTKKAGKTGPMKTLLVRVMTPDLRERLENLRKKPENIPQPISNTSRANLNKLLTDYTEMKKAILHVYWEEFQKDPVGLMSRVAQPASKKIDQNKLKPEMDEKGNLTTAGFACSQCGQPLFVYKLEQVSEKGKAYTNYFGRCNVAEHEKLILLAQLKPEKDSDEAVTYSLGKFGQRALDFYSIHVTKESTHPVKPLAQIAGNRYASGPVGKALSDACMGTIASFLSKYQDIIIEHQKVVKGNQKRLESLRELAGKENLEYPSVTLPPQPHTSEGVDAYNEVIARVRMWVNLNLWQKLKLSRDDAKPLLRLKGFPSFPLVERQANEVDWWDMVCNVKKLINEKKEDGKVFWQNLAGYKRQEALRPYLSSEEDRKKGKKFARYQLGDLLLHLEKKHGEDWGKVYDEAWERIDKKVEGLSKHIKLEEERRSEDAQSKAALTDWLRAKASFVIEGLKEADKDEFCRCELKLQKWYGDLRGKPFAIEAENSILDISGFSKQYNCAFIWQKDGVKKLNLYLIINYFKGGKLRFKKIKPEAFEANRFYTVINKKSGEIVPMEVNFNFDDPNLIILPLAFGKRQGREFIWNDLLSLETGSLKLANGRVIEKTLYNRRTRQDEPALFVALTFERREVLDSSNIKPMNLIGVDRGENIPAVIALTDPEGCPLSRFKDSLGNPTHILRIGESYKEKQRTIQAKKEVEQRRAGGYSRKYASKAKNLADDMVRNTARDLLYYAVTQDAMLIFENLSRGFGRQGKRTFMAERQYTRMEDWLTAKLAYNGLPSKTYLSKTLAQYTSKTCSNCGFTITSADYDRVLEKLKKTATGWMTTINGKELKVEGQITYYNRYKRQNVVKDLSVELDRLSEESVNNDISSWTKGRSGEALSLLKKRFSHRPVQEKFVCLNCGFETHADEQAALNIARSWLFLRSQEYKKYQTNKTTGNTDKRAFVETWQSFYRKKLKEVWKPAV

SEQ ID NO: 29434 - protein, 978 aa, synthetic construct
  REGION 1..978: note = engineered CasX variant
QEIKRINKIRRRLVKDSNTKKAGKTGPMKTLLVRVMTPDLRERLENLRKKPENIPQPISNTSRANLNKLLTDYTEMKKAILHVYWEEFQKDPVGLMSRVAQPASKKIDQNKLKPEMDEKGNLTTAGFACSQCGQPLFVYKLEQVSEKGKAYTNYFGRCNVAEHEKLIQLAQLKPEKDSDEAVTYSLGKFGQRALDFYSIHVTKESTHPVKPLAQIAGNRYASGPVGKALSDACMGTIASFLSKYQDIIIEHQKVVKGNQKRLESLRELAGKENLEYPSVTLPPQPHTSEGVDAYNEVIARVRMWVNLNLWQKLKLSRDDAKPLLRLKGFPSFPLVERQANEVDWWDMVCNVKKLINEKKEDGKVFWQNLAGYKRQEALRPYLSSEEDRKKGKKFARYQLGDLLLHLEKKHGEDWGKVYDEAWERIDKKVEGLSKHIKLEEERRSEDAQSKAALTDWLRAKASFVIEGLKEADKDEFCRCELKLQKWYGDLRGKPFAIEAENSILDISGFSKQYNCAFIWQKDGVKKLNLYLIINYFKGGKLRFKKIKPEAFEANRFYTVINKKSGEIVPMEVNFNFDDPNLIILPLAFGKRQGREFIWNDLLSLETGSLKLANGRVIEKTLYNRRTRQDEPALFVALTFERREVLDSSNIKPMNLIGVDRGENIPAVIALTDPEGCPLSRFKDSLGNPTHILRIGESYKEKQRTIQAKKEVEQRRAGGYSRKYASKAKNLADDMVRNTARDLLYYAVTQDAMLIFENLSRGFGRQGKRTFMAERQYTRMEDWLTAKLAYEGLPSKTYLSKTLAQYTSKTCSNCGFTITSADYDRVLEKLKKTATGWMTTINGKELKVEGQITYYNRYKRQNVVKDLSVELDRLSEESVNNDISSWTKGRSGEALSLLKKRFSHRPVQEKFVCLNCGFETHADEQAALNIARSWLFLRSQEYKKYQTNKTTGNTDKRAFVETWQSFYRKKLKEVWKPAV

SEQ ID NO: 29435 - protein, 978 aa, synthetic construct
  REGION 1..978: note = engineered CasX variant
QEIKRINKIRRRLVKDSNTKKAGKTGPMKTLLVRVMTPDLRERLENLRKKPENIPQPISNTSRANLNKLLTDYTEMKKAILHVYWEEFQKDPVGLMSRVAQPASKKIDQNKLKPEMDEKGNLTTAGFACSQCGQPLFVYKLEQVSEKGKAYTNYFGRCNVAEHEKLILLAQLKPEKDSDEAVTYSLGKFGQRALDFYSIHVTKESTHPVKPLAQIAGNRYASGPVGKALSDACMGTIASFLSKYQDIIIEHQKVVKGNQKRLESLRELAGKENLEYPSVTLPPQPHTSEGVDAYNEVIARVRMWVNLNLWQKLKLSRDDAKPLLRLKGFPSFPLVERQANEVDWWDMVCNVKKLINEKKEDGKVFWQNLAIYKRQEALRPYLSSEEDRKKGKKFARYQLGDLLLHLEKKHGEDWGKVYDEAWERIDKKVEGLSKHIKLEEERRSEDAQSKAALTDWLRAKASFVIEGLKEADKDEFCRCELKLQKWYGDLRGKPFAIEAENSILDISGFSKQYNCAFIWQKDGVKKLNLYLIINYFKGGKLRFKKIKPEAFEANRFYTVINKKSGEIVPMEVNFNFDDPNLIILPLAFGKRQGREFIWNDLLSLETGSLKLANGRVIEKTLYNRRTRQDEPALFVALTFERREVLDSSNIKPMNLIGVDRGENIPAVIALTDPEGCPLSRFKDSLGNPTHILRIGESYKEKQRTIQAKKEVEQRRAGGYSRKYASKAKNLADDMVRNTARDLLYYAVTQDAMLIFENLSRGFGRQGKRTFMAERQYTRMEDWLTAKLAYEGLPSKTYLSKTLAQYTSKTCSNCGFTITSADYDRVLEKLKKTATGWMTTINGKELKVEGQITYYNRYKRQNVVKDLSVELDRLSEESVNNDISSWTKGRSGEALSLLKKRFSHRPVQEKFVCLNCGFETHADEQAALNIARSWLFLRSQEYKKYQTNKTTGNTDKRAFVETWQSFYRKKLKEVWKPAV

SEQ ID NO: 29436 - protein, 978 aa, synthetic construct
  REGION 1..978: note = engineered CasX variant
QEIKRINKIRRRLVKDSNTKKAGKTGPMKTLLVRVMTPDLRERLENLRKKPENIPQPISNTSRANLNKLLTDYTEMKKAILHVYWEEFQKDPVGLMSRVAQPASKKIDQNKLKPEMDEKGNLTTAGFACSQCGQPLFVYKLEQVSEKGKAYTNYFGRCNVAEHEKLILLAQLKPEKDSDEAVTYSLGKFGQRALDFYSIHVTKESTHPVKPLAQIAGNRYASGPVGKALSDACMGTIASFLSKYQDIIIEHQKVVKGNQKRLESLRELAGKENLEYPSVTLPPQPHTSEGVDAYNEVIARVRMWVNLNLWQKLKLSRDDAKPLLRLKGFPSFPLVERQANEVDWWDMVCNVKKLINEKKEDGKVFWQNLAGYKRQEALRPYLSSEEDREKGKKFARYQLGDLLLHLEKKHGEDWGKVYDEAWERIDKKVEGLSKHIKLEEERRSEDAQSKAALTDWLRAKASFVIEGLKEADKDEFCRCELKLQKWYGDLRGKPFAIEAENSILDISGFSKQYNCAFIWQKDGVKKLNLYLIINYFKGGKLRFKKIKPEAFEANRFYTVINKKSGEIVPMEVNFNFDDPNLIILPLAFGKRQGREFIWNDLLSLETGSLKLANGRVIEKTLYNRRTRQDEPALFVALTFERREVLDSSNIKPMNLIGVDRGENIPAVIALTDPEGCPLSRFKDSLGNPTHILRIGESYKEKQRTIQAKKEVEQRRAGGYSRKYASKAKNLADDMVRNTARDLLYYAVTQDAMLIFENLSRGFGRQGKRTFMAERQYTRMEDWLTAKLAYEGLPSKTYLSKTLAQYTSKTCSNCGFTITSADYDRVLEKLKKTATGWMTTINGKELKVEGQITYYNRYKRQNVVKDLSVELDRLSEESVNNDISSWTKGRSGEALSLLKKRFSHRPVQEKFVCLNCGFETHADEQAALNIARSWLFLRSQEYKKYQTNKTTGNTDKRAFVETWQSFYRKKLKEVWKPAV

SEQ ID NO: 29437 - protein, 978 aa, synthetic construct
  REGION 1..978: note = engineered CasX variant
QEIKRINKIRRRLVKDSNTKKAGKTGPMKTLLVRVMTPDLRERLENLRKKPENIPQPISNTSRANLNKLLTDYTEMKKAILHVYWEEFQKDPVGLMSRVAQPASKKIDQNKLKPEMDEKGNLTTAGFACSQCGQPLFVYKLEQVSEKGKAYTNYFGRCNVAEHEKLILLAQLKPEKDSDEAVTYSLGKFGQRALDFYSIHVTKESTHPVKPLAQIAGNRYASGPVGKALSDACMGTIASFLSKYQDIIIEHQKVVKGNQKRLESLRELAGKENLEYPSVTLPPQPHTSEGVDAYNEVIARVRMWVNLNLWQKLKLSRDDAKPLLRLKGFPSFPLVERQANEVDWWDMVCNVKKLINEKKEDGKVFWQNLAGYKRQEALRPYLSSEEDRKKGKKFARYQLGDLLLHLEKKHGEDWGKVYDEAWERIDKKVEGLSKHIKLEEERRSEDAQSKAALTDWLRAKASFVIEGLKEADKDEFCRCELKLQKWYGDLRGKPFAIEAENSILDISGFSKQYNCAFIWQKDGVKKLNLYLIINYFKGGKLRFKKIKPEAFEANRFYTVINKKSGEIVIMEVNFNFDDPNLIILPLAFGKRQGREFIWNDLLSLETGSLKLANGRVIEKTLYNRRTRQDEPALFVALTFERREVLDSSNIKPMNLIGVDRGENIPAVIALTDPEGCPLSRFKDSLGNPTHILRIGESYKEKQRTIQAKKEVEQRRAGGYSRKYASKAKNLADDMVRNTARDLLYYAVTQDAMLIFENLSRGFGRQGKRTFMAERQYTRMEDWLTAKLAYEGLPSKTYLSKTLAQYTSKTCSNCGFTITSADYDRVLEKLKKTATGWMTTINGKELKVEGQITYYNRYKRQNVVKDLSVELDRLSEESVNNDISSWTKGRSGEALSLLKKRFSHRPVQEKFVCLNCGFETHADEQAALNIARSWLFLRSQEYKKYQTNKTTGNTDKRAFVETWQSFYRKKLKEVWKPAV

SEQ ID NO: 29438 - protein, 978 aa, synthetic construct
  REGION 1..978: note = engineered CasX variant
QEIKRINKIRRRLVKDSNTKKAGKTGPMKTLLVRVMTPDLRERLENLRKKPENIPQPISNTSRANLNKLLTDYTEMKKAILHVYWEEFQKDPVGLMSRVAQPASKKIDQNKLKPEMDEKGNLTTAGFACSQCGQPLFVYKLEQVSEKGKAYTNYFGRCNVAEHEKLILLAQLKPEKDSDEAVTYSLGKFGQRALDFYSIHVTKESTHPVKPLAQIAGNRYASGPVGKALSGACMGTIASFLSKYQDIIIEHQKVVKGNQKRLESLRELAGKENLEYPSVTLPPQPHTKEGLDAYNEVIARVRMWVNLNLWQKLKLSRDDAKPLLRLKGFPSFPLVERQANEVDWWDMVCNVKKLINEKKEDGKVFWQNLAGYKRQEALRPYLSSEEDRKKGKKFARYQLGDLLLHLEKKHGEDWGKVYDEAWERIDKKVEGLSKHIKLEEERRSEDAQSKAALTDWLRAKASFVIEGLKEADKDEFCRCELKLQKWYGDLRGKPFAIEAENSILDISGFSKQYNCAFIWQKDGVKKLNLYLIINYFKGGKLRFKKIKPEAFEANRFYTVINKKSGEIVPMEVNFNFDDPNLIILPLAFGKRQGREFIWNDLLSLETGSLKLANGRVIEKTLYNRRTRQDEPALFVALTFERREVLDSSNIKPMNLIGVDRGENIPAVIALTDPEGCPLSRFKDSLGNPTHILRIGESYKEKQRTIQAKKEVEQRRAGGYSRKYASKAKNLADDMVRNTARDLLYYAVTQDAMLIFENLSRGFGRQGKRTFMAERQYTRMEDWLTAKLAYEGLPSKTYLSKTLAQYTSKTCSNCGFTITSADYDRVLEKLKKTATGWMTTINGKELKVEGQITYYNRYKRQNVVKDLSVELDRLSEESVNNDISSWTKGRSGEALSLLKKRFSHRPVQEKFVCLNCGFETHADEQAALNIARSWLFLRSQEYKKYQTNKTTGNTDKRAFVETWQSFYRKKLKEVWKPAV

SEQ ID NO: 29439 - protein, 978 aa, synthetic construct
  REGION 1..978: note = engineered CasX variant
QEIKRINKIRRRLVKDSNTKKAGKTGPMKTLLVRVMTPDLRERLENLRKKPENIPQPISNTSRANLNKLLTDYTEMKKAILHVYWEEFQKDPVGLMSRVAQPASKKIDQNKLKPEMDEKGNLTTAGFACSQCGQPLFVYKLEQVSEKGKAYTNYFGRCNVAEHEKLILLAQLKPEKDSDEAVTYSLGKFGQRALDFYSIHVTKESTHPVKPLAQIAGNRYASGPVGKALSDACMGTIASFLSKYQDIIIEHQKVVKGNQKRLESLRELAGKENLEYPSVTLPPQPHTKEGLDAYNEVIARVRMWVNLNLWQKLKLSRDDAKPLLRLKNFPSFPLVERQANEVDWWDMVCNVKKLINEKKEDGKVFWQNLAGYKRQEALRPYLSSEEDRKKGKKFARYQLGDLLLHLEKKHGEDWGKVYDEAWERIDKKVEGLSKHIKLEEERRSEDAQSKAALTDWLRAKASFVIEGLKEADKDEFCRCELKLQKWYGDLRGKPFAIEAENSILDISGFSKQYNCAFIWQKDGVKKLNLYLIINYFKGGKLRFKKIKPEAFEANRFYTVINKKSGEIVPMEVNFNFDDPNLIILPLAFGKRQGREFIWNDLLSLETGSLKLANGRVIEKTLYNRRTRQDEPALFVALTFERREVLDSSNIKPMNLIGVDRGENIPAVIALTDPEGCPLSRFKDSLGNPTHILRIGESYKEKQRTIQAKKEVEQRRAGGYSRKYASKAKNLADDMVRNTARDLLYYAVTQDAMLIFENLSRGFGRQGKRTFMAERQYTRMEDWLTAKLAYEGLPSKTYLSKTLAQYTSKTCSNCGFTITSADYDRVLEKLKKTATGWMTTINGKELKVEGQITYYNRYKRQNVVKDLSVELDRLSEESVNNDISSWTKGRSGEALSLLKKRFSHRPVQEKFVCLNCGFETHADEQAALNIARSWLFLRSQEYKKYQTNKTTGNTDKRAFVETWQSFYRKKLKEVWKPAV

SEQ ID NO: 29440 - protein, 978 aa, synthetic construct
  REGION 1..978: note = engineered CasX variant
QEIKRINKIRRRLVKDSNTKKAGKTGPMKTLLVRVMTPDLRERLENLRKKPENIPQPISNTSRANLNKLLTDYTEMKKAILHVYWEEFQKDPVGLMSRVAQPASKKIDQNKLKPEMDEKGNLTTAGFACSQCGQPLFVYKLEQVSEKGKAYTNYFGRCNVAEHEKLILLAQLKPEKDSDEAVTYSLGKFGQRALDFYSIHVTKESTHPVKPLAQIAGNRYASGPVGKALSDACMGTIASFLSKYQDIIIEHQKVVKGNQKRLESLRELAGKENLEYPSVTLPPQPHTKEGLDAYNEVIARVRMWVNLNLWQKLKLSRDDAKPLLRLKGFPSFPLVERQANEVDWWDMVCNVKKLINEKKEDGKVFWQNLAGYKRQEALRPYLSSEEDRKKGKKFARYQLGDLLNHLEKKHGEDWGKVYDEAWERIDKKVEGLSKHIKLEEERRSEDAQSKAALTDWLRAKASFVIEGLKEADKDEFCRCELKLQKWYGDLRGKPFAIEAENSILDISGFSKQYNCAFIWQKDGVKKLNLYLIINYFKGGKLRFKKIKPEAFEANRFYTVINKKSGEIVPMEVNFNFDDPNLIILPLAFGKRQGREFIWNDLLSLETGSLKLANGRVIEKTLYNRRTRQDEPALFVALTFERREVLDSSNIKPMNLIGVDRGENIPAVIALTDPEGCPLSRFKDSLGNPTHILRIGESYKEKQRTIQAKKEVEQRRAGGYSRKYASKAKNLADDMVRNTARDLLYYAVTQDAMLIFENLSRGFGRQGKRTFMAERQYTRMEDWLTAKLAYEGLPSKTYLSKTLAQYTSKTCSNCGFTITSADYDRVLEKLKKTATGWMTTINGKELKVEGQITYYNRYKRQNVVKDLSVELDRLSEESVNNDISSWTKGRSGEALSLLKKRFSHRPVQEKFVCLNCGFETHADEQAALNIARSWLFLRSQEYKKYQTNKTTGNTDKRAFVETWQSFYRKKLKEVWKPAV

SEQ ID NO: 29441 - protein, 978 aa, synthetic construct
  REGION 1..978: note = engineered CasX variant
QEIKRINKIRRRLVKDSNTKKAGKTGPMKTLLVRVMTPDLRERLENLRKKPENIPQPISNTSRANLNKLLTDYTEMKKAILHVYWEEFQKDPVGLMSRVAQPASKKIDQNKLKPEMDEKGNLTTAGFACSQCGQPLFVYKLEQVSEKGKAYTNYFGRCNVAEHEKLILLAQLKPEKDSDEAVTYSLGKFGQRALDFYSIHVTKESTHPVKPLAQIAGNRYASGPVGKALSDACMGTIASFLSKYQDIIIEHQKVVKGNQKRLESLRELAGKENLEYPSVTLPPQPHTKEGLDAYNEVIARVRMWVNLNLWQKLKLSRDDAKPLLRLKGFPSFPLVERQANEVDWWDMVCNVKKLINEKKEDGKVFWQNLAGYKRQEALRPYLSSEEDRKKGKKFARYQLGDLLWHLEKKHGEDWGKVYDEAWERIDKKVEGLSKHIKLEEERRSEDAQSKAALTDWLRAKASFVIEGLKEADKDEFCRCELKLQKWYGDLRGKPFAIEAENSILDISGFSKQYNCAFIWQKDGVKKLNLYLIINYFKGGKLRFKKIKPEAFEANRFYTVINKKSGEIVPMEVNFNFDDPNLIILPLAFGKRQGREFIWNDLLSLETGSLKLANGRVIEKTLYNRRTRQDEPALFVALTFERREVLDSSNIKPMNLIGVDRGENIPAVIALTDPEGCPLSRFKDSLGNPTHILRIGESYKEKQRTIQAKKEVEQRRAGGYSRKYASKAKNLADDMVRNTARDLLYYAVTQDAMLIFENLSRGFGRQGKRTFMAERQYTRMEDWLTAKLAYEGLPSKTYLSKTLAQYTSKTCSNCGFTITSADYDRVLEKLKKTATGWMTTINGKELKVEGQITYYNRYKRQNVVKDLSVELDRLSEESVNNDISSWTKGRSGEALSLLKKRFSHRPVQEKFVCLNCGFETHADEQAALNIARSWLFLRSQEYKKYQTNKTTGNTDKRAFVETWQSFYRKKLKEVWKPAV

SEQ ID NO: 29442 - protein, 978 aa, synthetic construct
  REGION 1..978: note = engineered CasX variant
QEIKRINKIRRRLVKDSNTKKAGKTGPMKTLLVRVMTPDLRERLENLRKKPENIPQPISNTSRANLNKLLTDYTEMKKAILHVYWEEFQKDPVGLMSRVAQPASKKIDQNKLKPEMDEKGNLTTAGFACSQCGQPLFVYKLEQVSEKGKAYTNYFGRCNVAEHEKLILLAQLKPEKDSDEAVTYSLGKFGQRALDFYSIHVTKESTHPVKPLAQIAGNRYASGPVGKALSDACMGTIASFLSKYQDIIIEHQKVVKGNQKRLESLRELAGKENLEYPSVTLPPQPHTKEGLDAYNEVIARVRMWVNLNLWQKLKLSRDDAKPLLRLKGFPSFPLVERQANEVDWWDMVCNVKKLINEKKEDGKVFWQNLAGYKRQEALRPYLSSEEDRKKGKKFARYQLGDLLLHLYKKHGEDWGKVYDEAWERIDKKVEGLSKHIKLEEERRSEDAQSKAALTDWLRAKASFVIEGLKEADKDEFCRCELKLQKWYGDLRGKPFAIEAENSILDISGFSKQYNCAFIWQKDGVKKLNLYLIINYFKGGKLRFKKIKPEAFEANRFYTVINKKSGEIVPMEVNFNFDDPNLIILPLAFGKRQGREFIWNDLLSLETGSLKLANGRVIEKTLYNRRTRQDEPALFVALTFERREVLDSSNIKPMNLIGVDRGENIPAVIALTDPEGCPLSRFKDSLGNPTHILRIGESYKEKQRTIQAKKEVEQRRAGGYSRKYASKAKNLADDMVRNTARDLLYYAVTQDAMLIFENLSRGFGRQGKRTFMAERQYTRMEDWLTAKLAYEGLPSKTYLSKTLAQYTSKTCSNCGFTITSADYDRVLEKLKKTATGWMTTINGKELKVEGQITYYNRYKRQNVVKDLSVELDRLSEESVNNDISSWTKGRSGEALSLLKKRFSHRPVQEKFVCLNCGFETHADEQAALNIARSWLFLRSQEYKKYQTNKTTGNTDKRAFVETWQSFYRKKLKEVWKPAV

SEQ ID NO: 29443 - protein, 978 aa, synthetic construct
  REGION 1..978: note = engineered CasX variant
QEIKRINKIRRRLVKDSNTKKAGKTGPMKTLLVRVMTPDLRERLENLRKKPENIPQPISNTSRANLNKLLTDYTEMKKAILHVYWEEFQKDPVGLMSRVAQPASKKIDQNKLKPEMDEKGNLTTAGFACSQCGQPLFVYKLEQVSEKGKAYTNYFGRCNVAEHEKLILLAQLKPEKDSDEAVTYSLGKFGQRALDFYSIHVTKESTHPVKPLAQIAGNRYASGPVGKALSDACMGTIASFLSKYQDIIIEHQKVVKGNQKRLESLRELAGKENLEYPSVTLPPQPHTKEGLDAYNEVIARVRMWVNLNLWQKLKLSRDDAKPLLRLKGFPSFPLVERQANEVDWWDMVCNVKKLINEKKEDGKVFWQNLAGYKRQEALRPYLSSEEDRKKGKKFARYQLGDLLLHLEKKHPEDWGKVYDEAWERIDKKVEGLSKHIKLEEERRSEDAQSKAALTDWLRAKASFVIEGLKEADKDEFCRCELKLQKWYGDLRGKPFAIEAENSILDISGFSKQYNCAFIWQKDGVKKLNLYLIINYFKGGKLRFKKIKPEAFEANRFYTVINKKSGEIVPMEVNFNFDDPNLIILPLAFGKRQGREFIWNDLLSLETGSLKLANGRVIEKTLYNRRTRQDEPALFVALTFERREVLDSSNIKPMNLIGVDRGENIPAVIALTDPEGCPLSRFKDSLGNPTHILRIGESYKEKQRTIQAKKEVEQRRAGGYSRKYASKAKNLADDMVRNTARDLLYYAVTQDAMLIFENLSRGFGRQGKRTFMAERQYTRMEDWLTAKLAYEGLPSKTYLSKTLAQYTSKTCSNCGFTITSADYDRVLEKLKKTATGWMTTINGKELKVEGQITYYNRYKRQNVVKDLSVELDRLSEESVNNDISSWTKGRSGEALSLLKKRFSHRPVQEKFVCLNCGFETHADEQAALNIARSWLFLRSQEYKKYQTNKTTGNTDKRAFVETWQSFYRKKLKEVWKPAV

SEQ ID NO: 29444 - protein, 979 aa, synthetic construct
  REGION 1..979: note = engineered CasX variant
QEIKRINKIRRRLVKDSNTKKAGKTGPMKTLLVRVMTPDLRERLENLRKKPENIPQPISNTSRANLNKLLTDYTEMKKAILHVYWEEFQKDPVGLMSRVAQPASKKIDQNKLKPEMDEKGNLTTAGFACSQCGQPLFVYKLEQVSEKGKAYTNYFGRCNVAEHEKLILLAQLKPEKDSDEAVTYSLGKFGQRALDFYSIHVTKESTHPVKPLAQIAGNRYASGPVGKALSDACMGTIASFLSKYQDIIIEHQKVVKGNQKRLESLRELAGKENLEYPSVTLPPQPHTKEGLDAYNEVIARVRMWVNLNLWQKLKLSRDDAKPLLRLKGFPSFPLVERQANEVDWWDMVCNVKKLINEKKEDGKVFWQNLAGYKRQEALRPYLSSEEDRKKGKKFARYQLGDLLLHLEKKHGERDWGKVYDEAWERIDKKVEGLSKHIKLEEERRSEDAQSKAALTDWLRAKASFVIEGLKEADKDEFCRCELKLQKWYGDLRGKPFAIEAENSILDISGFSKQYNCAFIWQKDGVKKLNLYLIINYFKGGKLRFKKIKPEAFEANRFYTVINKKSGEIVPMEVNFNFDDPNLIILPLAFGKRQGREFIWNDLLSLETGSLKLANGRVIEKTLYNRRTRQDEPALFVALTFERREVLDSSNIKPMNLIGVDRGENIPAVIALTDPEGCPLSRFKDSLGNPTHILRIGESYKEKQRTIQAKKEVEQRRAGGYSRKYASKAKNLADDMVRNTARDLLYYAVTQDAMLIFENLSRGFGRQGKRTFMAERQYTRMEDWLTAKLAYEGLPSKTYLSKTLAQYTSKTCSNCGFTITSADYDRVLEKLKKTATGWMTTINGKELKVEGQITYYNRYKRQNVVKDLSVELDRLSEESVNNDISSWTKGRSGEALSLLKKRFSHRPVQEKFVCLNCGFETHADEQAALNIARSWLFLRSQEYKKYQTNKTTGNTDKRAFVETWQSFYRKKLKEVWKPAV

SEQ ID NO: 29445 - protein, 979 aa, synthetic construct
  REGION 1..979: note = engineered CasX variant
QEIKRINKIRRRLVKDSNTKKAGKTGPMKTLLVRVMTPDLRERLENLRKKPENIPQPISNTSRANLNKLLTDYTEMKKAILHVYWEEFQKDPVGLMSRVAQPASKKIDQNKLKPEMDEKGNLTTAGFACSQCGQPLFVYKLEQVSEKGKAYTNYFGRCNVAEHEKLILLAQLKPEKDSDEAVTYSLGKFGQRALDFYSIHVTKESTHPVKPLAQIAGNRYASGPVGKALSDACMGTIASFLSKYQDIIIEHQKVVKGNQKRLESLRELAGKENLEYPSVTLPPQPHTKEGLDAYNEVIARVRMWVNLNLWQKLKLSRDDAKPLLRLKGFPSFPLVERQANEVDWWDMVCNVKKLINEKKEDGKVFWQNLAGYKRQEALRPYLSSEEDRKKGKKFARYQLGDLLLHLEKKHGEYDWGKVYDEAWERIDKKVEGLSKHIKLEEERRSEDAQSKAALTDWLRAKASFVIEGLKEADKDEFCRCELKLQKWYGDLRGKPFAIEAENSILDISGFSKQYNCAFIWQKDGVKKLNLYLIINYFKGGKLRFKKIKPEAFEANRFYTVINKKSGEIVPMEVNFNFDDPNLIILPLAFGKRQGREFIWNDLLSLETGSLKLANGRVIEKTLYNRRTRQDEPALFVALTFERREVLDSSNIKPMNLIGVDRGENIPAVIALTDPEGCPLSRFKDSLGNPTHILRIGESYKEKQRTIQAKKEVEQRRAGGYSRKYASKAKNLADDMVRNTARDLLYYAVTQDAMLIFENLSRGFGRQGKRTFMAERQYTRMEDWLTAKLAYEGLPSKTYLSKTLAQYTSKTCSNCGFTITSADYDRVLEKLKKTATGWMTTINGKELKVEGQITYYNRYKRQNVVKDLSVELDRLSEESVNNDISSWTKGRSGEALSLLKKRFSHRPVQEKFVCLNCGFETHADEQAALNIARSWLFLRSQEYKKYQTNKTTGNTDKRAFVETWQSFYRKKLKEVWKPAV

SEQ ID NO: 29446 - protein, 978 aa, synthetic construct
  REGION 1..978: note = engineered CasX variant
QEIKRINKIRRRLVKDSNTKKAGKTGPMKTLLVRVMTPDLRERLENLRKKPENIPQPISNTSRANLNKLLTDYTEMKKAILHVYWEEFQKDPVGLMSRVAQPASKKIDQNKLKPEMDEKGNLTTAGFACSQCGQPLFVYKLEQVSEKGKAYTNYFGRCNVAEHEKLILLAQLKPEKDSDEAVTYSLGKFGQRALDFYSIHVTKESTHPVKPLAQIAGNRYASGPVGKALSDACMGTIASFLSKYQDIIIEHQKVVKGNQKRLESLRELAGKENLEYPSVTLPPQPHTKEGLDAYNEVIARVRMWVNLNLWQKLKLSRDDAKPLLRLKGFPSFPLVERQANEVDWWDMVCNVKKLINEKKEDGKVFWQNLAGYKRQEALRPYLSSEEDRKKGKKFARYQLGDLLLHLEKKHGEDWGDVYDEAWERIDKKVEGLSKHIKLEEERRSEDAQSKAALTDWLRAKASFVIEGLKEADKDEFCRCELKLQKWYGDLRGKPFAIEAENSILDISGFSKQYNCAFIWQKDGVKKLNLYLIINYFKGGKLRFKKIKPEAFEANRFYTVINKKSGEIVPMEVNFNFDDPNLIILPLAFGKRQGREFIWNDLLSLETGSLKLANGRVIEKTLYNRRTRQDEPALFVALTFERREVLDSSNIKPMNLIGVDRGENIPAVIALTDPEGCPLSRFKDSLGNPTHILRIGESYKEKQRTIQAKKEVEQRRAGGYSRKYASKAKNLADDMVRNTARDLLYYAVTQDAMLIFENLSRGFGRQGKRTFMAERQYTRMEDWLTAKLAYEGLPSKTYLSKTLAQYTSKTCSNCGFTITSADYDRVLEKLKKTATGWMTTINGKELKVEGQITYYNRYKRQNVVKDLSVELDRLSEESVNNDISSWTKGRSGEALSLLKKRFSHRPVQEKFVCLNCGFETHADEQAALNIARSWLFLRSQEYKKYQTNKTTGNTDKRAFVETWQSFYRKKLKEVWKPAV

SEQ ID NO: 29447 - protein, 978 aa, synthetic construct
  REGION 1..978: note = engineered CasX variant
QEIKRINKIRRRLVKDSNTKKAGKTGPMKTLLVRVMTPDLRERLENLRKKPENIPQPISNTSRANLNKLLTDYTEMKKAILHVYWEEFQKDPVGLMSRVAQPASKKIDQNKLKPEMDEKGNLTTAGFACSQCGQPLFVYKLEQVSEKGKAYTNYFGRCNVAEHEKLILLAQLKPEKDSDEAVTYSLGKFGQRALDFYSIHVTKESTHPVKPLAQIAGNRYASGPVGKALSDACMGTIASFLSKYQDIIIEHQKVVKGNQKRLESLRELAGKENLEYPSVTLPPQPHTKEGLDAYNEVIARVRMWVNLNLWQKLKLSRDDAKPLLRLKGFPSFPLVERQANEVDWWDMVCNVKKLINEKKEDGKVFWQNLAGYKRQEALRPYLSSEEDRKKGKKFARYQLGDLLLHLEKKHGEDWGKVYGEAWERIDKKVEGLSKHIKLEEERRSEDAQSKAALTDWLRAKASFVIEGLKEADKDEFCRCELKLQKWYGDLRGKPFAIEAENSILDISGFSKQYNCAFIWQKDGVKKLNLYLIINYFKGGKLRFKKIKPEAFEANRFYTVINKKSGEIVPMEVNFNFDDPNLIILPLAFGKRQGREFIWNDLLSLETGSLKLANGRVIEKTLYNRRTRQDEPALFVALTFERREVLDSSNIKPMNLIGVDRGENIPAVIALTDPEGCPLSRFKDSLGNPTHILRIGESYKEKQRTIQAKKEVEQRRAGGYSRKYASKAKNLADDMVRNTARDLLYYAVTQDAMLIFENLSRGFGRQGKRTFMAERQYTRMEDWLTAKLAYEGLPSKTYLSKTLAQYTSKTCSNCGFTITSADYDRVLEKLKKTATGWMTTINGKELKVEGQITYYNRYKRQNVVKDLSVELDRLSEESVNNDISSWTKGRSGEALSLLKKRFSHRPVQEKFVCLNCGFETHADEQAALNIARSWLFLRSQEYKKYQTNKTTGNTDKRAFVETWQSFYRKKLKEVWKPAV

SEQ ID NO: 29448 - protein, 978 aa, synthetic construct
  REGION 1..978: note = engineered CasX variant
QEIKRINKIRRRLVKDSNTKKAGKTGPMKTLLVRVMTPDLRERLENLRKKPENIPQPISNTSRANLNKLLTDYTEMKKAILHVYWEEFQKDPVGLMSRVAQPASKKIDQNKLKPEMDEKGNLTTAGFACSQCGQPLFVYKLEQVSEKGKAYTNYFGRCNVAEHEKLILLAQLKPEKDSDEAVTYSLGKFGQRALDFYSIHVTKESTHPVKPLAQIAGNRYASGPVGKALSDACMGTIASFLSKYQDIIIEHQKVVKGNQKRLESLRELAGKENLEYPSVTLPPQPHTKEGLDAYNEVIARVRMWVNLNLWQKLKLSRDDAKPLLRLKGFPSFPLVERQANEVDWWDMVCNVKKLINEKKEDGKVFWQNLAGYKRQEALRPYLSSEEDRKKGKKFARYQLGDLLLHLEKKHGEDWGKVYDEAWERIDKKVEGLSKHIKLEEERRSEDAQSKAALTDWLRAKASFVIEGKKEADKDEFCRCELKLQKWYGDLRGKPFAIEAENSILDISGFSKQYNCAFIWQKDGVKKLNLYLIINYFKGGKLRFKKIKPEAFEANRFYTVINKKSGEIVPMEVNFNFDDPNLIILPLAFGKRQGREFIWNDLLSLETGSLKLANGRVIEKTLYNRRTRQDEPALFVALTFERREVLDSSNIKPMNLIGVDRGENIPAVIALTDPEGCPLSRFKDSLGNPTHILRIGESYKEKQRTIQAKKEVEQRRAGGYSRKYASKAKNLADDMVRNTARDLLYYAVTQDAMLIFENLSRGFGRQGKRTFMAERQYTRMEDWLTAKLAYEGLPSKTYLSKTLAQYTSKTCSNCGFTITSADYDRVLEKLKKTATGWMTTINGKELKVEGQITYYNRYKRQNVVKDLSVELDRLSEESVNNDISSWTKGRSGEALSLLKKRFSHRPVQEKFVCLNCGFETHADEQAALNIARSWLFLRSQEYKKYQTNKTTGNTDKRAFVETWQSFYRKKLKEVWKPAV

SEQ ID NO: 29449 - protein, 978 aa, synthetic construct
  REGION 1..978: note = engineered CasX variant
QEIKRINKIRRRLVKDSNTKKAGKTGPMKTLLVRVMTPDLRERLENLRKKPENIPQPISNTSRANLNKLLTDYTEMKKAILHVYWEEFQKDPVGLMSRVAQPASKKIDQNKLKPEMDEKGNLTTAGFACSQCGQPLFVYKLEQVSEKGKAYTNYFGRCNVAEHEKLILLAQLKPEKDSDEAVTYSLGKFGQRALDFYSIHVTKESTHPVKPLAQIAGNRYASGPVGKALSDACMGTIASFLSKYQDIIIEHQKVVKGNQKRLESLRELAGKENLEYPSVTLPPQPHTKEGLDAYNEVIARVRMWVNLNLWQKLKLSRDDAKPLLRLKGFPSFPLVERQANEVDWWDMVCNVKKLINEKKEDGKVFWQNLAGYKRQEALRPYLSSEEDRKKGKKFARYQLGDLLLHLEKKHGEDWGKVYDEAWERIDKKVEGLSKHIKLEEERRSEDAQSKAALTDWLRAKASFVIEGSKEADKDEFCRCELKLQKWYGDLRGKPFAIEAENSILDISGFSKQYNCAFIWQKDGVKKLNLYLIINYFKGGKLRFKKIKPEAFEANRFYTVINKKSGEIVPMEVNFNFDDPNLIILPLAFGKRQGREFIWNDLLSLETGSLKLANGRVIEKTLYNRRTRQDEPALFVALTFERREVLDSSNIKPMNLIGVDRGENIPAVIALTDPEGCPLSRFKDSLGNPTHILRIGESYKEKQRTIQAKKEVEQRRAGGYSRKYASKAKNLADDMVRNTARDLLYYAVTQDAMLIFENLSRGFGRQGKRTFMAERQYTRMEDWLTAKLAYEGLPSKTYLSKTLAQYTSKTCSNCGFTITSADYDRVLEKLKKTATGWMTTINGKELKVEGQITYYNRYKRQNVVKDLSVELDRLSEESVNNDISSWTKGRSGEALSLLKKRFSHRPVQEKFVCLNCGFETHADEQAALNIARSWLFLRSQEYKKYQTNKTTGNTDKRAFVETWQSFYRKKLKEVWKPAV

SEQ ID NO: 29450 - protein, 979 aa, synthetic construct
  REGION 1..979: note = engineered CasX variant
QEIKRINKIRRRLVKDSNTKKAGKTGPMKTLLVRVMTPDLRERLENLRKKPENIPQPISNTSRANLNKLLTDYTEMKKAILHVYWEEFQKDPVGLMSRVAQPASKKIDQNKLKPEMDEKGNLTTAGFACSQCGQPLFVYKLEQVSEKGKAYTNYFGRCNVAEHEKLILLAQLKPEKDSDEAVTYSLGKFGQRALDFYSIHVTKESTHPVKPLAQIAGNRYASGPVGKALSDACMGTIASFLSKYQDIIIEHQKVVKGNQKRLESLRELAGKENLEYPSVTLPPQPHTKEGLDAYNEVIARVRMWVNLNLWQKLKLSRDDAKPLLRLKGFPSFPLVERQANEVDWWDMVCNVKKLINEKKEDGKVFWQNLAGYKRQEALRPYLSSEEDRKKGKKFARYQLGDLLLHLEKKHGEDWGKVYDEAWERIDKKVEGLSKHIKLEEERRSEDAQSKAALTDWLRAKASFVIEGLKEADDKDEFCRCELKLQKWYGDLRGKPFAIEAENSILDISGFSKQYNCAFIWQKDGVKKLNLYLIINYFKGGKLRFKKIKPEAFEANRFYTVINKKSGEIVPMEVNFNFDDPNLIILPLAFGKRQGREFIWNDLLSLETGSLKLANGRVIEKTLYNRRTRQDEPALFVALTFERREVLDSSNIKPMNLIGVDRGENIPAVIALTDPEGCPLSRFKDSLGNPTHILRIGESYKEKQRTIQAKKEVEQRRAGGYSRKYASKAKNLADDMVRNTARDLLYYAVTQDAMLIFENLSRGFGRQGKRTFMAERQYTRMEDWLTAKLAYEGLPSKTYLSKTLAQYTSKTCSNCGFTITSADYDRVLEKLKKTATGWMTTINGKELKVEGQITYYNRYKRQNVVKDLSVELDRLSEESVNNDISSWTKGRSGEALSLLKKRFSHRPVQEKFVCLNCGFETHADEQAALNIARSWLFLRSQEYKKYQTNKTTGNTDKRAFVETWQSFYRKKLKEVWKPAV

SEQ ID NO: 29451 - protein, 979 aa, synthetic construct
  REGION 1..979: note = engineered CasX variant
QEIKRINKIRRRLVKDSNTKKAGKTGPMKTLLVRVMTPDLRERLENLRKKPENIPQPISNTSRANLNKLLTDYTEMKKAILHVYWEEFQKDPVGLMSRVAQPASKKIDQNKLKPEMDEKGNLTTAGFACSQCGQPLFVYKLEQVSEKGKAYTNYFGRCNVAEHEKLILLAQLKPEKDSDEAVTYSLGKFGQRALDFYSIHVTKESTHPVKPLAQIAGNRYASGPVGKALSDACMGTIASFLSKYQDIIIEHQKVVKGNQKRLESLRELAGKENLEYPSVTLPPQPHTKEGLDAYNEVIARVRMWVNLNLWQKLKLSRDDAKPLLRLKGFPSFPLVERQANEVDWWDMVCNVKKLINEKKEDGKVFWQNLAGYKRQEALRPYLSSEEDRKKGKKFARYQLGDLLLHLEKKHGEDWGKVYDEAWERIDKKVEGLSKHIKLEEERRSEDAQSKAALTDWLRAKASFVIEGLKEADKDEFCRCELKLQKWYGDLRGKPFAIEAENSILDISGFSKQYNCAFIWQKDGVKKLNLYLIINYFKGGKLRFKKIKPEAFEANRFYTVINKKSGEIVPMEVNFNFDDPNLIILPLAFGKRQGREFIWNDLLSLETGSLKLANGRVIEKTLYNRRTRQDEPALFVALTFERREVLDSSNIKPMNLIGVDRGENIPAVIALTDPEGCPLSRFKDSLGNPTHILRIGESYKEKQRTIQAKKEVEQRRAGGYSRKYASKAKNLADDMVRNTARDLLYYAVTQDAMLIFENLSRGFGRQGKRTFMAERQYTRMEDWLTAKLAYEGLPSKTYLSKTLAQYTSKTCSNCGFTITSADYDRVLEKLKKTATGWMTTINGKELKVEGQITYYNRYKRQNVVKDLSVELDRLSEESVNNDISSWTKGRSGNEALSLLKKRFSHRPVQEKFVCLNCGFETHADEQAALNIARSWLFLRSQEYKKYQTNKTTGNTDKRAFVETWQSFYRKKLKEVWKPAV

SEQ ID NO: 29452 - protein, 978 aa, synthetic construct
  REGION 1..978: note = engineered CasX variant
QEIKRINKIRRRLVKDSNTKKAGKTGPMKTLLVRVMTPDLRERLENLRKKPENIPQPISNTSRANLNKLLTDYTEMKKAILHVYWEEFQKDPVGLMSRVAQPASKKIDQNKLKPEMDEKGNLTTAGFACSQCGQPLFVYKLEQVSEKGKAYTNYFGRCNVAEHEKLILLAQLKPEKDSDEAVTYSLGKFGQRALDFYSIHVTKESTHPVKPLAQIAGNRYASGPVGKALSDACMGTIASFLSKYQDIIIEHQKVVKGNQKRLESLRELAGKENLEYPSVTLPPQPHTKEGLDAYNEVIARVRMWVNLNLWQKLKLSRDDAKPLLRLKGFPSFPLVERQANEVDWWDMVCNVKKLINEKKEDGKVFWQNLAGYKRQEALRPYLSSEEDRQKGKKFARYQLGDLLLHLEKKHGEDWGKVYDEAWERIDKKVEGLSKHIKLEEERRSEDAQSKAALTDWLRAKASFVIEGLKEADKDEFCRCELKLQKWYGDLRGKPFAIEAENSILDISGFSKQYNCAFIWQKDGVKKLNLYLIINYFKGGKLRFKKIKPEAFEANRFYTVINKKSGEIVPMEVNFNFDDPNLIILPLAFGKRQGREFIWNDLLSLETGSLKLANGRVIEKTLYNRRTRQDEPALFVALTFERREVLDSSNIKPMNLIGVDRGENIPAVIALTDPEGCPLSRFKDSLGNPTHILRIGESYKEKQRTIQAKKEVEQRRAGGYSRKYASKAKNLADDMVRNTARDLLYYAVTQDAMLIFENLSRGFGRQGKRTFMAERQYTRMEDWLTAKLAYEGLPSKTYLSKTLAQYTSKTCSNCGFTITSADYDRVLEKLKKTATGWMTTINGKELKVEGQITYYNRYKRQNVVKDLSVELDRLSEESVNNDISSWTKGRSGEALSLLKKRFSHRPVQEKFVCLNCGFETHADEQAALNIARSWLFLRSQEYKKYQTNKTTGNTDKRAFVETWQSFYRKKLKEVWKPAV

SEQ ID NO: 29453 - protein, 978 aa, synthetic construct
  REGION 1..978: note = engineered CasX variant
QEIKRINKIRRRLVKDSNTKKAGKTGPMKTLLVRVMTPDLRERLENLRKKPENIPQPISNTSRANLNKLLTDYTEMKKAILHVYWEEFQKDPVGLMSRVAQPASKKIDQNKLKPEMDEKGNLTTAGFACSQCGQPLFVYKLEQVSEKGKAYTNYFGRCNVAEHEKLILLAQLKPEKDSDEAVTYSLGKFGQRALDFYSIHVTKESTHPVKPLAQIAGNRYASGPVGKALSDACMGTIASFLSKYQDIIIEHQKVVKGNQKRLESLRELAGKENLEYPSVTLPPQPHTKEGLDAYNEVIARVRMWVNLNLWQKLKLSRDDAKPLLRLKGFPSFPLVERQANEVDWWDMVCNVKKLINEKKEDGKVFWQNLAGYKRQEALRPYLSSEEDRKKGKKFARYQLGDLLLHLEKKHGEDWGKVYDEAWERIDKKVEGLSKHIKLEEERRSEDAQSKAALTDWLRAKASFVIEGLKEADKDEFCRCELKLQKWYGDLRGKPFAIEAENSILDISGFSKQYNCAFIWQKDGVKKLNLYLIINYFKGGKLRFKKIKPEAFEANRFYTVINKKSGEIVPMEVNFNFDDPNLIILPLAFGKRQGREFIWNDLLSLETGSLKLANGRVIEKTLYNRRTRQDEPALFVALTFERREVLDSSNIKPMNLIGVDRGENIPAVIALTDPEGCPLSRFKDSLGNPTHILRIGESYKEKQRTIQAKKEVEQRRAGGYSRKYASKAKNLADDMVRNTARDLLYYAVTQDAMLIFENLSRGFGRQGKRTFMAERQYTRMEDWLTAKLAYEGLPSQTYLSKTLAQYTSKTCSNCGFTITSADYDRVLEKLKKTATGWMTTINGKELKVEGQITYYNRYKRQNVVKDLSVELDRLSEESVNNDISSWTKGRSGEALSLLKKRFSHRPVQEKFVCLNCGFETHADEQAALNIARSWLFLRSQEYKKYQTNKTTGNTDKRAFVETWQSFYRKKLKEVWKPAV

SEQ ID NO: 29454 - protein, 978 aa, synthetic construct
  REGION 1..978: note = engineered CasX variant
QEIKRINKIRRRLVKDSNTKKAGKTGPMKTLLVRVMTPDLRERLENLRKKPENIPQPISNTSRANLNKLLTDYTEMKKAILHVYWEEFQKDPVGLMSRVAQPASKKIDQNKLKPEMDEKGNLTTAGFACSQCGQPLFVYKLEQVSEKGKAYTNYFGRCNVAEHEKLILLAQLKPEKDSDEAVTYSLGKFGQRALDFYSIHVTKESTHPVKPLAQIAGNRYASGPVGKALSDACMGTIASFLSKYQDIIIEHQKVVKGNQKRLESLRELAGKENLEYPSVTLPPQPHTKEGLDAYNEVIARVRMWVNLNLWQKLKLSRDDAKPLLRLKGFPSFPLVERQANEVDWWDMVCNVKKLINEKKEDGKVFWQNLAGYKRQEALRPYLSSEEDRKKGKKFARYQLGDLLLHLEKKHGEDWGKVYDEAWERIDKKVEGLSKHIKLEEERRSEDAQSKAALTDWLRAKASFVIEGLKEADKDEFCRCELKLQKWYGDLRGKPFAIEAENSILDISGFSKQYNCAFIWQKDGVKKLNLYLIINYFKGGKLRFKKIKPEAFEANRFYTVINKKSGEIVPMEVNFNFDDPNLIILPLAFGKRQGREFIWNDLLSLETGSLKLANGRVIEKTLYNRRTRQDEPALFVALTFERREVLDSSNIKPMNLIGVDRGENIPAVIALTDPEGCPLSRFKDSLGNPTHILRIGESYKEKQRTIQAKKEVEQRRAGGYSRKYASKAKNLADDMVRNTARDLLYYAVTQDAMLIFENLSRGFGRQGKRTFMAERQYTRMEDWLTAKLAYNGLPSKTYLSKTLAQYTSKTCSNCGFTITSADYDRVLEKLKKTATGWMTTINGKELKVEGQITYYNRYKRQNVVKDLSVELDRLSEESVNNDISSWTKGRSGEALSLLKKRFSHRPVQEKFVCLNCGFETHADEQAALNIARSWLFLRSQEYKKYQTNKTTGNTDKRAFVETWQSFYRKKLKEVWKPAV

SEQ ID NO: 29455 - protein, 978 aa, synthetic construct
  REGION 1..978: note = engineered CasX variant
QEIKRINKIRRRLVKDSNTKKAGKTGPMKTLLVRVMTPDLRERLENLRKKPENIPQPISNTSRANLNKLLTDYTEMKKAILHVYWEEFQKDPVGLMSRVAQPASKKIDQNKLKPEMDEKGNLTTAGFACSQCGQPLFVYKLEQVSEKGKAYTNYFGRCNVAEHEKLIQLAQLKPEKDSDEAVTYSLGKFGQRALDFYSIHVTKESTHPVKPLAQIAGNRYASGPVGKALSDACMGTIASFLSKYQDIIIEHQKVVKGNQKRLESLRELAGKENLEYPSVTLPPQPHTKEGLDAYNEVIARVRMWVNLNLWQKLKLSRDDAKPLLRLKGFPSFPLVERQANEVDWWDMVCNVKKLINEKKEDGKVFWQNLAGYKRQEALRPYLSSEEDRKKGKKFARYQLGDLLLHLEKKHGEDWGKVYDEAWERIDKKVEGLSKHIKLEEERRSEDAQSKAALTDWLRAKASFVIEGLKEADKDEFCRCELKLQKWYGDLRGKPFAIEAENSILDISGFSKQYNCAFIWQKDGVKKLNLYLIINYFKGGKLRFKKIKPEAFEANRFYTVINKKSGEIVPMEVNFNFDDPNLIILPLAFGKRQGREFIWNDLLSLETGSLKLANGRVIEKTLYNRRTRQDEPALFVALTFERREVLDSSNIKPMNLIGVDRGENIPAVIALTDPEGCPLSRFKDSLGNPTHILRIGESYKEKQRTIQAKKEVEQRRAGGYSRKYASKAKNLADDMVRNTARDLLYYAVTQDAMLIFENLSRGFGRQGKRTFMAERQYTRMEDWLTAKLAYEGLPSKTYLSKTLAQYTSKTCSNCGFTITSADYDRVLEKLKKTATGWMTTINGKELKVEGQITYYNRYKRQNVVKDLSVELDRLSEESVNNDISSWTKGRSGEALSLLKKRFSHRPVQEKFVCLNCGFETHADEQAALNIARSWLFLRSQEYKKYQTNKTTGNTDKRAFVETWQSFYRKKLKEVWKPAV

SEQ ID NO: 29456 - protein, 978 aa, synthetic construct
  REGION 1..978: note = engineered CasX variant
QEIKRINKIRRRLVKDSNTKKAGKTGPMKTLLVRVMTPDLRERLENLRKKPENIPQPISNTSRANLNKLLTDYTEMKKAILHVYWEEFQKDPVGLMSRVAQPASKKIDQNKLKPEMDEKGNLTTAGFACSQCGQPLFVYKLEQVSEKGKAYTNYFGRCNVAEHEKLILLAQLKPEKDSDEAVTYSLGKFGQRALDFYSIHVTKESTHPVKPLAQIAGNRYASGPVGKALSDACMGTIASFLSKYQDIIIEHQKVVKGNQKRLESLRELAGKENLEYPSVTLPPQPHTKEGLDAYNEVIARVRMWVNLNLWQKLKLSRDDAKPLLRLKGFPSFPLVERQANEVDWWDMVCNVKKLINEKKEDGKVFWQNLAIYKRQEALRPYLSSEEDRKKGKKFARYQLGDLLLHLEKKHGEDWGKVYDEAWERIDKKVEGLSKHIKLEEERRSEDAQSKAALTDWLRAKASFVIEGLKEADKDEFCRCELKLQKWYGDLRGKPFAIEAENSILDISGFSKQYNCAFIWQKDGVKKLNLYLIINYFKGGKLRFKKIKPEAFEANRFYTVINKKSGEIVPMEVNFNFDDPNLIILPLAFGKRQGREFIWNDLLSLETGSLKLANGRVIEKTLYNRRTRQDEPALFVALTFERREVLDSSNIKPMNLIGVDRGENIPAVIALTDPEGCPLSRFKDSLGNPTHILRIGESYKEKQRTIQAKKEVEQRRAGGYSRKYASKAKNLADDMVRNTARDLLYYAVTQDAMLIFENLSRGFGRQGKRTFMAERQYTRMEDWLTAKLAYEGLPSKTYLSKTLAQYTSKTCSNCGFTITSADYDRVLEKLKKTATGWMTTINGKELKVEGQITYYNRYKRQNVVKDLSVELDRLSEESVNNDISSWTKGRSGEALSLLKKRFSHRPVQEKFVCLNCGFETHADEQAALNIARSWLFLRSQEYKKYQTNKTTGNTDKRAFVETWQSFYRKKLKEVWKPAV

SEQ ID NO: 29457 - protein, 978 aa, synthetic construct
  REGION 1..978: note = engineered CasX variant
QEIKRINKIRRRLVKDSNTKKAGKTGPMKTLLVRVMTPDLRERLENLRKKPENIPQPISNTSRANLNKLLTDYTEMKKAILHVYWEEFQKDPVGLMSRVAQPASKKIDQNKLKPEMDEKGNLTTAGFACSQCGQPLFVYKLEQVSEKGKAYTNYFGRCNVAEHEKLILLAQLKPEKDSDEAVTYSLGKFGQRALDFYSIHVTKESTHPVKPLAQIAGNRYASGPVGKALSDACMGTIASFLSKYQDIIIEHQKVVKGNQKRLESLRELAGKENLEYPSVTLPPQPHTKEGLDAYNEVIARVRMWVNLNLWQKLKLSRDDAKPLLRLKGFPSFPLVERQANEVDWWDMVCNVKKLINEKKEDGKVFWQNLAGYKRQEALRPYLSSEEDREKGKKFARYQLGDLLLHLEKKHGEDWGKVYDEAWERIDKKVEGLSKHIKLEEERRSEDAQSKAALTDWLRAKASFVIEGLKEADKDEFCRCELKLQKWYGDLRGKPFAIEAENSILDISGFSKQYNCAFIWQKDGVKKLNLYLIINYFKGGKLRFKKIKPEAFEANRFYTVINKKSGEIVPMEVNFNFDDPNLIILPLAFGKRQGREFIWNDLLSLETGSLKLANGRVIEKTLYNRRTRQDEPALFVALTFERREVLDSSNIKPMNLIGVDRGENIPAVIALTDPEGCPLSRFKDSLGNPTHILRIGESYKEKQRTIQAKKEVEQRRAGGYSRKYASKAKNLADDMVRNTARDLLYYAVTQDAMLIFENLSRGFGRQGKRTFMAERQYTRMEDWLTAKLAYEGLPSKTYLSKTLAQYTSKTCSNCGFTITSADYDRVLEKLKKTATGWMTTINGKELKVEGQITYYNRYKRQNVVKDLSVELDRLSEESVNNDISSWTKGRSGEALSLLKKRFSHRPVQEKFVCLNCGFETHADEQAALNIARSWLFLRSQEYKKYQTNKTTGNTDKRAFVETWQSFYRKKLKEVWKPAV

SEQ ID NO: 29458 - protein, 978 aa, synthetic construct
  REGION 1..978: note = engineered CasX variant
QEIKRINKIRRRLVKDSNTKKAGKTGPMKTLLVRVMTPDLRERLENLRKKPENIPQPISNTSRANLNKLLTDYTEMKKAILHVYWEEFQKDPVGLMSRVAQPASKKIDQNKLKPEMDEKGNLTTAGFACSQCGQPLFVYKLEQVSEKGKAYTNYFGRCNVAEHEKLILLAQLKPEKDSDEAVTYSLGKFGQRALDFYSIHVTKESTHPVKPLAQIAGNRYASGPVGKALSDACMGTIASFLSKYQDIIIEHQKVVKGNQKRLESLRELAGKENLEYPSVTLPPQPHTKEGLDAYNEVIARVRMWVNLNLWQKLKLSRDDAKPLLRLKGFPSFPLVERQANEVDWWDMVCNVKKLINEKKEDGKVFWQNLAGYKRQEALRPYLSSEEDRKKGKKFARYQLGDLLLHLEKKHGEDWGKVYDEAWERIDKKVEGLSKHIKLEEERRSEDAQSKAALTDWLRAKASFVIEGLKEADKDEFCRCELKLQKWYGDLRGKPFAIEAENSILDISGFSKQYNCAFIWQKDGVKKLNLYLIINYFKGGKLRFKKIKPEAFEANRFYTVINKKSGEIVIMEVNFNFDDPNLIILPLAFGKRQGREFIWNDLLSLETGSLKLANGRVIEKTLYNRRTRQDEPALFVALTFERREVLDSSNIKPMNLIGVDRGENIPAVIALTDPEGCPLSRFKDSLGNPTHILRIGESYKEKQRTIQAKKEVEQRRAGGYSRKYASKAKNLADDMVRNTARDLLYYAVTQDAMLIFENLSRGFGRQGKRTFMAERQYTRMEDWLTAKLAYEGLPSKTYLSKTLAQYTSKTCSNCGFTITSADYDRVLEKLKKTATGWMTTINGKELKVEGQITYYNRYKRQNVVKDLSVELDRLSEESVNNDISSWTKGRSGEALSLLKKRFSHRPVQEKFVCLNCGFETHADEQAALNIARSWLFLRSQEYKKYQTNKTTGNTDKRAFVETWQSFYRKKLKEVWKPAV

SEQ ID NO: 29459 - protein, 978 aa, synthetic construct
  REGION 1..978: note = engineered CasX variant
QEIKRINKIRRRLVKDSNTKKAGKTGPMKTLLVRVMTPDLRERLENLRKKPENIPQPISNTSRANLNKLLTDYTEMKKAILHVYWEEFQKDPVGLMSRVAQPASKKIDQNKLKPEMDEKGNLTTAGFACSQCGQPLFVYKLEQVSEKGKAYTNYFGRCNVAEHEKLILLAQLKPEKDSDEAVTYSLGKFGQRALDFYSIHVTKESTHPVKPLAQIAGNRYASGPVGKALSGACMGTIASFLSKYQDIIIEHQKVVKGNQKRLESLRELAGKENLEYPSVTLPPQPHTKEGVDAYNEVIARVRTWVNLNLWQKLKLSRDDAKPLLRLKGFPSFPLVERQANEVDWWDMVCNVKKLINEKKEDGKVFWQNLAGYKRQEALRPYLSSEEDRKKGKKFARYQLGDLLLHLEKKHGEDWGKVYDEAWERIDKKVEGLSKHIKLEEERRSEDAQSKAALTDWLRAKASFVIEGLKEADKDEFCRCELKLQKWYGDLRGKPFAIEAENSILDISGFSKQYNCAFIWQKDGVKKLNLYLIINYFKGGKLRFKKIKPEAFEANRFYTVINKKSGEIVPMEVNFNFDDPNLIILPLAFGKRQGREFIWNDLLSLETGSLKLANGRVIEKTLYNRRTRQDEPALFVALTFERREVLDSSNIKPMNLIGVDRGENIPAVIALTDPEGCPLSRFKDSLGNPTHILRIGESYKEKQRTIQAKKEVEQRRAGGYSRKYASKAKNLADDMVRNTARDLLYYAVTQDAMLIFENLSRGFGRQGKRTFMAERQYTRMEDWLTAKLAYEGLPSKTYLSKTLAQYTSKTCSNCGFTITSADYDRVLEKLKKTATGWMTTINGKELKVEGQITYYNRYKRQNVVKDLSVELDRLSEESVNNDISSWTKGRSGEALSLLKKRFSHRPVQEKFVCLNCGFETHADEQAALNIARSWLFLRSQEYKKYQTNKTTGNTDKRAFVETWQSFYRKKLKEVWKPAV

SEQ ID NO: 29460 - protein, 978 aa, synthetic construct
  REGION 1..978: note = engineered CasX variant
QEIKRINKIRRRLVKDSNTKKAGKTGPMKTLLVRVMTPDLRERLENLRKKPENIPQPISNTSRANLNKLLTDYTEMKKAILHVYWEEFQKDPVGLMSRVAQPASKKIDQNKLKPEMDEKGNLTTAGFACSQCGQPLFVYKLEQVSEKGKAYTNYFGRCNVAEHEKLILLAQLKPEKDSDEAVTYSLGKFGQRALDFYSIHVTKESTHPVKPLAQIAGNRYASGPVGKALSDACMGTIASFLSKYQDIIIEHQKVVKGNQKRLESLRELAGKENLEYPSVTLPPQPHTKEGVDAYNEVIARVRTWVNLNLWQKLKLSRDDAKPLLRLKNFPSFPLVERQANEVDWWDMVCNVKKLINEKKEDGKVFWQNLAGYKRQEALRPYLSSEEDRKKGKKFARYQLGDLLLHLEKKHGEDWGKVYDEAWERIDKKVEGLSKHIKLEEERRSEDAQSKAALTDWLRAKASFVIEGLKEADKDEFCRCELKLQKWYGDLRGKPFAIEAENSILDISGFSKQYNCAFIWQKDGVKKLNLYLIINYFKGGKLRFKKIKPEAFEANRFYTVINKKSGEIVPMEVNFNFDDPNLIILPLAFGKRQGREFIWNDLLSLETGSLKLANGRVIEKTLYNRRTRQDEPALFVALTFERREVLDSSNIKPMNLIGVDRGENIPAVIALTDPEGCPLSRFKDSLGNPTHILRIGESYKEKQRTIQAKKEVEQRRAGGYSRKYASKAKNLADDMVRNTARDLLYYAVTQDAMLIFENLSRGFGRQGKRTFMAERQYTRMEDWLTAKLAYEGLPSKTYLSKTLAQYTSKTCSNCGFTITSADYDRVLEKLKKTATGWMTTINGKELKVEGQITYYNRYKRQNVVKDLSVELDRLSEESVNNDISSWTKGRSGEALSLLKKRFSHRPVQEKFVCLNCGFETHADEQAALNIARSWLFLRSQEYKKYQTNKTTGNTDKRAFVETWQSFYRKKLKEVWKPAV

SEQ ID NO: 29461 - protein, 978 aa, synthetic construct
  REGION 1..978: note = engineered CasX variant
QEIKRINKIRRRLVKDSNTKKAGKTGPMKTLLVRVMTPDLRERLENLRKKPENIPQPISNTSRANLNKLLTDYTEMKKAILHVYWEEFQKDPVGLMSRVAQPASKKIDQNKLKPEMDEKGNLTTAGFACSQCGQPLFVYKLEQVSEKGKAYTNYFGRCNVAEHEKLILLAQLKPEKDSDEAVTYSLGKFGQRALDFYSIHVTKESTHPVKPLAQIAGNRYASGPVGKALSDACMGTIASFLSKYQDIIIEHQKVVKGNQKRLESLRELAGKENLEYPSVTLPPQPHTKEGVDAYNEVIARVRTWVNLNLWQKLKLSRDDAKPLLRLKGFPSFPLVERQANEVDWWDMVCNVKKLINEKKEDGKVFWQNLAGYKRQEALRPYLSSEEDRKKGKKFARYQLGDLLNHLEKKHGEDWGKVYDEAWERIDKKVEGLSKHIKLEEERRSEDAQSKAALTDWLRAKASFVIEGLKEADKDEFCRCELKLQKWYGDLRGKPFAIEAENSILDISGFSKQYNCAFIWQKDGVKKLNLYLIINYFKGGKLRFKKIKPEAFEANRFYTVINKKSGEIVPMEVNFNFDDPNLIILPLAFGKRQGREFIWNDLLSLETGSLKLANGRVIEKTLYNRRTRQDEPALFVALTFERREVLDSSNIKPMNLIGVDRGENIPAVIALTDPEGCPLSRFKDSLGNPTHILRIGESYKEKQRTIQAKKEVEQRRAGGYSRKYASKAKNLADDMVRNTARDLLYYAVTQDAMLIFENLSRGFGRQGKRTFMAERQYTRMEDWLTAKLAYEGLPSKTYLSKTLAQYTSKTCSNCGFTITSADYDRVLEKLKKTATGWMTTINGKELKVEGQITYYNRYKRQNVVKDLSVELDRLSEESVNNDISSWTKGRSGEALSLLKKRFSHRPVQEKFVCLNCGFETHADEQAALNIARSWLFLRSQEYKKYQTNKTTGNTDKRAFVETWQSFYRKKLKEVWKPAV

SEQ ID NO: 29462 - protein, 978 aa, synthetic construct
  REGION 1..978: note = engineered CasX variant
QEIKRINKIRRRLVKDSNTKKAGKTGPMKTLLVRVMTPDLRERLENLRKKPENIPQPISNTSRANLNKLLTDYTEMKKAILHVYWEEFQKDPVGLMSRVAQPASKKIDQNKLKPEMDEKGNLTTAGFACSQCGQPLFVYKLEQVSEKGKAYTNYFGRCNVAEHEKLILLAQLKPEKDSDEAVTYSLGKFGQRALDFYSIHVTKESTHPVKPLAQIAGNRYASGPVGKALSDACMGTIASFLSKYQDIIIEHQKVVKGNQKRLESLRELAGKENLEYPSVTLPPQPHTKEGVDAYNEVIARVRTWVNLNLWQKLKLSRDDAKPLLRLKGFPSFPLVERQANEVDWWDMVCNVKKLINEKKEDGKVFWQNLAGYKRQEALRPYLSSEEDRKKGKKFARYQLGDLLWHLEKKHGEDWGKVYDEAWERIDKKVEGLSKHIKLEEERRSEDAQSKAALTDWLRAKASFVIEGLKEADKDEFCRCELKLQKWYGDLRGKPFAIEAENSILDISGFSKQYNCAFIWQKDGVKKLNLYLIINYFKGGKLRFKKIKPEAFEANRFYTVINKKSGEIVPMEVNFNFDDPNLIILPLAFGKRQGREFIWNDLLSLETGSLKLANGRVIEKTLYNRRTRQDEPALFVALTFERREVLDSSNIKPMNLIGVDRGENIPAVIALTDPEGCPLSRFKDSLGNPTHILRIGESYKEKQRTIQAKKEVEQRRAGGYSRKYASKAKNLADDMVRNTARDLLYYAVTQDAMLIFENLSRGFGRQGKRTFMAERQYTRMEDWLTAKLAYEGLPSKTYLSKTLAQYTSKTCSNCGFTITSADYDRVLEKLKKTATGWMTTINGKELKVEGQITYYNRYKRQNVVKDLSVELDRLSEESVNNDISSWTKGRSGEALSLLKKRFSHRPVQEKFVCLNCGFETHADEQAALNIARSWLFLRSQEYKKYQTNKTTGNTDKRAFVETWQSFYRKKLKEVWKPAV

SEQ ID NO: 29463 - protein, 978 aa, synthetic construct
  REGION 1..978: note = engineered CasX variant
QEIKRINKIRRRLVKDSNTKKAGKTGPMKTLLVRVMTPDLRERLENLRKKPENIPQPISNTSRANLNKLLTDYTEMKKAILHVYWEEFQKDPVGLMSRVAQPASKKIDQNKLKPEMDEKGNLTTAGFACSQCGQPLFVYKLEQVSEKGKAYTNYFGRCNVAEHEKLILLAQLKPEKDSDEAVTYSLGKFGQRALDFYSIHVTKESTHPVKPLAQIAGNRYASGPVGKALSDACMGTIASFLSKYQDIIIEHQKVVKGNQKRLESLRELAGKENLEYPSVTLPPQPHTKEGVDAYNEVIARVRTWVNLNLWQKLKLSRDDAKPLLRLKGFPSFPLVERQANEVDWWDMVCNVKKLINEKKEDGKVFWQNLAGYKRQEALRPYLSSEEDRKKGKKFARYQLGDLLLHLYKKHGEDWGKVYDEAWERIDKKVEGLSKHIKLEEERRSEDAQSKAALTDWLRAKASFVIEGLKEADKDEFCRCELKLQKWYGDLRGKPFAIEAENSILDISGFSKQYNCAFIWQKDGVKKLNLYLIINYFKGGKLRFKKIKPEAFEANRFYTVINKKSGEIVPMEVNFNFDDPNLIILPLAFGKRQGREFIWNDLLSLETGSLKLANGRVIEKTLYNRRTRQDEPALFVALTFERREVLDSSNIKPMNLIGVDRGENIPAVIALTDPEGCPLSRFKDSLGNPTHILRIGESYKEKQRTIQAKKEVEQRRAGGYSRKYASKAKNLADDMVRNTARDLLYYAVTQDAMLIFENLSRGFGRQGKRTFMAERQYTRMEDWLTAKLAYEGLPSKTYLSKTLAQYTSKTCSNCGFTITSADYDRVLEKLKKTATGWMTTINGKELKVEGQITYYNRYKRQNVVKDLSVELDRLSEESVNNDISSWTKGRSGEALSLLKKRFSHRPVQEKFVCLNCGFETHADEQAALNIARSWLFLRSQEYKKYQTNKTTGNTDKRAFVETWQSFYRKKLKEVWKPAV

SEQ ID NO: 29464 - protein, 978 aa, synthetic construct
  REGION 1..978: note = engineered CasX variant
QEIKRINKIRRRLVKDSNTKKAGKTGPMKTLLVRVMTPDLRERLENLRKKPENIPQPISNTSRANLNKLLTDYTEMKKAILHVYWEEFQKDPVGLMSRVAQPASKKIDQNKLKPEMDEKGNLTTAGFACSQCGQPLFVYKLEQVSEKGKAYTNYFGRCNVAEHEKLILLAQLKPEKDSDEAVTYSLGKFGQRALDFYSIHVTKESTHPVKPLAQIAGNRYASGPVGKALSDACMGTIASFLSKYQDIIIEHQKVVKGNQKRLESLRELAGKENLEYPSVTLPPQPHTKEGVDAYNEVIARVRTWVNLNLWQKLKLSRDDAKPLLRLKGFPSFPLVERQANEVDWWDMVCNVKKLINEKKEDGKVFWQNLAGYKRQEALRPYLSSEEDRKKGKKFARYQLGDLLLHLEKKHPEDWGKVYDEAWERIDKKVEGLSKHIKLEEERRSEDAQSKAALTDWLRAKASFVIEGLKEADKDEFCRCELKLQKWYGDLRGKPFAIEAENSILDISGFSKQYNCAFIWQKDGVKKLNLYLIINYFKGGKLRFKKIKPEAFEANRFYTVINKKSGEIVPMEVNFNFDDPNLIILPLAFGKRQGREFIWNDLLSLETGSLKLANGRVIEKTLYNRRTRQDEPALFVALTFERREVLDSSNIKPMNLIGVDRGENIPAVIALTDPEGCPLSRFKDSLGNPTHILRIGESYKEKQRTIQAKKEVEQRRAGGYSRKYASKAKNLADDMVRNTARDLLYYAVTQDAMLIFENLSRGFGRQGKRTFMAERQYTRMEDWLTAKLAYEGLPSKTYLSKTLAQYTSKTCSNCGFTITSADYDRVLEKLKKTATGWMTTINGKELKVEGQITYYNRYKRQNVVKDLSVELDRLSEESVNNDISSWTKGRSGEALSLLKKRFSHRPVQEKFVCLNCGFETHADEQAALNIARSWLFLRSQEYKKYQTNKTTGNTDKRAFVETWQSFYRKKLKEVWKPAV

SEQ ID NO: 29465 - protein, 979 aa, synthetic construct
  REGION 1..979: note = engineered CasX variant
QEIKRINKIRRRLVKDSNTKKAGKTGPMKTLLVRVMTPDLRERLENLRKKPENIPQPISNTSRANLNKLLTDYTEMKKAILHVYWEEFQKDPVGLMSRVAQPASKKIDQNKLKPEMDEKGNLTTAGFACSQCGQPLFVYKLEQVSEKGKAYTNYFGRCNVAEHEKLILLAQLKPEKDSDEAVTYSLGKFGQRALDFYSIHVTKESTHPVKPLAQIAGNRYASGPVGKALSDACMGTIASFLSKYQDIIIEHQKVVKGNQKRLESLRELAGKENLEYPSVTLPPQPHTKEGVDAYNEVIARVRTWVNLNLWQKLKLSRDDAKPLLRLKGFPSFPLVERQANEVDWWDMVCNVKKLINEKKEDGKVFWQNLAGYKRQEALRPYLSSEEDRKKGKKFARYQLGDLLLHLEKKHGERDWGKVYDEAWERIDKKVEGLSKHIKLEEERRSEDAQSKAALTDWLRAKASFVIEGLKEADKDEFCRCELKLQKWYGDLRGKPFAIEAENSILDISGFSKQYNCAFIWQKDGVKKLNLYLIINYFKGGKLRFKKIKPEAFEANRFYTVINKKSGEIVPMEVNFNFDDPNLIILPLAFGKRQGREFIWNDLLSLETGSLKLANGRVIEKTLYNRRTRQDEPALFVALTFERREVLDSSNIKPMNLIGVDRGENIPAVIALTDPEGCPLSRFKDSLGNPTHILRIGESYKEKQRTIQAKKEVEQRRAGGYSRKYASKAKNLADDMVRNTARDLLYYAVTQDAMLIFENLSRGFGRQGKRTFMAERQYTRMEDWLTAKLAYEGLPSKTYLSKTLAQYTSKTCSNCGFTITSADYDRVLEKLKKTATGWMTTINGKELKVEGQITYYNRYKRQNVVKDLSVELDRLSEESVNNDISSWTKGRSGEALSLLKKRFSHRPVQEKFVCLNCGFETHADEQAALNIARSWLFLRSQEYKKYQTNKTTGNTDKRAFVETWQSFYRKKLKEVWKPAV

SEQ ID NO: 29466 - protein, 979 aa, synthetic construct
  REGION 1..979: note = engineered CasX variant
QEIKRINKIRRRLVKDSNTKKAGKTGPMKTLLVRVMTPDLRERLENLRKKPENIPQPISNTSRANLNKLLTDYTEMKKAILHVYWEEFQKDPVGLMSRVAQPASKKIDQNKLKPEMDEKGNLTTAGFACSQCGQPLFVYKLEQVSEKGKAYTNYFGRCNVAEHEKLILLAQLKPEKDSDEAVTYSLGKFGQRALDFYSIHVTKESTHPVKPLAQIAGNRYASGPVGKALSDACMGTIASFLSKYQDIIIEHQKVVKGNQKRLESLRELAGKENLEYPSVTLPPQPHTKEGVDAYNEVIARVRTWVNLNLWQKLKLSRDDAKPLLRLKGFPSFPLVERQANEVDWWDMVCNVKKLINEKKEDGKVFWQNLAGYKRQEALRPYLSSEEDRKKGKKFARYQLGDLLLHLEKKHGEYDWGKVYDEAWERIDKKVEGLSKHIKLEEERRSEDAQSKAALTDWLRAKASFVIEGLKEADKDEFCRCELKLQKWYGDLRGKPFAIEAENSILDISGFSKQYNCAFIWQKDGVKKLNLYLIINYFKGGKLRFKKIKPEAFEANRFYTVINKKSGEIVPMEVNFNFDDPNLIILPLAFGKRQGREFIWNDLLSLETGSLKLANGRVIEKTLYNRRTRQDEPALFVALTFERREVLDSSNIKPMNLIGVDRGENIPAVIALTDPEGCPLSRFKDSLGNPTHILRIGESYKEKQRTIQAKKEVEQRRAGGYSRKYASKAKNLADDMVRNTARDLLYYAVTQDAMLIFENLSRGFGRQGKRTFMAERQYTRMEDWLTAKLAYEGLPSKTYLSKTLAQYTSKTCSNCGFTITSADYDRVLEKLKKTATGWMTTINGKELKVEGQITYYNRYKRQNVVKDLSVELDRLSEESVNNDISSWTKGRSGEALSLLKKRFSHRPVQEKFVCLNCGFETHADEQAALNIARSWLFLRSQEYKKYQTNKTTGNTDKRAFVETWQSFYRKKLKEVWKPAV

SEQ ID NO: 29467 - protein, 978 aa, synthetic construct
  REGION 1..978: note = engineered CasX variant
QEIKRINKIRRRLVKDSNTKKAGKTGPMKTLLVRVMTPDLRERLENLRKKPENIPQPISNTSRANLNKLLTDYTEMKKAILHVYWEEFQKDPVGLMSRVAQPASKKIDQNKLKPEMDEKGNLTTAGFACSQCGQPLFVYKLEQVSEKGKAYTNYFGRCNVAEHEKLILLAQLKPEKDSDEAVTYSLGKFGQRALDFYSIHVTKESTHPVKPLAQIAGNRYASGPVGKALSDACMGTIASFLSKYQDIIIEHQKVVKGNQKRLESLRELAGKENLEYPSVTLPPQPHTKEGVDAYNEVIARVRTWVNLNLWQKLKLSRDDAKPLLRLKGFPSFPLVERQANEVDWWDMVCNVKKLINEKKEDGKVFWQNLAGYKRQEALRPYLSSEEDRKKGKKFARYQLGDLLLHLEKKHGEDWGDVYDEAWERIDKKVEGLSKHIKLEEERRSEDAQSKAALTDWLRAKASFVIEGLKEADKDEFCRCELKLQKWYGDLRGKPFAIEAENSILDISGFSKQYNCAFIWQKDGVKKLNLYLIINYFKGGKLRFKKIKPEAFEANRFYTVINKKSGEIVPMEVNFNFDDPNLIILPLAFGKRQGREFIWNDLLSLETGSLKLANGRVIEKTLYNRRTRQDEPALFVALTFERREVLDSSNIKPMNLIGVDRGENIPAVIALTDPEGCPLSRFKDSLGNPTHILRIGESYKEKQRTIQAKKEVEQRRAGGYSRKYASKAKNLADDMVRNTARDLLYYAVTQDAMLIFENLSRGFGRQGKRTFMAERQYTRMEDWLTAKLAYEGLPSKTYLSKTLAQYTSKTCSNCGFTITSADYDRVLEKLKKTATGWMTTINGKELKVEGQITYYNRYKRQNVVKDLSVELDRLSEESVNNDISSWTKGRSGEALSLLKKRFSHRPVQEKFVCLNCGFETHADEQAALNIARSWLFLRSQEYKKYQTNKTTGNTDKRAFVETWQSFYRKKLKEVWKPAV

SEQ ID NO: 29468 - protein, 978 aa, synthetic construct
  REGION 1..978: note = engineered CasX variant
QEIKRINKIRRRLVKDSNTKKAGKTGPMKTLLVRVMTPDLRERLENLRKKPENIPQPISNTSRANLNKLLTDYTEMKKAILHVYWEEFQKDPVGLMSRVAQPASKKIDQNKLKPEMDEKGNLTTAGFACSQCGQPLFVYKLEQVSEKGKAYTNYFGRCNVAEHEKLILLAQLKPEKDSDEAVTYSLGKFGQRALDFYSIHVTKESTHPVKPLAQIAGNRYASGPVGKALSDACMGTIASFLSKYQDIIIEHQKVVKGNQKRLESLRELAGKENLEYPSVTLPPQPHTKEGVDAYNEVIARVRTWVNLNLWQKLKLSRDDAKPLLRLKGFPSFPLVERQANEVDWWDMVCNVKKLINEKKEDGKVFWQNLAGYKRQEALRPYLSSEEDRKKGKKFARYQLGDLLLHLEKKHGEDWGKVYGEAWERIDKKVEGLSKHIKLEEERRSEDAQSKAALTDWLRAKASFVIEGLKEADKDEFCRCELKLQKWYGDLRGKPFAIEAENSILDISGFSKQYNCAFIWQKDGVKKLNLYLIINYFKGGKLRFKKIKPEAFEANRFYTVINKKSGEIVPMEVNFNFDDPNLIILPLAFGKRQGREFIWNDLLSLETGSLKLANGRVIEKTLYNRRTRQDEPALFVALTFERREVLDSSNIKPMNLIGVDRGENIPAVIALTDPEGCPLSRFKDSLGNPTHILRIGESYKEKQRTIQAKKEVEQRRAGGYSRKYASKAKNLADDMVRNTARDLLYYAVTQDAMLIFENLSRGFGRQGKRTFMAERQYTRMEDWLTAKLAYEGLPSKTYLSKTLAQYTSKTCSNCGFTITSADYDRVLEKLKKTATGWMTTINGKELKVEGQITYYNRYKRQNVVKDLSVELDRLSEESVNNDISSWTKGRSGEALSLLKKRFSHRPVQEKFVCLNCGFETHADEQAALNIARSWLFLRSQEYKKYQTNKTTGNTDKRAFVETWQSFYRKKLKEVWKPAV

SEQ ID NO: 29469 - protein, 978 aa, synthetic construct
  REGION 1..978: note = engineered CasX variant
QEIKRINKIRRRLVKDSNTKKAGKTGPMKTLLVRVMTPDLRERLENLRKKPENIPQPISNTSRANLNKLLTDYTEMKKAILHVYWEEFQKDPVGLMSRVAQPASKKIDQNKLKPEMDEKGNLTTAGFACSQCGQPLFVYKLEQVSEKGKAYTNYFGRCNVAEHEKLILLAQLKPEKDSDEAVTYSLGKFGQRALDFYSIHVTKESTHPVKPLAQIAGNRYASGPVGKALSDACMGTIASFLSKYQDIIIEHQKVVKGNQKRLESLRELAGKENLEYPSVTLPPQPHTKEGVDAYNEVIARVRTWVNLNLWQKLKLSRDDAKPLLRLKGFPSFPLVERQANEVDWWDMVCNVKKLINEKKEDGKVFWQNLAGYKRQEALRPYLSSEEDRKKGKKFARYQLGDLLLHLEKKHGEDWGKVYDEAWERIDKKVEGLSKHIKLEEERRSEDAQSKAALTDWLRAKASFVIEGKKEADKDEFCRCELKLQKWYGDLRGKPFAIEAENSILDISGFSKQYNCAFIWQKDGVKKLNLYLIINYFKGGKLRFKKIKPEAFEANRFYTVINKKSGEIVPMEVNFNFDDPNLIILPLAFGKRQGREFIWNDLLSLETGSLKLANGRVIEKTLYNRRTRQDEPALFVALTFERREVLDSSNIKPMNLIGVDRGENIPAVIALTDPEGCPLSRFKDSLGNPTHILRIGESYKEKQRTIQAKKEVEQRRAGGYSRKYASKAKNLADDMVRNTARDLLYYAVTQDAMLIFENLSRGFGRQGKRTFMAERQYTRMEDWLTAKLAYEGLPSKTYLSKTLAQYTSKTCSNCGFTITSADYDRVLEKLKKTATGWMTTINGKELKVEGQITYYNRYKRQNVVKDLSVELDRLSEESVNNDISSWTKGRSGEALSLLKKRFSHRPVQEKFVCLNCGFETHADEQAALNIARSWLFLRSQEYKKYQTNKTTGNTDKRAFVETWQSFYRKKLKEVWKPAV

SEQ ID NO: 29470 - protein, 978 aa, synthetic construct
  REGION 1..978: note = engineered CasX variant
QEIKRINKIRRRLVKDSNTKKAGKTGPMKTLLVRVMTPDLRERLENLRKKPENIPQPISNTSRANLNKLLTDYTEMKKAILHVYWEEFQKDPVGLMSRVAQPASKKIDQNKLKPEMDEKGNLTTAGFACSQCGQPLFVYKLEQVSEKGKAYTNYFGRCNVAEHEKLILLAQLKPEKDSDEAVTYSLGKFGQRALDFYSIHVTKESTHPVKPLAQIAGNRYASGPVGKALSDACMGTIASFLSKYQDIIIEHQKVVKGNQKRLESLRELAGKENLEYPSVTLPPQPHTKEGVDAYNEVIARVRTWVNLNLWQKLKLSRDDAKPLLRLKGFPSFPLVERQANEVDWWDMVCNVKKLINEKKEDGKVFWQNLAGYKRQEALRPYLSSEEDRKKGKKFARYQLGDLLLHLEKKHGEDWGKVYDEAWERIDKKVEGLSKHIKLEEERRSEDAQSKAALTDWLRAKASFVIEGSKEADKDEFCRCELKLQKWYGDLRGKPFAIEAENSILDISGFSKQYNCAFIWQKDGVKKLNLYLIINYFKGGKLRFKKIKPEAFEANRFYTVINKKSGEIVPMEVNFNFDDPNLIILPLAFGKRQGREFIWNDLLSLETGSLKLANGRVIEKTLYNRRTRQDEPALFVALTFERREVLDSSNIKPMNLIGVDRGENIPAVIALTDPEGCPLSRFKDSLGNPTHILRIGESYKEKQRTIQAKKEVEQRRAGGYSRKYASKAKNLADDMVRNTARDLLYYAVTQDAMLIFENLSRGFGRQGKRTFMAERQYTRMEDWLTAKLAYEGLPSKTYLSKTLAQYTSKTCSNCGFTITSADYDRVLEKLKKTATGWMTTINGKELKVEGQITYYNRYKRQNVVKDLSVELDRLSEESVNNDISSWTKGRSGEALSLLKKRFSHRPVQEKFVCLNCGFETHADEQAALNIARSWLFLRSQEYKKYQTNKTTGNTDKRAFVETWQSFYRKKLKEVWKPAV

SEQ ID NO: 29471 - protein, 979 aa, synthetic construct
  REGION 1..979: note = engineered CasX variant
QEIKRINKIRRRLVKDSNTKKAGKTGPMKTLLVRVMTPDLRERLENLRKKPENIPQPISNTSRANLNKLLTDYTEMKKAILHVYWEEFQKDPVGLMSRVAQPASKKIDQNKLKPEMDEKGNLTTAGFACSQCGQPLFVYKLEQVSEKGKAYTNYFGRCNVAEHEKLILLAQLKPEKDSDEAVTYSLGKFGQRALDFYSIHVTKESTHPVKPLAQIAGNRYASGPVGKALSDACMGTIASFLSKYQDIIIEHQKVVKGNQKRLESLRELAGKENLEYPSVTLPPQPHTKEGVDAYNEVIARVRTWVNLNLWQKLKLSRDDAKPLLRLKGFPSFPLVERQANEVDWWDMVCNVKKLINEKKEDGKVFWQNLAGYKRQEALRPYLSSEEDRKKGKKFARYQLGDLLLHLEKKHGEDWGKVYDEAWERIDKKVEGLSKHIKLEEERRSEDAQSKAALTDWLRAKASFVIEGLKEADDKDEFCRCELKLQKWYGDLRGKPFAIEAENSILDISGFSKQYNCAFIWQKDGVKKLNLYLIINYFKGGKLRFKKIKPEAFEANRFYTVINKKSGEIVPMEVNFNFDDPNLIILPLAFGKRQGREFIWNDLLSLETGSLKLANGRVIEKTLYNRRTRQDEPALFVALTFERREVLDSSNIKPMNLIGVDRGENIPAVIALTDPEGCPLSRFKDSLGNPTHILRIGESYKEKQRTIQAKKEVEQRRAGGYSRKYASKAKNLADDMVRNTARDLLYYAVTQDAMLIFENLSRGFGRQGKRTFMAERQYTRMEDWLTAKLAYEGLPSKTYLSKTLAQYTSKTCSNCGFTITSADYDRVLEKLKKTATGWMTTINGKELKVEGQITYYNRYKRQNVVKDLSVELDRLSEESVNNDISSWTKGRSGEALSLLKKRFSHRPVQEKFVCLNCGFETHADEQAALNIARSWLFLRSQEYKKYQTNKTTGNTDKRAFVETWQSFYRKKLKEVWKPAV

SEQ ID NO: 29472 - protein, 979 aa, synthetic construct
  REGION 1..979: note = engineered CasX variant
QEIKRINKIRRRLVKDSNTKKAGKTGPMKTLLVRVMTPDLRERLENLRKKPENIPQPISNTSRANLNKLLTDYTEMKKAILHVYWEEFQKDPVGLMSRVAQPASKKIDQNKLKPEMDEKGNLTTAGFACSQCGQPLFVYKLEQVSEKGKAYTNYFGRCNVAEHEKLILLAQLKPEKDSDEAVTYSLGKFGQRALDFYSIHVTKESTHPVKPLAQIAGNRYASGPVGKALSDACMGTIASFLSKYQDIIIEHQKVVKGNQKRLESLRELAGKENLEYPSVTLPPQPHTKEGVDAYNEVIARVRTWVNLNLWQKLKLSRDDAKPLLRLKGFPSFPLVERQANEVDWWDMVCNVKKLINEKKEDGKVFWQNLAGYKRQEALRPYLSSEEDRKKGKKFARYQLGDLLLHLEKKHGEDWGKVYDEAWERIDKKVEGLSKHIKLEEERRSEDAQSKAALTDWLRAKASFVIEGLKEADKDEFCRCELKLQKWYGDLRGKPFAIEAENSILDISGFSKQYNCAFIWQKDGVKKLNLYLIINYFKGGKLRFKKIKPEAFEANRFYTVINKKSGEIVPMEVNFNFDDPNLIILPLAFGKRQGREFIWNDLLSLETGSLKLANGRVIEKTLYNRRTRQDEPALFVALTFERREVLDSSNIKPMNLIGVDRGENIPAVIALTDPEGCPLSRFKDSLGNPTHILRIGESYKEKQRTIQAKKEVEQRRAGGYSRKYASKAKNLADDMVRNTARDLLYYAVTQDAMLIFENLSRGFGRQGKRTFMAERQYTRMEDWLTAKLAYEGLPSKTYLSKTLAQYTSKTCSNCGFTITSADYDRVLEKLKKTATGWMTTINGKELKVEGQITYYNRYKRQNVVKDLSVELDRLSEESVNNDISSWTKGRSGNEALSLLKKRFSHRPVQEKFVCLNCGFETHADEQAALNIARSWLFLRSQEYKKYQTNKTTGNTDKRAFVETWQSFYRKKLKEVWKPAV

SEQ ID NO: 29473 - protein, 978 aa, synthetic construct
  REGION 1..978: note = engineered CasX variant
QEIKRINKIRRRLVKDSNTKKAGKTGPMKTLLVRVMTPDLRERLENLRKKPENIPQPISNTSRANLNKLLTDYTEMKKAILHVYWEEFQKDPVGLMSRVAQPASKKIDQNKLKPEMDEKGNLTTAGFACSQCGQPLFVYKLEQVSEKGKAYTNYFGRCNVAEHEKLILLAQLKPEKDSDEAVTYSLGKFGQRALDFYSIHVTKESTHPVKPLAQIAGNRYASGPVGKALSDACMGTIASFLSKYQDIIIEHQKVVKGNQKRLESLRELAGKENLEYPSVTLPPQPHTKEGVDAYNEVIARVRTWVNLNLWQKLKLSRDDAKPLLRLKGFPSFPLVERQANEVDWWDMVCNVKKLINEKKEDGKVFWQNLAGYKRQEALRPYLSSEEDRQKGKKFARYQLGDLLLHLEKKHGEDWGKVYDEAWERIDKKVEGLSKHIKLEEERRSEDAQSKAALTDWLRAKASFVIEGLKEADKDEFCRCELKLQKWYGDLRGKPFAIEAENSILDISGFSKQYNCAFIWQKDGVKKLNLYLIINYFKGGKLRFKKIKPEAFEANRFYTVINKKSGEIVPMEVNFNFDDPNLIILPLAFGKRQGREFIWNDLLSLETGSLKLANGRVIEKTLYNRRTRQDEPALFVALTFERREVLDSSNIKPMNLIGVDRGENIPAVIALTDPEGCPLSRFKDSLGNPTHILRIGESYKEKQRTIQAKKEVEQRRAGGYSRKYASKAKNLADDMVRNTARDLLYYAVTQDAMLIFENLSRGFGRQGKRTFMAERQYTRMEDWLTAKLAYEGLPSKTYLSKTLAQYTSKTCSNCGFTITSADYDRVLEKLKKTATGWMTTINGKELKVEGQITYYNRYKRQNVVKDLSVELDRLSEESVNNDISSWTKGRSGEALSLLKKRFSHRPVQEKFVCLNCGFETHADEQAALNIARSWLFLRSQEYKKYQTNKTTGNTDKRAFVETWQSFYRKKLKEVWKPAV

SEQ ID NO: 29474 - protein, 978 aa, synthetic construct
  REGION 1..978: note = engineered CasX variant
QEIKRINKIRRRLVKDSNTKKAGKTGPMKTLLVRVMTPDLRERLENLRKKPENIPQPISNTSRANLNKLLTDYTEMKKAILHVYWEEFQKDPVGLMSRVAQPASKKIDQNKLKPEMDEKGNLTTAGFACSQCGQPLFVYKLEQVSEKGKAYTNYFGRCNVAEHEKLILLAQLKPEKDSDEAVTYSLGKFGQRALDFYSIHVTKESTHPVKPLAQIAGNRYASGPVGKALSDACMGTIASFLSKYQDIIIEHQKVVKGNQKRLESLRELAGKENLEYPSVTLPPQPHTKEGVDAYNEVIARVRTWVNLNLWQKLKLSRDDAKPLLRLKGFPSFPLVERQANEVDWWDMVCNVKKLINEKKEDGKVFWQNLAGYKRQEALRPYLSSEEDRKKGKKFARYQLGDLLLHLEKKHGEDWGKVYDEAWERIDKKVEGLSKHIKLEEERRSEDAQSKAALTDWLRAKASFVIEGLKEADKDEFCRCELKLQKWYGDLRGKPFAIEAENSILDISGFSKQYNCAFIWQKDGVKKLNLYLIINYFKGGKLRFKKIKPEAFEANRFYTVINKKSGEIVPMEVNFNFDDPNLIILPLAFGKRQGREFIWNDLLSLETGSLKLANGRVIEKTLYNRRTRQDEPALFVALTFERREVLDSSNIKPMNLIGVDRGENIPAVIALTDPEGCPLSRFKDSLGNPTHILRIGESYKEKQRTIQAKKEVEQRRAGGYSRKYASKAKNLADDMVRNTARDLLYYAVTQDAMLIFENLSRGFGRQGKRTFMAERQYTRMEDWLTAKLAYEGLPSQTYLSKTLAQYTSKTCSNCGFTITSADYDRVLEKLKKTATGWMTTINGKELKVEGQITYYNRYKRQNVVKDLSVELDRLSEESVNNDISSWTKGRSGEALSLLKKRFSHRPVQEKFVCLNCGFETHADEQAALNIARSWLFLRSQEYKKYQTNKTTGNTDKRAFVETWQSFYRKKLKEVWKPAV

SEQ ID NO: 29475 - protein, 978 aa, synthetic construct
  REGION 1..978: note = engineered CasX variant
QEIKRINKIRRRLVKDSNTKKAGKTGPMKTLLVRVMTPDLRERLENLRKKPENIPQPISNTSRANLNKLLTDYTEMKKAILHVYWEEFQKDPVGLMSRVAQPASKKIDQNKLKPEMDEKGNLTTAGFACSQCGQPLFVYKLEQVSEKGKAYTNYFGRCNVAEHEKLILLAQLKPEKDSDEAVTYSLGKFGQRALDFYSIHVTKESTHPVKPLAQIAGNRYASGPVGKALSDACMGTIASFLSKYQDIIIEHQKVVKGNQKRLESLRELAGKENLEYPSVTLPPQPHTKEGVDAYNEVIARVRTWVNLNLWQKLKLSRDDAKPLLRLKGFPSFPLVERQANEVDWWDMVCNVKKLINEKKEDGKVFWQNLAGYKRQEALRPYLSSEEDRKKGKKFARYQLGDLLLHLEKKHGEDWGKVYDEAWERIDKKVEGLSKHIKLEEERRSEDAQSKAALTDWLRAKASFVIEGLKEADKDEFCRCELKLQKWYGDLRGKPFAIEAENSILDISGFSKQYNCAFIWQKDGVKKLNLYLIINYFKGGKLRFKKIKPEAFEANRFYTVINKKSGEIVPMEVNFNFDDPNLIILPLAFGKRQGREFIWNDLLSLETGSLKLANGRVIEKTLYNRRTRQDEPALFVALTFERREVLDSSNIKPMNLIGVDRGENIPAVIALTDPEGCPLSRFKDSLGNPTHILRIGESYKEKQRTIQAKKEVEQRRAGGYSRKYASKAKNLADDMVRNTARDLLYYAVTQDAMLIFENLSRGFGRQGKRTFMAERQYTRMEDWLTAKLAYNGLPSKTYLSKTLAQYTSKTCSNCGFTITSADYDRVLEKLKKTATGWMTTINGKELKVEGQITYYNRYKRQNVVKDLSVELDRLSEESVNNDISSWTKGRSGEALSLLKKRFSHRPVQEKFVCLNCGFETHADEQAALNIARSWLFLRSQEYKKYQTNKTTGNTDKRAFVETWQSFYRKKLKEVWKPAV

SEQ ID NO: 29476 - protein, 978 aa, synthetic construct
  REGION 1..978: note = engineered CasX variant
QEIKRINKIRRRLVKDSNTKKAGKTGPMKTLLVRVMTPDLRERLENLRKKPENIPQPISNTSRANLNKLLTDYTEMKKAILHVYWEEFQKDPVGLMSRVAQPASKKIDQNKLKPEMDEKGNLTTAGFACSQCGQPLFVYKLEQVSEKGKAYTNYFGRCNVAEHEKLIQLAQLKPEKDSDEAVTYSLGKFGQRALDFYSIHVTKESTHPVKPLAQIAGNRYASGPVGKALSDACMGTIASFLSKYQDIIIEHQKVVKGNQKRLESLRELAGKENLEYPSVTLPPQPHTKEGVDAYNEVIARVRTWVNLNLWQKLKLSRDDAKPLLRLKGFPSFPLVERQANEVDWWDMVCNVKKLINEKKEDGKVFWQNLAGYKRQEALRPYLSSEEDRKKGKKFARYQLGDLLLHLEKKHGEDWGKVYDEAWERIDKKVEGLSKHIKLEEERRSEDAQSKAALTDWLRAKASFVIEGLKEADKDEFCRCELKLQKWYGDLRGKPFAIEAENSILDISGFSKQYNCAFIWQKDGVKKLNLYLIINYFKGGKLRFKKIKPEAFEANRFYTVINKKSGEIVPMEVNFNFDDPNLIILPLAFGKRQGREFIWNDLLSLETGSLKLANGRVIEKTLYNRRTRQDEPALFVALTFERREVLDSSNIKPMNLIGVDRGENIPAVIALTDPEGCPLSRFKDSLGNPTHILRIGESYKEKQRTIQAKKEVEQRRAGGYSRKYASKAKNLADDMVRNTARDLLYYAVTQDAMLIFENLSRGFGRQGKRTFMAERQYTRMEDWLTAKLAYEGLPSKTYLSKTLAQYTSKTCSNCGFTITSADYDRVLEKLKKTATGWMTTINGKELKVEGQITYYNRYKRQNVVKDLSVELDRLSEESVNNDISSWTKGRSGEALSLLKKRFSHRPVQEKFVCLNCGFETHADEQAALNIARSWLFLRSQEYKKYQTNKTTGNTDKRAFVETWQSFYRKKLKEVWKPAV

SEQ ID NO: 29477 - protein, 978 aa, synthetic construct
  REGION 1..978: note = engineered CasX variant
QEIKRINKIRRRLVKDSNTKKAGKTGPMKTLLVRVMTPDLRERLENLRKKPENIPQPISNTSRANLNKLLTDYTEMKKAILHVYWEEFQKDPVGLMSRVAQPASKKIDQNKLKPEMDEKGNLTTAGFACSQCGQPLFVYKLEQVSEKGKAYTNYFGRCNVAEHEKLILLAQLKPEKDSDEAVTYSLGKFGQRALDFYSIHVTKESTHPVKPLAQIAGNRYASGPVGKALSDACMGTIASFLSKYQDIIIEHQKVVKGNQKRLESLRELAGKENLEYPSVTLPPQPHTKEGVDAYNEVIARVRTWVNLNLWQKLKLSRDDAKPLLRLKGFPSFPLVERQANEVDWWDMVCNVKKLINEKKEDGKVFWQNLAIYKRQEALRPYLSSEEDRKKGKKFARYQLGDLLLHLEKKHGEDWGKVYDEAWERIDKKVEGLSKHIKLEEERRSEDAQSKAALTDWLRAKASFVIEGLKEADKDEFCRCELKLQKWYGDLRGKPFAIEAENSILDISGFSKQYNCAFIWQKDGVKKLNLYLIINYFKGGKLRFKKIKPEAFEANRFYTVINKKSGEIVPMEVNFNFDDPNLIILPLAFGKRQGREFIWNDLLSLETGSLKLANGRVIEKTLYNRRTRQDEPALFVALTFERREVLDSSNIKPMNLIGVDRGENIPAVIALTDPEGCPLSRFKDSLGNPTHILRIGESYKEKQRTIQAKKEVEQRRAGGYSRKYASKAKNLADDMVRNTARDLLYYAVTQDAMLIFENLSRGFGRQGKRTFMAERQYTRMEDWLTAKLAYEGLPSKTYLSKTLAQYTSKTCSNCGFTITSADYDRVLEKLKKTATGWMTTINGKELKVEGQITYYNRYKRQNVVKDLSVELDRLSEESVNNDISSWTKGRSGEALSLLKKRFSHRPVQEKFVCLNCGFETHADEQAALNIARSWLFLRSQEYKKYQTNKTTGNTDKRAFVETWQSFYRKKLKEVWKPAV

SEQ ID NO: 29478 - protein, 978 aa, synthetic construct
  REGION 1..978: note = engineered CasX variant
QEIKRINKIRRRLVKDSNTKKAGKTGPMKTLLVRVMTPDLRERLENLRKKPENIPQPISNTSRANLNKLLTDYTEMKKAILHVYWEEFQKDPVGLMSRVAQPASKKIDQNKLKPEMDEKGNLTTAGFACSQCGQPLFVYKLEQVSEKGKAYTNYFGRCNVAEHEKLILLAQLKPEKDSDEAVTYSLGKFGQRALDFYSIHVTKESTHPVKPLAQIAGNRYASGPVGKALSDACMGTIASFLSKYQDIIIEHQKVVKGNQKRLESLRELAGKENLEYPSVTLPPQPHTKEGVDAYNEVIARVRTWVNLNLWQKLKLSRDDAKPLLRLKGFPSFPLVERQANEVDWWDMVCNVKKLINEKKEDGKVFWQNLAGYKRQEALRPYLSSEEDREKGKKFARYQLGDLLLHLEKKHGEDWGKVYDEAWERIDKKVEGLSKHIKLEEERRSEDAQSKAALTDWLRAKASFVIEGLKEADKDEFCRCELKLQKWYGDLRGKPFAIEAENSILDISGFSKQYNCAFIWQKDGVKKLNLYLIINYFKGGKLRFKKIKPEAFEANRFYTVINKKSGEIVPMEVNFNFDDPNLIILPLAFGKRQGREFIWNDLLSLETGSLKLANGRVIEKTLYNRRTRQDEPALFVALTFERREVLDSSNIKPMNLIGVDRGENIPAVIALTDPEGCPLSRFKDSLGNPTHILRIGESYKEKQRTIQAKKEVEQRRAGGYSRKYASKAKNLADDMVRNTARDLLYYAVTQDAMLIFENLSRGFGRQGKRTFMAERQYTRMEDWLTAKLAYEGLPSKTYLSKTLAQYTSKTCSNCGFTITSADYDRVLEKLKKTATGWMTTINGKELKVEGQITYYNRYKRQNVVKDLSVELDRLSEESVNNDISSWTKGRSGEALSLLKKRFSHRPVQEKFVCLNCGFETHADEQAALNIARSWLFLRSQEYKKYQTNKTTGNTDKRAFVETWQSFYRKKLKEVWKPAV

SEQ ID NO: 29479 - protein, 978 aa, synthetic construct
  REGION 1..978: note = engineered CasX variant
QEIKRINKIRRRLVKDSNTKKAGKTGPMKTLLVRVMTPDLRERLENLRKKPENIPQPISNTSRANLNKLLTDYTEMKKAILHVYWEEFQKDPVGLMSRVAQPASKKIDQNKLKPEMDEKGNLTTAGFACSQCGQPLFVYKLEQVSEKGKAYTNYFGRCNVAEHEKLILLAQLKPEKDSDEAVTYSLGKFGQRALDFYSIHVTKESTHPVKPLAQIAGNRYASGPVGKALSDACMGTIASFLSKYQDIIIEHQKVVKGNQKRLESLRELAGKENLEYPSVTLPPQPHTKEGVDAYNEVIARVRTWVNLNLWQKLKLSRDDAKPLLRLKGFPSFPLVERQANEVDWWDMVCNVKKLINEKKEDGKVFWQNLAGYKRQEALRPYLSSEEDRKKGKKFARYQLGDLLLHLEKKHGEDWGKVYDEAWERIDKKVEGLSKHIKLEEERRSEDAQSKAALTDWLRAKASFVIEGLKEADKDEFCRCELKLQKWYGDLRGKPFAIEAENSILDISGFSKQYNCAFIWQKDGVKKLNLYLIINYFKGGKLRFKKIKPEAFEANRFYTVINKKSGEIVIMEVNFNFDDPNLIILPLAFGKRQGREFIWNDLLSLETGSLKLANGRVIEKTLYNRRTRQDEPALFVALTFERREVLDSSNIKPMNLIGVDRGENIPAVIALTDPEGCPLSRFKDSLGNPTHILRIGESYKEKQRTIQAKKEVEQRRAGGYSRKYASKAKNLADDMVRNTARDLLYYAVTQDAMLIFENLSRGFGRQGKRTFMAERQYTRMEDWLTAKLAYEGLPSKTYLSKTLAQYTSKTCSNCGFTITSADYDRVLEKLKKTATGWMTTINGKELKVEGQITYYNRYKRQNVVKDLSVELDRLSEESVNNDISSWTKGRSGEALSLLKKRFSHRPVQEKFVCLNCGFETHADEQAALNIARSWLFLRSQEYKKYQTNKTTGNTDKRAFVETWQSFYRKKLKEVWKPAV

SEQ ID NO: 29480 - protein, 978 aa, synthetic construct
  REGION 1..978: note = engineered CasX variant
QEIKRINKIRRRLVKDSNTKKAGKTGPMKTLLVRVMTPDLRERLENLRKKPENIPQPISNTSRANLNKLLTDYTEMKKAILHVYWEEFQKDPVGLMSRVAQPASKKIDQNKLKPEMDEKGNLTTAGFACSQCGQPLFVYKLEQVSEKGKAYTNYFGRCNVAEHEKLILLAQLKPEKDSDEAVTYSLGKFGQRALDFYSIHVTKESTHPVKPLAQIAGNRYASGPVGKALSGACMGTIASFLSKYQDIIIEHQKVVKGNQKRLESLRELAGKENLEYPSVTLPPQPHTKEGVDAYNEVIARVRWWVNLNLWQKLKLSRDDAKPLLRLKGFPSFPLVERQANEVDWWDMVCNVKKLINEKKEDGKVFWQNLAGYKRQEALRPYLSSEEDRKKGKKFARYQLGDLLLHLEKKHGEDWGKVYDEAWERIDKKVEGLSKHIKLEEERRSEDAQSKAALTDWLRAKASFVIEGLKEADKDEFCRCELKLQKWYGDLRGKPFAIEAENSILDISGFSKQYNCAFIWQKDGVKKLNLYLIINYFKGGKLRFKKIKPEAFEANRFYTVINKKSGEIVPMEVNFNFDDPNLIILPLAFGKRQGREFIWNDLLSLETGSLKLANGRVIEKTLYNRRTRQDEPALFVALTFERREVLDSSNIKPMNLIGVDRGENIPAVIALTDPEGCPLSRFKDSLGNPTHILRIGESYKEKQRTIQAKKEVEQRRAGGYSRKYASKAKNLADDMVRNTARDLLYYAVTQDAMLIFENLSRGFGRQGKRTFMAERQYTRMEDWLTAKLAYEGLPSKTYLSKTLAQYTSKTCSNCGFTITSADYDRVLEKLKKTATGWMTTINGKELKVEGQITYYNRYKRQNVVKDLSVELDRLSEESVNNDISSWTKGRSGEALSLLKKRFSHRPVQEKFVCLNCGFETHADEQAALNIARSWLFLRSQEYKKYQTNKTTGNTDKRAFVETWQSFYRKKLKEVWKPAV

SEQ ID NO: 29481 - protein, 978 aa, synthetic construct
  REGION 1..978: note = engineered CasX variant
QEIKRINKIRRRLVKDSNTKKAGKTGPMKTLLVRVMTPDLRERLENLRKKPENIPQPISNTSRANLNKLLTDYTEMKKAILHVYWEEFQKDPVGLMSRVAQPASKKIDQNKLKPEMDEKGNLTTAGFACSQCGQPLFVYKLEQVSEKGKAYTNYFGRCNVAEHEKLILLAQLKPEKDSDEAVTYSLGKFGQRALDFYSIHVTKESTHPVKPLAQIAGNRYASGPVGKALSDACMGTIASFLSKYQDIIIEHQKVVKGNQKRLESLRELAGKENLEYPSVTLPPQPHTKEGVDAYNEVIARVRWWVNLNLWQKLKLSRDDAKPLLRLKNFPSFPLVERQANEVDWWDMVCNVKKLINEKKEDGKVFWQNLAGYKRQEALRPYLSSEEDRKKGKKFARYQLGDLLLHLEKKHGEDWGKVYDEAWERIDKKVEGLSKHIKLEEERRSEDAQSKAALTDWLRAKASFVIEGLKEADKDEFCRCELKLQKWYGDLRGKPFAIEAENSILDISGFSKQYNCAFIWQKDGVKKLNLYLIINYFKGGKLRFKKIKPEAFEANRFYTVINKKSGEIVPMEVNFNFDDPNLIILPLAFGKRQGREFIWNDLLSLETGSLKLANGRVIEKTLYNRRTRQDEPALFVALTFERREVLDSSNIKPMNLIGVDRGENIPAVIALTDPEGCPLSRFKDSLGNPTHILRIGESYKEKQRTIQAKKEVEQRRAGGYSRKYASKAKNLADDMVRNTARDLLYYAVTQDAMLIFENLSRGFGRQGKRTFMAERQYTRMEDWLTAKLAYEGLPSKTYLSKTLAQYTSKTCSNCGFTITSADYDRVLEKLKKTATGWMTTINGKELKVEGQITYYNRYKRQNVVKDLSVELDRLSEESVNNDISSWTKGRSGEALSLLKKRFSHRPVQEKFVCLNCGFETHADEQAALNIARSWLFLRSQEYKKYQTNKTTGNTDKRAFVETWQSFYRKKLKEVWKPAV

SEQ ID NO: 29482 - protein, 978 aa, synthetic construct
  REGION 1..978: note = engineered CasX variant
QEIKRINKIRRRLVKDSNTKKAGKTGPMKTLLVRVMTPDLRERLENLRKKPENIPQPISNTSRANLNKLLTDYTEMKKAILHVYWEEFQKDPVGLMSRVAQPASKKIDQNKLKPEMDEKGNLTTAGFACSQCGQPLFVYKLEQVSEKGKAYTNYFGRCNVAEHEKLILLAQLKPEKDSDEAVTYSLGKFGQRALDFYSIHVTKESTHPVKPLAQIAGNRYASGPVGKALSDACMGTIASFLSKYQDIIIEHQKVVKGNQKRLESLRELAGKENLEYPSVTLPPQPHTKEGVDAYNEVIARVRWWVNLNLWQKLKLSRDDAKPLLRLKGFPSFPLVERQANEVDWWDMVCNVKKLINEKKEDGKVFWQNLAGYKRQEALRPYLSSEEDRKKGKKFARYQLGDLLNHLEKKHGEDWGKVYDEAWERIDKKVEGLSKHIKLEEERRSEDAQSKAALTDWLRAKASFVIEGLKEADKDEFCRCELKLQKWYGDLRGKPFAIEAENSILDISGFSKQYNCAFIWQKDGVKKLNLYLIINYFKGGKLRFKKIKPEAFEANRFYTVINKKSGEIVPMEVNFNFDDPNLIILPLAFGKRQGREFIWNDLLSLETGSLKLANGRVIEKTLYNRRTRQDEPALFVALTFERREVLDSSNIKPMNLIGVDRGENIPAVIALTDPEGCPLSRFKDSLGNPTHILRIGESYKEKQRTIQAKKEVEQRRAGGYSRKYASKAKNLADDMVRNTARDLLYYAVTQDAMLIFENLSRGFGRQGKRTFMAERQYTRMEDWLTAKLAYEGLPSKTYLSKTLAQYTSKTCSNCGFTITSADYDRVLEKLKKTATGWMTTINGKELKVEGQITYYNRYKRQNVVKDLSVELDRLSEESVNNDISSWTKGRSGEALSLLKKRFSHRPVQEKFVCLNCGFETHADEQAALNIARSWLFLRSQEYKKYQTNKTTGNTDKRAFVETWQSFYRKKLKEVWKPAV

SEQ ID NO: 29483 - protein, 978 aa, synthetic construct
  REGION 1..978: note = engineered CasX variant
QEIKRINKIRRRLVKDSNTKKAGKTGPMKTLLVRVMTPDLRERLENLRKKPENIPQPISNTSRANLNKLLTDYTEMKKAILHVYWEEFQKDPVGLMSRVAQPASKKIDQNKLKPEMDEKGNLTTAGFACSQCGQPLFVYKLEQVSEKGKAYTNYFGRCNVAEHEKLILLAQLKPEKDSDEAVTYSLGKFGQRALDFYSIHVTKESTHPVKPLAQIAGNRYASGPVGKALSDACMGTIASFLSKYQDIIIEHQKVVKGNQKRLESLRELAGKENLEYPSVTLPPQPHTKEGVDAYNEVIARVRWWVNLNLWQKLKLSRDDAKPLLRLKGFPSFPLVERQANEVDWWDMVCNVKKLINEKKEDGKVFWQNLAGYKRQEALRPYLSSEEDRKKGKKFARYQLGDLLWHLEKKHGEDWGKVYDEAWERIDKKVEGLSKHIKLEEERRSEDAQSKAALTDWLRAKASFVIEGLKEADKDEFCRCELKLQKWYGDLRGKPFAIEAENSILDISGFSKQYNCAFIWQKDGVKKLNLYLIINYFKGGKLRFKKIKPEAFEANRFYTVINKKSGEIVPMEVNFNFDDPNLIILPLAFGKRQGREFIWNDLLSLETGSLKLANGRVIEKTLYNRRTRQDEPALFVALTFERREVLDSSNIKPMNLIGVDRGENIPAVIALTDPEGCPLSRFKDSLGNPTHILRIGESYKEKQRTIQAKKEVEQRRAGGYSRKYASKAKNLADDMVRNTARDLLYYAVTQDAMLIFENLSRGFGRQGKRTFMAERQYTRMEDWLTAKLAYEGLPSKTYLSKTLAQYTSKTCSNCGFTITSADYDRVLEKLKKTATGWMTTINGKELKVEGQITYYNRYKRQNVVKDLSVELDRLSEESVNNDISSWTKGRSGEALSLLKKRFSHRPVQEKFVCLNCGFETHADEQAALNIARSWLFLRSQEYKKYQTNKTTGNTDKRAFVETWQSFYRKKLKEVWKPAV

SEQ ID NO: 29484 - protein, 978 aa, synthetic construct
  REGION 1..978: note = engineered CasX variant
QEIKRINKIRRRLVKDSNTKKAGKTGPMKTLLVRVMTPDLRERLENLRKKPENIPQPISNTSRANLNKLLTDYTEMKKAILHVYWEEFQKDPVGLMSRVAQPASKKIDQNKLKPEMDEKGNLTTAGFACSQCGQPLFVYKLEQVSEKGKAYTNYFGRCNVAEHEKLILLAQLKPEKDSDEAVTYSLGKFGQRALDFYSIHVTKESTHPVKPLAQIAGNRYASGPVGKALSDACMGTIASFLSKYQDIIIEHQKVVKGNQKRLESLRELAGKENLEYPSVTLPPQPHTKEGVDAYNEVIARVRWWVNLNLWQKLKLSRDDAKPLLRLKGFPSFPLVERQANEVDWWDMVCNVKKLINEKKEDGKVFWQNLAGYKRQEALRPYLSSEEDRKKGKKFARYQLGDLLLHLYKKHGEDWGKVYDEAWERIDKKVEGLSKHIKLEEERRSEDAQSKAALTDWLRAKASFVIEGLKEADKDEFCRCELKLQKWYGDLRGKPFAIEAENSILDISGFSKQYNCAFIWQKDGVKKLNLYLIINYFKGGKLRFKKIKPEAFEANRFYTVINKKSGEIVPMEVNFNFDDPNLIILPLAFGKRQGREFIWNDLLSLETGSLKLANGRVIEKTLYNRRTRQDEPALFVALTFERREVLDSSNIKPMNLIGVDRGENIPAVIALTDPEGCPLSRFKDSLGNPTHILRIGESYKEKQRTIQAKKEVEQRRAGGYSRKYASKAKNLADDMVRNTARDLLYYAVTQDAMLIFENLSRGFGRQGKRTFMAERQYTRMEDWLTAKLAYEGLPSKTYLSKTLAQYTSKTCSNCGFTITSADYDRVLEKLKKTATGWMTTINGKELKVEGQITYYNRYKRQNVVKDLSVELDRLSEESVNNDISSWTKGRSGEALSLLKKRFSHRPVQEKFVCLNCGFETHADEQAALNIARSWLFLRSQEYKKYQTNKTTGNTDKRAFVETWQSFYRKKLKEVWKPAV

SEQ ID NO: 29485 - protein, 978 aa, synthetic construct
  REGION 1..978: note = engineered CasX variant
QEIKRINKIRRRLVKDSNTKKAGKTGPMKTLLVRVMTPDLRERLENLRKKPENIPQPISNTSRANLNKLLTDYTEMKKAILHVYWEEFQKDPVGLMSRVAQPASKKIDQNKLKPEMDEKGNLTTAGFACSQCGQPLFVYKLEQVSEKGKAYTNYFGRCNVAEHEKLILLAQLKPEKDSDEAVTYSLGKFGQRALDFYSIHVTKESTHPVKPLAQIAGNRYASGPVGKALSDACMGTIASFLSKYQDIIIEHQKVVKGNQKRLESLRELAGKENLEYPSVTLPPQPHTKEGVDAYNEVIARVRWWVNLNLWQKLKLSRDDAKPLLRLKGFPSFPLVERQANEVDWWDMVCNVKKLINEKKEDGKVFWQNLAGYKRQEALRPYLSSEEDRKKGKKFARYQLGDLLLHLEKKHPEDWGKVYDEAWERIDKKVEGLSKHIKLEEERRSEDAQSKAALTDWLRAKASFVIEGLKEADKDEFCRCELKLQKWYGDLRGKPFAIEAENSILDISGFSKQYNCAFIWQKDGVKKLNLYLIINYFKGGKLRFKKIKPEAFEANRFYTVINKKSGEIVPMEVNFNFDDPNLIILPLAFGKRQGREFIWNDLLSLETGSLKLANGRVIEKTLYNRRTRQDEPALFVALTFERREVLDSSNIKPMNLIGVDRGENIPAVIALTDPEGCPLSRFKDSLGNPTHILRIGESYKEKQRTIQAKKEVEQRRAGGYSRKYASKAKNLADDMVRNTARDLLYYAVTQDAMLIFENLSRGFGRQGKRTFMAERQYTRMEDWLTAKLAYEGLPSKTYLSKTLAQYTSKTCSNCGFTITSADYDRVLEKLKKTATGWMTTINGKELKVEGQITYYNRYKRQNVVKDLSVELDRLSEESVNNDISSWTKGRSGEALSLLKKRFSHRPVQEKFVCLNCGFETHADEQAALNIARSWLFLRSQEYKKYQTNKTTGNTDKRAFVETWQSFYRKKLKEVWKPAV

SEQ ID NO: 29486 - protein, 979 aa, synthetic construct
  REGION 1..979: note = engineered CasX variant
QEIKRINKIRRRLVKDSNTKKAGKTGPMKTLLVRVMTPDLRERLENLRKKPENIPQPISNTSRANLNKLLTDYTEMKKAILHVYWEEFQKDPVGLMSRVAQPASKKIDQNKLKPEMDEKGNLTTAGFACSQCGQPLFVYKLEQVSEKGKAYTNYFGRCNVAEHEKLILLAQLKPEKDSDEAVTYSLGKFGQRALDFYSIHVTKESTHPVKPLAQIAGNRYASGPVGKALSDACMGTIASFLSKYQDIIIEHQKVVKGNQKRLESLRELAGKENLEYPSVTLPPQPHTKEGVDAYNEVIARVRWWVNLNLWQKLKLSRDDAKPLLRLKGFPSFPLVERQANEVDWWDMVCNVKKLINEKKEDGKVFWQNLAGYKRQEALRPYLSSEEDRKKGKKFARYQLGDLLLHLEKKHGERDWGKVYDEAWERIDKKVEGLSKHIKLEEERRSEDAQSKAALTDWLRAKASFVIEGLKEADKDEFCRCELKLQKWYGDLRGKPFAIEAENSILDISGFSKQYNCAFIWQKDGVKKLNLYLIINYFKGGKLRFKKIKPEAFEANRFYTVINKKSGEIVPMEVNFNFDDPNLIILPLAFGKRQGREFIWNDLLSLETGSLKLANGRVIEKTLYNRRTRQDEPALFVALTFERREVLDSSNIKPMNLIGVDRGENIPAVIALTDPEGCPLSRFKDSLGNPTHILRIGESYKEKQRTIQAKKEVEQRRAGGYSRKYASKAKNLADDMVRNTARDLLYYAVTQDAMLIFENLSRGFGRQGKRTFMAERQYTRMEDWLTAKLAYEGLPSKTYLSKTLAQYTSKTCSNCGFTITSADYDRVLEKLKKTATGWMTTINGKELKVEGQITYYNRYKRQNVVKDLSVELDRLSEESVNNDISSWTKGRSGEALSLLKKRFSHRPVQEKFVCLNCGFETHADEQAALNIARSWLFLRSQEYKKYQTNKTTGNTDKRAFVETWQSFYRKKLKEVWKPAV

SEQ ID NO: 29487 - protein, 979 aa, synthetic construct
  REGION 1..979: note = engineered CasX variant
QEIKRINKIRRRLVKDSNTKKAGKTGPMKTLLVRVMTPDLRERLENLRKKPENIPQPISNTSRANLNKLLTDYTEMKKAILHVYWEEFQKDPVGLMSRVAQPASKKIDQNKLKPEMDEKGNLTTAGFACSQCGQPLFVYKLEQVSEKGKAYTNYFGRCNVAEHEKLILLAQLKPEKDSDEAVTYSLGKFGQRALDFYSIHVTKESTHPVKPLAQIAGNRYASGPVGKALSDACMGTIASFLSKYQDIIIEHQKVVKGNQKRLESLRELAGKENLEYPSVTLPPQPHTKEGVDAYNEVIARVRWWVNLNLWQKLKLSRDDAKPLLRLKGFPSFPLVERQANEVDWWDMVCNVKKLINEKKEDGKVFWQNLAGYKRQEALRPYLSSEEDRKKGKKFARYQLGDLLLHLEKKHGEYDWGKVYDEAWERIDKKVEGLSKHIKLEEERRSEDAQSKAALTDWLRAKASFVIEGLKEADKDEFCRCELKLQKWYGDLRGKPFAIEAENSILDISGFSKQYNCAFIWQKDGVKKLNLYLIINYFKGGKLRFKKIKPEAFEANRFYTVINKKSGEIVPMEVNFNFDDPNLIILPLAFGKRQGREFIWNDLLSLETGSLKLANGRVIEKTLYNRRTRQDEPALFVALTFERREVLDSSNIKPMNLIGVDRGENIPAVIALTDPEGCPLSRFKDSLGNPTHILRIGESYKEKQRTIQAKKEVEQRRAGGYSRKYASKAKNLADDMVRNTARDLLYYAVTQDAMLIFENLSRGFGRQGKRTFMAERQYTRMEDWLTAKLAYEGLPSKTYLSKTLAQYTSKTCSNCGFTITSADYDRVLEKLKKTATGWMTTINGKELKVEGQITYYNRYKRQNVVKDLSVELDRLSEESVNNDISSWTKGRSGEALSLLKKRFSHRPVQEKFVCLNCGFETHADEQAALNIARSWLFLRSQEYKKYQTNKTTGNTDKRAFVETWQSFYRKKLKEVWKPAV

SEQ ID NO: 29488 - protein, 978 aa, synthetic construct
  REGION 1..978: note = engineered CasX variant
QEIKRINKIRRRLVKDSNTKKAGKTGPMKTLLVRVMTPDLRERLENLRKKPENIPQPISNTSRANLNKLLTDYTEMKKAILHVYWEEFQKDPVGLMSRVAQPASKKIDQNKLKPEMDEKGNLTTAGFACSQCGQPLFVYKLEQVSEKGKAYTNYFGRCNVAEHEKLILLAQLKPEKDSDEAVTYSLGKFGQRALDFYSIHVTKESTHPVKPLAQIAGNRYASGPVGKALSDACMGTIASFLSKYQDIIIEHQKVVKGNQKRLESLRELAGKENLEYPSVTLPPQPHTKEGVDAYNEVIARVRWWVNLNLWQKLKLSRDDAKPLLRLKGFPSFPLVERQANEVDWWDMVCNVKKLINEKKEDGKVFWQNLAGYKRQEALRPYLSSEEDRKKGKKFARYQLGDLLLHLEKKHGEDWGDVYDEAWERIDKKVEGLSKHIKLEEERRSEDAQSKAALTDWLRAKASFVIEGLKEADKDEFCRCELKLQKWYGDLRGKPFAIEAENSILDISGFSKQYNCAFIWQKDGVKKLNLYLIINYFKGGKLRFKKIKPEAFEANRFYTVINKKSGEIVPMEVNFNFDDPNLIILPLAFGKRQGREFIWNDLLSLETGSLKLANGRVIEKTLYNRRTRQDEPALFVALTFERREVLDSSNIKPMNLIGVDRGENIPAVIALTDPEGCPLSRFKDSLGNPTHILRIGESYKEKQRTIQAKKEVEQRRAGGYSRKYASKAKNLADDMVRNTARDLLYYAVTQDAMLIFENLSRGFGRQGKRTFMAERQYTRMEDWLTAKLAYEGLPSKTYLSKTLAQYTSKTCSNCGFTITSADYDRVLEKLKKTATGWMTTINGKELKVEGQITYYNRYKRQNVVKDLSVELDRLSEESVNNDISSWTKGRSGEALSLLKKRFSHRPVQEKFVCLNCGFETHADEQAALNIARSWLFLRSQEYKKYQTNKTTGNTDKRAFVETWQSFYRKKLKEVWKPAV

SEQ ID NO: 29489 - protein, 978 aa, synthetic construct
  REGION 1..978: note = engineered CasX variant
QEIKRINKIRRRLVKDSNTKKAGKTGPMKTLLVRVMTPDLRERLENLRKKPENIPQPISNTSRANLNKLLTDYTEMKKAILHVYWEEFQKDPVGLMSRVAQPASKKIDQNKLKPEMDEKGNLTTAGFACSQCGQPLFVYKLEQVSEKGKAYTNYFGRCNVAEHEKLILLAQLKPEKDSDEAVTYSLGKFGQRALDFYSIHVTKESTHPVKPLAQIAGNRYASGPVGKALSDACMGTIASFLSKYQDIIIEHQKVVKGNQKRLESLRELAGKENLEYPSVTLPPQPHTKEGVDAYNEVIARVRWWVNLNLWQKLKLSRDDAKPLLRLKGFPSFPLVERQANEVDWWDMVCNVKKLINEKKEDGKVFWQNLAGYKRQEALRPYLSSEEDRKKGKKFARYQLGDLLLHLEKKHGEDWGKVYGEAWERIDKKVEGLSKHIKLEEERRSEDAQSKAALTDWLRAKASFVIEGLKEADKDEFCRCELKLQKWYGDLRGKPFAIEAENSILDISGFSKQYNCAFIWQKDGVKKLNLYLIINYFKGGKLRFKKIKPEAFEANRFYTVINKKSGEIVPMEVNFNFDDPNLIILPLAFGKRQGREFIWNDLLSLETGSLKLANGRVIEKTLYNRRTRQDEPALFVALTFERREVLDSSNIKPMNLIGVDRGENIPAVIALTDPEGCPLSRFKDSLGNPTHILRIGESYKEKQRTIQAKKEVEQRRAGGYSRKYASKAKNLADDMVRNTARDLLYYAVTQDAMLIFENLSRGFGRQGKRTFMAERQYTRMEDWLTAKLAYEGLPSKTYLSKTLAQYTSKTCSNCGFTITSADYDRVLEKLKKTATGWMTTINGKELKVEGQITYYNRYKRQNVVKDLSVELDRLSEESVNNDISSWTKGRSGEALSLLKKRFSHRPVQEKFVCLNCGFETHADEQAALNIARSWLFLRSQEYKKYQTNKTTGNTDKRAFVETWQSFYRKKLKEVWKPAV

SEQ ID NO: 29490 - protein, 978 aa, synthetic construct
  REGION 1..978: note = engineered CasX variant
QEIKRINKIRRRLVKDSNTKKAGKTGPMKTLLVRVMTPDLRERLENLRKKPENIPQPISNTSRANLNKLLTDYTEMKKAILHVYWEEFQKDPVGLMSRVAQPASKKIDQNKLKPEMDEKGNLTTAGFACSQCGQPLFVYKLEQVSEKGKAYTNYFGRCNVAEHEKLILLAQLKPEKDSDEAVTYSLGKFGQRALDFYSIHVTKESTHPVKPLAQIAGNRYASGPVGKALSDACMGTIASFLSKYQDIIIEHQKVVKGNQKRLESLRELAGKENLEYPSVTLPPQPHTKEGVDAYNEVIARVRWWVNLNLWQKLKLSRDDAKPLLRLKGFPSFPLVERQANEVDWWDMVCNVKKLINEKKEDGKVFWQNLAGYKRQEALRPYLSSEEDRKKGKKFARYQLGDLLLHLEKKHGEDWGKVYDEAWERIDKKVEGLSKHIKLEEERRSEDAQSKAALTDWLRAKASFVIEGKKEADKDEFCRCELKLQKWYGDLRGKPFAIEAENSILDISGFSKQYNCAFIWQKDGVKKLNLYLIINYFKGGKLRFKKIKPEAFEANRFYTVINKKSGEIVPMEVNFNFDDPNLIILPLAFGKRQGREFIWNDLLSLETGSLKLANGRVIEKTLYNRRTRQDEPALFVALTFERREVLDSSNIKPMNLIGVDRGENIPAVIALTDPEGCPLSRFKDSLGNPTHILRIGESYKEKQRTIQAKKEVEQRRAGGYSRKYASKAKNLADDMVRNTARDLLYYAVTQDAMLIFENLSRGFGRQGKRTFMAERQYTRMEDWLTAKLAYEGLPSKTYLSKTLAQYTSKTCSNCGFTITSADYDRVLEKLKKTATGWMTTINGKELKVEGQITYYNRYKRQNVVKDLSVELDRLSEESVNNDISSWTKGRSGEALSLLKKRFSHRPVQEKFVCLNCGFETHADEQAALNIARSWLFLRSQEYKKYQTNKTTGNTDKRAFVETWQSFYRKKLKEVWKPAV

SEQ ID NO: 29491 - protein, 978 aa, synthetic construct
  REGION 1..978: note = engineered CasX variant
QEIKRINKIRRRLVKDSNTKKAGKTGPMKTLLVRVMTPDLRERLENLRKKPENIPQPISNTSRANLNKLLTDYTEMKKAILHVYWEEFQKDPVGLMSRVAQPASKKIDQNKLKPEMDEKGNLTTAGFACSQCGQPLFVYKLEQVSEKGKAYTNYFGRCNVAEHEKLILLAQLKPEKDSDEAVTYSLGKFGQRALDFYSIHVTKESTHPVKPLAQIAGNRYASGPVGKALSDACMGTIASFLSKYQDIIIEHQKVVKGNQKRLESLRELAGKENLEYPSVTLPPQPHTKEGVDAYNEVIARVRWWVNLNLWQKLKLSRDDAKPLLRLKGFPSFPLVERQANEVDWWDMVCNVKKLINEKKEDGKVFWQNLAGYKRQEALRPYLSSEEDRKKGKKFARYQLGDLLLHLEKKHGEDWGKVYDEAWERIDKKVEGLSKHIKLEEERRSEDAQSKAALTDWLRAKASFVIEGSKEADKDEFCRCELKLQKWYGDLRGKPFAIEAENSILDISGFSKQYNCAFIWQKDGVKKLNLYLIINYFKGGKLRFKKIKPEAFEANRFYTVINKKSGEIVPMEVNFNFDDPNLIILPLAFGKRQGREFIWNDLLSLETGSLKLANGRVIEKTLYNRRTRQDEPALFVALTFERREVLDSSNIKPMNLIGVDRGENIPAVIALTDPEGCPLSRFKDSLGNPTHILRIGESYKEKQRTIQAKKEVEQRRAGGYSRKYASKAKNLADDMVRNTARDLLYYAVTQDAMLIFENLSRGFGRQGKRTFMAERQYTRMEDWLTAKLAYEGLPSKTYLSKTLAQYTSKTCSNCGFTITSADYDRVLEKLKKTATGWMTTINGKELKVEGQITYYNRYKRQNVVKDLSVELDRLSEESVNNDISSWTKGRSGEALSLLKKRFSHRPVQEKFVCLNCGFETHADEQAALNIARSWLFLRSQEYKKYQTNKTTGNTDKRAFVETWQSFYRKKLKEVWKPAV

SEQ ID NO: 29492 - protein, 979 aa, synthetic construct
  REGION 1..979: note = engineered CasX variant
QEIKRINKIRRRLVKDSNTKKAGKTGPMKTLLVRVMTPDLRERLENLRKKPENIPQPISNTSRANLNKLLTDYTEMKKAILHVYWEEFQKDPVGLMSRVAQPASKKIDQNKLKPEMDEKGNLTTAGFACSQCGQPLFVYKLEQVSEKGKAYTNYFGRCNVAEHEKLILLAQLKPEKDSDEAVTYSLGKFGQRALDFYSIHVTKESTHPVKPLAQIAGNRYASGPVGKALSDACMGTIASFLSKYQDIIIEHQKVVKGNQKRLESLRELAGKENLEYPSVTLPPQPHTKEGVDAYNEVIARVRWWVNLNLWQKLKLSRDDAKPLLRLKGFPSFPLVERQANEVDWWDMVCNVKKLINEKKEDGKVFWQNLAGYKRQEALRPYLSSEEDRKKGKKFARYQLGDLLLHLEKKHGEDWGKVYDEAWERIDKKVEGLSKHIKLEEERRSEDAQSKAALTDWLRAKASFVIEGLKEADDKDEFCRCELKLQKWYGDLRGKPFAIEAENSILDISGFSKQYNCAFIWQKDGVKKLNLYLIINYFKGGKLRFKKIKPEAFEANRFYTVINKKSGEIVPMEVNFNFDDPNLIILPLAFGKRQGREFIWNDLLSLETGSLKLANGRVIEKTLYNRRTRQDEPALFVALTFERREVLDSSNIKPMNLIGVDRGENIPAVIALTDPEGCPLSRFKDSLGNPTHILRIGESYKEKQRTIQAKKEVEQRRAGGYSRKYASKAKNLADDMVRNTARDLLYYAVTQDAMLIFENLSRGFGRQGKRTFMAERQYTRMEDWLTAKLAYEGLPSKTYLSKTLAQYTSKTCSNCGFTITSADYDRVLEKLKKTATGWMTTINGKELKVEGQITYYNRYKRQNVVKDLSVELDRLSEESVNNDISSWTKGRSGEALSLLKKRFSHRPVQEKFVCLNCGFETHADEQAALNIARSWLFLRSQEYKKYQTNKTTGNTDKRAFVETWQSFYRKKLKEVWKPAV

SEQ ID NO: 29493 - protein, 979 aa, synthetic construct
  REGION 1..979: note = engineered CasX variant
QEIKRINKIRRRLVKDSNTKKAGKTGPMKTLLVRVMTPDLRERLENLRKKPENIPQPISNTSRANLNKLLTDYTEMKKAILHVYWEEFQKDPVGLMSRVAQPASKKIDQNKLKPEMDEKGNLTTAGFACSQCGQPLFVYKLEQVSEKGKAYTNYFGRCNVAEHEKLILLAQLKPEKDSDEAVTYSLGKFGQRALDFYSIHVTKESTHPVKPLAQIAGNRYASGPVGKALSDACMGTIASFLSKYQDIIIEHQKVVKGNQKRLESLRELAGKENLEYPSVTLPPQPHTKEGVDAYNEVIARVRWWVNLNLWQKLKLSRDDAKPLLRLKGFPSFPLVERQANEVDWWDMVCNVKKLINEKKEDGKVFWQNLAGYKRQEALRPYLSSEEDRKKGKKFARYQLGDLLLHLEKKHGEDWGKVYDEAWERIDKKVEGLSKHIKLEEERRSEDAQSKAALTDWLRAKASFVIEGLKEADKDEFCRCELKLQKWYGDLRGKPFAIEAENSILDISGFSKQYNCAFIWQKDGVKKLNLYLIINYFKGGKLRFKKIKPEAFEANRFYTVINKKSGEIVPMEVNFNFDDPNLIILPLAFGKRQGREFIWNDLLSLETGSLKLANGRVIEKTLYNRRTRQDEPALFVALTFERREVLDSSNIKPMNLIGVDRGENIPAVIALTDPEGCPLSRFKDSLGNPTHILRIGESYKEKQRTIQAKKEVEQRRAGGYSRKYASKAKNLADDMVRNTARDLLYYAVTQDAMLIFENLSRGFGRQGKRTFMAERQYTRMEDWLTAKLAYEGLPSKTYLSKTLAQYTSKTCSNCGFTITSADYDRVLEKLKKTATGWMTTINGKELKVEGQITYYNRYKRQNVVKDLSVELDRLSEESVNNDISSWTKGRSGNEALSLLKKRFSHRPVQEKFVCLNCGFETHADEQAALNIARSWLFLRSQEYKKYQTNKTTGNTDKRAFVETWQSFYRKKLKEVWKPAV

SEQ ID NO: 29494 - protein, 978 aa, synthetic construct
  REGION 1..978: note = engineered CasX variant
QEIKRINKIRRRLVKDSNTKKAGKTGPMKTLLVRVMTPDLRERLENLRKKPENIPQPISNTSRANLNKLLTDYTEMKKAILHVYWEEFQKDPVGLMSRVAQPASKKIDQNKLKPEMDEKGNLTTAGFACSQCGQPLFVYKLEQVSEKGKAYTNYFGRCNVAEHEKLILLAQLKPEKDSDEAVTYSLGKFGQRALDFYSIHVTKESTHPVKPLAQIAGNRYASGPVGKALSDACMGTIASFLSKYQDIIIEHQKVVKGNQKRLESLRELAGKENLEYPSVTLPPQPHTKEGVDAYNEVIARVRWWVNLNLWQKLKLSRDDAKPLLRLKGFPSFPLVERQANEVDWWDMVCNVKKLINEKKEDGKVFWQNLAGYKRQEALRPYLSSEEDRQKGKKFARYQLGDLLLHLEKKHGEDWGKVYDEAWERIDKKVEGLSKHIKLEEERRSEDAQSKAALTDWLRAKASFVIEGLKEADKDEFCRCELKLQKWYGDLRGKPFAIEAENSILDISGFSKQYNCAFIWQKDGVKKLNLYLIINYFKGGKLRFKKIKPEAFEANRFYTVINKKSGEIVPMEVNFNFDDPNLIILPLAFGKRQGREFIWNDLLSLETGSLKLANGRVIEKTLYNRRTRQDEPALFVALTFERREVLDSSNIKPMNLIGVDRGENIPAVIALTDPEGCPLSRFKDSLGNPTHILRIGESYKEKQRTIQAKKEVEQRRAGGYSRKYASKAKNLADDMVRNTARDLLYYAVTQDAMLIFENLSRGFGRQGKRTFMAERQYTRMEDWLTAKLAYEGLPSKTYLSKTLAQYTSKTCSNCGFTITSADYDRVLEKLKKTATGWMTTINGKELKVEGQITYYNRYKRQNVVKDLSVELDRLSEESVNNDISSWTKGRSGEALSLLKKRFSHRPVQEKFVCLNCGFETHADEQAALNIARSWLFLRSQEYKKYQTNKTTGNTDKRAFVETWQSFYRKKLKEVWKPAV

SEQ ID NO: 29495 - protein, 978 aa, synthetic construct
  REGION 1..978: note = engineered CasX variant
QEIKRINKIRRRLVKDSNTKKAGKTGPMKTLLVRVMTPDLRERLENLRKKPENIPQPISNTSRANLNKLLTDYTEMKKAILHVYWEEFQKDPVGLMSRVAQPASKKIDQNKLKPEMDEKGNLTTAGFACSQCGQPLFVYKLEQVSEKGKAYTNYFGRCNVAEHEKLILLAQLKPEKDSDEAVTYSLGKFGQRALDFYSIHVTKESTHPVKPLAQIAGNRYASGPVGKALSDACMGTIASFLSKYQDIIIEHQKVVKGNQKRLESLRELAGKENLEYPSVTLPPQPHTKEGVDAYNEVIARVRWWVNLNLWQKLKLSRDDAKPLLRLKGFPSFPLVERQANEVDWWDMVCNVKKLINEKKEDGKVFWQNLAGYKRQEALRPYLSSEEDRKKGKKFARYQLGDLLLHLEKKHGEDWGKVYDEAWERIDKKVEGLSKHIKLEEERRSEDAQSKAALTDWLRAKASFVIEGLKEADKDEFCRCELKLQKWYGDLRGKPFAIEAENSILDISGFSKQYNCAFIWQKDGVKKLNLYLIINYFKGGKLRFKKIKPEAFEANRFYTVINKKSGEIVPMEVNFNFDDPNLIILPLAFGKRQGREFIWNDLLSLETGSLKLANGRVIEKTLYNRRTRQDEPALFVALTFERREVLDSSNIKPMNLIGVDRGENIPAVIALTDPEGCPLSRFKDSLGNPTHILRIGESYKEKQRTIQAKKEVEQRRAGGYSRKYASKAKNLADDMVRNTARDLLYYAVTQDAMLIFENLSRGFGRQGKRTFMAERQYTRMEDWLTAKLAYEGLPSQTYLSKTLAQYTSKTCSNCGFTITSADYDRVLEKLKKTATGWMTTINGKELKVEGQITYYNRYKRQNVVKDLSVELDRLSEESVNNDISSWTKGRSGEALSLLKKRFSHRPVQEKFVCLNCGFETHADEQAALNIARSWLFLRSQEYKKYQTNKTTGNTDKRAFVETWQSFYRKKLKEVWKPAV

SEQ ID NO: 29496 - protein, 978 aa, synthetic construct
  REGION 1..978: note = engineered CasX variant
QEIKRINKIRRRLVKDSNTKKAGKTGPMKTLLVRVMTPDLRERLENLRKKPENIPQPISNTSRANLNKLLTDYTEMKKAILHVYWEEFQKDPVGLMSRVAQPASKKIDQNKLKPEMDEKGNLTTAGFACSQCGQPLFVYKLEQVSEKGKAYTNYFGRCNVAEHEKLILLAQLKPEKDSDEAVTYSLGKFGQRALDFYSIHVTKESTHPVKPLAQIAGNRYASGPVGKALSDACMGTIASFLSKYQDIIIEHQKVVKGNQKRLESLRELAGKENLEYPSVTLPPQPHTKEGVDAYNEVIARVRWWVNLNLWQKLKLSRDDAKPLLRLKGFPSFPLVERQANEVDWWDMVCNVKKLINEKKEDGKVFWQNLAGYKRQEALRPYLSSEEDRKKGKKFARYQLGDLLLHLEKKHGEDWGKVYDEAWERIDKKVEGLSKHIKLEEERRSEDAQSKAALTDWLRAKASFVIEGLKEADKDEFCRCELKLQKWYGDLRGKPFAIEAENSILDISGFSKQYNCAFIWQKDGVKKLNLYLIINYFKGGKLRFKKIKPEAFEANRFYTVINKKSGEIVPMEVNFNFDDPNLIILPLAFGKRQGREFIWNDLLSLETGSLKLANGRVIEKTLYNRRTRQDEPALFVALTFERREVLDSSNIKPMNLIGVDRGENIPAVIALTDPEGCPLSRFKDSLGNPTHILRIGESYKEKQRTIQAKKEVEQRRAGGYSRKYASKAKNLADDMVRNTARDLLYYAVTQDAMLIFENLSRGFGRQGKRTFMAERQYTRMEDWLTAKLAYNGLPSKTYLSKTLAQYTSKTCSNCGFTITSADYDRVLEKLKKTATGWMTTINGKELKVEGQITYYNRYKRQNVVKDLSVELDRLSEESVNNDISSWTKGRSGEALSLLKKRFSHRPVQEKFVCLNCGFETHADEQAALNIARSWLFLRSQEYKKYQTNKTTGNTDKRAFVETWQSFYRKKLKEVWKPAV

SEQ ID NO: 29497 - protein, 978 aa, synthetic construct
  REGION 1..978: note = engineered CasX variant
QEIKRINKIRRRLVKDSNTKKAGKTGPMKTLLVRVMTPDLRERLENLRKKPENIPQPISNTSRANLNKLLTDYTEMKKAILHVYWEEFQKDPVGLMSRVAQPASKKIDQNKLKPEMDEKGNLTTAGFACSQCGQPLFVYKLEQVSEKGKAYTNYFGRCNVAEHEKLIQLAQLKPEKDSDEAVTYSLGKFGQRALDFYSIHVTKESTHPVKPLAQIAGNRYASGPVGKALSDACMGTIASFLSKYQDIIIEHQKVVKGNQKRLESLRELAGKENLEYPSVTLPPQPHTKEGVDAYNEVIARVRWWVNLNLWQKLKLSRDDAKPLLRLKGFPSFPLVERQANEVDWWDMVCNVKKLINEKKEDGKVFWQNLAGYKRQEALRPYLSSEEDRKKGKKFARYQLGDLLLHLEKKHGEDWGKVYDEAWERIDKKVEGLSKHIKLEEERRSEDAQSKAALTDWLRAKASFVIEGLKEADKDEFCRCELKLQKWYGDLRGKPFAIEAENSILDISGFSKQYNCAFIWQKDGVKKLNLYLIINYFKGGKLRFKKIKPEAFEANRFYTVINKKSGEIVPMEVNFNFDDPNLIILPLAFGKRQGREFIWNDLLSLETGSLKLANGRVIEKTLYNRRTRQDEPALFVALTFERREVLDSSNIKPMNLIGVDRGENIPAVIALTDPEGCPLSRFKDSLGNPTHILRIGESYKEKQRTIQAKKEVEQRRAGGYSRKYASKAKNLADDMVRNTARDLLYYAVTQDAMLIFENLSRGFGRQGKRTFMAERQYTRMEDWLTAKLAYEGLPSKTYLSKTLAQYTSKTCSNCGFTITSADYDRVLEKLKKTATGWMTTINGKELKVEGQITYYNRYKRQNVVKDLSVELDRLSEESVNNDISSWTKGRSGEALSLLKKRFSHRPVQEKFVCLNCGFETHADEQAALNIARSWLFLRSQEYKKYQTNKTTGNTDKRAFVETWQSFYRKKLKEVWKPAV

SEQ ID NO: 29498 - protein, 978 aa, synthetic construct
  REGION 1..978: note = engineered CasX variant
QEIKRINKIRRRLVKDSNTKKAGKTGPMKTLLVRVMTPDLRERLENLRKKPENIPQPISNTSRANLNKLLTDYTEMKKAILHVYWEEFQKDPVGLMSRVAQPASKKIDQNKLKPEMDEKGNLTTAGFACSQCGQPLFVYKLEQVSEKGKAYTNYFGRCNVAEHEKLILLAQLKPEKDSDEAVTYSLGKFGQRALDFYSIHVTKESTHPVKPLAQIAGNRYASGPVGKALSDACMGTIASFLSKYQDIIIEHQKVVKGNQKRLESLRELAGKENLEYPSVTLPPQPHTKEGVDAYNEVIARVRWWVNLNLWQKLKLSRDDAKPLLRLKGFPSFPLVERQANEVDWWDMVCNVKKLINEKKEDGKVFWQNLAIYKRQEALRPYLSSEEDRKKGKKFARYQLGDLLLHLEKKHGEDWGKVYDEAWERIDKKVEGLSKHIKLEEERRSEDAQSKAALTDWLRAKASFVIEGLKEADKDEFCRCELKLQKWYGDLRGKPFAIEAENSILDISGFSKQYNCAFIWQKDGVKKLNLYLIINYFKGGKLRFKKIKPEAFEANRFYTVINKKSGEIVPMEVNFNFDDPNLIILPLAFGKRQGREFIWNDLLSLETGSLKLANGRVIEKTLYNRRTRQDEPALFVALTFERREVLDSSNIKPMNLIGVDRGENIPAVIALTDPEGCPLSRFKDSLGNPTHILRIGESYKEKQRTIQAKKEVEQRRAGGYSRKYASKAKNLADDMVRNTARDLLYYAVTQDAMLIFENLSRGFGRQGKRTFMAERQYTRMEDWLTAKLAYEGLPSKTYLSKTLAQYTSKTCSNCGFTITSADYDRVLEKLKKTATGWMTTINGKELKVEGQITYYNRYKRQNVVKDLSVELDRLSEESVNNDISSWTKGRSGEALSLLKKRFSHRPVQEKFVCLNCGFETHADEQAALNIARSWLFLRSQEYKKYQTNKTTGNTDKRAFVETWQSFYRKKLKEVWKPAV

SEQ ID NO: 29499 - protein, 978 aa, synthetic construct
  REGION 1..978: note = engineered CasX variant
QEIKRINKIRRRLVKDSNTKKAGKTGPMKTLLVRVMTPDLRERLENLRKKPENIPQPISNTSRANLNKLLTDYTEMKKAILHVYWEEFQKDPVGLMSRVAQPASKKIDQNKLKPEMDEKGNLTTAGFACSQCGQPLFVYKLEQVSEKGKAYTNYFGRCNVAEHEKLILLAQLKPEKDSDEAVTYSLGKFGQRALDFYSIHVTKESTHPVKPLAQIAGNRYASGPVGKALSDACMGTIASFLSKYQDIIIEHQKVVKGNQKRLESLRELAGKENLEYPSVTLPPQPHTKEGVDAYNEVIARVRWWVNLNLWQKLKLSRDDAKPLLRLKGFPSFPLVERQANEVDWWDMVCNVKKLINEKKEDGKVFWQNLAGYKRQEALRPYLSSEEDREKGKKFARYQLGDLLLHLEKKHGEDWGKVYDEAWERIDKKVEGLSKHIKLEEERRSEDAQSKAALTDWLRAKASFVIEGLKEADKDEFCRCELKLQKWYGDLRGKPFAIEAENSILDISGFSKQYNCAFIWQKDGVKKLNLYLIINYFKGGKLRFKKIKPEAFEANRFYTVINKKSGEIVPMEVNFNFDDPNLIILPLAFGKRQGREFIWNDLLSLETGSLKLANGRVIEKTLYNRRTRQDEPALFVALTFERREVLDSSNIKPMNLIGVDRGENIPAVIALTDPEGCPLSRFKDSLGNPTHILRIGESYKEKQRTIQAKKEVEQRRAGGYSRKYASKAKNLADDMVRNTARDLLYYAVTQDAMLIFENLSRGFGRQGKRTFMAERQYTRMEDWLTAKLAYEGLPSKTYLSKTLAQYTSKTCSNCGFTITSADYDRVLEKLKKTATGWMTTINGKELKVEGQITYYNRYKRQNVVKDLSVELDRLSEESVNNDISSWTKGRSGEALSLLKKRFSHRPVQEKFVCLNCGFETHADEQAALNIARSWLFLRSQEYKKYQTNKTTGNTDKRAFVETWQSFYRKKLKEVWKPAV

SEQ ID NO: 29500 - protein, 978 aa, synthetic construct
  REGION 1..978: note = engineered CasX variant
QEIKRINKIRRRLVKDSNTKKAGKTGPMKTLLVRVMTPDLRERLENLRKKPENIPQPISNTSRANLNKLLTDYTEMKKAILHVYWEEFQKDPVGLMSRVAQPASKKIDQNKLKPEMDEKGNLTTAGFACSQCGQPLFVYKLEQVSEKGKAYTNYFGRCNVAEHEKLILLAQLKPEKDSDEAVTYSLGKFGQRALDFYSIHVTKESTHPVKPLAQIAGNRYASGPVGKALSDACMGTIASFLSKYQDIIIEHQKVVKGNQKRLESLRELAGKENLEYPSVTLPPQPHTKEGVDAYNEVIARVRWWVNLNLWQKLKLSRDDAKPLLRLKGFPSFPLVERQANEVDWWDMVCNVKKLINEKKEDGKVFWQNLAGYKRQEALRPYLSSEEDRKKGKKFARYQLGDLLLHLEKKHGEDWGKVYDEAWERIDKKVEGLSKHIKLEEERRSEDAQSKAALTDWLRAKASFVIEGLKEADKDEFCRCELKLQKWYGDLRGKPFAIEAENSILDISGFSKQYNCAFIWQKDGVKKLNLYLIINYFKGGKLRFKKIKPEAFEANRFYTVINKKSGEIVIMEVNFNFDDPNLIILPLAFGKRQGREFIWNDLLSLETGSLKLANGRVIEKTLYNRRTRQDEPALFVALTFERREVLDSSNIKPMNLIGVDRGENIPAVIALTDPEGCPLSRFKDSLGNPTHILRIGESYKEKQRTIQAKKEVEQRRAGGYSRKYASKAKNLADDMVRNTARDLLYYAVTQDAMLIFENLSRGFGRQGKRTFMAERQYTRMEDWLTAKLAYEGLPSKTYLSKTLAQYTSKTCSNCGFTITSADYDRVLEKLKKTATGWMTTINGKELKVEGQITYYNRYKRQNVVKDLSVELDRLSEESVNNDISSWTKGRSGEALSLLKKRFSHRPVQEKFVCLNCGFETHADEQAALNIARSWLFLRSQEYKKYQTNKTTGNTDKRAFVETWQSFYRKKLKEVWKPAV

SEQ ID NO: 29501 - protein, 979 aa, synthetic construct
  REGION 1..979: note = engineered CasX variant
QEIKRINKIRRRLVKDSNTKKAGKTGPMKTLLVRVMTPDLRERLENLRKKPENIPQPISNTSRANLNKLLTDYTEMKKAILHVYWEEFQKDPVGLMSRVAQPASKKIDQNKLKPEMDEKGNLTTAGFACSQCGQPLFVYKLEQVSEKGKAYTNYFGRCNVAEHEKLILLAQLKPEKDSDEAVTYSLGKFGQRALDFYSIHVTKESTHPVKPLAQIAGNRYASGPVGKALSGACMGTIASFLSKYQDIIIEHQKVVKGNQKRLESLRELAGKENLEYPSVTLPPQPHTKEGVDAYNEVIARVRMWVNLNLWQKLKLSRDDAKPLLRLKGFPSFPLVERQQANEVDWWDMVCNVKKLINEKKEDGKVFWQNLAGYKRQEALRPYLSSEEDRKKGKKFARYQLGDLLLHLEKKHGEDWGKVYDEAWERIDKKVEGLSKHIKLEEERRSEDAQSKAALTDWLRAKASFVIEGLKEADKDEFCRCELKLQKWYGDLRGKPFAIEAENSILDISGFSKQYNCAFIWQKDGVKKLNLYLIINYFKGGKLRFKKIKPEAFEANRFYTVINKKSGEIVPMEVNFNFDDPNLIILPLAFGKRQGREFIWNDLLSLETGSLKLANGRVIEKTLYNRRTRQDEPALFVALTFERREVLDSSNIKPMNLIGVDRGENIPAVIALTDPEGCPLSRFKDSLGNPTHILRIGESYKEKQRTIQAKKEVEQRRAGGYSRKYASKAKNLADDMVRNTARDLLYYAVTQDAMLIFENLSRGFGRQGKRTFMAERQYTRMEDWLTAKLAYEGLPSKTYLSKTLAQYTSKTCSNCGFTITSADYDRVLEKLKKTATGWMTTINGKELKVEGQITYYNRYKRQNVVKDLSVELDRLSEESVNNDISSWTKGRSGEALSLLKKRFSHRPVQEKFVCLNCGFETHADEQAALNIARSWLFLRSQEYKKYQTNKTTGNTDKRAFVETWQSFYRKKLKEVWKPAV

SEQ ID NO: 29502 - protein, 979 aa, synthetic construct
  REGION 1..979: note = engineered CasX variant
QEIKRINKIRRRLVKDSNTKKAGKTGPMKTLLVRVMTPDLRERLENLRKKPENIPQPISNTSRANLNKLLTDYTEMKKAILHVYWEEFQKDPVGLMSRVAQPASKKIDQNKLKPEMDEKGNLTTAGFACSQCGQPLFVYKLEQVSEKGKAYTNYFGRCNVAEHEKLILLAQLKPEKDSDEAVTYSLGKFGQRALDFYSIHVTKESTHPVKPLAQIAGNRYASGPVGKALSDACMGTIASFLSKYQDIIIEHQKVVKGNQKRLESLRELAGKENLEYPSVTLPPQPHTKEGVDAYNEVIARVRMWVNLNLWQKLKLSRDDAKPLLRLKNFPSFPLVERQQANEVDWWDMVCNVKKLINEKKEDGKVFWQNLAGYKRQEALRPYLSSEEDRKKGKKFARYQLGDLLLHLEKKHGEDWGKVYDEAWERIDKKVEGLSKHIKLEEERRSEDAQSKAALTDWLRAKASFVIEGLKEADKDEFCRCELKLQKWYGDLRGKPFAIEAENSILDISGFSKQYNCAFIWQKDGVKKLNLYLIINYFKGGKLRFKKIKPEAFEANRFYTVINKKSGEIVPMEVNFNFDDPNLIILPLAFGKRQGREFIWNDLLSLETGSLKLANGRVIEKTLYNRRTRQDEPALFVALTFERREVLDSSNIKPMNLIGVDRGENIPAVIALTDPEGCPLSRFKDSLGNPTHILRIGESYKEKQRTIQAKKEVEQRRAGGYSRKYASKAKNLADDMVRNTARDLLYYAVTQDAMLIFENLSRGFGRQGKRTFMAERQYTRMEDWLTAKLAYEGLPSKTYLSKTLAQYTSKTCSNCGFTITSADYDRVLEKLKKTATGWMTTINGKELKVEGQITYYNRYKRQNVVKDLSVELDRLSEESVNNDISSWTKGRSGEALSLLKKRFSHRPVQEKFVCLNCGFETHADEQAALNIARSWLFLRSQEYKKYQTNKTTGNTDKRAFVETWQSFYRKKLKEVWKPAV

SEQ ID NO: 29503 - protein, 979 aa, synthetic construct
  REGION 1..979: note = engineered CasX variant
QEIKRINKIRRRLVKDSNTKKAGKTGPMKTLLVRVMTPDLRERLENLRKKPENIPQPISNTSRANLNKLLTDYTEMKKAILHVYWEEFQKDPVGLMSRVAQPASKKIDQNKLKPEMDEKGNLTTAGFACSQCGQPLFVYKLEQVSEKGKAYTNYFGRCNVAEHEKLILLAQLKPEKDSDEAVTYSLGKFGQRALDFYSIHVTKESTHPVKPLAQIAGNRYASGPVGKALSDACMGTIASFLSKYQDIIIEHQKVVKGNQKRLESLRELAGKENLEYPSVTLPPQPHTKEGVDAYNEVIARVRMWVNLNLWQKLKLSRDDAKPLLRLKGFPSFPLVERQQANEVDWWDMVCNVKKLINEKKEDGKVFWQNLAGYKRQEALRPYLSSEEDRKKGKKFARYQLGDLLNHLEKKHGEDWGKVYDEAWERIDKKVEGLSKHIKLEEERRSEDAQSKAALTDWLRAKASFVIEGLKEADKDEFCRCELKLQKWYGDLRGKPFAIEAENSILDISGFSKQYNCAFIWQKDGVKKLNLYLIINYFKGGKLRFKKIKPEAFEANRFYTVINKKSGEIVPMEVNFNFDDPNLIILPLAFGKRQGREFIWNDLLSLETGSLKLANGRVIEKTLYNRRTRQDEPALFVALTFERREVLDSSNIKPMNLIGVDRGENIPAVIALTDPEGCPLSRFKDSLGNPTHILRIGESYKEKQRTIQAKKEVEQRRAGGYSRKYASKAKNLADDMVRNTARDLLYYAVTQDAMLIFENLSRGFGRQGKRTFMAERQYTRMEDWLTAKLAYEGLPSKTYLSKTLAQYTSKTCSNCGFTITSADYDRVLEKLKKTATGWMTTINGKELKVEGQITYYNRYKRQNVVKDLSVELDRLSEESVNNDISSWTKGRSGEALSLLKKRFSHRPVQEKFVCLNCGFETHADEQAALNIARSWLFLRSQEYKKYQTNKTTGNTDKRAFVETWQSFYRKKLKEVWKPAV

SEQ ID NO: 29504 - protein, 979 aa, synthetic construct
  REGION 1..979: note = engineered CasX variant
QEIKRINKIRRRLVKDSNTKKAGKTGPMKTLLVRVMTPDLRERLENLRKKPENIPQPISNTSRANLNKLLTDYTEMKKAILHVYWEEFQKDPVGLMSRVAQPASKKIDQNKLKPEMDEKGNLTTAGFACSQCGQPLFVYKLEQVSEKGKAYTNYFGRCNVAEHEKLILLAQLKPEKDSDEAVTYSLGKFGQRALDFYSIHVTKESTHPVKPLAQIAGNRYASGPVGKALSDACMGTIASFLSKYQDIIIEHQKVVKGNQKRLESLRELAGKENLEYPSVTLPPQPHTKEGVDAYNEVIARVRMWVNLNLWQKLKLSRDDAKPLLRLKGFPSFPLVERQQANEVDWWDMVCNVKKLINEKKEDGKVFWQNLAGYKRQEALRPYLSSEEDRKKGKKFARYQLGDLLWHLEKKHGEDWGKVYDEAWERIDKKVEGLSKHIKLEEERRSEDAQSKAALTDWLRAKASFVIEGLKEADKDEFCRCELKLQKWYGDLRGKPFAIEAENSILDISGFSKQYNCAFIWQKDGVKKLNLYLIINYFKGGKLRFKKIKPEAFEANRFYTVINKKSGEIVPMEVNFNFDDPNLIILPLAFGKRQGREFIWNDLLSLETGSLKLANGRVIEKTLYNRRTRQDEPALFVALTFERREVLDSSNIKPMNLIGVDRGENIPAVIALTDPEGCPLSRFKDSLGNPTHILRIGESYKEKQRTIQAKKEVEQRRAGGYSRKYASKAKNLADDMVRNTARDLLYYAVTQDAMLIFENLSRGFGRQGKRTFMAERQYTRMEDWLTAKLAYEGLPSKTYLSKTLAQYTSKTCSNCGFTITSADYDRVLEKLKKTATGWMTTINGKELKVEGQITYYNRYKRQNVVKDLSVELDRLSEESVNNDISSWTKGRSGEALSLLKKRFSHRPVQEKFVCLNCGFETHADEQAALNIARSWLFLRSQEYKKYQTNKTTGNTDKRAFVETWQSFYRKKLKEVWKPAV

SEQ ID NO: 29505 - protein, 979 aa, synthetic construct
  REGION 1..979: note = engineered CasX variant
QEIKRINKIRRRLVKDSNTKKAGKTGPMKTLLVRVMTPDLRERLENLRKKPENIPQPISNTSRANLNKLLTDYTEMKKAILHVYWEEFQKDPVGLMSRVAQPASKKIDQNKLKPEMDEKGNLTTAGFACSQCGQPLFVYKLEQVSEKGKAYTNYFGRCNVAEHEKLILLAQLKPEKDSDEAVTYSLGKFGQRALDFYSIHVTKESTHPVKPLAQIAGNRYASGPVGKALSDACMGTIASFLSKYQDIIIEHQKVVKGNQKRLESLRELAGKENLEYPSVTLPPQPHTKEGVDAYNEVIARVRMWVNLNLWQKLKLSRDDAKPLLRLKGFPSFPLVERQQANEVDWWDMVCNVKKLINEKKEDGKVFWQNLAGYKRQEALRPYLSSEEDRKKGKKFARYQLGDLLLHLYKKHGEDWGKVYDEAWERIDKKVEGLSKHIKLEEERRSEDAQSKAALTDWLRAKASFVIEGLKEADKDEFCRCELKLQKWYGDLRGKPFAIEAENSILDISGFSKQYNCAFIWQKDGVKKLNLYLIINYFKGGKLRFKKIKPEAFEANRFYTVINKKSGEIVPMEVNFNFDDPNLIILPLAFGKRQGREFIWNDLLSLETGSLKLANGRVIEKTLYNRRTRQDEPALFVALTFERREVLDSSNIKPMNLIGVDRGENIPAVIALTDPEGCPLSRFKDSLGNPTHILRIGESYKEKQRTIQAKKEVEQRRAGGYSRKYASKAKNLADDMVRNTARDLLYYAVTQDAMLIFENLSRGFGRQGKRTFMAERQYTRMEDWLTAKLAYEGLPSKTYLSKTLAQYTSKTCSNCGFTITSADYDRVLEKLKKTATGWMTTINGKELKVEGQITYYNRYKRQNVVKDLSVELDRLSEESVNNDISSWTKGRSGEALSLLKKRFSHRPVQEKFVCLNCGFETHADEQAALNIARSWLFLRSQEYKKYQTNKTTGNTDKRAFVETWQSFYRKKLKEVWKPAV

SEQ ID NO: 29506 - protein, 979 aa, synthetic construct
  REGION 1..979: note = engineered CasX variant
QEIKRINKIRRRLVKDSNTKKAGKTGPMKTLLVRVMTPDLRERLENLRKKPENIPQPISNTSRANLNKLLTDYTEMKKAILHVYWEEFQKDPVGLMSRVAQPASKKIDQNKLKPEMDEKGNLTTAGFACSQCGQPLFVYKLEQVSEKGKAYTNYFGRCNVAEHEKLILLAQLKPEKDSDEAVTYSLGKFGQRALDFYSIHVTKESTHPVKPLAQIAGNRYASGPVGKALSDACMGTIASFLSKYQDIIIEHQKVVKGNQKRLESLRELAGKENLEYPSVTLPPQPHTKEGVDAYNEVIARVRMWVNLNLWQKLKLSRDDAKPLLRLKGFPSFPLVERQQANEVDWWDMVCNVKKLINEKKEDGKVFWQNLAGYKRQEALRPYLSSEEDRKKGKKFARYQLGDLLLHLEKKHPEDWGKVYDEAWERIDKKVEGLSKHIKLEEERRSEDAQSKAALTDWLRAKASFVIEGLKEADKDEFCRCELKLQKWYGDLRGKPFAIEAENSILDISGFSKQYNCAFIWQKDGVKKLNLYLIINYFKGGKLRFKKIKPEAFEANRFYTVINKKSGEIVPMEVNFNFDDPNLIILPLAFGKRQGREFIWNDLLSLETGSLKLANGRVIEKTLYNRRTRQDEPALFVALTFERREVLDSSNIKPMNLIGVDRGENIPAVIALTDPEGCPLSRFKDSLGNPTHILRIGESYKEKQRTIQAKKEVEQRRAGGYSRKYASKAKNLADDMVRNTARDLLYYAVTQDAMLIFENLSRGFGRQGKRTFMAERQYTRMEDWLTAKLAYEGLPSKTYLSKTLAQYTSKTCSNCGFTITSADYDRVLEKLKKTATGWMTTINGKELKVEGQITYYNRYKRQNVVKDLSVELDRLSEESVNNDISSWTKGRSGEALSLLKKRFSHRPVQEKFVCLNCGFETHADEQAALNIARSWLFLRSQEYKKYQTNKTTGNTDKRAFVETWQSFYRKKLKEVWKPAV

SEQ ID NO: 29507 - protein, 980 aa, synthetic construct
  REGION 1..980: note = engineered CasX variant
QEIKRINKIRRRLVKDSNTKKAGKTGPMKTLLVRVMTPDLRERLENLRKKPENIPQPISNTSRANLNKLLTDYTEMKKAILHVYWEEFQKDPVGLMSRVAQPASKKIDQNKLKPEMDEKGNLTTAGFACSQCGQPLFVYKLEQVSEKGKAYTNYFGRCNVAEHEKLILLAQLKPEKDSDEAVTYSLGKFGQRALDFYSIHVTKESTHPVKPLAQIAGNRYASGPVGKALSDACMGTIASFLSKYQDIIIEHQKVVKGNQKRLESLRELAGKENLEYPSVTLPPQPHTKEGVDAYNEVIARVRMWVNLNLWQKLKLSRDDAKPLLRLKGFPSFPLVERQQANEVDWWDMVCNVKKLINEKKEDGKVFWQNLAGYKRQEALRPYLSSEEDRKKGKKFARYQLGDLLLHLEKKHGERDWGKVYDEAWERIDKKVEGLSKHIKLEEERRSEDAQSKAALTDWLRAKASFVIEGLKEADKDEFCRCELKLQKWYGDLRGKPFAIEAENSILDISGFSKQYNCAFIWQKDGVKKLNLYLIINYFKGGKLRFKKIKPEAFEANRFYTVINKKSGEIVPMEVNFNFDDPNLIILPLAFGKRQGREFIWNDLLSLETGSLKLANGRVIEKTLYNRRTRQDEPALFVALTFERREVLDSSNIKPMNLIGVDRGENIPAVIALTDPEGCPLSRFKDSLGNPTHILRIGESYKEKQRTIQAKKEVEQRRAGGYSRKYASKAKNLADDMVRNTARDLLYYAVTQDAMLIFENLSRGFGRQGKRTFMAERQYTRMEDWLTAKLAYEGLPSKTYLSKTLAQYTSKTCSNCGFTITSADYDRVLEKLKKTATGWMTTINGKELKVEGQITYYNRYKRQNVVKDLSVELDRLSEESVNNDISSWTKGRSGEALSLLKKRFSHRPVQEKFVCLNCGFETHADEQAALNIARSWLFLRSQEYKKYQTNKTTGNTDKRAFVETWQSFYRKKLKEVWKPAV

SEQ ID NO: 29508 - protein, 980 aa, synthetic construct
  REGION 1..980: note = engineered CasX variant
QEIKRINKIRRRLVKDSNTKKAGKTGPMKTLLVRVMTPDLRERLENLRKKPENIPQPISNTSRANLNKLLTDYTEMKKAILHVYWEEFQKDPVGLMSRVAQPASKKIDQNKLKPEMDEKGNLTTAGFACSQCGQPLFVYKLEQVSEKGKAYTNYFGRCNVAEHEKLILLAQLKPEKDSDEAVTYSLGKFGQRALDFYSIHVTKESTHPVKPLAQIAGNRYASGPVGKALSDACMGTIASFLSKYQDIIIEHQKVVKGNQKRLESLRELAGKENLEYPSVTLPPQPHTKEGVDAYNEVIARVRMWVNLNLWQKLKLSRDDAKPLLRLKGFPSFPLVERQQANEVDWWDMVCNVKKLINEKKEDGKVFWQNLAGYKRQEALRPYLSSEEDRKKGKKFARYQLGDLLLHLEKKHGEYDWGKVYDEAWERIDKKVEGLSKHIKLEEERRSEDAQSKAALTDWLRAKASFVIEGLKEADKDEFCRCELKLQKWYGDLRGKPFAIEAENSILDISGFSKQYNCAFIWQKDGVKKLNLYLIINYFKGGKLRFKKIKPEAFEANRFYTVINKKSGEIVPMEVNFNFDDPNLIILPLAFGKRQGREFIWNDLLSLETGSLKLANGRVIEKTLYNRRTRQDEPALFVALTFERREVLDSSNIKPMNLIGVDRGENIPAVIALTDPEGCPLSRFKDSLGNPTHILRIGESYKEKQRTIQAKKEVEQRRAGGYSRKYASKAKNLADDMVRNTARDLLYYAVTQDAMLIFENLSRGFGRQGKRTFMAERQYTRMEDWLTAKLAYEGLPSKTYLSKTLAQYTSKTCSNCGFTITSADYDRVLEKLKKTATGWMTTINGKELKVEGQITYYNRYKRQNVVKDLSVELDRLSEESVNNDISSWTKGRSGEALSLLKKRFSHRPVQEKFVCLNCGFETHADEQAALNIARSWLFLRSQEYKKYQTNKTTGNTDKRAFVETWQSFYRKKLKEVWKPAV

SEQ ID NO: 29509 - protein, 979 aa, synthetic construct
  REGION 1..979: note = engineered CasX variant
QEIKRINKIRRRLVKDSNTKKAGKTGPMKTLLVRVMTPDLRERLENLRKKPENIPQPISNTSRANLNKLLTDYTEMKKAILHVYWEEFQKDPVGLMSRVAQPASKKIDQNKLKPEMDEKGNLTTAGFACSQCGQPLFVYKLEQVSEKGKAYTNYFGRCNVAEHEKLILLAQLKPEKDSDEAVTYSLGKFGQRALDFYSIHVTKESTHPVKPLAQIAGNRYASGPVGKALSDACMGTIASFLSKYQDIIIEHQKVVKGNQKRLESLRELAGKENLEYPSVTLPPQPHTKEGVDAYNEVIARVRMWVNLNLWQKLKLSRDDAKPLLRLKGFPSFPLVERQQANEVDWWDMVCNVKKLINEKKEDGKVFWQNLAGYKRQEALRPYLSSEEDRKKGKKFARYQLGDLLLHLEKKHGEDWGDVYDEAWERIDKKVEGLSKHIKLEEERRSEDAQSKAALTDWLRAKASFVIEGLKEADKDEFCRCELKLQKWYGDLRGKPFAIEAENSILDISGFSKQYNCAFIWQKDGVKKLNLYLIINYFKGGKLRFKKIKPEAFEANRFYTVINKKSGEIVPMEVNFNFDDPNLIILPLAFGKRQGREFIWNDLLSLETGSLKLANGRVIEKTLYNRRTRQDEPALFVALTFERREVLDSSNIKPMNLIGVDRGENIPAVIALTDPEGCPLSRFKDSLGNPTHILRIGESYKEKQRTIQAKKEVEQRRAGGYSRKYASKAKNLADDMVRNTARDLLYYAVTQDAMLIFENLSRGFGRQGKRTFMAERQYTRMEDWLTAKLAYEGLPSKTYLSKTLAQYTSKTCSNCGFTITSADYDRVLEKLKKTATGWMTTINGKELKVEGQITYYNRYKRQNVVKDLSVELDRLSEESVNNDISSWTKGRSGEALSLLKKRFSHRPVQEKFVCLNCGFETHADEQAALNIARSWLFLRSQEYKKYQTNKTTGNTDKRAFVETWQSFYRKKLKEVWKPAV

SEQ ID NO: 29510 - protein, 979 aa, synthetic construct
  REGION 1..979: note = engineered CasX variant
QEIKRINKIRRRLVKDSNTKKAGKTGPMKTLLVRVMTPDLRERLENLRKKPENIPQPISNTSRANLNKLLTDYTEMKKAILHVYWEEFQKDPVGLMSRVAQPASKKIDQNKLKPEMDEKGNLTTAGFACSQCGQPLFVYKLEQVSEKGKAYTNYFGRCNVAEHEKLILLAQLKPEKDSDEAVTYSLGKFGQRALDFYSIHVTKESTHPVKPLAQIAGNRYASGPVGKALSDACMGTIASFLSKYQDIIIEHQKVVKGNQKRLESLRELAGKENLEYPSVTLPPQPHTKEGVDAYNEVIARVRMWVNLNLWQKLKLSRDDAKPLLRLKGFPSFPLVERQQANEVDWWDMVCNVKKLINEKKEDGKVFWQNLAGYKRQEALRPYLSSEEDRKKGKKFARYQLGDLLLHLEKKHGEDWGKVYGEAWERIDKKVEGLSKHIKLEEERRSEDAQSKAALTDWLRAKASFVIEGLKEADKDEFCRCELKLQKWYGDLRGKPFAIEAENSILDISGFSKQYNCAFIWQKDGVKKLNLYLIINYFKGGKLRFKKIKPEAFEANRFYTVINKKSGEIVPMEVNFNFDDPNLIILPLAFGKRQGREFIWNDLLSLETGSLKLANGRVIEKTLYNRRTRQDEPALFVALTFERREVLDSSNIKPMNLIGVDRGENIPAVIALTDPEGCPLSRFKDSLGNPTHILRIGESYKEKQRTIQAKKEVEQRRAGGYSRKYASKAKNLADDMVRNTARDLLYYAVTQDAMLIFENLSRGFGRQGKRTFMAERQYTRMEDWLTAKLAYEGLPSKTYLSKTLAQYTSKTCSNCGFTITSADYDRVLEKLKKTATGWMTTINGKELKVEGQITYYNRYKRQNVVKDLSVELDRLSEESVNNDISSWTKGRSGEALSLLKKRFSHRPVQEKFVCLNCGFETHADEQAALNIARSWLFLRSQEYKKYQTNKTTGNTDKRAFVETWQSFYRKKLKEVWKPAV

SEQ ID NO: 29511 - protein, 979 aa, synthetic construct
  REGION 1..979: note = engineered CasX variant
QEIKRINKIRRRLVKDSNTKKAGKTGPMKTLLVRVMTPDLRERLENLRKKPENIPQPISNTSRANLNKLLTDYTEMKKAILHVYWEEFQKDPVGLMSRVAQPASKKIDQNKLKPEMDEKGNLTTAGFACSQCGQPLFVYKLEQVSEKGKAYTNYFGRCNVAEHEKLILLAQLKPEKDSDEAVTYSLGKFGQRALDFYSIHVTKESTHPVKPLAQIAGNRYASGPVGKALSDACMGTIASFLSKYQDIIIEHQKVVKGNQKRLESLRELAGKENLEYPSVTLPPQPHTKEGVDAYNEVIARVRMWVNLNLWQKLKLSRDDAKPLLRLKGFPSFPLVERQQANEVDWWDMVCNVKKLINEKKEDGKVFWQNLAGYKRQEALRPYLSSEEDRKKGKKFARYQLGDLLLHLEKKHGEDWGKVYDEAWERIDKKVEGLSKHIKLEEERRSEDAQSKAALTDWLRAKASFVIEGKKEADKDEFCRCELKLQKWYGDLRGKPFAIEAENSILDISGFSKQYNCAFIWQKDGVKKLNLYLIINYFKGGKLRFKKIKPEAFEANRFYTVINKKSGEIVPMEVNFNFDDPNLIILPLAFGKRQGREFIWNDLLSLETGSLKLANGRVIEKTLYNRRTRQDEPALFVALTFERREVLDSSNIKPMNLIGVDRGENIPAVIALTDPEGCPLSRFKDSLGNPTHILRIGESYKEKQRTIQAKKEVEQRRAGGYSRKYASKAKNLADDMVRNTARDLLYYAVTQDAMLIFENLSRGFGRQGKRTFMAERQYTRMEDWLTAKLAYEGLPSKTYLSKTLAQYTSKTCSNCGFTITSADYDRVLEKLKKTATGWMTTINGKELKVEGQITYYNRYKRQNVVKDLSVELDRLSEESVNNDISSWTKGRSGEALSLLKKRFSHRPVQEKFVCLNCGFETHADEQAALNIARSWLFLRSQEYKKYQTNKTTGNTDKRAFVETWQSFYRKKLKEVWKPAV

SEQ ID NO: 29512 - protein, 979 aa, synthetic construct
  REGION 1..979: note = engineered CasX variant
QEIKRINKIRRRLVKDSNTKKAGKTGPMKTLLVRVMTPDLRERLENLRKKPENIPQPISNTSRANLNKLLTDYTEMKKAILHVYWEEFQKDPVGLMSRVAQPASKKIDQNKLKPEMDEKGNLTTAGFACSQCGQPLFVYKLEQVSEKGKAYTNYFGRCNVAEHEKLILLAQLKPEKDSDEAVTYSLGKFGQRALDFYSIHVTKESTHPVKPLAQIAGNRYASGPVGKALSDACMGTIASFLSKYQDIIIEHQKVVKGNQKRLESLRELAGKENLEYPSVTLPPQPHTKEGVDAYNEVIARVRMWVNLNLWQKLKLSRDDAKPLLRLKGFPSFPLVERQQANEVDWWDMVCNVKKLINEKKEDGKVFWQNLAGYKRQEALRPYLSSEEDRKKGKKFARYQLGDLLLHLEKKHGEDWGKVYDEAWERIDKKVEGLSKHIKLEEERRSEDAQSKAALTDWLRAKASFVIEGSKEADKDEFCRCELKLQKWYGDLRGKPFAIEAENSILDISGFSKQYNCAFIWQKDGVKKLNLYLIINYFKGGKLRFKKIKPEAFEANRFYTVINKKSGEIVPMEVNFNFDDPNLIILPLAFGKRQGREFIWNDLLSLETGSLKLANGRVIEKTLYNRRTRQDEPALFVALTFERREVLDSSNIKPMNLIGVDRGENIPAVIALTDPEGCPLSRFKDSLGNPTHILRIGESYKEKQRTIQAKKEVEQRRAGGYSRKYASKAKNLADDMVRNTARDLLYYAVTQDAMLIFENLSRGFGRQGKRTFMAERQYTRMEDWLTAKLAYEGLPSKTYLSKTLAQYTSKTCSNCGFTITSADYDRVLEKLKKTATGWMTTINGKELKVEGQITYYNRYKRQNVVKDLSVELDRLSEESVNNDISSWTKGRSGEALSLLKKRFSHRPVQEKFVCLNCGFETHADEQAALNIARSWLFLRSQEYKKYQTNKTTGNTDKRAFVETWQSFYRKKLKEVWKPAV

SEQ ID NO: 29513 - protein, 980 aa, synthetic construct
  REGION 1..980: note = engineered CasX variant
QEIKRINKIRRRLVKDSNTKKAGKTGPMKTLLVRVMTPDLRERLENLRKKPENIPQPISNTSRANLNKLLTDYTEMKKAILHVYWEEFQKDPVGLMSRVAQPASKKIDQNKLKPEMDEKGNLTTAGFACSQCGQPLFVYKLEQVSEKGKAYTNYFGRCNVAEHEKLILLAQLKPEKDSDEAVTYSLGKFGQRALDFYSIHVTKESTHPVKPLAQIAGNRYASGPVGKALSDACMGTIASFLSKYQDIIIEHQKVVKGNQKRLESLRELAGKENLEYPSVTLPPQPHTKEGVDAYNEVIARVRMWVNLNLWQKLKLSRDDAKPLLRLKGFPSFPLVERQQANEVDWWDMVCNVKKLINEKKEDGKVFWQNLAGYKRQEALRPYLSSEEDRKKGKKFARYQLGDLLLHLEKKHGEDWGKVYDEAWERIDKKVEGLSKHIKLEEERRSEDAQSKAALTDWLRAKASFVIEGLKEADDKDEFCRCELKLQKWYGDLRGKPFAIEAENSILDISGFSKQYNCAFIWQKDGVKKLNLYLIINYFKGGKLRFKKIKPEAFEANRFYTVINKKSGEIVPMEVNFNFDDPNLIILPLAFGKRQGREFIWNDLLSLETGSLKLANGRVIEKTLYNRRTRQDEPALFVALTFERREVLDSSNIKPMNLIGVDRGENIPAVIALTDPEGCPLSRFKDSLGNPTHILRIGESYKEKQRTIQAKKEVEQRRAGGYSRKYASKAKNLADDMVRNTARDLLYYAVTQDAMLIFENLSRGFGRQGKRTFMAERQYTRMEDWLTAKLAYEGLPSKTYLSKTLAQYTSKTCSNCGFTITSADYDRVLEKLKKTATGWMTTINGKELKVEGQITYYNRYKRQNVVKDLSVELDRLSEESVNNDISSWTKGRSGEALSLLKKRFSHRPVQEKFVCLNCGFETHADEQAALNIARSWLFLRSQEYKKYQTNKTTGNTDKRAFVETWQSFYRKKLKEVWKPAV

SEQ ID NO: 29514 - protein, 980 aa, synthetic construct
  REGION 1..980: note = engineered CasX variant
QEIKRINKIRRRLVKDSNTKKAGKTGPMKTLLVRVMTPDLRERLENLRKKPENIPQPISNTSRANLNKLLTDYTEMKKAILHVYWEEFQKDPVGLMSRVAQPASKKIDQNKLKPEMDEKGNLTTAGFACSQCGQPLFVYKLEQVSEKGKAYTNYFGRCNVAEHEKLILLAQLKPEKDSDEAVTYSLGKFGQRALDFYSIHVTKESTHPVKPLAQIAGNRYASGPVGKALSDACMGTIASFLSKYQDIIIEHQKVVKGNQKRLESLRELAGKENLEYPSVTLPPQPHTKEGVDAYNEVIARVRMWVNLNLWQKLKLSRDDAKPLLRLKGFPSFPLVERQQANEVDWWDMVCNVKKLINEKKEDGKVFWQNLAGYKRQEALRPYLSSEEDRKKGKKFARYQLGDLLLHLEKKHGEDWGKVYDEAWERIDKKVEGLSKHIKLEEERRSEDAQSKAALTDWLRAKASFVIEGLKEADKDEFCRCELKLQKWYGDLRGKPFAIEAENSILDISGFSKQYNCAFIWQKDGVKKLNLYLIINYFKGGKLRFKKIKPEAFEANRFYTVINKKSGEIVPMEVNFNFDDPNLIILPLAFGKRQGREFIWNDLLSLETGSLKLANGRVIEKTLYNRRTRQDEPALFVALTFERREVLDSSNIKPMNLIGVDRGENIPAVIALTDPEGCPLSRFKDSLGNPTHILRIGESYKEKQRTIQAKKEVEQRRAGGYSRKYASKAKNLADDMVRNTARDLLYYAVTQDAMLIFENLSRGFGRQGKRTFMAERQYTRMEDWLTAKLAYEGLPSKTYLSKTLAQYTSKTCSNCGFTITSADYDRVLEKLKKTATGWMTTINGKELKVEGQITYYNRYKRQNVVKDLSVELDRLSEESVNNDISSWTKGRSGNEALSLLKKRFSHRPVQEKFVCLNCGFETHADEQAALNIARSWLFLRSQEYKKYQTNKTTGNTDKRAFVETWQSFYRKKLKEVWKPAV

SEQ ID NO: 29515 - protein, 979 aa, synthetic construct
  REGION 1..979: note = engineered CasX variant
QEIKRINKIRRRLVKDSNTKKAGKTGPMKTLLVRVMTPDLRERLENLRKKPENIPQPISNTSRANLNKLLTDYTEMKKAILHVYWEEFQKDPVGLMSRVAQPASKKIDQNKLKPEMDEKGNLTTAGFACSQCGQPLFVYKLEQVSEKGKAYTNYFGRCNVAEHEKLILLAQLKPEKDSDEAVTYSLGKFGQRALDFYSIHVTKESTHPVKPLAQIAGNRYASGPVGKALSDACMGTIASFLSKYQDIIIEHQKVVKGNQKRLESLRELAGKENLEYPSVTLPPQPHTKEGVDAYNEVIARVRMWVNLNLWQKLKLSRDDAKPLLRLKGFPSFPLVERQQANEVDWWDMVCNVKKLINEKKEDGKVFWQNLAGYKRQEALRPYLSSEEDRQKGKKFARYQLGDLLLHLEKKHGEDWGKVYDEAWERIDKKVEGLSKHIKLEEERRSEDAQSKAALTDWLRAKASFVIEGLKEADKDEFCRCELKLQKWYGDLRGKPFAIEAENSILDISGFSKQYNCAFIWQKDGVKKLNLYLIINYFKGGKLRFKKIKPEAFEANRFYTVINKKSGEIVPMEVNFNFDDPNLIILPLAFGKRQGREFIWNDLLSLETGSLKLANGRVIEKTLYNRRTRQDEPALFVALTFERREVLDSSNIKPMNLIGVDRGENIPAVIALTDPEGCPLSRFKDSLGNPTHILRIGESYKEKQRTIQAKKEVEQRRAGGYSRKYASKAKNLADDMVRNTARDLLYYAVTQDAMLIFENLSRGFGRQGKRTFMAERQYTRMEDWLTAKLAYEGLPSKTYLSKTLAQYTSKTCSNCGFTITSADYDRVLEKLKKTATGWMTTINGKELKVEGQITYYNRYKRQNVVKDLSVELDRLSEESVNNDISSWTKGRSGEALSLLKKRFSHRPVQEKFVCLNCGFETHADEQAALNIARSWLFLRSQEYKKYQTNKTTGNTDKRAFVETWQSFYRKKLKEVWKPAV

SEQ ID NO: 29516 - protein, 979 aa, synthetic construct
  REGION 1..979: note = engineered CasX variant
QEIKRINKIRRRLVKDSNTKKAGKTGPMKTLLVRVMTPDLRERLENLRKKPENIPQPISNTSRANLNKLLTDYTEMKKAILHVYWEEFQKDPVGLMSRVAQPASKKIDQNKLKPEMDEKGNLTTAGFACSQCGQPLFVYKLEQVSEKGKAYTNYFGRCNVAEHEKLILLAQLKPEKDSDEAVTYSLGKFGQRALDFYSIHVTKESTHPVKPLAQIAGNRYASGPVGKALSDACMGTIASFLSKYQDIIIEHQKVVKGNQKRLESLRELAGKENLEYPSVTLPPQPHTKEGVDAYNEVIARVRMWVNLNLWQKLKLSRDDAKPLLRLKGFPSFPLVERQQANEVDWWDMVCNVKKLINEKKEDGKVFWQNLAGYKRQEALRPYLSSEEDRKKGKKFARYQLGDLLLHLEKKHGEDWGKVYDEAWERIDKKVEGLSKHIKLEEERRSEDAQSKAALTDWLRAKASFVIEGLKEADKDEFCRCELKLQKWYGDLRGKPFAIEAENSILDISGFSKQYNCAFIWQKDGVKKLNLYLIINYFKGGKLRFKKIKPEAFEANRFYTVINKKSGEIVPMEVNFNFDDPNLIILPLAFGKRQGREFIWNDLLSLETGSLKLANGRVIEKTLYNRRTRQDEPALFVALTFERREVLDSSNIKPMNLIGVDRGENIPAVIALTDPEGCPLSRFKDSLGNPTHILRIGESYKEKQRTIQAKKEVEQRRAGGYSRKYASKAKNLADDMVRNTARDLLYYAVTQDAMLIFENLSRGFGRQGKRTFMAERQYTRMEDWLTAKLAYEGLPSQTYLSKTLAQYTSKTCSNCGFTITSADYDRVLEKLKKTATGWMTTINGKELKVEGQITYYNRYKRQNVVKDLSVELDRLSEESVNNDISSWTKGRSGEALSLLKKRFSHRPVQEKFVCLNCGFETHADEQAALNIARSWLFLRSQEYKKYQTNKTTGNTDKRAFVETWQSFYRKKLKEVWKPAV

SEQ ID NO: 29517 - protein, 979 aa, synthetic construct
  REGION 1..979: note = engineered CasX variant
QEIKRINKIRRRLVKDSNTKKAGKTGPMKTLLVRVMTPDLRERLENLRKKPENIPQPISNTSRANLNKLLTDYTEMKKAILHVYWEEFQKDPVGLMSRVAQPASKKIDQNKLKPEMDEKGNLTTAGFACSQCGQPLFVYKLEQVSEKGKAYTNYFGRCNVAEHEKLILLAQLKPEKDSDEAVTYSLGKFGQRALDFYSIHVTKESTHPVKPLAQIAGNRYASGPVGKALSDACMGTIASFLSKYQDIIIEHQKVVKGNQKRLESLRELAGKENLEYPSVTLPPQPHTKEGVDAYNEVIARVRMWVNLNLWQKLKLSRDDAKPLLRLKGFPSFPLVERQQANEVDWWDMVCNVKKLINEKKEDGKVFWQNLAGYKRQEALRPYLSSEEDRKKGKKFARYQLGDLLLHLEKKHGEDWGKVYDEAWERIDKKVEGLSKHIKLEEERRSEDAQSKAALTDWLRAKASFVIEGLKEADKDEFCRCELKLQKWYGDLRGKPFAIEAENSILDISGFSKQYNCAFIWQKDGVKKLNLYLIINYFKGGKLRFKKIKPEAFEANRFYTVINKKSGEIVPMEVNFNFDDPNLIILPLAFGKRQGREFIWNDLLSLETGSLKLANGRVIEKTLYNRRTRQDEPALFVALTFERREVLDSSNIKPMNLIGVDRGENIPAVIALTDPEGCPLSRFKDSLGNPTHILRIGESYKEKQRTIQAKKEVEQRRAGGYSRKYASKAKNLADDMVRNTARDLLYYAVTQDAMLIFENLSRGFGRQGKRTFMAERQYTRMEDWLTAKLAYNGLPSKTYLSKTLAQYTSKTCSNCGFTITSADYDRVLEKLKKTATGWMTTINGKELKVEGQITYYNRYKRQNVVKDLSVELDRLSEESVNNDISSWTKGRSGEALSLLKKRFSHRPVQEKFVCLNCGFETHADEQAALNIARSWLFLRSQEYKKYQTNKTTGNTDKRAFVETWQSFYRKKLKEVWKPAV

SEQ ID NO: 29518 - protein, 979 aa, synthetic construct
  REGION 1..979: note = engineered CasX variant
QEIKRINKIRRRLVKDSNTKKAGKTGPMKTLLVRVMTPDLRERLENLRKKPENIPQPISNTSRANLNKLLTDYTEMKKAILHVYWEEFQKDPVGLMSRVAQPASKKIDQNKLKPEMDEKGNLTTAGFACSQCGQPLFVYKLEQVSEKGKAYTNYFGRCNVAEHEKLIQLAQLKPEKDSDEAVTYSLGKFGQRALDFYSIHVTKESTHPVKPLAQIAGNRYASGPVGKALSDACMGTIASFLSKYQDIIIEHQKVVKGNQKRLESLRELAGKENLEYPSVTLPPQPHTKEGVDAYNEVIARVRMWVNLNLWQKLKLSRDDAKPLLRLKGFPSFPLVERQQANEVDWWDMVCNVKKLINEKKEDGKVFWQNLAGYKRQEALRPYLSSEEDRKKGKKFARYQLGDLLLHLEKKHGEDWGKVYDEAWERIDKKVEGLSKHIKLEEERRSEDAQSKAALTDWLRAKASFVIEGLKEADKDEFCRCELKLQKWYGDLRGKPFAIEAENSILDISGFSKQYNCAFIWQKDGVKKLNLYLIINYFKGGKLRFKKIKPEAFEANRFYTVINKKSGEIVPMEVNFNFDDPNLIILPLAFGKRQGREFIWNDLLSLETGSLKLANGRVIEKTLYNRRTRQDEPALFVALTFERREVLDSSNIKPMNLIGVDRGENIPAVIALTDPEGCPLSRFKDSLGNPTHILRIGESYKEKQRTIQAKKEVEQRRAGGYSRKYASKAKNLADDMVRNTARDLLYYAVTQDAMLIFENLSRGFGRQGKRTFMAERQYTRMEDWLTAKLAYEGLPSKTYLSKTLAQYTSKTCSNCGFTITSADYDRVLEKLKKTATGWMTTINGKELKVEGQITYYNRYKRQNVVKDLSVELDRLSEESVNNDISSWTKGRSGEALSLLKKRFSHRPVQEKFVCLNCGFETHADEQAALNIARSWLFLRSQEYKKYQTNKTTGNTDKRAFVETWQSFYRKKLKEVWKPAV

SEQ ID NO: 29519 - protein, 979 aa, synthetic construct
  REGION 1..979: note = engineered CasX variant
QEIKRINKIRRRLVKDSNTKKAGKTGPMKTLLVRVMTPDLRERLENLRKKPENIPQPISNTSRANLNKLLTDYTEMKKAILHVYWEEFQKDPVGLMSRVAQPASKKIDQNKLKPEMDEKGNLTTAGFACSQCGQPLFVYKLEQVSEKGKAYTNYFGRCNVAEHEKLILLAQLKPEKDSDEAVTYSLGKFGQRALDFYSIHVTKESTHPVKPLAQIAGNRYASGPVGKALSDACMGTIASFLSKYQDIIIEHQKVVKGNQKRLESLRELAGKENLEYPSVTLPPQPHTKEGVDAYNEVIARVRMWVNLNLWQKLKLSRDDAKPLLRLKGFPSFPLVERQQANEVDWWDMVCNVKKLINEKKEDGKVFWQNLAIYKRQEALRPYLSSEEDRKKGKKFARYQLGDLLLHLEKKHGEDWGKVYDEAWERIDKKVEGLSKHIKLEEERRSEDAQSKAALTDWLRAKASFVIEGLKEADKDEFCRCELKLQKWYGDLRGKPFAIEAENSILDISGFSKQYNCAFIWQKDGVKKLNLYLIINYFKGGKLRFKKIKPEAFEANRFYTVINKKSGEIVPMEVNFNFDDPNLIILPLAFGKRQGREFIWNDLLSLETGSLKLANGRVIEKTLYNRRTRQDEPALFVALTFERREVLDSSNIKPMNLIGVDRGENIPAVIALTDPEGCPLSRFKDSLGNPTHILRIGESYKEKQRTIQAKKEVEQRRAGGYSRKYASKAKNLADDMVRNTARDLLYYAVTQDAMLIFENLSRGFGRQGKRTFMAERQYTRMEDWLTAKLAYEGLPSKTYLSKTLAQYTSKTCSNCGFTITSADYDRVLEKLKKTATGWMTTINGKELKVEGQITYYNRYKRQNVVKDLSVELDRLSEESVNNDISSWTKGRSGEALSLLKKRFSHRPVQEKFVCLNCGFETHADEQAALNIARSWLFLRSQEYKKYQTNKTTGNTDKRAFVETWQSFYRKKLKEVWKPAV

SEQ ID NO: 29520 - protein, 979 aa, synthetic construct
  REGION 1..979: note = engineered CasX variant
QEIKRINKIRRRLVKDSNTKKAGKTGPMKTLLVRVMTPDLRERLENLRKKPENIPQPISNTSRANLNKLLTDYTEMKKAILHVYWEEFQKDPVGLMSRVAQPASKKIDQNKLKPEMDEKGNLTTAGFACSQCGQPLFVYKLEQVSEKGKAYTNYFGRCNVAEHEKLILLAQLKPEKDSDEAVTYSLGKFGQRALDFYSIHVTKESTHPVKPLAQIAGNRYASGPVGKALSDACMGTIASFLSKYQDIIIEHQKVVKGNQKRLESLRELAGKENLEYPSVTLPPQPHTKEGVDAYNEVIARVRMWVNLNLWQKLKLSRDDAKPLLRLKGFPSFPLVERQQANEVDWWDMVCNVKKLINEKKEDGKVFWQNLAGYKRQEALRPYLSSEEDREKGKKFARYQLGDLLLHLEKKHGEDWGKVYDEAWERIDKKVEGLSKHIKLEEERRSEDAQSKAALTDWLRAKASFVIEGLKEADKDEFCRCELKLQKWYGDLRGKPFAIEAENSILDISGFSKQYNCAFIWQKDGVKKLNLYLIINYFKGGKLRFKKIKPEAFEANRFYTVINKKSGEIVPMEVNFNFDDPNLIILPLAFGKRQGREFIWNDLLSLETGSLKLANGRVIEKTLYNRRTRQDEPALFVALTFERREVLDSSNIKPMNLIGVDRGENIPAVIALTDPEGCPLSRFKDSLGNPTHILRIGESYKEKQRTIQAKKEVEQRRAGGYSRKYASKAKNLADDMVRNTARDLLYYAVTQDAMLIFENLSRGFGRQGKRTFMAERQYTRMEDWLTAKLAYEGLPSKTYLSKTLAQYTSKTCSNCGFTITSADYDRVLEKLKKTATGWMTTINGKELKVEGQITYYNRYKRQNVVKDLSVELDRLSEESVNNDISSWTKGRSGEALSLLKKRFSHRPVQEKFVCLNCGFETHADEQAALNIARSWLFLRSQEYKKYQTNKTTGNTDKRAFVETWQSFYRKKLKEVWKPAV

SEQ ID NO: 29521 - protein, 979 aa, synthetic construct
  REGION 1..979: note = engineered CasX variant
QEIKRINKIRRRLVKDSNTKKAGKTGPMKTLLVRVMTPDLRERLENLRKKPENIPQPISNTSRANLNKLLTDYTEMKKAILHVYWEEFQKDPVGLMSRVAQPASKKIDQNKLKPEMDEKGNLTTAGFACSQCGQPLFVYKLEQVSEKGKAYTNYFGRCNVAEHEKLILLAQLKPEKDSDEAVTYSLGKFGQRALDFYSIHVTKESTHPVKPLAQIAGNRYASGPVGKALSDACMGTIASFLSKYQDIIIEHQKVVKGNQKRLESLRELAGKENLEYPSVTLPPQPHTKEGVDAYNEVIARVRMWVNLNLWQKLKLSRDDAKPLLRLKGFPSFPLVERQQANEVDWWDMVCNVKKLINEKKEDGKVFWQNLAGYKRQEALRPYLSSEEDRKKGKKFARYQLGDLLLHLEKKHGEDWGKVYDEAWERIDKKVEGLSKHIKLEEERRSEDAQSKAALTDWLRAKASFVIEGLKEADKDEFCRCELKLQKWYGDLRGKPFAIEAENSILDISGFSKQYNCAFIWQKDGVKKLNLYLIINYFKGGKLRFKKIKPEAFEANRFYTVINKKSGEIVIMEVNFNFDDPNLIILPLAFGKRQGREFIWNDLLSLETGSLKLANGRVIEKTLYNRRTRQDEPALFVALTFERREVLDSSNIKPMNLIGVDRGENIPAVIALTDPEGCPLSRFKDSLGNPTHILRIGESYKEKQRTIQAKKEVEQRRAGGYSRKYASKAKNLADDMVRNTARDLLYYAVTQDAMLIFENLSRGFGRQGKRTFMAERQYTRMEDWLTAKLAYEGLPSKTYLSKTLAQYTSKTCSNCGFTITSADYDRVLEKLKKTATGWMTTINGKELKVEGQITYYNRYKRQNVVKDLSVELDRLSEESVNNDISSWTKGRSGEALSLLKKRFSHRPVQEKFVCLNCGFETHADEQAALNIARSWLFLRSQEYKKYQTNKTTGNTDKRAFVETWQSFYRKKLKEVWKPAV

SEQ ID NO: 29522 - protein, 979 aa, synthetic construct
  REGION 1..979: note = engineered CasX variant
QEIKRINKIRRRLVKDSNTKKAGKTGPMKTLLVRVMTPDLRERLENLRKKPENIPQPISNTSRANLNKLLTDYTEMKKAILHVYWEEFQKDPVGLMSRVAQPASKKIDQNKLKPEMDEKGNLTTAGFACSQCGQPLFVYKLEQVSEKGKAYTNYFGRCNVAEHEKLILLAQLKPEKDSDEAVTYSLGKFGQRALDFYSIHVTKESTHPVKPLAQIAGNRYASGPVGKALSGACMGTIASFLSKYQDIIIEHQKVVKGNQKRLESLRELAGKENLEYPSVTLPPQPHTKEGVDAYNEVIARVRMWVNLNLWQKLKLSRDDAKPLLRLKGFPSFPLVERQANAEVDWWDMVCNVKKLINEKKEDGKVFWQNLAGYKRQEALRPYLSSEEDRKKGKKFARYQLGDLLLHLEKKHGEDWGKVYDEAWERIDKKVEGLSKHIKLEEERRSEDAQSKAALTDWLRAKASFVIEGLKEADKDEFCRCELKLQKWYGDLRGKPFAIEAENSILDISGFSKQYNCAFIWQKDGVKKLNLYLIINYFKGGKLRFKKIKPEAFEANRFYTVINKKSGEIVPMEVNFNFDDPNLIILPLAFGKRQGREFIWNDLLSLETGSLKLANGRVIEKTLYNRRTRQDEPALFVALTFERREVLDSSNIKPMNLIGVDRGENIPAVIALTDPEGCPLSRFKDSLGNPTHILRIGESYKEKQRTIQAKKEVEQRRAGGYSRKYASKAKNLADDMVRNTARDLLYYAVTQDAMLIFENLSRGFGRQGKRTFMAERQYTRMEDWLTAKLAYEGLPSKTYLSKTLAQYTSKTCSNCGFTITSADYDRVLEKLKKTATGWMTTINGKELKVEGQITYYNRYKRQNVVKDLSVELDRLSEESVNNDISSWTKGRSGEALSLLKKRFSHRPVQEKFVCLNCGFETHADEQAALNIARSWLFLRSQEYKKYQTNKTTGNTDKRAFVETWQSFYRKKLKEVWKPAV

SEQ ID NO: 29523 - protein, 979 aa, synthetic construct
  REGION 1..979: note = engineered CasX variant
QEIKRINKIRRRLVKDSNTKKAGKTGPMKTLLVRVMTPDLRERLENLRKKPENIPQPISNTSRANLNKLLTDYTEMKKAILHVYWEEFQKDPVGLMSRVAQPASKKIDQNKLKPEMDEKGNLTTAGFACSQCGQPLFVYKLEQVSEKGKAYTNYFGRCNVAEHEKLILLAQLKPEKDSDEAVTYSLGKFGQRALDFYSIHVTKESTHPVKPLAQIAGNRYASGPVGKALSDACMGTIASFLSKYQDIIIEHQKVVKGNQKRLESLRELAGKENLEYPSVTLPPQPHTKEGVDAYNEVIARVRMWVNLNLWQKLKLSRDDAKPLLRLKNFPSFPLVERQANAEVDWWDMVCNVKKLINEKKEDGKVFWQNLAGYKRQEALRPYLSSEEDRKKGKKFARYQLGDLLLHLEKKHGEDWGKVYDEAWERIDKKVEGLSKHIKLEEERRSEDAQSKAALTDWLRAKASFVIEGLKEADKDEFCRCELKLQKWYGDLRGKPFAIEAENSILDISGFSKQYNCAFIWQKDGVKKLNLYLIINYFKGGKLRFKKIKPEAFEANRFYTVINKKSGEIVPMEVNFNFDDPNLIILPLAFGKRQGREFIWNDLLSLETGSLKLANGRVIEKTLYNRRTRQDEPALFVALTFERREVLDSSNIKPMNLIGVDRGENIPAVIALTDPEGCPLSRFKDSLGNPTHILRIGESYKEKQRTIQAKKEVEQRRAGGYSRKYASKAKNLADDMVRNTARDLLYYAVTQDAMLIFENLSRGFGRQGKRTFMAERQYTRMEDWLTAKLAYEGLPSKTYLSKTLAQYTSKTCSNCGFTITSADYDRVLEKLKKTATGWMTTINGKELKVEGQITYYNRYKRQNVVKDLSVELDRLSEESVNNDISSWTKGRSGEALSLLKKRFSHRPVQEKFVCLNCGFETHADEQAALNIARSWLFLRSQEYKKYQTNKTTGNTDKRAFVETWQSFYRKKLKEVWKPAV

SEQ ID NO: 29524 - protein, 979 aa, synthetic construct
  REGION 1..979: note = engineered CasX variant
QEIKRINKIRRRLVKDSNTKKAGKTGPMKTLLVRVMTPDLRERLENLRKKPENIPQPISNTSRANLNKLLTDYTEMKKAILHVYWEEFQKDPVGLMSRVAQPASKKIDQNKLKPEMDEKGNLTTAGFACSQCGQPLFVYKLEQVSEKGKAYTNYFGRCNVAEHEKLILLAQLKPEKDSDEAVTYSLGKFGQRALDFYSIHVTKESTHPVKPLAQIAGNRYASGPVGKALSDACMGTIASFLSKYQDIIIEHQKVVKGNQKRLESLRELAGKENLEYPSVTLPPQPHTKEGVDAYNEVIARVRMWVNLNLWQKLKLSRDDAKPLLRLKGFPSFPLVERQANAEVDWWDMVCNVKKLINEKKEDGKVFWQNLAGYKRQEALRPYLSSEEDRKKGKKFARYQLGDLLNHLEKKHGEDWGKVYDEAWERIDKKVEGLSKHIKLEEERRSEDAQSKAALTDWLRAKASFVIEGLKEADKDEFCRCELKLQKWYGDLRGKPFAIEAENSILDISGFSKQYNCAFIWQKDGVKKLNLYLIINYFKGGKLRFKKIKPEAFEANRFYTVINKKSGEIVPMEVNFNFDDPNLIILPLAFGKRQGREFIWNDLLSLETGSLKLANGRVIEKTLYNRRTRQDEPALFVALTFERREVLDSSNIKPMNLIGVDRGENIPAVIALTDPEGCPLSRFKDSLGNPTHILRIGESYKEKQRTIQAKKEVEQRRAGGYSRKYASKAKNLADDMVRNTARDLLYYAVTQDAMLIFENLSRGFGRQGKRTFMAERQYTRMEDWLTAKLAYEGLPSKTYLSKTLAQYTSKTCSNCGFTITSADYDRVLEKLKKTATGWMTTINGKELKVEGQITYYNRYKRQNVVKDLSVELDRLSEESVNNDISSWTKGRSGEALSLLKKRFSHRPVQEKFVCLNCGFETHADEQAALNIARSWLFLRSQEYKKYQTNKTTGNTDKRAFVETWQSFYRKKLKEVWKPAV

SEQ ID NO: 29525 - protein, 979 aa, synthetic construct
  REGION 1..979: note = engineered CasX variant
QEIKRINKIRRRLVKDSNTKKAGKTGPMKTLLVRVMTPDLRERLENLRKKPENIPQPISNTSRANLNKLLTDYTEMKKAILHVYWEEFQKDPVGLMSRVAQPASKKIDQNKLKPEMDEKGNLTTAGFACSQCGQPLFVYKLEQVSEKGKAYTNYFGRCNVAEHEKLILLAQLKPEKDSDEAVTYSLGKFGQRALDFYSIHVTKESTHPVKPLAQIAGNRYASGPVGKALSDACMGTIASFLSKYQDIIIEHQKVVKGNQKRLESLRELAGKENLEYPSVTLPPQPHTKEGVDAYNEVIARVRMWVNLNLWQKLKLSRDDAKPLLRLKGFPSFPLVERQANAEVDWWDMVCNVKKLINEKKEDGKVFWQNLAGYKRQEALRPYLSSEEDRKKGKKFARYQLGDLLWHLEKKHGEDWGKVYDEAWERIDKKVEGLSKHIKLEEERRSEDAQSKAALTDWLRAKASFVIEGLKEADKDEFCRCELKLQKWYGDLRGKPFAIEAENSILDISGFSKQYNCAFIWQKDGVKKLNLYLIINYFKGGKLRFKKIKPEAFEANRFYTVINKKSGEIVPMEVNFNFDDPNLIILPLAFGKRQGREFIWNDLLSLETGSLKLANGRVIEKTLYNRRTRQDEPALFVALTFERREVLDSSNIKPMNLIGVDRGENIPAVIALTDPEGCPLSRFKDSLGNPTHILRIGESYKEKQRTIQAKKEVEQRRAGGYSRKYASKAKNLADDMVRNTARDLLYYAVTQDAMLIFENLSRGFGRQGKRTFMAERQYTRMEDWLTAKLAYEGLPSKTYLSKTLAQYTSKTCSNCGFTITSADYDRVLEKLKKTATGWMTTINGKELKVEGQITYYNRYKRQNVVKDLSVELDRLSEESVNNDISSWTKGRSGEALSLLKKRFSHRPVQEKFVCLNCGFETHADEQAALNIARSWLFLRSQEYKKYQTNKTTGNTDKRAFVETWQSFYRKKLKEVWKPAV

SEQ ID NO: 29526 - protein, 979 aa, synthetic construct
  REGION 1..979: note = engineered CasX variant
QEIKRINKIRRRLVKDSNTKKAGKTGPMKTLLVRVMTPDLRERLENLRKKPENIPQPISNTSRANLNKLLTDYTEMKKAILHVYWEEFQKDPVGLMSRVAQPASKKIDQNKLKPEMDEKGNLTTAGFACSQCGQPLFVYKLEQVSEKGKAYTNYFGRCNVAEHEKLILLAQLKPEKDSDEAVTYSLGKFGQRALDFYSIHVTKESTHPVKPLAQIAGNRYASGPVGKALSDACMGTIASFLSKYQDIIIEHQKVVKGNQKRLESLRELAGKENLEYPSVTLPPQPHTKEGVDAYNEVIARVRMWVNLNLWQKLKLSRDDAKPLLRLKGFPSFPLVERQANAEVDWWDMVCNVKKLINEKKEDGKVFWQNLAGYKRQEALRPYLSSEEDRKKGKKFARYQLGDLLLHLYKKHGEDWGKVYDEAWERIDKKVEGLSKHIKLEEERRSEDAQSKAALTDWLRAKASFVIEGLKEADKDEFCRCELKLQKWYGDLRGKPFAIEAENSILDISGFSKQYNCAFIWQKDGVKKLNLYLIINYFKGGKLRFKKIKPEAFEANRFYTVINKKSGEIVPMEVNFNFDDPNLIILPLAFGKRQGREFIWNDLLSLETGSLKLANGRVIEKTLYNRRTRQDEPALFVALTFERREVLDSSNIKPMNLIGVDRGENIPAVIALTDPEGCPLSRFKDSLGNPTHILRIGESYKEKQRTIQAKKEVEQRRAGGYSRKYASKAKNLADDMVRNTARDLLYYAVTQDAMLIFENLSRGFGRQGKRTFMAERQYTRMEDWLTAKLAYEGLPSKTYLSKTLAQYTSKTCSNCGFTITSADYDRVLEKLKKTATGWMTTINGKELKVEGQITYYNRYKRQNVVKDLSVELDRLSEESVNNDISSWTKGRSGEALSLLKKRFSHRPVQEKFVCLNCGFETHADEQAALNIARSWLFLRSQEYKKYQTNKTTGNTDKRAFVETWQSFYRKKLKEVWKPAV

SEQ ID NO: 29527 - protein, 979 aa, synthetic construct
  REGION 1..979: note = engineered CasX variant
QEIKRINKIRRRLVKDSNTKKAGKTGPMKTLLVRVMTPDLRERLENLRKKPENIPQPISNTSRANLNKLLTDYTEMKKAILHVYWEEFQKDPVGLMSRVAQPASKKIDQNKLKPEMDEKGNLTTAGFACSQCGQPLFVYKLEQVSEKGKAYTNYFGRCNVAEHEKLILLAQLKPEKDSDEAVTYSLGKFGQRALDFYSIHVTKESTHPVKPLAQIAGNRYASGPVGKALSDACMGTIASFLSKYQDIIIEHQKVVKGNQKRLESLRELAGKENLEYPSVTLPPQPHTKEGVDAYNEVIARVRMWVNLNLWQKLKLSRDDAKPLLRLKGFPSFPLVERQANAEVDWWDMVCNVKKLINEKKEDGKVFWQNLAGYKRQEALRPYLSSEEDRKKGKKFARYQLGDLLLHLEKKHPEDWGKVYDEAWERIDKKVEGLSKHIKLEEERRSEDAQSKAALTDWLRAKASFVIEGLKEADKDEFCRCELKLQKWYGDLRGKPFAIEAENSILDISGFSKQYNCAFIWQKDGVKKLNLYLIINYFKGGKLRFKKIKPEAFEANRFYTVINKKSGEIVPMEVNFNFDDPNLIILPLAFGKRQGREFIWNDLLSLETGSLKLANGRVIEKTLYNRRTRQDEPALFVALTFERREVLDSSNIKPMNLIGVDRGENIPAVIALTDPEGCPLSRFKDSLGNPTHILRIGESYKEKQRTIQAKKEVEQRRAGGYSRKYASKAKNLADDMVRNTARDLLYYAVTQDAMLIFENLSRGFGRQGKRTFMAERQYTRMEDWLTAKLAYEGLPSKTYLSKTLAQYTSKTCSNCGFTITSADYDRVLEKLKKTATGWMTTINGKELKVEGQITYYNRYKRQNVVKDLSVELDRLSEESVNNDISSWTKGRSGEALSLLKKRFSHRPVQEKFVCLNCGFETHADEQAALNIARSWLFLRSQEYKKYQTNKTTGNTDKRAFVETWQSFYRKKLKEVWKPAV

SEQ ID NO: 29528 - protein, 980 aa, synthetic construct
  REGION 1..980: note = engineered CasX variant
QEIKRINKIRRRLVKDSNTKKAGKTGPMKTLLVRVMTPDLRERLENLRKKPENIPQPISNTSRANLNKLLTDYTEMKKAILHVYWEEFQKDPVGLMSRVAQPASKKIDQNKLKPEMDEKGNLTTAGFACSQCGQPLFVYKLEQVSEKGKAYTNYFGRCNVAEHEKLILLAQLKPEKDSDEAVTYSLGKFGQRALDFYSIHVTKESTHPVKPLAQIAGNRYASGPVGKALSDACMGTIASFLSKYQDIIIEHQKVVKGNQKRLESLRELAGKENLEYPSVTLPPQPHTKEGVDAYNEVIARVRMWVNLNLWQKLKLSRDDAKPLLRLKGFPSFPLVERQANAEVDWWDMVCNVKKLINEKKEDGKVFWQNLAGYKRQEALRPYLSSEEDRKKGKKFARYQLGDLLLHLEKKHGERDWGKVYDEAWERIDKKVEGLSKHIKLEEERRSEDAQSKAALTDWLRAKASFVIEGLKEADKDEFCRCELKLQKWYGDLRGKPFAIEAENSILDISGFSKQYNCAFIWQKDGVKKLNLYLIINYFKGGKLRFKKIKPEAFEANRFYTVINKKSGEIVPMEVNFNFDDPNLIILPLAFGKRQGREFIWNDLLSLETGSLKLANGRVIEKTLYNRRTRQDEPALFVALTFERREVLDSSNIKPMNLIGVDRGENIPAVIALTDPEGCPLSRFKDSLGNPTHILRIGESYKEKQRTIQAKKEVEQRRAGGYSRKYASKAKNLADDMVRNTARDLLYYAVTQDAMLIFENLSRGFGRQGKRTFMAERQYTRMEDWLTAKLAYEGLPSKTYLSKTLAQYTSKTCSNCGFTITSADYDRVLEKLKKTATGWMTTINGKELKVEGQITYYNRYKRQNVVKDLSVELDRLSEESVNNDISSWTKGRSGEALSLLKKRFSHRPVQEKFVCLNCGFETHADEQAALNIARSWLFLRSQEYKKYQTNKTTGNTDKRAFVETWQSFYRKKLKEVWKPAV

SEQ ID NO: 29529 - protein, 980 aa, synthetic construct
  REGION 1..980: note = engineered CasX variant
QEIKRINKIRRRLVKDSNTKKAGKTGPMKTLLVRVMTPDLRERLENLRKKPENIPQPISNTSRANLNKLLTDYTEMKKAILHVYWEEFQKDPVGLMSRVAQPASKKIDQNKLKPEMDEKGNLTTAGFACSQCGQPLFVYKLEQVSEKGKAYTNYFGRCNVAEHEKLILLAQLKPEKDSDEAVTYSLGKFGQRALDFYSIHVTKESTHPVKPLAQIAGNRYASGPVGKALSDACMGTIASFLSKYQDIIIEHQKVVKGNQKRLESLRELAGKENLEYPSVTLPPQPHTKEGVDAYNEVIARVRMWVNLNLWQKLKLSRDDAKPLLRLKGFPSFPLVERQANAEVDWWDMVCNVKKLINEKKEDGKVFWQNLAGYKRQEALRPYLSSEEDRKKGKKFARYQLGDLLLHLEKKHGEYDWGKVYDEAWERIDKKVEGLSKHIKLEEERRSEDAQSKAALTDWLRAKASFVIEGLKEADKDEFCRCELKLQKWYGDLRGKPFAIEAENSILDISGFSKQYNCAFIWQKDGVKKLNLYLIINYFKGGKLRFKKIKPEAFEANRFYTVINKKSGEIVPMEVNFNFDDPNLIILPLAFGKRQGREFIWNDLLSLETGSLKLANGRVIEKTLYNRRTRQDEPALFVALTFERREVLDSSNIKPMNLIGVDRGENIPAVIALTDPEGCPLSRFKDSLGNPTHILRIGESYKEKQRTIQAKKEVEQRRAGGYSRKYASKAKNLADDMVRNTARDLLYYAVTQDAMLIFENLSRGFGRQGKRTFMAERQYTRMEDWLTAKLAYEGLPSKTYLSKTLAQYTSKTCSNCGFTITSADYDRVLEKLKKTATGWMTTINGKELKVEGQITYYNRYKRQNVVKDLSVELDRLSEESVNNDISSWTKGRSGEALSLLKKRFSHRPVQEKFVCLNCGFETHADEQAALNIARSWLFLRSQEYKKYQTNKTTGNTDKRAFVETWQSFYRKKLKEVWKPAV

SEQ ID NO: 29530 - protein, 979 aa, synthetic construct
  REGION 1..979: note = engineered CasX variant
QEIKRINKIRRRLVKDSNTKKAGKTGPMKTLLVRVMTPDLRERLENLRKKPENIPQPISNTSRANLNKLLTDYTEMKKAILHVYWEEFQKDPVGLMSRVAQPASKKIDQNKLKPEMDEKGNLTTAGFACSQCGQPLFVYKLEQVSEKGKAYTNYFGRCNVAEHEKLILLAQLKPEKDSDEAVTYSLGKFGQRALDFYSIHVTKESTHPVKPLAQIAGNRYASGPVGKALSDACMGTIASFLSKYQDIIIEHQKVVKGNQKRLESLRELAGKENLEYPSVTLPPQPHTKEGVDAYNEVIARVRMWVNLNLWQKLKLSRDDAKPLLRLKGFPSFPLVERQANAEVDWWDMVCNVKKLINEKKEDGKVFWQNLAGYKRQEALRPYLSSEEDRKKGKKFARYQLGDLLLHLEKKHGEDWGDVYDEAWERIDKKVEGLSKHIKLEEERRSEDAQSKAALTDWLRAKASFVIEGLKEADKDEFCRCELKLQKWYGDLRGKPFAIEAENSILDISGFSKQYNCAFIWQKDGVKKLNLYLIINYFKGGKLRFKKIKPEAFEANRFYTVINKKSGEIVPMEVNFNFDDPNLIILPLAFGKRQGREFIWNDLLSLETGSLKLANGRVIEKTLYNRRTRQDEPALFVALTFERREVLDSSNIKPMNLIGVDRGENIPAVIALTDPEGCPLSRFKDSLGNPTHILRIGESYKEKQRTIQAKKEVEQRRAGGYSRKYASKAKNLADDMVRNTARDLLYYAVTQDAMLIFENLSRGFGRQGKRTFMAERQYTRMEDWLTAKLAYEGLPSKTYLSKTLAQYTSKTCSNCGFTITSADYDRVLEKLKKTATGWMTTINGKELKVEGQITYYNRYKRQNVVKDLSVELDRLSEESVNNDISSWTKGRSGEALSLLKKRFSHRPVQEKFVCLNCGFETHADEQAALNIARSWLFLRSQEYKKYQTNKTTGNTDKRAFVETWQSFYRKKLKEVWKPAV

SEQ ID NO: 29531 - protein, 979 aa, synthetic construct
  REGION 1..979: note = engineered CasX variant
QEIKRINKIRRRLVKDSNTKKAGKTGPMKTLLVRVMTPDLRERLENLRKKPENIPQPISNTSRANLNKLLTDYTEMKKAILHVYWEEFQKDPVGLMSRVAQPASKKIDQNKLKPEMDEKGNLTTAGFACSQCGQPLFVYKLEQVSEKGKAYTNYFGRCNVAEHEKLILLAQLKPEKDSDEAVTYSLGKFGQRALDFYSIHVTKESTHPVKPLAQIAGNRYASGPVGKALSDACMGTIASFLSKYQDIIIEHQKVVKGNQKRLESLRELAGKENLEYPSVTLPPQPHTKEGVDAYNEVIARVRMWVNLNLWQKLKLSRDDAKPLLRLKGFPSFPLVERQANAEVDWWDMVCNVKKLINEKKEDGKVFWQNLAGYKRQEALRPYLSSEEDRKKGKKFARYQLGDLLLHLEKKHGEDWGKVYGEAWERIDKKVEGLSKHIKLEEERRSEDAQSKAALTDWLRAKASFVIEGLKEADKDEFCRCELKLQKWYGDLRGKPFAIEAENSILDISGFSKQYNCAFIWQKDGVKKLNLYLIINYFKGGKLRFKKIKPEAFEANRFYTVINKKSGEIVPMEVNFNFDDPNLIILPLAFGKRQGREFIWNDLLSLETGSLKLANGRVIEKTLYNRRTRQDEPALFVALTFERREVLDSSNIKPMNLIGVDRGENIPAVIALTDPEGCPLSRFKDSLGNPTHILRIGESYKEKQRTIQAKKEVEQRRAGGYSRKYASKAKNLADDMVRNTARDLLYYAVTQDAMLIFENLSRGFGRQGKRTFMAERQYTRMEDWLTAKLAYEGLPSKTYLSKTLAQYTSKTCSNCGFTITSADYDRVLEKLKKTATGWMTTINGKELKVEGQITYYNRYKRQNVVKDLSVELDRLSEESVNNDISSWTKGRSGEALSLLKKRFSHRPVQEKFVCLNCGFETHADEQAALNIARSWLFLRSQEYKKYQTNKTTGNTDKRAFVETWQSFYRKKLKEVWKPAV

SEQ ID NO: 29532 - protein, 979 aa, synthetic construct
  REGION 1..979: note = engineered CasX variant
QEIKRINKIRRRLVKDSNTKKAGKTGPMKTLLVRVMTPDLRERLENLRKKPENIPQPISNTSRANLNKLLTDYTEMKKAILHVYWEEFQKDPVGLMSRVAQPASKKIDQNKLKPEMDEKGNLTTAGFACSQCGQPLFVYKLEQVSEKGKAYTNYFGRCNVAEHEKLILLAQLKPEKDSDEAVTYSLGKFGQRALDFYSIHVTKESTHPVKPLAQIAGNRYASGPVGKALSDACMGTIASFLSKYQDIIIEHQKVVKGNQKRLESLRELAGKENLEYPSVTLPPQPHTKEGVDAYNEVIARVRMWVNLNLWQKLKLSRDDAKPLLRLKGFPSFPLVERQANAEVDWWDMVCNVKKLINEKKEDGKVFWQNLAGYKRQEALRPYLSSEEDRKKGKKFARYQLGDLLLHLEKKHGEDWGKVYDEAWERIDKKVEGLSKHIKLEEERRSEDAQSKAALTDWLRAKASFVIEGKKEADKDEFCRCELKLQKWYGDLRGKPFAIEAENSILDISGFSKQYNCAFIWQKDGVKKLNLYLIINYFKGGKLRFKKIKPEAFEANRFYTVINKKSGEIVPMEVNFNFDDPNLIILPLAFGKRQGREFIWNDLLSLETGSLKLANGRVIEKTLYNRRTRQDEPALFVALTFERREVLDSSNIKPMNLIGVDRGENIPAVIALTDPEGCPLSRFKDSLGNPTHILRIGESYKEKQRTIQAKKEVEQRRAGGYSRKYASKAKNLADDMVRNTARDLLYYAVTQDAMLIFENLSRGFGRQGKRTFMAERQYTRMEDWLTAKLAYEGLPSKTYLSKTLAQYTSKTCSNCGFTITSADYDRVLEKLKKTATGWMTTINGKELKVEGQITYYNRYKRQNVVKDLSVELDRLSEESVNNDISSWTKGRSGEALSLLKKRFSHRPVQEKFVCLNCGFETHADEQAALNIARSWLFLRSQEYKKYQTNKTTGNTDKRAFVETWQSFYRKKLKEVWKPAV

SEQ ID NO: 29533 - protein, 979 aa, synthetic construct
  REGION 1..979: note = engineered CasX variant
QEIKRINKIRRRLVKDSNTKKAGKTGPMKTLLVRVMTPDLRERLENLRKKPENIPQPISNTSRANLNKLLTDYTEMKKAILHVYWEEFQKDPVGLMSRVAQPASKKIDQNKLKPEMDEKGNLTTAGFACSQCGQPLFVYKLEQVSEKGKAYTNYFGRCNVAEHEKLILLAQLKPEKDSDEAVTYSLGKFGQRALDFYSIHVTKESTHPVKPLAQIAGNRYASGPVGKALSDACMGTIASFLSKYQDIIIEHQKVVKGNQKRLESLRELAGKENLEYPSVTLPPQPHTKEGVDAYNEVIARVRMWVNLNLWQKLKLSRDDAKPLLRLKGFPSFPLVERQANAEVDWWDMVCNVKKLINEKKEDGKVFWQNLAGYKRQEALRPYLSSEEDRKKGKKFARYQLGDLLLHLEKKHGEDWGKVYDEAWERIDKKVEGLSKHIKLEEERRSEDAQSKAALTDWLRAKASFVIEGSKEADKDEFCRCELKLQKWYGDLRGKPFAIEAENSILDISGFSKQYNCAFIWQKDGVKKLNLYLIINYFKGGKLRFKKIKPEAFEANRFYTVINKKSGEIVPMEVNFNFDDPNLIILPLAFGKRQGREFIWNDLLSLETGSLKLANGRVIEKTLYNRRTRQDEPALFVALTFERREVLDSSNIKPMNLIGVDRGENIPAVIALTDPEGCPLSRFKDSLGNPTHILRIGESYKEKQRTIQAKKEVEQRRAGGYSRKYASKAKNLADDMVRNTARDLLYYAVTQDAMLIFENLSRGFGRQGKRTFMAERQYTRMEDWLTAKLAYEGLPSKTYLSKTLAQYTSKTCSNCGFTITSADYDRVLEKLKKTATGWMTTINGKELKVEGQITYYNRYKRQNVVKDLSVELDRLSEESVNNDISSWTKGRSGEALSLLKKRFSHRPVQEKFVCLNCGFETHADEQAALNIARSWLFLRSQEYKKYQTNKTTGNTDKRAFVETWQSFYRKKLKEVWKPAV

SEQ ID NO: 29534 - protein, 980 aa, synthetic construct
  REGION 1..980: note = engineered CasX variant
QEIKRINKIRRRLVKDSNTKKAGKTGPMKTLLVRVMTPDLRERLENLRKKPENIPQPISNTSRANLNKLLTDYTEMKKAILHVYWEEFQKDPVGLMSRVAQPASKKIDQNKLKPEMDEKGNLTTAGFACSQCGQPLFVYKLEQVSEKGKAYTNYFGRCNVAEHEKLILLAQLKPEKDSDEAVTYSLGKFGQRALDFYSIHVTKESTHPVKPLAQIAGNRYASGPVGKALSDACMGTIASFLSKYQDIIIEHQKVVKGNQKRLESLRELAGKENLEYPSVTLPPQPHTKEGVDAYNEVIARVRMWVNLNLWQKLKLSRDDAKPLLRLKGFPSFPLVERQANAEVDWWDMVCNVKKLINEKKEDGKVFWQNLAGYKRQEALRPYLSSEEDRKKGKKFARYQLGDLLLHLEKKHGEDWGKVYDEAWERIDKKVEGLSKHIKLEEERRSEDAQSKAALTDWLRAKASFVIEGLKEADDKDEFCRCELKLQKWYGDLRGKPFAIEAENSILDISGFSKQYNCAFIWQKDGVKKLNLYLIINYFKGGKLRFKKIKPEAFEANRFYTVINKKSGEIVPMEVNFNFDDPNLIILPLAFGKRQGREFIWNDLLSLETGSLKLANGRVIEKTLYNRRTRQDEPALFVALTFERREVLDSSNIKPMNLIGVDRGENIPAVIALTDPEGCPLSRFKDSLGNPTHILRIGESYKEKQRTIQAKKEVEQRRAGGYSRKYASKAKNLADDMVRNTARDLLYYAVTQDAMLIFENLSRGFGRQGKRTFMAERQYTRMEDWLTAKLAYEGLPSKTYLSKTLAQYTSKTCSNCGFTITSADYDRVLEKLKKTATGWMTTINGKELKVEGQITYYNRYKRQNVVKDLSVELDRLSEESVNNDISSWTKGRSGEALSLLKKRFSHRPVQEKFVCLNCGFETHADEQAALNIARSWLFLRSQEYKKYQTNKTTGNTDKRAFVETWQSFYRKKLKEVWKPAV

SEQ ID NO: 29535 - protein, 980 aa, synthetic construct
  REGION 1..980: note = engineered CasX variant
QEIKRINKIRRRLVKDSNTKKAGKTGPMKTLLVRVMTPDLRERLENLRKKPENIPQPISNTSRANLNKLLTDYTEMKKAILHVYWEEFQKDPVGLMSRVAQPASKKIDQNKLKPEMDEKGNLTTAGFACSQCGQPLFVYKLEQVSEKGKAYTNYFGRCNVAEHEKLILLAQLKPEKDSDEAVTYSLGKFGQRALDFYSIHVTKESTHPVKPLAQIAGNRYASGPVGKALSDACMGTIASFLSKYQDIIIEHQKVVKGNQKRLESLRELAGKENLEYPSVTLPPQPHTKEGVDAYNEVIARVRMWVNLNLWQKLKLSRDDAKPLLRLKGFPSFPLVERQANAEVDWWDMVCNVKKLINEKKEDGKVFWQNLAGYKRQEALRPYLSSEEDRKKGKKFARYQLGDLLLHLEKKHGEDWGKVYDEAWERIDKKVEGLSKHIKLEEERRSEDAQSKAALTDWLRAKASFVIEGLKEADKDEFCRCELKLQKWYGDLRGKPFAIEAENSILDISGFSKQYNCAFIWQKDGVKKLNLYLIINYFKGGKLRFKKIKPEAFEANRFYTVINKKSGEIVPMEVNFNFDDPNLIILPLAFGKRQGREFIWNDLLSLETGSLKLANGRVIEKTLYNRRTRQDEPALFVALTFERREVLDSSNIKPMNLIGVDRGENIPAVIALTDPEGCPLSRFKDSLGNPTHILRIGESYKEKQRTIQAKKEVEQRRAGGYSRKYASKAKNLADDMVRNTARDLLYYAVTQDAMLIFENLSRGFGRQGKRTFMAERQYTRMEDWLTAKLAYEGLPSKTYLSKTLAQYTSKTCSNCGFTITSADYDRVLEKLKKTATGWMTTINGKELKVEGQITYYNRYKRQNVVKDLSVELDRLSEESVNNDISSWTKGRSGNEALSLLKKRFSHRPVQEKFVCLNCGFETHADEQAALNIARSWLFLRSQEYKKYQTNKTTGNTDKRAFVETWQSFYRKKLKEVWKPAV

SEQ ID NO: 29536 - protein, 979 aa, synthetic construct
  REGION 1..979: note = engineered CasX variant
QEIKRINKIRRRLVKDSNTKKAGKTGPMKTLLVRVMTPDLRERLENLRKKPENIPQPISNTSRANLNKLLTDYTEMKKAILHVYWEEFQKDPVGLMSRVAQPASKKIDQNKLKPEMDEKGNLTTAGFACSQCGQPLFVYKLEQVSEKGKAYTNYFGRCNVAEHEKLILLAQLKPEKDSDEAVTYSLGKFGQRALDFYSIHVTKESTHPVKPLAQIAGNRYASGPVGKALSDACMGTIASFLSKYQDIIIEHQKVVKGNQKRLESLRELAGKENLEYPSVTLPPQPHTKEGVDAYNEVIARVRMWVNLNLWQKLKLSRDDAKPLLRLKGFPSFPLVERQANAEVDWWDMVCNVKKLINEKKEDGKVFWQNLAGYKRQEALRPYLSSEEDRQKGKKFARYQLGDLLLHLEKKHGEDWGKVYDEAWERIDKKVEGLSKHIKLEEERRSEDAQSKAALTDWLRAKASFVIEGLKEADKDEFCRCELKLQKWYGDLRGKPFAIEAENSILDISGFSKQYNCAFIWQKDGVKKLNLYLIINYFKGGKLRFKKIKPEAFEANRFYTVINKKSGEIVPMEVNFNFDDPNLIILPLAFGKRQGREFIWNDLLSLETGSLKLANGRVIEKTLYNRRTRQDEPALFVALTFERREVLDSSNIKPMNLIGVDRGENIPAVIALTDPEGCPLSRFKDSLGNPTHILRIGESYKEKQRTIQAKKEVEQRRAGGYSRKYASKAKNLADDMVRNTARDLLYYAVTQDAMLIFENLSRGFGRQGKRTFMAERQYTRMEDWLTAKLAYEGLPSKTYLSKTLAQYTSKTCSNCGFTITSADYDRVLEKLKKTATGWMTTINGKELKVEGQITYYNRYKRQNVVKDLSVELDRLSEESVNNDISSWTKGRSGEALSLLKKRFSHRPVQEKFVCLNCGFETHADEQAALNIARSWLFLRSQEYKKYQTNKTTGNTDKRAFVETWQSFYRKKLKEVWKPAV

SEQ ID NO: 29537 - protein, 979 aa, synthetic construct
  REGION 1..979: note = engineered CasX variant
QEIKRINKIRRRLVKDSNTKKAGKTGPMKTLLVRVMTPDLRERLENLRKKPENIPQPISNTSRANLNKLLTDYTEMKKAILHVYWEEFQKDPVGLMSRVAQPASKKIDQNKLKPEMDEKGNLTTAGFACSQCGQPLFVYKLEQVSEKGKAYTNYFGRCNVAEHEKLILLAQLKPEKDSDEAVTYSLGKFGQRALDFYSIHVTKESTHPVKPLAQIAGNRYASGPVGKALSDACMGTIASFLSKYQDIIIEHQKVVKGNQKRLESLRELAGKENLEYPSVTLPPQPHTKEGVDAYNEVIARVRMWVNLNLWQKLKLSRDDAKPLLRLKGFPSFPLVERQANAEVDWWDMVCNVKKLINEKKEDGKVFWQNLAGYKRQEALRPYLSSEEDRKKGKKFARYQLGDLLLHLEKKHGEDWGKVYDEAWERIDKKVEGLSKHIKLEEERRSEDAQSKAALTDWLRAKASFVIEGLKEADKDEFCRCELKLQKWYGDLRGKPFAIEAENSILDISGFSKQYNCAFIWQKDGVKKLNLYLIINYFKGGKLRFKKIKPEAFEANRFYTVINKKSGEIVPMEVNFNFDDPNLIILPLAFGKRQGREFIWNDLLSLETGSLKLANGRVIEKTLYNRRTRQDEPALFVALTFERREVLDSSNIKPMNLIGVDRGENIPAVIALTDPEGCPLSRFKDSLGNPTHILRIGESYKEKQRTIQAKKEVEQRRAGGYSRKYASKAKNLADDMVRNTARDLLYYAVTQDAMLIFENLSRGFGRQGKRTFMAERQYTRMEDWLTAKLAYEGLPSQTYLSKTLAQYTSKTCSNCGFTITSADYDRVLEKLKKTATGWMTTINGKELKVEGQITYYNRYKRQNVVKDLSVELDRLSEESVNNDISSWTKGRSGEALSLLKKRFSHRPVQEKFVCLNCGFETHADEQAALNIARSWLFLRSQEYKKYQTNKTTGNTDKRAFVETWQSFYRKKLKEVWKPAV

SEQ ID NO: 29538 - protein, 979 aa, synthetic construct
  REGION 1..979: note = engineered CasX variant
QEIKRINKIRRRLVKDSNTKKAGKTGPMKTLLVRVMTPDLRERLENLRKKPENIPQPISNTSRANLNKLLTDYTEMKKAILHVYWEEFQKDPVGLMSRVAQPASKKIDQNKLKPEMDEKGNLTTAGFACSQCGQPLFVYKLEQVSEKGKAYTNYFGRCNVAEHEKLILLAQLKPEKDSDEAVTYSLGKFGQRALDFYSIHVTKESTHPVKPLAQIAGNRYASGPVGKALSDACMGTIASFLSKYQDIIIEHQKVVKGNQKRLESLRELAGKENLEYPSVTLPPQPHTKEGVDAYNEVIARVRMWVNLNLWQKLKLSRDDAKPLLRLKGFPSFPLVERQANAEVDWWDMVCNVKKLINEKKEDGKVFWQNLAGYKRQEALRPYLSSEEDRKKGKKFARYQLGDLLLHLEKKHGEDWGKVYDEAWERIDKKVEGLSKHIKLEEERRSEDAQSKAALTDWLRAKASFVIEGLKEADKDEFCRCELKLQKWYGDLRGKPFAIEAENSILDISGFSKQYNCAFIWQKDGVKKLNLYLIINYFKGGKLRFKKIKPEAFEANRFYTVINKKSGEIVPMEVNFNFDDPNLIILPLAFGKRQGREFIWNDLLSLETGSLKLANGRVIEKTLYNRRTRQDEPALFVALTFERREVLDSSNIKPMNLIGVDRGENIPAVIALTDPEGCPLSRFKDSLGNPTHILRIGESYKEKQRTIQAKKEVEQRRAGGYSRKYASKAKNLADDMVRNTARDLLYYAVTQDAMLIFENLSRGFGRQGKRTFMAERQYTRMEDWLTAKLAYNGLPSKTYLSKTLAQYTSKTCSNCGFTITSADYDRVLEKLKKTATGWMTTINGKELKVEGQITYYNRYKRQNVVKDLSVELDRLSEESVNNDISSWTKGRSGEALSLLKKRFSHRPVQEKFVCLNCGFETHADEQAALNIARSWLFLRSQEYKKYQTNKTTGNTDKRAFVETWQSFYRKKLKEVWKPAV

SEQ ID NO: 29539 - protein, 979 aa, synthetic construct
  REGION 1..979: note = engineered CasX variant
QEIKRINKIRRRLVKDSNTKKAGKTGPMKTLLVRVMTPDLRERLENLRKKPENIPQPISNTSRANLNKLLTDYTEMKKAILHVYWEEFQKDPVGLMSRVAQPASKKIDQNKLKPEMDEKGNLTTAGFACSQCGQPLFVYKLEQVSEKGKAYTNYFGRCNVAEHEKLIQLAQLKPEKDSDEAVTYSLGKFGQRALDFYSIHVTKESTHPVKPLAQIAGNRYASGPVGKALSDACMGTIASFLSKYQDIIIEHQKVVKGNQKRLESLRELAGKENLEYPSVTLPPQPHTKEGVDAYNEVIARVRMWVNLNLWQKLKLSRDDAKPLLRLKGFPSFPLVERQANAEVDWWDMVCNVKKLINEKKEDGKVFWQNLAGYKRQEALRPYLSSEEDRKKGKKFARYQLGDLLLHLEKKHGEDWGKVYDEAWERIDKKVEGLSKHIKLEEERRSEDAQSKAALTDWLRAKASFVIEGLKEADKDEFCRCELKLQKWYGDLRGKPFAIEAENSILDISGFSKQYNCAFIWQKDGVKKLNLYLIINYFKGGKLRFKKIKPEAFEANRFYTVINKKSGEIVPMEVNFNFDDPNLIILPLAFGKRQGREFIWNDLLSLETGSLKLANGRVIEKTLYNRRTRQDEPALFVALTFERREVLDSSNIKPMNLIGVDRGENIPAVIALTDPEGCPLSRFKDSLGNPTHILRIGESYKEKQRTIQAKKEVEQRRAGGYSRKYASKAKNLADDMVRNTARDLLYYAVTQDAMLIFENLSRGFGRQGKRTFMAERQYTRMEDWLTAKLAYEGLPSKTYLSKTLAQYTSKTCSNCGFTITSADYDRVLEKLKKTATGWMTTINGKELKVEGQITYYNRYKRQNVVKDLSVELDRLSEESVNNDISSWTKGRSGEALSLLKKRFSHRPVQEKFVCLNCGFETHADEQAALNIARSWLFLRSQEYKKYQTNKTTGNTDKRAFVETWQSFYRKKLKEVWKPAV

SEQ ID NO: 29540 - protein, 979 aa, synthetic construct
  REGION 1..979: note = engineered CasX variant
QEIKRINKIRRRLVKDSNTKKAGKTGPMKTLLVRVMTPDLRERLENLRKKPENIPQPISNTSRANLNKLLTDYTEMKKAILHVYWEEFQKDPVGLMSRVAQPASKKIDQNKLKPEMDEKGNLTTAGFACSQCGQPLFVYKLEQVSEKGKAYTNYFGRCNVAEHEKLILLAQLKPEKDSDEAVTYSLGKFGQRALDFYSIHVTKESTHPVKPLAQIAGNRYASGPVGKALSDACMGTIASFLSKYQDIIIEHQKVVKGNQKRLESLRELAGKENLEYPSVTLPPQPHTKEGVDAYNEVIARVRMWVNLNLWQKLKLSRDDAKPLLRLKGFPSFPLVERQANAEVDWWDMVCNVKKLINEKKEDGKVFWQNLAIYKRQEALRPYLSSEEDRKKGKKFARYQLGDLLLHLEKKHGEDWGKVYDEAWERIDKKVEGLSKHIKLEEERRSEDAQSKAALTDWLRAKASFVIEGLKEADKDEFCRCELKLQKWYGDLRGKPFAIEAENSILDISGFSKQYNCAFIWQKDGVKKLNLYLIINYFKGGKLRFKKIKPEAFEANRFYTVINKKSGEIVPMEVNFNFDDPNLIILPLAFGKRQGREFIWNDLLSLETGSLKLANGRVIEKTLYNRRTRQDEPALFVALTFERREVLDSSNIKPMNLIGVDRGENIPAVIALTDPEGCPLSRFKDSLGNPTHILRIGESYKEKQRTIQAKKEVEQRRAGGYSRKYASKAKNLADDMVRNTARDLLYYAVTQDAMLIFENLSRGFGRQGKRTFMAERQYTRMEDWLTAKLAYEGLPSKTYLSKTLAQYTSKTCSNCGFTITSADYDRVLEKLKKTATGWMTTINGKELKVEGQITYYNRYKRQNVVKDLSVELDRLSEESVNNDISSWTKGRSGEALSLLKKRFSHRPVQEKFVCLNCGFETHADEQAALNIARSWLFLRSQEYKKYQTNKTTGNTDKRAFVETWQSFYRKKLKEVWKPAV

SEQ ID NO: 29541 - protein, 979 aa, synthetic construct
  REGION 1..979: note = engineered CasX variant
QEIKRINKIRRRLVKDSNTKKAGKTGPMKTLLVRVMTPDLRERLENLRKKPENIPQPISNTSRANLNKLLTDYTEMKKAILHVYWEEFQKDPVGLMSRVAQPASKKIDQNKLKPEMDEKGNLTTAGFACSQCGQPLFVYKLEQVSEKGKAYTNYFGRCNVAEHEKLILLAQLKPEKDSDEAVTYSLGKFGQRALDFYSIHVTKESTHPVKPLAQIAGNRYASGPVGKALSDACMGTIASFLSKYQDIIIEHQKVVKGNQKRLESLRELAGKENLEYPSVTLPPQPHTKEGVDAYNEVIARVRMWVNLNLWQKLKLSRDDAKPLLRLKGFPSFPLVERQANAEVDWWDMVCNVKKLINEKKEDGKVFWQNLAGYKRQEALRPYLSSEEDREKGKKFARYQLGDLLLHLEKKHGEDWGKVYDEAWERIDKKVEGLSKHIKLEEERRSEDAQSKAALTDWLRAKASFVIEGLKEADKDEFCRCELKLQKWYGDLRGKPFAIEAENSILDISGFSKQYNCAFIWQKDGVKKLNLYLIINYFKGGKLRFKKIKPEAFEANRFYTVINKKSGEIVPMEVNFNFDDPNLIILPLAFGKRQGREFIWNDLLSLETGSLKLANGRVIEKTLYNRRTRQDEPALFVALTFERREVLDSSNIKPMNLIGVDRGENIPAVIALTDPEGCPLSRFKDSLGNPTHILRIGESYKEKQRTIQAKKEVEQRRAGGYSRKYASKAKNLADDMVRNTARDLLYYAVTQDAMLIFENLSRGFGRQGKRTFMAERQYTRMEDWLTAKLAYEGLPSKTYLSKTLAQYTSKTCSNCGFTITSADYDRVLEKLKKTATGWMTTINGKELKVEGQITYYNRYKRQNVVKDLSVELDRLSEESVNNDISSWTKGRSGEALSLLKKRFSHRPVQEKFVCLNCGFETHADEQAALNIARSWLFLRSQEYKKYQTNKTTGNTDKRAFVETWQSFYRKKLKEVWKPAV

SEQ ID NO: 29542 - protein, 979 aa, synthetic construct
  REGION 1..979: note = engineered CasX variant
QEIKRINKIRRRLVKDSNTKKAGKTGPMKTLLVRVMTPDLRERLENLRKKPENIPQPISNTSRANLNKLLTDYTEMKKAILHVYWEEFQKDPVGLMSRVAQPASKKIDQNKLKPEMDEKGNLTTAGFACSQCGQPLFVYKLEQVSEKGKAYTNYFGRCNVAEHEKLILLAQLKPEKDSDEAVTYSLGKFGQRALDFYSIHVTKESTHPVKPLAQIAGNRYASGPVGKALSDACMGTIASFLSKYQDIIIEHQKVVKGNQKRLESLRELAGKENLEYPSVTLPPQPHTKEGVDAYNEVIARVRMWVNLNLWQKLKLSRDDAKPLLRLKGFPSFPLVERQANAEVDWWDMVCNVKKLINEKKEDGKVFWQNLAGYKRQEALRPYLSSEEDRKKGKKFARYQLGDLLLHLEKKHGEDWGKVYDEAWERIDKKVEGLSKHIKLEEERRSEDAQSKAALTDWLRAKASFVIEGLKEADKDEFCRCELKLQKWYGDLRGKPFAIEAENSILDISGFSKQYNCAFIWQKDGVKKLNLYLIINYFKGGKLRFKKIKPEAFEANRFYTVINKKSGEIVIMEVNFNFDDPNLIILPLAFGKRQGREFIWNDLLSLETGSLKLANGRVIEKTLYNRRTRQDEPALFVALTFERREVLDSSNIKPMNLIGVDRGENIPAVIALTDPEGCPLSRFKDSLGNPTHILRIGESYKEKQRTIQAKKEVEQRRAGGYSRKYASKAKNLADDMVRNTARDLLYYAVTQDAMLIFENLSRGFGRQGKRTFMAERQYTRMEDWLTAKLAYEGLPSKTYLSKTLAQYTSKTCSNCGFTITSADYDRVLEKLKKTATGWMTTINGKELKVEGQITYYNRYKRQNVVKDLSVELDRLSEESVNNDISSWTKGRSGEALSLLKKRFSHRPVQEKFVCLNCGFETHADEQAALNIARSWLFLRSQEYKKYQTNKTTGNTDKRAFVETWQSFYRKKLKEVWKPAV

SEQ ID NO: 29543 - protein, 978 aa, synthetic construct
  REGION 1..978: note = engineered CasX variant
QEIKRINKIRRRLVKDSNTKKAGKTGPMKTLLVRVMTPDLRERLENLRKKPENIPQPISNTSRANLNKLLTDYTEMKKAILHVYWEEFQKDPVGLMSRVAQPASKKIDQNKLKPEMDEKGNLTTAGFACSQCGQPLFVYKLEQVSEKGKAYTNYFGRCNVAEHEKLILLAQLKPEKDSDEAVTYSLGKFGQRALDFYSIHVTKESTHPVKPLAQIAGNRYASGPVGKALSGACMGTIASFLSKYQDIIIEHQKVVKGNQKRLESLRELAGKENLEYPSVTLPPQPHTKEGVDAYNEVIARVRMWVNLNLWQKLKLSRDDAKPLLRLKGFPSFPLVERQANEVDWWDMVCNVKKLINEKKEDGKVFWQNLAGYKRQEALRPYLSSEEDRKKGKKFARTQLGDLLLHLEKKHGEDWGKVYDEAWERIDKKVEGLSKHIKLEEERRSEDAQSKAALTDWLRAKASFVIEGLKEADKDEFCRCELKLQKWYGDLRGKPFAIEAENSILDISGFSKQYNCAFIWQKDGVKKLNLYLIINYFKGGKLRFKKIKPEAFEANRFYTVINKKSGEIVPMEVNFNFDDPNLIILPLAFGKRQGREFIWNDLLSLETGSLKLANGRVIEKTLYNRRTRQDEPALFVALTFERREVLDSSNIKPMNLIGVDRGENIPAVIALTDPEGCPLSRFKDSLGNPTHILRIGESYKEKQRTIQAKKEVEQRRAGGYSRKYASKAKNLADDMVRNTARDLLYYAVTQDAMLIFENLSRGFGRQGKRTFMAERQYTRMEDWLTAKLAYEGLPSKTYLSKTLAQYTSKTCSNCGFTITSADYDRVLEKLKKTATGWMTTINGKELKVEGQITYYNRYKRQNVVKDLSVELDRLSEESVNNDISSWTKGRSGEALSLLKKRFSHRPVQEKFVCLNCGFETHADEQAALNIARSWLFLRSQEYKKYQTNKTTGNTDKRAFVETWQSFYRKKLKEVWKPAV

SEQ ID NO: 29544 - protein, 978 aa, synthetic construct
  REGION 1..978: note = engineered CasX variant
QEIKRINKIRRRLVKDSNTKKAGKTGPMKTLLVRVMTPDLRERLENLRKKPENIPQPISNTSRANLNKLLTDYTEMKKAILHVYWEEFQKDPVGLMSRVAQPASKKIDQNKLKPEMDEKGNLTTAGFACSQCGQPLFVYKLEQVSEKGKAYTNYFGRCNVAEHEKLILLAQLKPEKDSDEAVTYSLGKFGQRALDFYSIHVTKESTHPVKPLAQIAGNRYASGPVGKALSDACMGTIASFLSKYQDIIIEHQKVVKGNQKRLESLRELAGKENLEYPSVTLPPQPHTKEGVDAYNEVIARVRMWVNLNLWQKLKLSRDDAKPLLRLKNFPSFPLVERQANEVDWWDMVCNVKKLINEKKEDGKVFWQNLAGYKRQEALRPYLSSEEDRKKGKKFARTQLGDLLLHLEKKHGEDWGKVYDEAWERIDKKVEGLSKHIKLEEERRSEDAQSKAALTDWLRAKASFVIEGLKEADKDEFCRCELKLQKWYGDLRGKPFAIEAENSILDISGFSKQYNCAFIWQKDGVKKLNLYLIINYFKGGKLRFKKIKPEAFEANRFYTVINKKSGEIVPMEVNFNFDDPNLIILPLAFGKRQGREFIWNDLLSLETGSLKLANGRVIEKTLYNRRTRQDEPALFVALTFERREVLDSSNIKPMNLIGVDRGENIPAVIALTDPEGCPLSRFKDSLGNPTHILRIGESYKEKQRTIQAKKEVEQRRAGGYSRKYASKAKNLADDMVRNTARDLLYYAVTQDAMLIFENLSRGFGRQGKRTFMAERQYTRMEDWLTAKLAYEGLPSKTYLSKTLAQYTSKTCSNCGFTITSADYDRVLEKLKKTATGWMTTINGKELKVEGQITYYNRYKRQNVVKDLSVELDRLSEESVNNDISSWTKGRSGEALSLLKKRFSHRPVQEKFVCLNCGFETHADEQAALNIARSWLFLRSQEYKKYQTNKTTGNTDKRAFVETWQSFYRKKLKEVWKPAV

SEQ ID NO: 29545 - protein, 978 aa, synthetic construct
  REGION 1..978: note = engineered CasX variant
QEIKRINKIRRRLVKDSNTKKAGKTGPMKTLLVRVMTPDLRERLENLRKKPENIPQPISNTSRANLNKLLTDYTEMKKAILHVYWEEFQKDPVGLMSRVAQPASKKIDQNKLKPEMDEKGNLTTAGFACSQCGQPLFVYKLEQVSEKGKAYTNYFGRCNVAEHEKLILLAQLKPEKDSDEAVTYSLGKFGQRALDFYSIHVTKESTHPVKPLAQIAGNRYASGPVGKALSDACMGTIASFLSKYQDIIIEHQKVVKGNQKRLESLRELAGKENLEYPSVTLPPQPHTKEGVDAYNEVIARVRMWVNLNLWQKLKLSRDDAKPLLRLKGFPSFPLVERQANEVDWWDMVCNVKKLINEKKEDGKVFWQNLAGYKRQEALRPYLSSEEDRKKGKKFARTQLGDLLNHLEKKHGEDWGKVYDEAWERIDKKVEGLSKHIKLEEERRSEDAQSKAALTDWLRAKASFVIEGLKEADKDEFCRCELKLQKWYGDLRGKPFAIEAENSILDISGFSKQYNCAFIWQKDGVKKLNLYLIINYFKGGKLRFKKIKPEAFEANRFYTVINKKSGEIVPMEVNFNFDDPNLIILPLAFGKRQGREFIWNDLLSLETGSLKLANGRVIEKTLYNRRTRQDEPALFVALTFERREVLDSSNIKPMNLIGVDRGENIPAVIALTDPEGCPLSRFKDSLGNPTHILRIGESYKEKQRTIQAKKEVEQRRAGGYSRKYASKAKNLADDMVRNTARDLLYYAVTQDAMLIFENLSRGFGRQGKRTFMAERQYTRMEDWLTAKLAYEGLPSKTYLSKTLAQYTSKTCSNCGFTITSADYDRVLEKLKKTATGWMTTINGKELKVEGQITYYNRYKRQNVVKDLSVELDRLSEESVNNDISSWTKGRSGEALSLLKKRFSHRPVQEKFVCLNCGFETHADEQAALNIARSWLFLRSQEYKKYQTNKTTGNTDKRAFVETWQSFYRKKLKEVWKPAV

SEQ ID NO: 29546 - protein, 978 aa, synthetic construct
  REGION 1..978: note = engineered CasX variant
QEIKRINKIRRRLVKDSNTKKAGKTGPMKTLLVRVMTPDLRERLENLRKKPENIPQPISNTSRANLNKLLTDYTEMKKAILHVYWEEFQKDPVGLMSRVAQPASKKIDQNKLKPEMDEKGNLTTAGFACSQCGQPLFVYKLEQVSEKGKAYTNYFGRCNVAEHEKLILLAQLKPEKDSDEAVTYSLGKFGQRALDFYSIHVTKESTHPVKPLAQIAGNRYASGPVGKALSDACMGTIASFLSKYQDIIIEHQKVVKGNQKRLESLRELAGKENLEYPSVTLPPQPHTKEGVDAYNEVIARVRMWVNLNLWQKLKLSRDDAKPLLRLKGFPSFPLVERQANEVDWWDMVCNVKKLINEKKEDGKVFWQNLAGYKRQEALRPYLSSEEDRKKGKKFARTQLGDLLWHLEKKHGEDWGKVYDEAWERIDKKVEGLSKHIKLEEERRSEDAQSKAALTDWLRAKASFVIEGLKEADKDEFCRCELKLQKWYGDLRGKPFAIEAENSILDISGFSKQYNCAFIWQKDGVKKLNLYLIINYFKGGKLRFKKIKPEAFEANRFYTVINKKSGEIVPMEVNFNFDDPNLIILPLAFGKRQGREFIWNDLLSLETGSLKLANGRVIEKTLYNRRTRQDEPALFVALTFERREVLDSSNIKPMNLIGVDRGENIPAVIALTDPEGCPLSRFKDSLGNPTHILRIGESYKEKQRTIQAKKEVEQRRAGGYSRKYASKAKNLADDMVRNTARDLLYYAVTQDAMLIFENLSRGFGRQGKRTFMAERQYTRMEDWLTAKLAYEGLPSKTYLSKTLAQYTSKTCSNCGFTITSADYDRVLEKLKKTATGWMTTINGKELKVEGQITYYNRYKRQNVVKDLSVELDRLSEESVNNDISSWTKGRSGEALSLLKKRFSHRPVQEKFVCLNCGFETHADEQAALNIARSWLFLRSQEYKKYQTNKTTGNTDKRAFVETWQSFYRKKLKEVWKPAV

SEQ ID NO: 29547 - protein, 978 aa, synthetic construct
  REGION 1..978: note = engineered CasX variant
QEIKRINKIRRRLVKDSNTKKAGKTGPMKTLLVRVMTPDLRERLENLRKKPENIPQPISNTSRANLNKLLTDYTEMKKAILHVYWEEFQKDPVGLMSRVAQPASKKIDQNKLKPEMDEKGNLTTAGFACSQCGQPLFVYKLEQVSEKGKAYTNYFGRCNVAEHEKLILLAQLKPEKDSDEAVTYSLGKFGQRALDFYSIHVTKESTHPVKPLAQIAGNRYASGPVGKALSDACMGTIASFLSKYQDIIIEHQKVVKGNQKRLESLRELAGKENLEYPSVTLPPQPHTKEGVDAYNEVIARVRMWVNLNLWQKLKLSRDDAKPLLRLKGFPSFPLVERQANEVDWWDMVCNVKKLINEKKEDGKVFWQNLAGYKRQEALRPYLSSEEDRKKGKKFARTQLGDLLLHLYKKHGEDWGKVYDEAWERIDKKVEGLSKHIKLEEERRSEDAQSKAALTDWLRAKASFVIEGLKEADKDEFCRCELKLQKWYGDLRGKPFAIEAENSILDISGFSKQYNCAFIWQKDGVKKLNLYLIINYFKGGKLRFKKIKPEAFEANRFYTVINKKSGEIVPMEVNFNFDDPNLIILPLAFGKRQGREFIWNDLLSLETGSLKLANGRVIEKTLYNRRTRQDEPALFVALTFERREVLDSSNIKPMNLIGVDRGENIPAVIALTDPEGCPLSRFKDSLGNPTHILRIGESYKEKQRTIQAKKEVEQRRAGGYSRKYASKAKNLADDMVRNTARDLLYYAVTQDAMLIFENLSRGFGRQGKRTFMAERQYTRMEDWLTAKLAYEGLPSKTYLSKTLAQYTSKTCSNCGFTITSADYDRVLEKLKKTATGWMTTINGKELKVEGQITYYNRYKRQNVVKDLSVELDRLSEESVNNDISSWTKGRSGEALSLLKKRFSHRPVQEKFVCLNCGFETHADEQAALNIARSWLFLRSQEYKKYQTNKTTGNTDKRAFVETWQSFYRKKLKEVWKPAV

SEQ ID NO: 29548 - protein, 978 aa, synthetic construct
  REGION 1..978: note = engineered CasX variant
QEIKRINKIRRRLVKDSNTKKAGKTGPMKTLLVRVMTPDLRERLENLRKKPENIPQPISNTSRANLNKLLTDYTEMKKAILHVYWEEFQKDPVGLMSRVAQPASKKIDQNKLKPEMDEKGNLTTAGFACSQCGQPLFVYKLEQVSEKGKAYTNYFGRCNVAEHEKLILLAQLKPEKDSDEAVTYSLGKFGQRALDFYSIHVTKESTHPVKPLAQIAGNRYASGPVGKALSDACMGTIASFLSKYQDIIIEHQKVVKGNQKRLESLRELAGKENLEYPSVTLPPQPHTKEGVDAYNEVIARVRMWVNLNLWQKLKLSRDDAKPLLRLKGFPSFPLVERQANEVDWWDMVCNVKKLINEKKEDGKVFWQNLAGYKRQEALRPYLSSEEDRKKGKKFARTQLGDLLLHLEKKHPEDWGKVYDEAWERIDKKVEGLSKHIKLEEERRSEDAQSKAALTDWLRAKASFVIEGLKEADKDEFCRCELKLQKWYGDLRGKPFAIEAENSILDISGFSKQYNCAFIWQKDGVKKLNLYLIINYFKGGKLRFKKIKPEAFEANRFYTVINKKSGEIVPMEVNFNFDDPNLIILPLAFGKRQGREFIWNDLLSLETGSLKLANGRVIEKTLYNRRTRQDEPALFVALTFERREVLDSSNIKPMNLIGVDRGENIPAVIALTDPEGCPLSRFKDSLGNPTHILRIGESYKEKQRTIQAKKEVEQRRAGGYSRKYASKAKNLADDMVRNTARDLLYYAVTQDAMLIFENLSRGFGRQGKRTFMAERQYTRMEDWLTAKLAYEGLPSKTYLSKTLAQYTSKTCSNCGFTITSADYDRVLEKLKKTATGWMTTINGKELKVEGQITYYNRYKRQNVVKDLSVELDRLSEESVNNDISSWTKGRSGEALSLLKKRFSHRPVQEKFVCLNCGFETHADEQAALNIARSWLFLRSQEYKKYQTNKTTGNTDKRAFVETWQSFYRKKLKEVWKPAV

SEQ ID NO: 29549 - protein, 979 aa, synthetic construct
  REGION 1..979: note = engineered CasX variant
QEIKRINKIRRRLVKDSNTKKAGKTGPMKTLLVRVMTPDLRERLENLRKKPENIPQPISNTSRANLNKLLTDYTEMKKAILHVYWEEFQKDPVGLMSRVAQPASKKIDQNKLKPEMDEKGNLTTAGFACSQCGQPLFVYKLEQVSEKGKAYTNYFGRCNVAEHEKLILLAQLKPEKDSDEAVTYSLGKFGQRALDFYSIHVTKESTHPVKPLAQIAGNRYASGPVGKALSDACMGTIASFLSKYQDIIIEHQKVVKGNQKRLESLRELAGKENLEYPSVTLPPQPHTKEGVDAYNEVIARVRMWVNLNLWQKLKLSRDDAKPLLRLKGFPSFPLVERQANEVDWWDMVCNVKKLINEKKEDGKVFWQNLAGYKRQEALRPYLSSEEDRKKGKKFARTQLGDLLLHLEKKHGERDWGKVYDEAWERIDKKVEGLSKHIKLEEERRSEDAQSKAALTDWLRAKASFVIEGLKEADKDEFCRCELKLQKWYGDLRGKPFAIEAENSILDISGFSKQYNCAFIWQKDGVKKLNLYLIINYFKGGKLRFKKIKPEAFEANRFYTVINKKSGEIVPMEVNFNFDDPNLIILPLAFGKRQGREFIWNDLLSLETGSLKLANGRVIEKTLYNRRTRQDEPALFVALTFERREVLDSSNIKPMNLIGVDRGENIPAVIALTDPEGCPLSRFKDSLGNPTHILRIGESYKEKQRTIQAKKEVEQRRAGGYSRKYASKAKNLADDMVRNTARDLLYYAVTQDAMLIFENLSRGFGRQGKRTFMAERQYTRMEDWLTAKLAYEGLPSKTYLSKTLAQYTSKTCSNCGFTITSADYDRVLEKLKKTATGWMTTINGKELKVEGQITYYNRYKRQNVVKDLSVELDRLSEESVNNDISSWTKGRSGEALSLLKKRFSHRPVQEKFVCLNCGFETHADEQAALNIARSWLFLRSQEYKKYQTNKTTGNTDKRAFVETWQSFYRKKLKEVWKPAV

SEQ ID NO: 29550 - protein, 979 aa, synthetic construct
  REGION 1..979: note = engineered CasX variant
QEIKRINKIRRRLVKDSNTKKAGKTGPMKTLLVRVMTPDLRERLENLRKKPENIPQPISNTSRANLNKLLTDYTEMKKAILHVYWEEFQKDPVGLMSRVAQPASKKIDQNKLKPEMDEKGNLTTAGFACSQCGQPLFVYKLEQVSEKGKAYTNYFGRCNVAEHEKLILLAQLKPEKDSDEAVTYSLGKFGQRALDFYSIHVTKESTHPVKPLAQIAGNRYASGPVGKALSDACMGTIASFLSKYQDIIIEHQKVVKGNQKRLESLRELAGKENLEYPSVTLPPQPHTKEGVDAYNEVIARVRMWVNLNLWQKLKLSRDDAKPLLRLKGFPSFPLVERQANEVDWWDMVCNVKKLINEKKEDGKVFWQNLAGYKRQEALRPYLSSEEDRKKGKKFARTQLGDLLLHLEKKHGEYDWGKVYDEAWERIDKKVEGLSKHIKLEEERRSEDAQSKAALTDWLRAKASFVIEGLKEADKDEFCRCELKLQKWYGDLRGKPFAIEAENSILDISGFSKQYNCAFIWQKDGVKKLNLYLIINYFKGGKLRFKKIKPEAFEANRFYTVINKKSGEIVPMEVNFNFDDPNLIILPLAFGKRQGREFIWNDLLSLETGSLKLANGRVIEKTLYNRRTRQDEPALFVALTFERREVLDSSNIKPMNLIGVDRGENIPAVIALTDPEGCPLSRFKDSLGNPTHILRIGESYKEKQRTIQAKKEVEQRRAGGYSRKYASKAKNLADDMVRNTARDLLYYAVTQDAMLIFENLSRGFGRQGKRTFMAERQYTRMEDWLTAKLAYEGLPSKTYLSKTLAQYTSKTCSNCGFTITSADYDRVLEKLKKTATGWMTTINGKELKVEGQITYYNRYKRQNVVKDLSVELDRLSEESVNNDISSWTKGRSGEALSLLKKRFSHRPVQEKFVCLNCGFETHADEQAALNIARSWLFLRSQEYKKYQTNKTTGNTDKRAFVETWQSFYRKKLKEVWKPAV

SEQ ID NO: 29551 - protein, 978 aa, synthetic construct
  REGION 1..978: note = engineered CasX variant
QEIKRINKIRRRLVKDSNTKKAGKTGPMKTLLVRVMTPDLRERLENLRKKPENIPQPISNTSRANLNKLLTDYTEMKKAILHVYWEEFQKDPVGLMSRVAQPASKKIDQNKLKPEMDEKGNLTTAGFACSQCGQPLFVYKLEQVSEKGKAYTNYFGRCNVAEHEKLILLAQLKPEKDSDEAVTYSLGKFGQRALDFYSIHVTKESTHPVKPLAQIAGNRYASGPVGKALSDACMGTIASFLSKYQDIIIEHQKVVKGNQKRLESLRELAGKENLEYPSVTLPPQPHTKEGVDAYNEVIARVRMWVNLNLWQKLKLSRDDAKPLLRLKGFPSFPLVERQANEVDWWDMVCNVKKLINEKKEDGKVFWQNLAGYKRQEALRPYLSSEEDRKKGKKFARTQLGDLLLHLEKKHGEDWGDVYDEAWERIDKKVEGLSKHIKLEEERRSEDAQSKAALTDWLRAKASFVIEGLKEADKDEFCRCELKLQKWYGDLRGKPFAIEAENSILDISGFSKQYNCAFIWQKDGVKKLNLYLIINYFKGGKLRFKKIKPEAFEANRFYTVINKKSGEIVPMEVNFNFDDPNLIILPLAFGKRQGREFIWNDLLSLETGSLKLANGRVIEKTLYNRRTRQDEPALFVALTFERREVLDSSNIKPMNLIGVDRGENIPAVIALTDPEGCPLSRFKDSLGNPTHILRIGESYKEKQRTIQAKKEVEQRRAGGYSRKYASKAKNLADDMVRNTARDLLYYAVTQDAMLIFENLSRGFGRQGKRTFMAERQYTRMEDWLTAKLAYEGLPSKTYLSKTLAQYTSKTCSNCGFTITSADYDRVLEKLKKTATGWMTTINGKELKVEGQITYYNRYKRQNVVKDLSVELDRLSEESVNNDISSWTKGRSGEALSLLKKRFSHRPVQEKFVCLNCGFETHADEQAALNIARSWLFLRSQEYKKYQTNKTTGNTDKRAFVETWQSFYRKKLKEVWKPAV

SEQ ID NO: 29552 - protein, 978 aa, synthetic construct
  REGION 1..978: note = engineered CasX variant
QEIKRINKIRRRLVKDSNTKKAGKTGPMKTLLVRVMTPDLRERLENLRKKPENIPQPISNTSRANLNKLLTDYTEMKKAILHVYWEEFQKDPVGLMSRVAQPASKKIDQNKLKPEMDEKGNLTTAGFACSQCGQPLFVYKLEQVSEKGKAYTNYFGRCNVAEHEKLILLAQLKPEKDSDEAVTYSLGKFGQRALDFYSIHVTKESTHPVKPLAQIAGNRYASGPVGKALSDACMGTIASFLSKYQDIIIEHQKVVKGNQKRLESLRELAGKENLEYPSVTLPPQPHTKEGVDAYNEVIARVRMWVNLNLWQKLKLSRDDAKPLLRLKGFPSFPLVERQANEVDWWDMVCNVKKLINEKKEDGKVFWQNLAGYKRQEALRPYLSSEEDRKKGKKFARTQLGDLLLHLEKKHGEDWGKVYGEAWERIDKKVEGLSKHIKLEEERRSEDAQSKAALTDWLRAKASFVIEGLKEADKDEFCRCELKLQKWYGDLRGKPFAIEAENSILDISGFSKQYNCAFIWQKDGVKKLNLYLIINYFKGGKLRFKKIKPEAFEANRFYTVINKKSGEIVPMEVNFNFDDPNLIILPLAFGKRQGREFIWNDLLSLETGSLKLANGRVIEKTLYNRRTRQDEPALFVALTFERREVLDSSNIKPMNLIGVDRGENIPAVIALTDPEGCPLSRFKDSLGNPTHILRIGESYKEKQRTIQAKKEVEQRRAGGYSRKYASKAKNLADDMVRNTARDLLYYAVTQDAMLIFENLSRGFGRQGKRTFMAERQYTRMEDWLTAKLAYEGLPSKTYLSKTLAQYTSKTCSNCGFTITSADYDRVLEKLKKTATGWMTTINGKELKVEGQITYYNRYKRQNVVKDLSVELDRLSEESVNNDISSWTKGRSGEALSLLKKRFSHRPVQEKFVCLNCGFETHADEQAALNIARSWLFLRSQEYKKYQTNKTTGNTDKRAFVETWQSFYRKKLKEVWKPAV

SEQ ID NO: 29553 - protein, 978 aa, synthetic construct
  REGION 1..978: note = engineered CasX variant
QEIKRINKIRRRLVKDSNTKKAGKTGPMKTLLVRVMTPDLRERLENLRKKPENIPQPISNTSRANLNKLLTDYTEMKKAILHVYWEEFQKDPVGLMSRVAQPASKKIDQNKLKPEMDEKGNLTTAGFACSQCGQPLFVYKLEQVSEKGKAYTNYFGRCNVAEHEKLILLAQLKPEKDSDEAVTYSLGKFGQRALDFYSIHVTKESTHPVKPLAQIAGNRYASGPVGKALSDACMGTIASFLSKYQDIIIEHQKVVKGNQKRLESLRELAGKENLEYPSVTLPPQPHTKEGVDAYNEVIARVRMWVNLNLWQKLKLSRDDAKPLLRLKGFPSFPLVERQANEVDWWDMVCNVKKLINEKKEDGKVFWQNLAGYKRQEALRPYLSSEEDRKKGKKFARTQLGDLLLHLEKKHGEDWGKVYDEAWERIDKKVEGLSKHIKLEEERRSEDAQSKAALTDWLRAKASFVIEGKKEADKDEFCRCELKLQKWYGDLRGKPFAIEAENSILDISGFSKQYNCAFIWQKDGVKKLNLYLIINYFKGGKLRFKKIKPEAFEANRFYTVINKKSGEIVPMEVNFNFDDPNLIILPLAFGKRQGREFIWNDLLSLETGSLKLANGRVIEKTLYNRRTRQDEPALFVALTFERREVLDSSNIKPMNLIGVDRGENIPAVIALTDPEGCPLSRFKDSLGNPTHILRIGESYKEKQRTIQAKKEVEQRRAGGYSRKYASKAKNLADDMVRNTARDLLYYAVTQDAMLIFENLSRGFGRQGKRTFMAERQYTRMEDWLTAKLAYEGLPSKTYLSKTLAQYTSKTCSNCGFTITSADYDRVLEKLKKTATGWMTTINGKELKVEGQITYYNRYKRQNVVKDLSVELDRLSEESVNNDISSWTKGRSGEALSLLKKRFSHRPVQEKFVCLNCGFETHADEQAALNIARSWLFLRSQEYKKYQTNKTTGNTDKRAFVETWQSFYRKKLKEVWKPAV

SEQ ID NO: 29554 - protein, 978 aa, synthetic construct
  REGION 1..978: note = engineered CasX variant
QEIKRINKIRRRLVKDSNTKKAGKTGPMKTLLVRVMTPDLRERLENLRKKPENIPQPISNTSRANLNKLLTDYTEMKKAILHVYWEEFQKDPVGLMSRVAQPASKKIDQNKLKPEMDEKGNLTTAGFACSQCGQPLFVYKLEQVSEKGKAYTNYFGRCNVAEHEKLILLAQLKPEKDSDEAVTYSLGKFGQRALDFYSIHVTKESTHPVKPLAQIAGNRYASGPVGKALSDACMGTIASFLSKYQDIIIEHQKVVKGNQKRLESLRELAGKENLEYPSVTLPPQPHTKEGVDAYNEVIARVRMWVNLNLWQKLKLSRDDAKPLLRLKGFPSFPLVERQANEVDWWDMVCNVKKLINEKKEDGKVFWQNLAGYKRQEALRPYLSSEEDRKKGKKFARTQLGDLLLHLEKKHGEDWGKVYDEAWERIDKKVEGLSKHIKLEEERRSEDAQSKAALTDWLRAKASFVIEGSKEADKDEFCRCELKLQKWYGDLRGKPFAIEAENSILDISGFSKQYNCAFIWQKDGVKKLNLYLIINYFKGGKLRFKKIKPEAFEANRFYTVINKKSGEIVPMEVNFNFDDPNLIILPLAFGKRQGREFIWNDLLSLETGSLKLANGRVIEKTLYNRRTRQDEPALFVALTFERREVLDSSNIKPMNLIGVDRGENIPAVIALTDPEGCPLSRFKDSLGNPTHILRIGESYKEKQRTIQAKKEVEQRRAGGYSRKYASKAKNLADDMVRNTARDLLYYAVTQDAMLIFENLSRGFGRQGKRTFMAERQYTRMEDWLTAKLAYEGLPSKTYLSKTLAQYTSKTCSNCGFTITSADYDRVLEKLKKTATGWMTTINGKELKVEGQITYYNRYKRQNVVKDLSVELDRLSEESVNNDISSWTKGRSGEALSLLKKRFSHRPVQEKFVCLNCGFETHADEQAALNIARSWLFLRSQEYKKYQTNKTTGNTDKRAFVETWQSFYRKKLKEVWKPAV

SEQ ID NO: 29555 - protein, 979 aa, synthetic construct
  REGION 1..979: note = engineered CasX variant
QEIKRINKIRRRLVKDSNTKKAGKTGPMKTLLVRVMTPDLRERLENLRKKPENIPQPISNTSRANLNKLLTDYTEMKKAILHVYWEEFQKDPVGLMSRVAQPASKKIDQNKLKPEMDEKGNLTTAGFACSQCGQPLFVYKLEQVSEKGKAYTNYFGRCNVAEHEKLILLAQLKPEKDSDEAVTYSLGKFGQRALDFYSIHVTKESTHPVKPLAQIAGNRYASGPVGKALSDACMGTIASFLSKYQDIIIEHQKVVKGNQKRLESLRELAGKENLEYPSVTLPPQPHTKEGVDAYNEVIARVRMWVNLNLWQKLKLSRDDAKPLLRLKGFPSFPLVERQANEVDWWDMVCNVKKLINEKKEDGKVFWQNLAGYKRQEALRPYLSSEEDRKKGKKFARTQLGDLLLHLEKKHGEDWGKVYDEAWERIDKKVEGLSKHIKLEEERRSEDAQSKAALTDWLRAKASFVIEGLKEADDKDEFCRCELKLQKWYGDLRGKPFAIEAENSILDISGFSKQYNCAFIWQKDGVKKLNLYLIINYFKGGKLRFKKIKPEAFEANRFYTVINKKSGEIVPMEVNFNFDDPNLIILPLAFGKRQGREFIWNDLLSLETGSLKLANGRVIEKTLYNRRTRQDEPALFVALTFERREVLDSSNIKPMNLIGVDRGENIPAVIALTDPEGCPLSRFKDSLGNPTHILRIGESYKEKQRTIQAKKEVEQRRAGGYSRKYASKAKNLADDMVRNTARDLLYYAVTQDAMLIFENLSRGFGRQGKRTFMAERQYTRMEDWLTAKLAYEGLPSKTYLSKTLAQYTSKTCSNCGFTITSADYDRVLEKLKKTATGWMTTINGKELKVEGQITYYNRYKRQNVVKDLSVELDRLSEESVNNDISSWTKGRSGEALSLLKKRFSHRPVQEKFVCLNCGFETHADEQAALNIARSWLFLRSQEYKKYQTNKTTGNTDKRAFVETWQSFYRKKLKEVWKPAV

SEQ ID NO: 29556 - protein, 979 aa, synthetic construct
  REGION 1..979: note = engineered CasX variant
QEIKRINKIRRRLVKDSNTKKAGKTGPMKTLLVRVMTPDLRERLENLRKKPENIPQPISNTSRANLNKLLTDYTEMKKAILHVYWEEFQKDPVGLMSRVAQPASKKIDQNKLKPEMDEKGNLTTAGFACSQCGQPLFVYKLEQVSEKGKAYTNYFGRCNVAEHEKLILLAQLKPEKDSDEAVTYSLGKFGQRALDFYSIHVTKESTHPVKPLAQIAGNRYASGPVGKALSDACMGTIASFLSKYQDIIIEHQKVVKGNQKRLESLRELAGKENLEYPSVTLPPQPHTKEGVDAYNEVIARVRMWVNLNLWQKLKLSRDDAKPLLRLKGFPSFPLVERQANEVDWWDMVCNVKKLINEKKEDGKVFWQNLAGYKRQEALRPYLSSEEDRKKGKKFARTQLGDLLLHLEKKHGEDWGKVYDEAWERIDKKVEGLSKHIKLEEERRSEDAQSKAALTDWLRAKASFVIEGLKEADKDEFCRCELKLQKWYGDLRGKPFAIEAENSILDISGFSKQYNCAFIWQKDGVKKLNLYLIINYFKGGKLRFKKIKPEAFEANRFYTVINKKSGEIVPMEVNFNFDDPNLIILPLAFGKRQGREFIWNDLLSLETGSLKLANGRVIEKTLYNRRTRQDEPALFVALTFERREVLDSSNIKPMNLIGVDRGENIPAVIALTDPEGCPLSRFKDSLGNPTHILRIGESYKEKQRTIQAKKEVEQRRAGGYSRKYASKAKNLADDMVRNTARDLLYYAVTQDAMLIFENLSRGFGRQGKRTFMAERQYTRMEDWLTAKLAYEGLPSKTYLSKTLAQYTSKTCSNCGFTITSADYDRVLEKLKKTATGWMTTINGKELKVEGQITYYNRYKRQNVVKDLSVELDRLSEESVNNDISSWTKGRSGNEALSLLKKRFSHRPVQEKFVCLNCGFETHADEQAALNIARSWLFLRSQEYKKYQTNKTTGNTDKRAFVETWQSFYRKKLKEVWKPAV

SEQ ID NO: 29557 - protein, 978 aa, synthetic construct
  REGION 1..978: note = engineered CasX variant
QEIKRINKIRRRLVKDSNTKKAGKTGPMKTLLVRVMTPDLRERLENLRKKPENIPQPISNTSRANLNKLLTDYTEMKKAILHVYWEEFQKDPVGLMSRVAQPASKKIDQNKLKPEMDEKGNLTTAGFACSQCGQPLFVYKLEQVSEKGKAYTNYFGRCNVAEHEKLILLAQLKPEKDSDEAVTYSLGKFGQRALDFYSIHVTKESTHPVKPLAQIAGNRYASGPVGKALSDACMGTIASFLSKYQDIIIEHQKVVKGNQKRLESLRELAGKENLEYPSVTLPPQPHTKEGVDAYNEVIARVRMWVNLNLWQKLKLSRDDAKPLLRLKGFPSFPLVERQANEVDWWDMVCNVKKLINEKKEDGKVFWQNLAGYKRQEALRPYLSSEEDRQKGKKFARTQLGDLLLHLEKKHGEDWGKVYDEAWERIDKKVEGLSKHIKLEEERRSEDAQSKAALTDWLRAKASFVIEGLKEADKDEFCRCELKLQKWYGDLRGKPFAIEAENSILDISGFSKQYNCAFIWQKDGVKKLNLYLIINYFKGGKLRFKKIKPEAFEANRFYTVINKKSGEIVPMEVNFNFDDPNLIILPLAFGKRQGREFIWNDLLSLETGSLKLANGRVIEKTLYNRRTRQDEPALFVALTFERREVLDSSNIKPMNLIGVDRGENIPAVIALTDPEGCPLSRFKDSLGNPTHILRIGESYKEKQRTIQAKKEVEQRRAGGYSRKYASKAKNLADDMVRNTARDLLYYAVTQDAMLIFENLSRGFGRQGKRTFMAERQYTRMEDWLTAKLAYEGLPSKTYLSKTLAQYTSKTCSNCGFTITSADYDRVLEKLKKTATGWMTTINGKELKVEGQITYYNRYKRQNVVKDLSVELDRLSEESVNNDISSWTKGRSGEALSLLKKRFSHRPVQEKFVCLNCGFETHADEQAALNIARSWLFLRSQEYKKYQTNKTTGNTDKRAFVETWQSFYRKKLKEVWKPAV

SEQ ID NO: 29558 - protein, 978 aa, synthetic construct
  REGION 1..978: note = engineered CasX variant
QEIKRINKIRRRLVKDSNTKKAGKTGPMKTLLVRVMTPDLRERLENLRKKPENIPQPISNTSRANLNKLLTDYTEMKKAILHVYWEEFQKDPVGLMSRVAQPASKKIDQNKLKPEMDEKGNLTTAGFACSQCGQPLFVYKLEQVSEKGKAYTNYFGRCNVAEHEKLILLAQLKPEKDSDEAVTYSLGKFGQRALDFYSIHVTKESTHPVKPLAQIAGNRYASGPVGKALSDACMGTIASFLSKYQDIIIEHQKVVKGNQKRLESLRELAGKENLEYPSVTLPPQPHTKEGVDAYNEVIARVRMWVNLNLWQKLKLSRDDAKPLLRLKGFPSFPLVERQANEVDWWDMVCNVKKLINEKKEDGKVFWQNLAGYKRQEALRPYLSSEEDRKKGKKFARTQLGDLLLHLEKKHGEDWGKVYDEAWERIDKKVEGLSKHIKLEEERRSEDAQSKAALTDWLRAKASFVIEGLKEADKDEFCRCELKLQKWYGDLRGKPFAIEAENSILDISGFSKQYNCAFIWQKDGVKKLNLYLIINYFKGGKLRFKKIKPEAFEANRFYTVINKKSGEIVPMEVNFNFDDPNLIILPLAFGKRQGREFIWNDLLSLETGSLKLANGRVIEKTLYNRRTRQDEPALFVALTFERREVLDSSNIKPMNLIGVDRGENIPAVIALTDPEGCPLSRFKDSLGNPTHILRIGESYKEKQRTIQAKKEVEQRRAGGYSRKYASKAKNLADDMVRNTARDLLYYAVTQDAMLIFENLSRGFGRQGKRTFMAERQYTRMEDWLTAKLAYEGLPSQTYLSKTLAQYTSKTCSNCGFTITSADYDRVLEKLKKTATGWMTTINGKELKVEGQITYYNRYKRQNVVKDLSVELDRLSEESVNNDISSWTKGRSGEALSLLKKRFSHRPVQEKFVCLNCGFETHADEQAALNIARSWLFLRSQEYKKYQTNKTTGNTDKRAFVETWQSFYRKKLKEVWKPAV

SEQ ID NO: 29559 - protein, 978 aa, synthetic construct
  REGION 1..978: note = engineered CasX variant
QEIKRINKIRRRLVKDSNTKKAGKTGPMKTLLVRVMTPDLRERLENLRKKPENIPQPISNTSRANLNKLLTDYTEMKKAILHVYWEEFQKDPVGLMSRVAQPASKKIDQNKLKPEMDEKGNLTTAGFACSQCGQPLFVYKLEQVSEKGKAYTNYFGRCNVAEHEKLILLAQLKPEKDSDEAVTYSLGKFGQRALDFYSIHVTKESTHPVKPLAQIAGNRYASGPVGKALSDACMGTIASFLSKYQDIIIEHQKVVKGNQKRLESLRELAGKENLEYPSVTLPPQPHTKEGVDAYNEVIARVRMWVNLNLWQKLKLSRDDAKPLLRLKGFPSFPLVERQANEVDWWDMVCNVKKLINEKKEDGKVFWQNLAGYKRQEALRPYLSSEEDRKKGKKFARTQLGDLLLHLEKKHGEDWGKVYDEAWERIDKKVEGLSKHIKLEEERRSEDAQSKAALTDWLRAKASFVIEGLKEADKDEFCRCELKLQKWYGDLRGKPFAIEAENSILDISGFSKQYNCAFIWQKDGVKKLNLYLIINYFKGGKLRFKKIKPEAFEANRFYTVINKKSGEIVPMEVNFNFDDPNLIILPLAFGKRQGREFIWNDLLSLETGSLKLANGRVIEKTLYNRRTRQDEPALFVALTFERREVLDSSNIKPMNLIGVDRGENIPAVIALTDPEGCPLSRFKDSLGNPTHILRIGESYKEKQRTIQAKKEVEQRRAGGYSRKYASKAKNLADDMVRNTARDLLYYAVTQDAMLIFENLSRGFGRQGKRTFMAERQYTRMEDWLTAKLAYNGLPSKTYLSKTLAQYTSKTCSNCGFTITSADYDRVLEKLKKTATGWMTTINGKELKVEGQITYYNRYKRQNVVKDLSVELDRLSEESVNNDISSWTKGRSGEALSLLKKRFSHRPVQEKFVCLNCGFETHADEQAALNIARSWLFLRSQEYKKYQTNKTTGNTDKRAFVETWQSFYRKKLKEVWKPAV

SEQ ID NO: 29560 - protein, 978 aa, synthetic construct
  REGION 1..978: note = engineered CasX variant
QEIKRINKIRRRLVKDSNTKKAGKTGPMKTLLVRVMTPDLRERLENLRKKPENIPQPISNTSRANLNKLLTDYTEMKKAILHVYWEEFQKDPVGLMSRVAQPASKKIDQNKLKPEMDEKGNLTTAGFACSQCGQPLFVYKLEQVSEKGKAYTNYFGRCNVAEHEKLIQLAQLKPEKDSDEAVTYSLGKFGQRALDFYSIHVTKESTHPVKPLAQIAGNRYASGPVGKALSDACMGTIASFLSKYQDIIIEHQKVVKGNQKRLESLRELAGKENLEYPSVTLPPQPHTKEGVDAYNEVIARVRMWVNLNLWQKLKLSRDDAKPLLRLKGFPSFPLVERQANEVDWWDMVCNVKKLINEKKEDGKVFWQNLAGYKRQEALRPYLSSEEDRKKGKKFARTQLGDLLLHLEKKHGEDWGKVYDEAWERIDKKVEGLSKHIKLEEERRSEDAQSKAALTDWLRAKASFVIEGLKEADKDEFCRCELKLQKWYGDLRGKPFAIEAENSILDISGFSKQYNCAFIWQKDGVKKLNLYLIINYFKGGKLRFKKIKPEAFEANRFYTVINKKSGEIVPMEVNFNFDDPNLIILPLAFGKRQGREFIWNDLLSLETGSLKLANGRVIEKTLYNRRTRQDEPALFVALTFERREVLDSSNIKPMNLIGVDRGENIPAVIALTDPEGCPLSRFKDSLGNPTHILRIGESYKEKQRTIQAKKEVEQRRAGGYSRKYASKAKNLADDMVRNTARDLLYYAVTQDAMLIFENLSRGFGRQGKRTFMAERQYTRMEDWLTAKLAYEGLPSKTYLSKTLAQYTSKTCSNCGFTITSADYDRVLEKLKKTATGWMTTINGKELKVEGQITYYNRYKRQNVVKDLSVELDRLSEESVNNDISSWTKGRSGEALSLLKKRFSHRPVQEKFVCLNCGFETHADEQAALNIARSWLFLRSQEYKKYQTNKTTGNTDKRAFVETWQSFYRKKLKEVWKPAV

SEQ ID NO: 29561 - protein, 978 aa, synthetic construct
  REGION 1..978: note = engineered CasX variant
QEIKRINKIRRRLVKDSNTKKAGKTGPMKTLLVRVMTPDLRERLENLRKKPENIPQPISNTSRANLNKLLTDYTEMKKAILHVYWEEFQKDPVGLMSRVAQPASKKIDQNKLKPEMDEKGNLTTAGFACSQCGQPLFVYKLEQVSEKGKAYTNYFGRCNVAEHEKLILLAQLKPEKDSDEAVTYSLGKFGQRALDFYSIHVTKESTHPVKPLAQIAGNRYASGPVGKALSDACMGTIASFLSKYQDIIIEHQKVVKGNQKRLESLRELAGKENLEYPSVTLPPQPHTKEGVDAYNEVIARVRMWVNLNLWQKLKLSRDDAKPLLRLKGFPSFPLVERQANEVDWWDMVCNVKKLINEKKEDGKVFWQNLAIYKRQEALRPYLSSEEDRKKGKKFARTQLGDLLLHLEKKHGEDWGKVYDEAWERIDKKVEGLSKHIKLEEERRSEDAQSKAALTDWLRAKASFVIEGLKEADKDEFCRCELKLQKWYGDLRGKPFAIEAENSILDISGFSKQYNCAFIWQKDGVKKLNLYLIINYFKGGKLRFKKIKPEAFEANRFYTVINKKSGEIVPMEVNFNFDDPNLIILPLAFGKRQGREFIWNDLLSLETGSLKLANGRVIEKTLYNRRTRQDEPALFVALTFERREVLDSSNIKPMNLIGVDRGENIPAVIALTDPEGCPLSRFKDSLGNPTHILRIGESYKEKQRTIQAKKEVEQRRAGGYSRKYASKAKNLADDMVRNTARDLLYYAVTQDAMLIFENLSRGFGRQGKRTFMAERQYTRMEDWLTAKLAYEGLPSKTYLSKTLAQYTSKTCSNCGFTITSADYDRVLEKLKKTATGWMTTINGKELKVEGQITYYNRYKRQNVVKDLSVELDRLSEESVNNDISSWTKGRSGEALSLLKKRFSHRPVQEKFVCLNCGFETHADEQAALNIARSWLFLRSQEYKKYQTNKTTGNTDKRAFVETWQSFYRKKLKEVWKPAV

SEQ ID NO: 29562 - protein, 978 aa, synthetic construct
  REGION 1..978: note = engineered CasX variant
QEIKRINKIRRRLVKDSNTKKAGKTGPMKTLLVRVMTPDLRERLENLRKKPENIPQPISNTSRANLNKLLTDYTEMKKAILHVYWEEFQKDPVGLMSRVAQPASKKIDQNKLKPEMDEKGNLTTAGFACSQCGQPLFVYKLEQVSEKGKAYTNYFGRCNVAEHEKLILLAQLKPEKDSDEAVTYSLGKFGQRALDFYSIHVTKESTHPVKPLAQIAGNRYASGPVGKALSDACMGTIASFLSKYQDIIIEHQKVVKGNQKRLESLRELAGKENLEYPSVTLPPQPHTKEGVDAYNEVIARVRMWVNLNLWQKLKLSRDDAKPLLRLKGFPSFPLVERQANEVDWWDMVCNVKKLINEKKEDGKVFWQNLAGYKRQEALRPYLSSEEDREKGKKFARTQLGDLLLHLEKKHGEDWGKVYDEAWERIDKKVEGLSKHIKLEEERRSEDAQSKAALTDWLRAKASFVIEGLKEADKDEFCRCELKLQKWYGDLRGKPFAIEAENSILDISGFSKQYNCAFIWQKDGVKKLNLYLIINYFKGGKLRFKKIKPEAFEANRFYTVINKKSGEIVPMEVNFNFDDPNLIILPLAFGKRQGREFIWNDLLSLETGSLKLANGRVIEKTLYNRRTRQDEPALFVALTFERREVLDSSNIKPMNLIGVDRGENIPAVIALTDPEGCPLSRFKDSLGNPTHILRIGESYKEKQRTIQAKKEVEQRRAGGYSRKYASKAKNLADDMVRNTARDLLYYAVTQDAMLIFENLSRGFGRQGKRTFMAERQYTRMEDWLTAKLAYEGLPSKTYLSKTLAQYTSKTCSNCGFTITSADYDRVLEKLKKTATGWMTTINGKELKVEGQITYYNRYKRQNVVKDLSVELDRLSEESVNNDISSWTKGRSGEALSLLKKRFSHRPVQEKFVCLNCGFETHADEQAALNIARSWLFLRSQEYKKYQTNKTTGNTDKRAFVETWQSFYRKKLKEVWKPAV

SEQ ID NO: 29563 - protein, 978 aa, synthetic construct
  REGION 1..978: note = engineered CasX variant
QEIKRINKIRRRLVKDSNTKKAGKTGPMKTLLVRVMTPDLRERLENLRKKPENIPQPISNTSRANLNKLLTDYTEMKKAILHVYWEEFQKDPVGLMSRVAQPASKKIDQNKLKPEMDEKGNLTTAGFACSQCGQPLFVYKLEQVSEKGKAYTNYFGRCNVAEHEKLILLAQLKPEKDSDEAVTYSLGKFGQRALDFYSIHVTKESTHPVKPLAQIAGNRYASGPVGKALSDACMGTIASFLSKYQDIIIEHQKVVKGNQKRLESLRELAGKENLEYPSVTLPPQPHTKEGVDAYNEVIARVRMWVNLNLWQKLKLSRDDAKPLLRLKGFPSFPLVERQANEVDWWDMVCNVKKLINEKKEDGKVFWQNLAGYKRQEALRPYLSSEEDRKKGKKFARTQLGDLLLHLEKKHGEDWGKVYDEAWERIDKKVEGLSKHIKLEEERRSEDAQSKAALTDWLRAKASFVIEGLKEADKDEFCRCELKLQKWYGDLRGKPFAIEAENSILDISGFSKQYNCAFIWQKDGVKKLNLYLIINYFKGGKLRFKKIKPEAFEANRFYTVINKKSGEIVIMEVNFNFDDPNLIILPLAFGKRQGREFIWNDLLSLETGSLKLANGRVIEKTLYNRRTRQDEPALFVALTFERREVLDSSNIKPMNLIGVDRGENIPAVIALTDPEGCPLSRFKDSLGNPTHILRIGESYKEKQRTIQAKKEVEQRRAGGYSRKYASKAKNLADDMVRNTARDLLYYAVTQDAMLIFENLSRGFGRQGKRTFMAERQYTRMEDWLTAKLAYEGLPSKTYLSKTLAQYTSKTCSNCGFTITSADYDRVLEKLKKTATGWMTTINGKELKVEGQITYYNRYKRQNVVKDLSVELDRLSEESVNNDISSWTKGRSGEALSLLKKRFSHRPVQEKFVCLNCGFETHADEQAALNIARSWLFLRSQEYKKYQTNKTTGNTDKRAFVETWQSFYRKKLKEVWKPAV

SEQ ID NO: 29564 - protein, 979 aa, synthetic construct
  REGION 1..979: note = engineered CasX variant
QEIKRINKIRRRLVKDSNTKKAGKTGPMKTLLVRVMTPDLRERLENLRKKPENIPQPISNTSRANLNKLLTDYTEMKKAILHVYWEEFQKDPVGLMSRVAQPASKKIDQNKLKPEMDEKGNLTTAGFACSQCGQPLFVYKLEQVSEKGKAYTNYFGRCNVAEHEKLILLAQLKPEKDSDEAVTYSLGKFGQRALDFYSIHVTKESTHPVKPLAQIAGNRYASGPVGKALSGACMGTIASFLSKYQDIIIEHQKVVKGNQKRLESLRELAGKENLEYPSVTLPPQPHTKEGVDAYNEVIARVRMWVNLNLWQKLKLSRDDAKPLLRLKGFPSFPLVERQANEVDWWDMVCNVKKLINEKKEDGKVFWQNLAGYKRQEALRPYLSSEEDRKKGKKFARYQLGDLLLHLEKKHEGEDWGKVYDEAWERIDKKVEGLSKHIKLEEERRSEDAQSKAALTDWLRAKASFVIEGLKEADKDEFCRCELKLQKWYGDLRGKPFAIEAENSILDISGFSKQYNCAFIWQKDGVKKLNLYLIINYFKGGKLRFKKIKPEAFEANRFYTVINKKSGEIVPMEVNFNFDDPNLIILPLAFGKRQGREFIWNDLLSLETGSLKLANGRVIEKTLYNRRTRQDEPALFVALTFERREVLDSSNIKPMNLIGVDRGENIPAVIALTDPEGCPLSRFKDSLGNPTHILRIGESYKEKQRTIQAKKEVEQRRAGGYSRKYASKAKNLADDMVRNTARDLLYYAVTQDAMLIFENLSRGFGRQGKRTFMAERQYTRMEDWLTAKLAYEGLPSKTYLSKTLAQYTSKTCSNCGFTITSADYDRVLEKLKKTATGWMTTINGKELKVEGQITYYNRYKRQNVVKDLSVELDRLSEESVNNDISSWTKGRSGEALSLLKKRFSHRPVQEKFVCLNCGFETHADEQAALNIARSWLFLRSQEYKKYQTNKTTGNTDKRAFVETWQSFYRKKLKEVWKPAV

SEQ ID NO: 29565 - protein, 979 aa, synthetic construct
  REGION 1..979: note = engineered CasX variant
QEIKRINKIRRRLVKDSNTKKAGKTGPMKTLLVRVMTPDLRERLENLRKKPENIPQPISNTSRANLNKLLTDYTEMKKAILHVYWEEFQKDPVGLMSRVAQPASKKIDQNKLKPEMDEKGNLTTAGFACSQCGQPLFVYKLEQVSEKGKAYTNYFGRCNVAEHEKLILLAQLKPEKDSDEAVTYSLGKFGQRALDFYSIHVTKESTHPVKPLAQIAGNRYASGPVGKALSDACMGTIASFLSKYQDIIIEHQKVVKGNQKRLESLRELAGKENLEYPSVTLPPQPHTKEGVDAYNEVIARVRMWVNLNLWQKLKLSRDDAKPLLRLKNFPSFPLVERQANEVDWWDMVCNVKKLINEKKEDGKVFWQNLAGYKRQEALRPYLSSEEDRKKGKKFARYQLGDLLLHLEKKHEGEDWGKVYDEAWERIDKKVEGLSKHIKLEEERRSEDAQSKAALTDWLRAKASFVIEGLKEADKDEFCRCELKLQKWYGDLRGKPFAIEAENSILDISGFSKQYNCAFIWQKDGVKKLNLYLIINYFKGGKLRFKKIKPEAFEANRFYTVINKKSGEIVPMEVNFNFDDPNLIILPLAFGKRQGREFIWNDLLSLETGSLKLANGRVIEKTLYNRRTRQDEPALFVALTFERREVLDSSNIKPMNLIGVDRGENIPAVIALTDPEGCPLSRFKDSLGNPTHILRIGESYKEKQRTIQAKKEVEQRRAGGYSRKYASKAKNLADDMVRNTARDLLYYAVTQDAMLIFENLSRGFGRQGKRTFMAERQYTRMEDWLTAKLAYEGLPSKTYLSKTLAQYTSKTCSNCGFTITSADYDRVLEKLKKTATGWMTTINGKELKVEGQITYYNRYKRQNVVKDLSVELDRLSEESVNNDISSWTKGRSGEALSLLKKRFSHRPVQEKFVCLNCGFETHADEQAALNIARSWLFLRSQEYKKYQTNKTTGNTDKRAFVETWQSFYRKKLKEVWKPAV

SEQ ID NO: 29566 - protein, 979 aa, synthetic construct
  REGION 1..979: note = engineered CasX variant
QEIKRINKIRRRLVKDSNTKKAGKTGPMKTLLVRVMTPDLRERLENLRKKPENIPQPISNTSRANLNKLLTDYTEMKKAILHVYWEEFQKDPVGLMSRVAQPASKKIDQNKLKPEMDEKGNLTTAGFACSQCGQPLFVYKLEQVSEKGKAYTNYFGRCNVAEHEKLILLAQLKPEKDSDEAVTYSLGKFGQRALDFYSIHVTKESTHPVKPLAQIAGNRYASGPVGKALSDACMGTIASFLSKYQDIIIEHQKVVKGNQKRLESLRELAGKENLEYPSVTLPPQPHTKEGVDAYNEVIARVRMWVNLNLWQKLKLSRDDAKPLLRLKGFPSFPLVERQANEVDWWDMVCNVKKLINEKKEDGKVFWQNLAGYKRQEALRPYLSSEEDRKKGKKFARYQLGDLLNHLEKKHEGEDWGKVYDEAWERIDKKVEGLSKHIKLEEERRSEDAQSKAALTDWLRAKASFVIEGLKEADKDEFCRCELKLQKWYGDLRGKPFAIEAENSILDISGFSKQYNCAFIWQKDGVKKLNLYLIINYFKGGKLRFKKIKPEAFEANRFYTVINKKSGEIVPMEVNFNFDDPNLIILPLAFGKRQGREFIWNDLLSLETGSLKLANGRVIEKTLYNRRTRQDEPALFVALTFERREVLDSSNIKPMNLIGVDRGENIPAVIALTDPEGCPLSRFKDSLGNPTHILRIGESYKEKQRTIQAKKEVEQRRAGGYSRKYASKAKNLADDMVRNTARDLLYYAVTQDAMLIFENLSRGFGRQGKRTFMAERQYTRMEDWLTAKLAYEGLPSKTYLSKTLAQYTSKTCSNCGFTITSADYDRVLEKLKKTATGWMTTINGKELKVEGQITYYNRYKRQNVVKDLSVELDRLSEESVNNDISSWTKGRSGEALSLLKKRFSHRPVQEKFVCLNCGFETHADEQAALNIARSWLFLRSQEYKKYQTNKTTGNTDKRAFVETWQSFYRKKLKEVWKPAV

SEQ ID NO: 29567 - protein, 979 aa, synthetic construct
  REGION 1..979: note = engineered CasX variant
QEIKRINKIRRRLVKDSNTKKAGKTGPMKTLLVRVMTPDLRERLENLRKKPENIPQPISNTSRANLNKLLTDYTEMKKAILHVYWEEFQKDPVGLMSRVAQPASKKIDQNKLKPEMDEKGNLTTAGFACSQCGQPLFVYKLEQVSEKGKAYTNYFGRCNVAEHEKLILLAQLKPEKDSDEAVTYSLGKFGQRALDFYSIHVTKESTHPVKPLAQIAGNRYASGPVGKALSDACMGTIASFLSKYQDIIIEHQKVVKGNQKRLESLRELAGKENLEYPSVTLPPQPHTKEGVDAYNEVIARVRMWVNLNLWQKLKLSRDDAKPLLRLKGFPSFPLVERQANEVDWWDMVCNVKKLINEKKEDGKVFWQNLAGYKRQEALRPYLSSEEDRKKGKKFARYQLGDLLWHLEKKHEGEDWGKVYDEAWERIDKKVEGLSKHIKLEEERRSEDAQSKAALTDWLRAKASFVIEGLKEADKDEFCRCELKLQKWYGDLRGKPFAIEAENSILDISGFSKQYNCAFIWQKDGVKKLNLYLIINYFKGGKLRFKKIKPEAFEANRFYTVINKKSGEIVPMEVNFNFDDPNLIILPLAFGKRQGREFIWNDLLSLETGSLKLANGRVIEKTLYNRRTRQDEPALFVALTFERREVLDSSNIKPMNLIGVDRGENIPAVIALTDPEGCPLSRFKDSLGNPTHILRIGESYKEKQRTIQAKKEVEQRRAGGYSRKYASKAKNLADDMVRNTARDLLYYAVTQDAMLIFENLSRGFGRQGKRTFMAERQYTRMEDWLTAKLAYEGLPSKTYLSKTLAQYTSKTCSNCGFTITSADYDRVLEKLKKTATGWMTTINGKELKVEGQITYYNRYKRQNVVKDLSVELDRLSEESVNNDISSWTKGRSGEALSLLKKRFSHRPVQEKFVCLNCGFETHADEQAALNIARSWLFLRSQEYKKYQTNKTTGNTDKRAFVETWQSFYRKKLKEVWKPAV

SEQ ID NO: 29568 - protein, 979 aa, synthetic construct
  REGION 1..979: note = engineered CasX variant
QEIKRINKIRRRLVKDSNTKKAGKTGPMKTLLVRVMTPDLRERLENLRKKPENIPQPISNTSRANLNKLLTDYTEMKKAILHVYWEEFQKDPVGLMSRVAQPASKKIDQNKLKPEMDEKGNLTTAGFACSQCGQPLFVYKLEQVSEKGKAYTNYFGRCNVAEHEKLILLAQLKPEKDSDEAVTYSLGKFGQRALDFYSIHVTKESTHPVKPLAQIAGNRYASGPVGKALSDACMGTIASFLSKYQDIIIEHQKVVKGNQKRLESLRELAGKENLEYPSVTLPPQPHTKEGVDAYNEVIARVRMWVNLNLWQKLKLSRDDAKPLLRLKGFPSFPLVERQANEVDWWDMVCNVKKLINEKKEDGKVFWQNLAGYKRQEALRPYLSSEEDRKKGKKFARYQLGDLLLHLYKKHEGEDWGKVYDEAWERIDKKVEGLSKHIKLEEERRSEDAQSKAALTDWLRAKASFVIEGLKEADKDEFCRCELKLQKWYGDLRGKPFAIEAENSILDISGFSKQYNCAFIWQKDGVKKLNLYLIINYFKGGKLRFKKIKPEAFEANRFYTVINKKSGEIVPMEVNFNFDDPNLIILPLAFGKRQGREFIWNDLLSLETGSLKLANGRVIEKTLYNRRTRQDEPALFVALTFERREVLDSSNIKPMNLIGVDRGENIPAVIALTDPEGCPLSRFKDSLGNPTHILRIGESYKEKQRTIQAKKEVEQRRAGGYSRKYASKAKNLADDMVRNTARDLLYYAVTQDAMLIFENLSRGFGRQGKRTFMAERQYTRMEDWLTAKLAYEGLPSKTYLSKTLAQYTSKTCSNCGFTITSADYDRVLEKLKKTATGWMTTINGKELKVEGQITYYNRYKRQNVVKDLSVELDRLSEESVNNDISSWTKGRSGEALSLLKKRFSHRPVQEKFVCLNCGFETHADEQAALNIARSWLFLRSQEYKKYQTNKTTGNTDKRAFVETWQSFYRKKLKEVWKPAV

SEQ ID NO: 29569 - protein, 979 aa, synthetic construct
  REGION 1..979: note = engineered CasX variant
QEIKRINKIRRRLVKDSNTKKAGKTGPMKTLLVRVMTPDLRERLENLRKKPENIPQPISNTSRANLNKLLTDYTEMKKAILHVYWEEFQKDPVGLMSRVAQPASKKIDQNKLKPEMDEKGNLTTAGFACSQCGQPLFVYKLEQVSEKGKAYTNYFGRCNVAEHEKLILLAQLKPEKDSDEAVTYSLGKFGQRALDFYSIHVTKESTHPVKPLAQIAGNRYASGPVGKALSDACMGTIASFLSKYQDIIIEHQKVVKGNQKRLESLRELAGKENLEYPSVTLPPQPHTKEGVDAYNEVIARVRMWVNLNLWQKLKLSRDDAKPLLRLKGFPSFPLVERQANEVDWWDMVCNVKKLINEKKEDGKVFWQNLAGYKRQEALRPYLSSEEDRKKGKKFARYQLGDLLLHLEKKHEPEDWGKVYDEAWERIDKKVEGLSKHIKLEEERRSEDAQSKAALTDWLRAKASFVIEGLKEADKDEFCRCELKLQKWYGDLRGKPFAIEAENSILDISGFSKQYNCAFIWQKDGVKKLNLYLIINYFKGGKLRFKKIKPEAFEANRFYTVINKKSGEIVPMEVNFNFDDPNLIILPLAFGKRQGREFIWNDLLSLETGSLKLANGRVIEKTLYNRRTRQDEPALFVALTFERREVLDSSNIKPMNLIGVDRGENIPAVIALTDPEGCPLSRFKDSLGNPTHILRIGESYKEKQRTIQAKKEVEQRRAGGYSRKYASKAKNLADDMVRNTARDLLYYAVTQDAMLIFENLSRGFGRQGKRTFMAERQYTRMEDWLTAKLAYEGLPSKTYLSKTLAQYTSKTCSNCGFTITSADYDRVLEKLKKTATGWMTTINGKELKVEGQITYYNRYKRQNVVKDLSVELDRLSEESVNNDISSWTKGRSGEALSLLKKRFSHRPVQEKFVCLNCGFETHADEQAALNIARSWLFLRSQEYKKYQTNKTTGNTDKRAFVETWQSFYRKKLKEVWKPAV

SEQ ID NO: 29570 - protein, 980 aa, synthetic construct
  REGION 1..980: note = engineered CasX variant
QEIKRINKIRRRLVKDSNTKKAGKTGPMKTLLVRVMTPDLRERLENLRKKPENIPQPISNTSRANLNKLLTDYTEMKKAILHVYWEEFQKDPVGLMSRVAQPASKKIDQNKLKPEMDEKGNLTTAGFACSQCGQPLFVYKLEQVSEKGKAYTNYFGRCNVAEHEKLILLAQLKPEKDSDEAVTYSLGKFGQRALDFYSIHVTKESTHPVKPLAQIAGNRYASGPVGKALSDACMGTIASFLSKYQDIIIEHQKVVKGNQKRLESLRELAGKENLEYPSVTLPPQPHTKEGVDAYNEVIARVRMWVNLNLWQKLKLSRDDAKPLLRLKGFPSFPLVERQANEVDWWDMVCNVKKLINEKKEDGKVFWQNLAGYKRQEALRPYLSSEEDRKKGKKFARYQLGDLLLHLEKKHEGERDWGKVYDEAWERIDKKVEGLSKHIKLEEERRSEDAQSKAALTDWLRAKASFVIEGLKEADKDEFCRCELKLQKWYGDLRGKPFAIEAENSILDISGFSKQYNCAFIWQKDGVKKLNLYLIINYFKGGKLRFKKIKPEAFEANRFYTVINKKSGEIVPMEVNFNFDDPNLIILPLAFGKRQGREFIWNDLLSLETGSLKLANGRVIEKTLYNRRTRQDEPALFVALTFERREVLDSSNIKPMNLIGVDRGENIPAVIALTDPEGCPLSRFKDSLGNPTHILRIGESYKEKQRTIQAKKEVEQRRAGGYSRKYASKAKNLADDMVRNTARDLLYYAVTQDAMLIFENLSRGFGRQGKRTFMAERQYTRMEDWLTAKLAYEGLPSKTYLSKTLAQYTSKTCSNCGFTITSADYDRVLEKLKKTATGWMTTINGKELKVEGQITYYNRYKRQNVVKDLSVELDRLSEESVNNDISSWTKGRSGEALSLLKKRFSHRPVQEKFVCLNCGFETHADEQAALNIARSWLFLRSQEYKKYQTNKTTGNTDKRAFVETWQSFYRKKLKEVWKPAV

SEQ ID NO: 29571 - protein, 980 aa, synthetic construct
  REGION 1..980: note = engineered CasX variant
QEIKRINKIRRRLVKDSNTKKAGKTGPMKTLLVRVMTPDLRERLENLRKKPENIPQPISNTSRANLNKLLTDYTEMKKAILHVYWEEFQKDPVGLMSRVAQPASKKIDQNKLKPEMDEKGNLTTAGFACSQCGQPLFVYKLEQVSEKGKAYTNYFGRCNVAEHEKLILLAQLKPEKDSDEAVTYSLGKFGQRALDFYSIHVTKESTHPVKPLAQIAGNRYASGPVGKALSDACMGTIASFLSKYQDIIIEHQKVVKGNQKRLESLRELAGKENLEYPSVTLPPQPHTKEGVDAYNEVIARVRMWVNLNLWQKLKLSRDDAKPLLRLKGFPSFPLVERQANEVDWWDMVCNVKKLINEKKEDGKVFWQNLAGYKRQEALRPYLSSEEDRKKGKKFARYQLGDLLLHLEKKHEGEYDWGKVYDEAWERIDKKVEGLSKHIKLEEERRSEDAQSKAALTDWLRAKASFVIEGLKEADKDEFCRCELKLQKWYGDLRGKPFAIEAENSILDISGFSKQYNCAFIWQKDGVKKLNLYLIINYFKGGKLRFKKIKPEAFEANRFYTVINKKSGEIVPMEVNFNFDDPNLIILPLAFGKRQGREFIWNDLLSLETGSLKLANGRVIEKTLYNRRTRQDEPALFVALTFERREVLDSSNIKPMNLIGVDRGENIPAVIALTDPEGCPLSRFKDSLGNPTHILRIGESYKEKQRTIQAKKEVEQRRAGGYSRKYASKAKNLADDMVRNTARDLLYYAVTQDAMLIFENLSRGFGRQGKRTFMAERQYTRMEDWLTAKLAYEGLPSKTYLSKTLAQYTSKTCSNCGFTITSADYDRVLEKLKKTATGWMTTINGKELKVEGQITYYNRYKRQNVVKDLSVELDRLSEESVNNDISSWTKGRSGEALSLLKKRFSHRPVQEKFVCLNCGFETHADEQAALNIARSWLFLRSQEYKKYQTNKTTGNTDKRAFVETWQSFYRKKLKEVWKPAV

SEQ ID NO: 29572 - protein, 979 aa, synthetic construct
  REGION 1..979: note = engineered CasX variant
QEIKRINKIRRRLVKDSNTKKAGKTGPMKTLLVRVMTPDLRERLENLRKKPENIPQPISNTSRANLNKLLTDYTEMKKAILHVYWEEFQKDPVGLMSRVAQPASKKIDQNKLKPEMDEKGNLTTAGFACSQCGQPLFVYKLEQVSEKGKAYTNYFGRCNVAEHEKLILLAQLKPEKDSDEAVTYSLGKFGQRALDFYSIHVTKESTHPVKPLAQIAGNRYASGPVGKALSDACMGTIASFLSKYQDIIIEHQKVVKGNQKRLESLRELAGKENLEYPSVTLPPQPHTKEGVDAYNEVIARVRMWVNLNLWQKLKLSRDDAKPLLRLKGFPSFPLVERQANEVDWWDMVCNVKKLINEKKEDGKVFWQNLAGYKRQEALRPYLSSEEDRKKGKKFARYQLGDLLLHLEKKHEGEDWGDVYDEAWERIDKKVEGLSKHIKLEEERRSEDAQSKAALTDWLRAKASFVIEGLKEADKDEFCRCELKLQKWYGDLRGKPFAIEAENSILDISGFSKQYNCAFIWQKDGVKKLNLYLIINYFKGGKLRFKKIKPEAFEANRFYTVINKKSGEIVPMEVNFNFDDPNLIILPLAFGKRQGREFIWNDLLSLETGSLKLANGRVIEKTLYNRRTRQDEPALFVALTFERREVLDSSNIKPMNLIGVDRGENIPAVIALTDPEGCPLSRFKDSLGNPTHILRIGESYKEKQRTIQAKKEVEQRRAGGYSRKYASKAKNLADDMVRNTARDLLYYAVTQDAMLIFENLSRGFGRQGKRTFMAERQYTRMEDWLTAKLAYEGLPSKTYLSKTLAQYTSKTCSNCGFTITSADYDRVLEKLKKTATGWMTTINGKELKVEGQITYYNRYKRQNVVKDLSVELDRLSEESVNNDISSWTKGRSGEALSLLKKRFSHRPVQEKFVCLNCGFETHADEQAALNIARSWLFLRSQEYKKYQTNKTTGNTDKRAFVETWQSFYRKKLKEVWKPAV

SEQ ID NO: 29573 - protein, 979 aa, synthetic construct
  REGION 1..979: note = engineered CasX variant
QEIKRINKIRRRLVKDSNTKKAGKTGPMKTLLVRVMTPDLRERLENLRKKPENIPQPISNTSRANLNKLLTDYTEMKKAILHVYWEEFQKDPVGLMSRVAQPASKKIDQNKLKPEMDEKGNLTTAGFACSQCGQPLFVYKLEQVSEKGKAYTNYFGRCNVAEHEKLILLAQLKPEKDSDEAVTYSLGKFGQRALDFYSIHVTKESTHPVKPLAQIAGNRYASGPVGKALSDACMGTIASFLSKYQDIIIEHQKVVKGNQKRLESLRELAGKENLEYPSVTLPPQPHTKEGVDAYNEVIARVRMWVNLNLWQKLKLSRDDAKPLLRLKGFPSFPLVERQANEVDWWDMVCNVKKLINEKKEDGKVFWQNLAGYKRQEALRPYLSSEEDRKKGKKFARYQLGDLLLHLEKKHEGEDWGKVYGEAWERIDKKVEGLSKHIKLEEERRSEDAQSKAALTDWLRAKASFVIEGLKEADKDEFCRCELKLQKWYGDLRGKPFAIEAENSILDISGFSKQYNCAFIWQKDGVKKLNLYLIINYFKGGKLRFKKIKPEAFEANRFYTVINKKSGEIVPMEVNFNFDDPNLIILPLAFGKRQGREFIWNDLLSLETGSLKLANGRVIEKTLYNRRTRQDEPALFVALTFERREVLDSSNIKPMNLIGVDRGENIPAVIALTDPEGCPLSRFKDSLGNPTHILRIGESYKEKQRTIQAKKEVEQRRAGGYSRKYASKAKNLADDMVRNTARDLLYYAVTQDAMLIFENLSRGFGRQGKRTFMAERQYTRMEDWLTAKLAYEGLPSKTYLSKTLAQYTSKTCSNCGFTITSADYDRVLEKLKKTATGWMTTINGKELKVEGQITYYNRYKRQNVVKDLSVELDRLSEESVNNDISSWTKGRSGEALSLLKKRFSHRPVQEKFVCLNCGFETHADEQAALNIARSWLFLRSQEYKKYQTNKTTGNTDKRAFVETWQSFYRKKLKEVWKPAV

SEQ ID NO: 29574 - protein, 979 aa, synthetic construct
  REGION 1..979: note = engineered CasX variant
QEIKRINKIRRRLVKDSNTKKAGKTGPMKTLLVRVMTPDLRERLENLRKKPENIPQPISNTSRANLNKLLTDYTEMKKAILHVYWEEFQKDPVGLMSRVAQPASKKIDQNKLKPEMDEKGNLTTAGFACSQCGQPLFVYKLEQVSEKGKAYTNYFGRCNVAEHEKLILLAQLKPEKDSDEAVTYSLGKFGQRALDFYSIHVTKESTHPVKPLAQIAGNRYASGPVGKALSDACMGTIASFLSKYQDIIIEHQKVVKGNQKRLESLRELAGKENLEYPSVTLPPQPHTKEGVDAYNEVIARVRMWVNLNLWQKLKLSRDDAKPLLRLKGFPSFPLVERQANEVDWWDMVCNVKKLINEKKEDGKVFWQNLAGYKRQEALRPYLSSEEDRKKGKKFARYQLGDLLLHLEKKHEGEDWGKVYDEAWERIDKKVEGLSKHIKLEEERRSEDAQSKAALTDWLRAKASFVIEGKKEADKDEFCRCELKLQKWYGDLRGKPFAIEAENSILDISGFSKQYNCAFIWQKDGVKKLNLYLIINYFKGGKLRFKKIKPEAFEANRFYTVINKKSGEIVPMEVNFNFDDPNLIILPLAFGKRQGREFIWNDLLSLETGSLKLANGRVIEKTLYNRRTRQDEPALFVALTFERREVLDSSNIKPMNLIGVDRGENIPAVIALTDPEGCPLSRFKDSLGNPTHILRIGESYKEKQRTIQAKKEVEQRRAGGYSRKYASKAKNLADDMVRNTARDLLYYAVTQDAMLIFENLSRGFGRQGKRTFMAERQYTRMEDWLTAKLAYEGLPSKTYLSKTLAQYTSKTCSNCGFTITSADYDRVLEKLKKTATGWMTTINGKELKVEGQITYYNRYKRQNVVKDLSVELDRLSEESVNNDISSWTKGRSGEALSLLKKRFSHRPVQEKFVCLNCGFETHADEQAALNIARSWLFLRSQEYKKYQTNKTTGNTDKRAFVETWQSFYRKKLKEVWKPAV

SEQ ID NO: 29575 - protein, 979 aa, synthetic construct
  REGION 1..979: note = engineered CasX variant
QEIKRINKIRRRLVKDSNTKKAGKTGPMKTLLVRVMTPDLRERLENLRKKPENIPQPISNTSRANLNKLLTDYTEMKKAILHVYWEEFQKDPVGLMSRVAQPASKKIDQNKLKPEMDEKGNLTTAGFACSQCGQPLFVYKLEQVSEKGKAYTNYFGRCNVAEHEKLILLAQLKPEKDSDEAVTYSLGKFGQRALDFYSIHVTKESTHPVKPLAQIAGNRYASGPVGKALSDACMGTIASFLSKYQDIIIEHQKVVKGNQKRLESLRELAGKENLEYPSVTLPPQPHTKEGVDAYNEVIARVRMWVNLNLWQKLKLSRDDAKPLLRLKGFPSFPLVERQANEVDWWDMVCNVKKLINEKKEDGKVFWQNLAGYKRQEALRPYLSSEEDRKKGKKFARYQLGDLLLHLEKKHEGEDWGKVYDEAWERIDKKVEGLSKHIKLEEERRSEDAQSKAALTDWLRAKASFVIEGSKEADKDEFCRCELKLQKWYGDLRGKPFAIEAENSILDISGFSKQYNCAFIWQKDGVKKLNLYLIINYFKGGKLRFKKIKPEAFEANRFYTVINKKSGEIVPMEVNFNFDDPNLIILPLAFGKRQGREFIWNDLLSLETGSLKLANGRVIEKTLYNRRTRQDEPALFVALTFERREVLDSSNIKPMNLIGVDRGENIPAVIALTDPEGCPLSRFKDSLGNPTHILRIGESYKEKQRTIQAKKEVEQRRAGGYSRKYASKAKNLADDMVRNTARDLLYYAVTQDAMLIFENLSRGFGRQGKRTFMAERQYTRMEDWLTAKLAYEGLPSKTYLSKTLAQYTSKTCSNCGFTITSADYDRVLEKLKKTATGWMTTINGKELKVEGQITYYNRYKRQNVVKDLSVELDRLSEESVNNDISSWTKGRSGEALSLLKKRFSHRPVQEKFVCLNCGFETHADEQAALNIARSWLFLRSQEYKKYQTNKTTGNTDKRAFVETWQSFYRKKLKEVWKPAV

SEQ ID NO: 29576 - protein, 980 aa, synthetic construct
  REGION 1..980: note = engineered CasX variant
QEIKRINKIRRRLVKDSNTKKAGKTGPMKTLLVRVMTPDLRERLENLRKKPENIPQPISNTSRANLNKLLTDYTEMKKAILHVYWEEFQKDPVGLMSRVAQPASKKIDQNKLKPEMDEKGNLTTAGFACSQCGQPLFVYKLEQVSEKGKAYTNYFGRCNVAEHEKLILLAQLKPEKDSDEAVTYSLGKFGQRALDFYSIHVTKESTHPVKPLAQIAGNRYASGPVGKALSDACMGTIASFLSKYQDIIIEHQKVVKGNQKRLESLRELAGKENLEYPSVTLPPQPHTKEGVDAYNEVIARVRMWVNLNLWQKLKLSRDDAKPLLRLKGFPSFPLVERQANEVDWWDMVCNVKKLINEKKEDGKVFWQNLAGYKRQEALRPYLSSEEDRKKGKKFARYQLGDLLLHLEKKHEGEDWGKVYDEAWERIDKKVEGLSKHIKLEEERRSEDAQSKAALTDWLRAKASFVIEGLKEADDKDEFCRCELKLQKWYGDLRGKPFAIEAENSILDISGFSKQYNCAFIWQKDGVKKLNLYLIINYFKGGKLRFKKIKPEAFEANRFYTVINKKSGEIVPMEVNFNFDDPNLIILPLAFGKRQGREFIWNDLLSLETGSLKLANGRVIEKTLYNRRTRQDEPALFVALTFERREVLDSSNIKPMNLIGVDRGENIPAVIALTDPEGCPLSRFKDSLGNPTHILRIGESYKEKQRTIQAKKEVEQRRAGGYSRKYASKAKNLADDMVRNTARDLLYYAVTQDAMLIFENLSRGFGRQGKRTFMAERQYTRMEDWLTAKLAYEGLPSKTYLSKTLAQYTSKTCSNCGFTITSADYDRVLEKLKKTATGWMTTINGKELKVEGQITYYNRYKRQNVVKDLSVELDRLSEESVNNDISSWTKGRSGEALSLLKKRFSHRPVQEKFVCLNCGFETHADEQAALNIARSWLFLRSQEYKKYQTNKTTGNTDKRAFVETWQSFYRKKLKEVWKPAV

SEQ ID NO: 29577 - protein, 980 aa, synthetic construct
  REGION 1..980: note = engineered CasX variant
QEIKRINKIRRRLVKDSNTKKAGKTGPMKTLLVRVMTPDLRERLENLRKKPENIPQPISNTSRANLNKLLTDYTEMKKAILHVYWEEFQKDPVGLMSRVAQPASKKIDQNKLKPEMDEKGNLTTAGFACSQCGQPLFVYKLEQVSEKGKAYTNYFGRCNVAEHEKLILLAQLKPEKDSDEAVTYSLGKFGQRALDFYSIHVTKESTHPVKPLAQIAGNRYASGPVGKALSDACMGTIASFLSKYQDIIIEHQKVVKGNQKRLESLRELAGKENLEYPSVTLPPQPHTKEGVDAYNEVIARVRMWVNLNLWQKLKLSRDDAKPLLRLKGFPSFPLVERQANEVDWWDMVCNVKKLINEKKEDGKVFWQNLAGYKRQEALRPYLSSEEDRKKGKKFARYQLGDLLLHLEKKHEGEDWGKVYDEAWERIDKKVEGLSKHIKLEEERRSEDAQSKAALTDWLRAKASFVIEGLKEADKDEFCRCELKLQKWYGDLRGKPFAIEAENSILDISGFSKQYNCAFIWQKDGVKKLNLYLIINYFKGGKLRFKKIKPEAFEANRFYTVINKKSGEIVPMEVNFNFDDPNLIILPLAFGKRQGREFIWNDLLSLETGSLKLANGRVIEKTLYNRRTRQDEPALFVALTFERREVLDSSNIKPMNLIGVDRGENIPAVIALTDPEGCPLSRFKDSLGNPTHILRIGESYKEKQRTIQAKKEVEQRRAGGYSRKYASKAKNLADDMVRNTARDLLYYAVTQDAMLIFENLSRGFGRQGKRTFMAERQYTRMEDWLTAKLAYEGLPSKTYLSKTLAQYTSKTCSNCGFTITSADYDRVLEKLKKTATGWMTTINGKELKVEGQITYYNRYKRQNVVKDLSVELDRLSEESVNNDISSWTKGRSGNEALSLLKKRFSHRPVQEKFVCLNCGFETHADEQAALNIARSWLFLRSQEYKKYQTNKTTGNTDKRAFVETWQSFYRKKLKEVWKPAV

SEQ ID NO: 29578 - protein, 979 aa, synthetic construct
  REGION 1..979: note = engineered CasX variant
QEIKRINKIRRRLVKDSNTKKAGKTGPMKTLLVRVMTPDLRERLENLRKKPENIPQPISNTSRANLNKLLTDYTEMKKAILHVYWEEFQKDPVGLMSRVAQPASKKIDQNKLKPEMDEKGNLTTAGFACSQCGQPLFVYKLEQVSEKGKAYTNYFGRCNVAEHEKLILLAQLKPEKDSDEAVTYSLGKFGQRALDFYSIHVTKESTHPVKPLAQIAGNRYASGPVGKALSDACMGTIASFLSKYQDIIIEHQKVVKGNQKRLESLRELAGKENLEYPSVTLPPQPHTKEGVDAYNEVIARVRMWVNLNLWQKLKLSRDDAKPLLRLKGFPSFPLVERQANEVDWWDMVCNVKKLINEKKEDGKVFWQNLAGYKRQEALRPYLSSEEDRQKGKKFARYQLGDLLLHLEKKHEGEDWGKVYDEAWERIDKKVEGLSKHIKLEEERRSEDAQSKAALTDWLRAKASFVIEGLKEADKDEFCRCELKLQKWYGDLRGKPFAIEAENSILDISGFSKQYNCAFIWQKDGVKKLNLYLIINYFKGGKLRFKKIKPEAFEANRFYTVINKKSGEIVPMEVNFNFDDPNLIILPLAFGKRQGREFIWNDLLSLETGSLKLANGRVIEKTLYNRRTRQDEPALFVALTFERREVLDSSNIKPMNLIGVDRGENIPAVIALTDPEGCPLSRFKDSLGNPTHILRIGESYKEKQRTIQAKKEVEQRRAGGYSRKYASKAKNLADDMVRNTARDLLYYAVTQDAMLIFENLSRGFGRQGKRTFMAERQYTRMEDWLTAKLAYEGLPSKTYLSKTLAQYTSKTCSNCGFTITSADYDRVLEKLKKTATGWMTTINGKELKVEGQITYYNRYKRQNVVKDLSVELDRLSEESVNNDISSWTKGRSGEALSLLKKRFSHRPVQEKFVCLNCGFETHADEQAALNIARSWLFLRSQEYKKYQTNKTTGNTDKRAFVETWQSFYRKKLKEVWKPAV

SEQ ID NO: 29579 - protein, 979 aa, synthetic construct
  REGION 1..979: note = engineered CasX variant
QEIKRINKIRRRLVKDSNTKKAGKTGPMKTLLVRVMTPDLRERLENLRKKPENIPQPISNTSRANLNKLLTDYTEMKKAILHVYWEEFQKDPVGLMSRVAQPASKKIDQNKLKPEMDEKGNLTTAGFACSQCGQPLFVYKLEQVSEKGKAYTNYFGRCNVAEHEKLILLAQLKPEKDSDEAVTYSLGKFGQRALDFYSIHVTKESTHPVKPLAQIAGNRYASGPVGKALSDACMGTIASFLSKYQDIIIEHQKVVKGNQKRLESLRELAGKENLEYPSVTLPPQPHTKEGVDAYNEVIARVRMWVNLNLWQKLKLSRDDAKPLLRLKGFPSFPLVERQANEVDWWDMVCNVKKLINEKKEDGKVFWQNLAGYKRQEALRPYLSSEEDRKKGKKFARYQLGDLLLHLEKKHEGEDWGKVYDEAWERIDKKVEGLSKHIKLEEERRSEDAQSKAALTDWLRAKASFVIEGLKEADKDEFCRCELKLQKWYGDLRGKPFAIEAENSILDISGFSKQYNCAFIWQKDGVKKLNLYLIINYFKGGKLRFKKIKPEAFEANRFYTVINKKSGEIVPMEVNFNFDDPNLIILPLAFGKRQGREFIWNDLLSLETGSLKLANGRVIEKTLYNRRTRQDEPALFVALTFERREVLDSSNIKPMNLIGVDRGENIPAVIALTDPEGCPLSRFKDSLGNPTHILRIGESYKEKQRTIQAKKEVEQRRAGGYSRKYASKAKNLADDMVRNTARDLLYYAVTQDAMLIFENLSRGFGRQGKRTFMAERQYTRMEDWLTAKLAYEGLPSQTYLSKTLAQYTSKTCSNCGFTITSADYDRVLEKLKKTATGWMTTINGKELKVEGQITYYNRYKRQNVVKDLSVELDRLSEESVNNDISSWTKGRSGEALSLLKKRFSHRPVQEKFVCLNCGFETHADEQAALNIARSWLFLRSQEYKKYQTNKTTGNTDKRAFVETWQSFYRKKLKEVWKPAV

SEQ ID NO: 29580 - protein, 979 aa, synthetic construct
  REGION 1..979: note = engineered CasX variant
QEIKRINKIRRRLVKDSNTKKAGKTGPMKTLLVRVMTPDLRERLENLRKKPENIPQPISNTSRANLNKLLTDYTEMKKAILHVYWEEFQKDPVGLMSRVAQPASKKIDQNKLKPEMDEKGNLTTAGFACSQCGQPLFVYKLEQVSEKGKAYTNYFGRCNVAEHEKLILLAQLKPEKDSDEAVTYSLGKFGQRALDFYSIHVTKESTHPVKPLAQIAGNRYASGPVGKALSDACMGTIASFLSKYQDIIIEHQKVVKGNQKRLESLRELAGKENLEYPSVTLPPQPHTKEGVDAYNEVIARVRMWVNLNLWQKLKLSRDDAKPLLRLKGFPSFPLVERQANEVDWWDMVCNVKKLINEKKEDGKVFWQNLAGYKRQEALRPYLSSEEDRKKGKKFARYQLGDLLLHLEKKHEGEDWGKVYDEAWERIDKKVEGLSKHIKLEEERRSEDAQSKAALTDWLRAKASFVIEGLKEADKDEFCRCELKLQKWYGDLRGKPFAIEAENSILDISGFSKQYNCAFIWQKDGVKKLNLYLIINYFKGGKLRFKKIKPEAFEANRFYTVINKKSGEIVPMEVNFNFDDPNLIILPLAFGKRQGREFIWNDLLSLETGSLKLANGRVIEKTLYNRRTRQDEPALFVALTFERREVLDSSNIKPMNLIGVDRGENIPAVIALTDPEGCPLSRFKDSLGNPTHILRIGESYKEKQRTIQAKKEVEQRRAGGYSRKYASKAKNLADDMVRNTARDLLYYAVTQDAMLIFENLSRGFGRQGKRTFMAERQYTRMEDWLTAKLAYNGLPSKTYLSKTLAQYTSKTCSNCGFTITSADYDRVLEKLKKTATGWMTTINGKELKVEGQITYYNRYKRQNVVKDLSVELDRLSEESVNNDISSWTKGRSGEALSLLKKRFSHRPVQEKFVCLNCGFETHADEQAALNIARSWLFLRSQEYKKYQTNKTTGNTDKRAFVETWQSFYRKKLKEVWKPAV

SEQ ID NO: 29581 - protein, 979 aa, synthetic construct
  REGION 1..979: note = engineered CasX variant
QEIKRINKIRRRLVKDSNTKKAGKTGPMKTLLVRVMTPDLRERLENLRKKPENIPQPISNTSRANLNKLLTDYTEMKKAILHVYWEEFQKDPVGLMSRVAQPASKKIDQNKLKPEMDEKGNLTTAGFACSQCGQPLFVYKLEQVSEKGKAYTNYFGRCNVAEHEKLIQLAQLKPEKDSDEAVTYSLGKFGQRALDFYSIHVTKESTHPVKPLAQIAGNRYASGPVGKALSDACMGTIASFLSKYQDIIIEHQKVVKGNQKRLESLRELAGKENLEYPSVTLPPQPHTKEGVDAYNEVIARVRMWVNLNLWQKLKLSRDDAKPLLRLKGFPSFPLVERQANEVDWWDMVCNVKKLINEKKEDGKVFWQNLAGYKRQEALRPYLSSEEDRKKGKKFARYQLGDLLLHLEKKHEGEDWGKVYDEAWERIDKKVEGLSKHIKLEEERRSEDAQSKAALTDWLRAKASFVIEGLKEADKDEFCRCELKLQKWYGDLRGKPFAIEAENSILDISGFSKQYNCAFIWQKDGVKKLNLYLIINYFKGGKLRFKKIKPEAFEANRFYTVINKKSGEIVPMEVNFNFDDPNLIILPLAFGKRQGREFIWNDLLSLETGSLKLANGRVIEKTLYNRRTRQDEPALFVALTFERREVLDSSNIKPMNLIGVDRGENIPAVIALTDPEGCPLSRFKDSLGNPTHILRIGESYKEKQRTIQAKKEVEQRRAGGYSRKYASKAKNLADDMVRNTARDLLYYAVTQDAMLIFENLSRGFGRQGKRTFMAERQYTRMEDWLTAKLAYEGLPSKTYLSKTLAQYTSKTCSNCGFTITSADYDRVLEKLKKTATGWMTTINGKELKVEGQITYYNRYKRQNVVKDLSVELDRLSEESVNNDISSWTKGRSGEALSLLKKRFSHRPVQEKFVCLNCGFETHADEQAALNIARSWLFLRSQEYKKYQTNKTTGNTDKRAFVETWQSFYRKKLKEVWKPAV

SEQ ID NO: 29582 - protein, 979 aa, synthetic construct
  REGION 1..979: note = engineered CasX variant
QEIKRINKIRRRLVKDSNTKKAGKTGPMKTLLVRVMTPDLRERLENLRKKPENIPQPISNTSRANLNKLLTDYTEMKKAILHVYWEEFQKDPVGLMSRVAQPASKKIDQNKLKPEMDEKGNLTTAGFACSQCGQPLFVYKLEQVSEKGKAYTNYFGRCNVAEHEKLILLAQLKPEKDSDEAVTYSLGKFGQRALDFYSIHVTKESTHPVKPLAQIAGNRYASGPVGKALSDACMGTIASFLSKYQDIIIEHQKVVKGNQKRLESLRELAGKENLEYPSVTLPPQPHTKEGVDAYNEVIARVRMWVNLNLWQKLKLSRDDAKPLLRLKGFPSFPLVERQANEVDWWDMVCNVKKLINEKKEDGKVFWQNLAIYKRQEALRPYLSSEEDRKKGKKFARYQLGDLLLHLEKKHEGEDWGKVYDEAWERIDKKVEGLSKHIKLEEERRSEDAQSKAALTDWLRAKASFVIEGLKEADKDEFCRCELKLQKWYGDLRGKPFAIEAENSILDISGFSKQYNCAFIWQKDGVKKLNLYLIINYFKGGKLRFKKIKPEAFEANRFYTVINKKSGEIVPMEVNFNFDDPNLIILPLAFGKRQGREFIWNDLLSLETGSLKLANGRVIEKTLYNRRTRQDEPALFVALTFERREVLDSSNIKPMNLIGVDRGENIPAVIALTDPEGCPLSRFKDSLGNPTHILRIGESYKEKQRTIQAKKEVEQRRAGGYSRKYASKAKNLADDMVRNTARDLLYYAVTQDAMLIFENLSRGFGRQGKRTFMAERQYTRMEDWLTAKLAYEGLPSKTYLSKTLAQYTSKTCSNCGFTITSADYDRVLEKLKKTATGWMTTINGKELKVEGQITYYNRYKRQNVVKDLSVELDRLSEESVNNDISSWTKGRSGEALSLLKKRFSHRPVQEKFVCLNCGFETHADEQAALNIARSWLFLRSQEYKKYQTNKTTGNTDKRAFVETWQSFYRKKLKEVWKPAV

SEQ ID NO: 29583 - protein, 979 aa, synthetic construct
  REGION 1..979: note = engineered CasX variant
QEIKRINKIRRRLVKDSNTKKAGKTGPMKTLLVRVMTPDLRERLENLRKKPENIPQPISNTSRANLNKLLTDYTEMKKAILHVYWEEFQKDPVGLMSRVAQPASKKIDQNKLKPEMDEKGNLTTAGFACSQCGQPLFVYKLEQVSEKGKAYTNYFGRCNVAEHEKLILLAQLKPEKDSDEAVTYSLGKFGQRALDFYSIHVTKESTHPVKPLAQIAGNRYASGPVGKALSDACMGTIASFLSKYQDIIIEHQKVVKGNQKRLESLRELAGKENLEYPSVTLPPQPHTKEGVDAYNEVIARVRMWVNLNLWQKLKLSRDDAKPLLRLKGFPSFPLVERQANEVDWWDMVCNVKKLINEKKEDGKVFWQNLAGYKRQEALRPYLSSEEDREKGKKFARYQLGDLLLHLEKKHEGEDWGKVYDEAWERIDKKVEGLSKHIKLEEERRSEDAQSKAALTDWLRAKASFVIEGLKEADKDEFCRCELKLQKWYGDLRGKPFAIEAENSILDISGFSKQYNCAFIWQKDGVKKLNLYLIINYFKGGKLRFKKIKPEAFEANRFYTVINKKSGEIVPMEVNFNFDDPNLIILPLAFGKRQGREFIWNDLLSLETGSLKLANGRVIEKTLYNRRTRQDEPALFVALTFERREVLDSSNIKPMNLIGVDRGENIPAVIALTDPEGCPLSRFKDSLGNPTHILRIGESYKEKQRTIQAKKEVEQRRAGGYSRKYASKAKNLADDMVRNTARDLLYYAVTQDAMLIFENLSRGFGRQGKRTFMAERQYTRMEDWLTAKLAYEGLPSKTYLSKTLAQYTSKTCSNCGFTITSADYDRVLEKLKKTATGWMTTINGKELKVEGQITYYNRYKRQNVVKDLSVELDRLSEESVNNDISSWTKGRSGEALSLLKKRFSHRPVQEKFVCLNCGFETHADEQAALNIARSWLFLRSQEYKKYQTNKTTGNTDKRAFVETWQSFYRKKLKEVWKPAV

SEQ ID NO: 29584 - protein, 979 aa, synthetic construct
  REGION 1..979: note = engineered CasX variant
QEIKRINKIRRRLVKDSNTKKAGKTGPMKTLLVRVMTPDLRERLENLRKKPENIPQPISNTSRANLNKLLTDYTEMKKAILHVYWEEFQKDPVGLMSRVAQPASKKIDQNKLKPEMDEKGNLTTAGFACSQCGQPLFVYKLEQVSEKGKAYTNYFGRCNVAEHEKLILLAQLKPEKDSDEAVTYSLGKFGQRALDFYSIHVTKESTHPVKPLAQIAGNRYASGPVGKALSDACMGTIASFLSKYQDIIIEHQKVVKGNQKRLESLRELAGKENLEYPSVTLPPQPHTKEGVDAYNEVIARVRMWVNLNLWQKLKLSRDDAKPLLRLKGFPSFPLVERQANEVDWWDMVCNVKKLINEKKEDGKVFWQNLAGYKRQEALRPYLSSEEDRKKGKKFARYQLGDLLLHLEKKHEGEDWGKVYDEAWERIDKKVEGLSKHIKLEEERRSEDAQSKAALTDWLRAKASFVIEGLKEADKDEFCRCELKLQKWYGDLRGKPFAIEAENSILDISGFSKQYNCAFIWQKDGVKKLNLYLIINYFKGGKLRFKKIKPEAFEANRFYTVINKKSGEIVIMEVNFNFDDPNLIILPLAFGKRQGREFIWNDLLSLETGSLKLANGRVIEKTLYNRRTRQDEPALFVALTFERREVLDSSNIKPMNLIGVDRGENIPAVIALTDPEGCPLSRFKDSLGNPTHILRIGESYKEKQRTIQAKKEVEQRRAGGYSRKYASKAKNLADDMVRNTARDLLYYAVTQDAMLIFENLSRGFGRQGKRTFMAERQYTRMEDWLTAKLAYEGLPSKTYLSKTLAQYTSKTCSNCGFTITSADYDRVLEKLKKTATGWMTTINGKELKVEGQITYYNRYKRQNVVKDLSVELDRLSEESVNNDISSWTKGRSGEALSLLKKRFSHRPVQEKFVCLNCGFETHADEQAALNIARSWLFLRSQEYKKYQTNKTTGNTDKRAFVETWQSFYRKKLKEVWKPAV

SEQ ID NO: 29585 - protein, 978 aa, synthetic construct
  REGION 1..978: note = engineered CasX variant
QEIKRINKIRRRLVKDSNTKKAGKTGPMKTLLVRVMTPDLRERLENLRKKPENIPQPISNTSRANLNKLLTDYTEMKKAILHVYWEEFQKDPVGLMSRVAQPASKKIDQNKLKPEMDEKGNLTTAGFACSQCGQPLFVYKLEQVSEKGKAYTNYFGRCNVAEHEKLILLAQLKPEKDSDEAVTYSLGKFGQRALDFYSIHVTKESTHPVKPLAQIAGNRYASGPVGKALSGACMGTIASFLSKYQDIIIEHQKVVKGNQKRLESLRELAGKENLEYPSVTLPPQPHTKEGVDAYNEVIARVRMWVNLNLWQKLKLSRDDAKPLLRLKGFPSFPLVERQANEVDWWDMVCNVKKLINEKKEDGKVFWQNLAGYKRQEALRPYLSSEEDRKKGKKFARYQLGDLLLHLEKKHGEDWGKVYDEAWERIDKKVEGLSKHIKLEEERRSEDAQSKAALTDWLRAKASFVIEGLKEADKDEFCRCDLKLQKWYGDLRGKPFAIEAENSILDISGFSKQYNCAFIWQKDGVKKLNLYLIINYFKGGKLRFKKIKPEAFEANRFYTVINKKSGEIVPMEVNFNFDDPNLIILPLAFGKRQGREFIWNDLLSLETGSLKLANGRVIEKTLYNRRTRQDEPALFVALTFERREVLDSSNIKPMNLIGVDRGENIPAVIALTDPEGCPLSRFKDSLGNPTHILRIGESYKEKQRTIQAKKEVEQRRAGGYSRKYASKAKNLADDMVRNTARDLLYYAVTQDAMLIFENLSRGFGRQGKRTFMAERQYTRMEDWLTAKLAYEGLPSKTYLSKTLAQYTSKTCSNCGFTITSADYDRVLEKLKKTATGWMTTINGKELKVEGQITYYNRYKRQNVVKDLSVELDRLSEESVNNDISSWTKGRSGEALSLLKKRFSHRPVQEKFVCLNCGFETHADEQAALNIARSWLFLRSQEYKKYQTNKTTGNTDKRAFVETWQSFYRKKLKEVWKPAV

SEQ ID NO: 29586 - protein, 978 aa, synthetic construct
  REGION 1..978: note = engineered CasX variant
QEIKRINKIRRRLVKDSNTKKAGKTGPMKTLLVRVMTPDLRERLENLRKKPENIPQPISNTSRANLNKLLTDYTEMKKAILHVYWEEFQKDPVGLMSRVAQPASKKIDQNKLKPEMDEKGNLTTAGFACSQCGQPLFVYKLEQVSEKGKAYTNYFGRCNVAEHEKLILLAQLKPEKDSDEAVTYSLGKFGQRALDFYSIHVTKESTHPVKPLAQIAGNRYASGPVGKALSDACMGTIASFLSKYQDIIIEHQKVVKGNQKRLESLRELAGKENLEYPSVTLPPQPHTKEGVDAYNEVIARVRMWVNLNLWQKLKLSRDDAKPLLRLKNFPSFPLVERQANEVDWWDMVCNVKKLINEKKEDGKVFWQNLAGYKRQEALRPYLSSEEDRKKGKKFARYQLGDLLLHLEKKHGEDWGKVYDEAWERIDKKVEGLSKHIKLEEERRSEDAQSKAALTDWLRAKASFVIEGLKEADKDEFCRCDLKLQKWYGDLRGKPFAIEAENSILDISGFSKQYNCAFIWQKDGVKKLNLYLIINYFKGGKLRFKKIKPEAFEANRFYTVINKKSGEIVPMEVNFNFDDPNLIILPLAFGKRQGREFIWNDLLSLETGSLKLANGRVIEKTLYNRRTRQDEPALFVALTFERREVLDSSNIKPMNLIGVDRGENIPAVIALTDPEGCPLSRFKDSLGNPTHILRIGESYKEKQRTIQAKKEVEQRRAGGYSRKYASKAKNLADDMVRNTARDLLYYAVTQDAMLIFENLSRGFGRQGKRTFMAERQYTRMEDWLTAKLAYEGLPSKTYLSKTLAQYTSKTCSNCGFTITSADYDRVLEKLKKTATGWMTTINGKELKVEGQITYYNRYKRQNVVKDLSVELDRLSEESVNNDISSWTKGRSGEALSLLKKRFSHRPVQEKFVCLNCGFETHADEQAALNIARSWLFLRSQEYKKYQTNKTTGNTDKRAFVETWQSFYRKKLKEVWKPAV

SEQ ID NO: 29587 - protein, 978 aa, synthetic construct
  REGION 1..978: note = engineered CasX variant
QEIKRINKIRRRLVKDSNTKKAGKTGPMKTLLVRVMTPDLRERLENLRKKPENIPQPISNTSRANLNKLLTDYTEMKKAILHVYWEEFQKDPVGLMSRVAQPASKKIDQNKLKPEMDEKGNLTTAGFACSQCGQPLFVYKLEQVSEKGKAYTNYFGRCNVAEHEKLILLAQLKPEKDSDEAVTYSLGKFGQRALDFYSIHVTKESTHPVKPLAQIAGNRYASGPVGKALSDACMGTIASFLSKYQDIIIEHQKVVKGNQKRLESLRELAGKENLEYPSVTLPPQPHTKEGVDAYNEVIARVRMWVNLNLWQKLKLSRDDAKPLLRLKGFPSFPLVERQANEVDWWDMVCNVKKLINEKKEDGKVFWQNLAGYKRQEALRPYLSSEEDRKKGKKFARYQLGDLLNHLEKKHGEDWGKVYDEAWERIDKKVEGLSKHIKLEEERRSEDAQSKAALTDWLRAKASFVIEGLKEADKDEFCRCDLKLQKWYGDLRGKPFAIEAENSILDISGFSKQYNCAFIWQKDGVKKLNLYLIINYFKGGKLRFKKIKPEAFEANRFYTVINKKSGEIVPMEVNFNFDDPNLIILPLAFGKRQGREFIWNDLLSLETGSLKLANGRVIEKTLYNRRTRQDEPALFVALTFERREVLDSSNIKPMNLIGVDRGENIPAVIALTDPEGCPLSRFKDSLGNPTHILRIGESYKEKQRTIQAKKEVEQRRAGGYSRKYASKAKNLADDMVRNTARDLLYYAVTQDAMLIFENLSRGFGRQGKRTFMAERQYTRMEDWLTAKLAYEGLPSKTYLSKTLAQYTSKTCSNCGFTITSADYDRVLEKLKKTATGWMTTINGKELKVEGQITYYNRYKRQNVVKDLSVELDRLSEESVNNDISSWTKGRSGEALSLLKKRFSHRPVQEKFVCLNCGFETHADEQAALNIARSWLFLRSQEYKKYQTNKTTGNTDKRAFVETWQSFYRKKLKEVWKPAV

SEQ ID NO: 29588 - protein, 978 aa, synthetic construct
  REGION 1..978: note = engineered CasX variant
QEIKRINKIRRRLVKDSNTKKAGKTGPMKTLLVRVMTPDLRERLENLRKKPENIPQPISNTSRANLNKLLTDYTEMKKAILHVYWEEFQKDPVGLMSRVAQPASKKIDQNKLKPEMDEKGNLTTAGFACSQCGQPLFVYKLEQVSEKGKAYTNYFGRCNVAEHEKLILLAQLKPEKDSDEAVTYSLGKFGQRALDFYSIHVTKESTHPVKPLAQIAGNRYASGPVGKALSDACMGTIASFLSKYQDIIIEHQKVVKGNQKRLESLRELAGKENLEYPSVTLPPQPHTKEGVDAYNEVIARVRMWVNLNLWQKLKLSRDDAKPLLRLKGFPSFPLVERQANEVDWWDMVCNVKKLINEKKEDGKVFWQNLAGYKRQEALRPYLSSEEDRKKGKKFARYQLGDLLWHLEKKHGEDWGKVYDEAWERIDKKVEGLSKHIKLEEERRSEDAQSKAALTDWLRAKASFVIEGLKEADKDEFCRCDLKLQKWYGDLRGKPFAIEAENSILDISGFSKQYNCAFIWQKDGVKKLNLYLIINYFKGGKLRFKKIKPEAFEANRFYTVINKKSGEIVPMEVNFNFDDPNLIILPLAFGKRQGREFIWNDLLSLETGSLKLANGRVIEKTLYNRRTRQDEPALFVALTFERREVLDSSNIKPMNLIGVDRGENIPAVIALTDPEGCPLSRFKDSLGNPTHILRIGESYKEKQRTIQAKKEVEQRRAGGYSRKYASKAKNLADDMVRNTARDLLYYAVTQDAMLIFENLSRGFGRQGKRTFMAERQYTRMEDWLTAKLAYEGLPSKTYLSKTLAQYTSKTCSNCGFTITSADYDRVLEKLKKTATGWMTTINGKELKVEGQITYYNRYKRQNVVKDLSVELDRLSEESVNNDISSWTKGRSGEALSLLKKRFSHRPVQEKFVCLNCGFETHADEQAALNIARSWLFLRSQEYKKYQTNKTTGNTDKRAFVETWQSFYRKKLKEVWKPAV

SEQ ID NO: 29589 - protein, 978 aa, synthetic construct
  REGION 1..978: note = engineered CasX variant
QEIKRINKIRRRLVKDSNTKKAGKTGPMKTLLVRVMTPDLRERLENLRKKPENIPQPISNTSRANLNKLLTDYTEMKKAILHVYWEEFQKDPVGLMSRVAQPASKKIDQNKLKPEMDEKGNLTTAGFACSQCGQPLFVYKLEQVSEKGKAYTNYFGRCNVAEHEKLILLAQLKPEKDSDEAVTYSLGKFGQRALDFYSIHVTKESTHPVKPLAQIAGNRYASGPVGKALSDACMGTIASFLSKYQDIIIEHQKVVKGNQKRLESLRELAGKENLEYPSVTLPPQPHTKEGVDAYNEVIARVRMWVNLNLWQKLKLSRDDAKPLLRLKGFPSFPLVERQANEVDWWDMVCNVKKLINEKKEDGKVFWQNLAGYKRQEALRPYLSSEEDRKKGKKFARYQLGDLLLHLYKKHGEDWGKVYDEAWERIDKKVEGLSKHIKLEEERRSEDAQSKAALTDWLRAKASFVIEGLKEADKDEFCRCDLKLQKWYGDLRGKPFAIEAENSILDISGFSKQYNCAFIWQKDGVKKLNLYLIINYFKGGKLRFKKIKPEAFEANRFYTVINKKSGEIVPMEVNFNFDDPNLIILPLAFGKRQGREFIWNDLLSLETGSLKLANGRVIEKTLYNRRTRQDEPALFVALTFERREVLDSSNIKPMNLIGVDRGENIPAVIALTDPEGCPLSRFKDSLGNPTHILRIGESYKEKQRTIQAKKEVEQRRAGGYSRKYASKAKNLADDMVRNTARDLLYYAVTQDAMLIFENLSRGFGRQGKRTFMAERQYTRMEDWLTAKLAYEGLPSKTYLSKTLAQYTSKTCSNCGFTITSADYDRVLEKLKKTATGWMTTINGKELKVEGQITYYNRYKRQNVVKDLSVELDRLSEESVNNDISSWTKGRSGEALSLLKKRFSHRPVQEKFVCLNCGFETHADEQAALNIARSWLFLRSQEYKKYQTNKTTGNTDKRAFVETWQSFYRKKLKEVWKPAV

SEQ ID NO: 29590 - protein, 978 aa, synthetic construct
  REGION 1..978: note = engineered CasX variant
QEIKRINKIRRRLVKDSNTKKAGKTGPMKTLLVRVMTPDLRERLENLRKKPENIPQPISNTSRANLNKLLTDYTEMKKAILHVYWEEFQKDPVGLMSRVAQPASKKIDQNKLKPEMDEKGNLTTAGFACSQCGQPLFVYKLEQVSEKGKAYTNYFGRCNVAEHEKLILLAQLKPEKDSDEAVTYSLGKFGQRALDFYSIHVTKESTHPVKPLAQIAGNRYASGPVGKALSDACMGTIASFLSKYQDIIIEHQKVVKGNQKRLESLRELAGKENLEYPSVTLPPQPHTKEGVDAYNEVIARVRMWVNLNLWQKLKLSRDDAKPLLRLKGFPSFPLVERQANEVDWWDMVCNVKKLINEKKEDGKVFWQNLAGYKRQEALRPYLSSEEDRKKGKKFARYQLGDLLLHLEKKHPEDWGKVYDEAWERIDKKVEGLSKHIKLEEERRSEDAQSKAALTDWLRAKASFVIEGLKEADKDEFCRCDLKLQKWYGDLRGKPFAIEAENSILDISGFSKQYNCAFIWQKDGVKKLNLYLIINYFKGGKLRFKKIKPEAFEANRFYTVINKKSGEIVPMEVNFNFDDPNLIILPLAFGKRQGREFIWNDLLSLETGSLKLANGRVIEKTLYNRRTRQDEPALFVALTFERREVLDSSNIKPMNLIGVDRGENIPAVIALTDPEGCPLSRFKDSLGNPTHILRIGESYKEKQRTIQAKKEVEQRRAGGYSRKYASKAKNLADDMVRNTARDLLYYAVTQDAMLIFENLSRGFGRQGKRTFMAERQYTRMEDWLTAKLAYEGLPSKTYLSKTLAQYTSKTCSNCGFTITSADYDRVLEKLKKTATGWMTTINGKELKVEGQITYYNRYKRQNVVKDLSVELDRLSEESVNNDISSWTKGRSGEALSLLKKRFSHRPVQEKFVCLNCGFETHADEQAALNIARSWLFLRSQEYKKYQTNKTTGNTDKRAFVETWQSFYRKKLKEVWKPAV

SEQ ID NO: 29591 - protein, 979 aa, synthetic construct
  REGION 1..979: note = engineered CasX variant
QEIKRINKIRRRLVKDSNTKKAGKTGPMKTLLVRVMTPDLRERLENLRKKPENIPQPISNTSRANLNKLLTDYTEMKKAILHVYWEEFQKDPVGLMSRVAQPASKKIDQNKLKPEMDEKGNLTTAGFACSQCGQPLFVYKLEQVSEKGKAYTNYFGRCNVAEHEKLILLAQLKPEKDSDEAVTYSLGKFGQRALDFYSIHVTKESTHPVKPLAQIAGNRYASGPVGKALSDACMGTIASFLSKYQDIIIEHQKVVKGNQKRLESLRELAGKENLEYPSVTLPPQPHTKEGVDAYNEVIARVRMWVNLNLWQKLKLSRDDAKPLLRLKGFPSFPLVERQANEVDWWDMVCNVKKLINEKKEDGKVFWQNLAGYKRQEALRPYLSSEEDRKKGKKFARYQLGDLLLHLEKKHGERDWGKVYDEAWERIDKKVEGLSKHIKLEEERRSEDAQSKAALTDWLRAKASFVIEGLKEADKDEFCRCDLKLQKWYGDLRGKPFAIEAENSILDISGFSKQYNCAFIWQKDGVKKLNLYLIINYFKGGKLRFKKIKPEAFEANRFYTVINKKSGEIVPMEVNFNFDDPNLIILPLAFGKRQGREFIWNDLLSLETGSLKLANGRVIEKTLYNRRTRQDEPALFVALTFERREVLDSSNIKPMNLIGVDRGENIPAVIALTDPEGCPLSRFKDSLGNPTHILRIGESYKEKQRTIQAKKEVEQRRAGGYSRKYASKAKNLADDMVRNTARDLLYYAVTQDAMLIFENLSRGFGRQGKRTFMAERQYTRMEDWLTAKLAYEGLPSKTYLSKTLAQYTSKTCSNCGFTITSADYDRVLEKLKKTATGWMTTINGKELKVEGQITYYNRYKRQNVVKDLSVELDRLSEESVNNDISSWTKGRSGEALSLLKKRFSHRPVQEKFVCLNCGFETHADEQAALNIARSWLFLRSQEYKKYQTNKTTGNTDKRAFVETWQSFYRKKLKEVWKPAV

SEQ ID NO: 29592 - protein, 979 aa, synthetic construct
  REGION 1..979: note = engineered CasX variant
QEIKRINKIRRRLVKDSNTKKAGKTGPMKTLLVRVMTPDLRERLENLRKKPENIPQPISNTSRANLNKLLTDYTEMKKAILHVYWEEFQKDPVGLMSRVAQPASKKIDQNKLKPEMDEKGNLTTAGFACSQCGQPLFVYKLEQVSEKGKAYTNYFGRCNVAEHEKLILLAQLKPEKDSDEAVTYSLGKFGQRALDFYSIHVTKESTHPVKPLAQIAGNRYASGPVGKALSDACMGTIASFLSKYQDIIIEHQKVVKGNQKRLESLRELAGKENLEYPSVTLPPQPHTKEGVDAYNEVIARVRMWVNLNLWQKLKLSRDDAKPLLRLKGFPSFPLVERQANEVDWWDMVCNVKKLINEKKEDGKVFWQNLAGYKRQEALRPYLSSEEDRKKGKKFARYQLGDLLLHLEKKHGEYDWGKVYDEAWERIDKKVEGLSKHIKLEEERRSEDAQSKAALTDWLRAKASFVIEGLKEADKDEFCRCDLKLQKWYGDLRGKPFAIEAENSILDISGFSKQYNCAFIWQKDGVKKLNLYLIINYFKGGKLRFKKIKPEAFEANRFYTVINKKSGEIVPMEVNFNFDDPNLIILPLAFGKRQGREFIWNDLLSLETGSLKLANGRVIEKTLYNRRTRQDEPALFVALTFERREVLDSSNIKPMNLIGVDRGENIPAVIALTDPEGCPLSRFKDSLGNPTHILRIGESYKEKQRTIQAKKEVEQRRAGGYSRKYASKAKNLADDMVRNTARDLLYYAVTQDAMLIFENLSRGFGRQGKRTFMAERQYTRMEDWLTAKLAYEGLPSKTYLSKTLAQYTSKTCSNCGFTITSADYDRVLEKLKKTATGWMTTINGKELKVEGQITYYNRYKRQNVVKDLSVELDRLSEESVNNDISSWTKGRSGEALSLLKKRFSHRPVQEKFVCLNCGFETHADEQAALNIARSWLFLRSQEYKKYQTNKTTGNTDKRAFVETWQSFYRKKLKEVWKPAV

SEQ ID NO: 29593 - protein, 978 aa, synthetic construct
  REGION 1..978: note = engineered CasX variant
QEIKRINKIRRRLVKDSNTKKAGKTGPMKTLLVRVMTPDLRERLENLRKKPENIPQPISNTSRANLNKLLTDYTEMKKAILHVYWEEFQKDPVGLMSRVAQPASKKIDQNKLKPEMDEKGNLTTAGFACSQCGQPLFVYKLEQVSEKGKAYTNYFGRCNVAEHEKLILLAQLKPEKDSDEAVTYSLGKFGQRALDFYSIHVTKESTHPVKPLAQIAGNRYASGPVGKALSDACMGTIASFLSKYQDIIIEHQKVVKGNQKRLESLRELAGKENLEYPSVTLPPQPHTKEGVDAYNEVIARVRMWVNLNLWQKLKLSRDDAKPLLRLKGFPSFPLVERQANEVDWWDMVCNVKKLINEKKEDGKVFWQNLAGYKRQEALRPYLSSEEDRKKGKKFARYQLGDLLLHLEKKHGEDWGDVYDEAWERIDKKVEGLSKHIKLEEERRSEDAQSKAALTDWLRAKASFVIEGLKEADKDEFCRCDLKLQKWYGDLRGKPFAIEAENSILDISGFSKQYNCAFIWQKDGVKKLNLYLIINYFKGGKLRFKKIKPEAFEANRFYTVINKKSGEIVPMEVNFNFDDPNLIILPLAFGKRQGREFIWNDLLSLETGSLKLANGRVIEKTLYNRRTRQDEPALFVALTFERREVLDSSNIKPMNLIGVDRGENIPAVIALTDPEGCPLSRFKDSLGNPTHILRIGESYKEKQRTIQAKKEVEQRRAGGYSRKYASKAKNLADDMVRNTARDLLYYAVTQDAMLIFENLSRGFGRQGKRTFMAERQYTRMEDWLTAKLAYEGLPSKTYLSKTLAQYTSKTCSNCGFTITSADYDRVLEKLKKTATGWMTTINGKELKVEGQITYYNRYKRQNVVKDLSVELDRLSEESVNNDISSWTKGRSGEALSLLKKRFSHRPVQEKFVCLNCGFETHADEQAALNIARSWLFLRSQEYKKYQTNKTTGNTDKRAFVETWQSFYRKKLKEVWKPAV

SEQ ID NO: 29594 - protein, 978 aa, synthetic construct
  REGION 1..978: note = engineered CasX variant
QEIKRINKIRRRLVKDSNTKKAGKTGPMKTLLVRVMTPDLRERLENLRKKPENIPQPISNTSRANLNKLLTDYTEMKKAILHVYWEEFQKDPVGLMSRVAQPASKKIDQNKLKPEMDEKGNLTTAGFACSQCGQPLFVYKLEQVSEKGKAYTNYFGRCNVAEHEKLILLAQLKPEKDSDEAVTYSLGKFGQRALDFYSIHVTKESTHPVKPLAQIAGNRYASGPVGKALSDACMGTIASFLSKYQDIIIEHQKVVKGNQKRLESLRELAGKENLEYPSVTLPPQPHTKEGVDAYNEVIARVRMWVNLNLWQKLKLSRDDAKPLLRLKGFPSFPLVERQANEVDWWDMVCNVKKLINEKKEDGKVFWQNLAGYKRQEALRPYLSSEEDRKKGKKFARYQLGDLLLHLEKKHGEDWGKVYGEAWERIDKKVEGLSKHIKLEEERRSEDAQSKAALTDWLRAKASFVIEGLKEADKDEFCRCDLKLQKWYGDLRGKPFAIEAENSILDISGFSKQYNCAFIWQKDGVKKLNLYLIINYFKGGKLRFKKIKPEAFEANRFYTVINKKSGEIVPMEVNFNFDDPNLIILPLAFGKRQGREFIWNDLLSLETGSLKLANGRVIEKTLYNRRTRQDEPALFVALTFERREVLDSSNIKPMNLIGVDRGENIPAVIALTDPEGCPLSRFKDSLGNPTHILRIGESYKEKQRTIQAKKEVEQRRAGGYSRKYASKAKNLADDMVRNTARDLLYYAVTQDAMLIFENLSRGFGRQGKRTFMAERQYTRMEDWLTAKLAYEGLPSKTYLSKTLAQYTSKTCSNCGFTITSADYDRVLEKLKKTATGWMTTINGKELKVEGQITYYNRYKRQNVVKDLSVELDRLSEESVNNDISSWTKGRSGEALSLLKKRFSHRPVQEKFVCLNCGFETHADEQAALNIARSWLFLRSQEYKKYQTNKTTGNTDKRAFVETWQSFYRKKLKEVWKPAV

SEQ ID NO: 29595 - protein, 978 aa, synthetic construct
  REGION 1..978: note = engineered CasX variant
QEIKRINKIRRRLVKDSNTKKAGKTGPMKTLLVRVMTPDLRERLENLRKKPENIPQPISNTSRANLNKLLTDYTEMKKAILHVYWEEFQKDPVGLMSRVAQPASKKIDQNKLKPEMDEKGNLTTAGFACSQCGQPLFVYKLEQVSEKGKAYTNYFGRCNVAEHEKLILLAQLKPEKDSDEAVTYSLGKFGQRALDFYSIHVTKESTHPVKPLAQIAGNRYASGPVGKALSDACMGTIASFLSKYQDIIIEHQKVVKGNQKRLESLRELAGKENLEYPSVTLPPQPHTKEGVDAYNEVIARVRMWVNLNLWQKLKLSRDDAKPLLRLKGFPSFPLVERQANEVDWWDMVCNVKKLINEKKEDGKVFWQNLAGYKRQEALRPYLSSEEDRKKGKKFARYQLGDLLLHLEKKHGEDWGKVYDEAWERIDKKVEGLSKHIKLEEERRSEDAQSKAALTDWLRAKASFVIEGKKEADKDEFCRCDLKLQKWYGDLRGKPFAIEAENSILDISGFSKQYNCAFIWQKDGVKKLNLYLIINYFKGGKLRFKKIKPEAFEANRFYTVINKKSGEIVPMEVNFNFDDPNLIILPLAFGKRQGREFIWNDLLSLETGSLKLANGRVIEKTLYNRRTRQDEPALFVALTFERREVLDSSNIKPMNLIGVDRGENIPAVIALTDPEGCPLSRFKDSLGNPTHILRIGESYKEKQRTIQAKKEVEQRRAGGYSRKYASKAKNLADDMVRNTARDLLYYAVTQDAMLIFENLSRGFGRQGKRTFMAERQYTRMEDWLTAKLAYEGLPSKTYLSKTLAQYTSKTCSNCGFTITSADYDRVLEKLKKTATGWMTTINGKELKVEGQITYYNRYKRQNVVKDLSVELDRLSEESVNNDISSWTKGRSGEALSLLKKRFSHRPVQEKFVCLNCGFETHADEQAALNIARSWLFLRSQEYKKYQTNKTTGNTDKRAFVETWQSFYRKKLKEVWKPAV

SEQ ID NO: 29596 - protein, 978 aa, synthetic construct
  REGION 1..978: note = engineered CasX variant
QEIKRINKIRRRLVKDSNTKKAGKTGPMKTLLVRVMTPDLRERLENLRKKPENIPQPISNTSRANLNKLLTDYTEMKKAILHVYWEEFQKDPVGLMSRVAQPASKKIDQNKLKPEMDEKGNLTTAGFACSQCGQPLFVYKLEQVSEKGKAYTNYFGRCNVAEHEKLILLAQLKPEKDSDEAVTYSLGKFGQRALDFYSIHVTKESTHPVKPLAQIAGNRYASGPVGKALSDACMGTIASFLSKYQDIIIEHQKVVKGNQKRLESLRELAGKENLEYPSVTLPPQPHTKEGVDAYNEVIARVRMWVNLNLWQKLKLSRDDAKPLLRLKGFPSFPLVERQANEVDWWDMVCNVKKLINEKKEDGKVFWQNLAGYKRQEALRPYLSSEEDRKKGKKFARYQLGDLLLHLEKKHGEDWGKVYDEAWERIDKKVEGLSKHIKLEEERRSEDAQSKAALTDWLRAKASFVIEGSKEADKDEFCRCDLKLQKWYGDLRGKPFAIEAENSILDISGFSKQYNCAFIWQKDGVKKLNLYLIINYFKGGKLRFKKIKPEAFEANRFYTVINKKSGEIVPMEVNFNFDDPNLIILPLAFGKRQGREFIWNDLLSLETGSLKLANGRVIEKTLYNRRTRQDEPALFVALTFERREVLDSSNIKPMNLIGVDRGENIPAVIALTDPEGCPLSRFKDSLGNPTHILRIGESYKEKQRTIQAKKEVEQRRAGGYSRKYASKAKNLADDMVRNTARDLLYYAVTQDAMLIFENLSRGFGRQGKRTFMAERQYTRMEDWLTAKLAYEGLPSKTYLSKTLAQYTSKTCSNCGFTITSADYDRVLEKLKKTATGWMTTINGKELKVEGQITYYNRYKRQNVVKDLSVELDRLSEESVNNDISSWTKGRSGEALSLLKKRFSHRPVQEKFVCLNCGFETHADEQAALNIARSWLFLRSQEYKKYQTNKTTGNTDKRAFVETWQSFYRKKLKEVWKPAV

SEQ ID NO: 29597 - protein, 979 aa, synthetic construct
  REGION 1..979: note = engineered CasX variant
QEIKRINKIRRRLVKDSNTKKAGKTGPMKTLLVRVMTPDLRERLENLRKKPENIPQPISNTSRANLNKLLTDYTEMKKAILHVYWEEFQKDPVGLMSRVAQPASKKIDQNKLKPEMDEKGNLTTAGFACSQCGQPLFVYKLEQVSEKGKAYTNYFGRCNVAEHEKLILLAQLKPEKDSDEAVTYSLGKFGQRALDFYSIHVTKESTHPVKPLAQIAGNRYASGPVGKALSDACMGTIASFLSKYQDIIIEHQKVVKGNQKRLESLRELAGKENLEYPSVTLPPQPHTKEGVDAYNEVIARVRMWVNLNLWQKLKLSRDDAKPLLRLKGFPSFPLVERQANEVDWWDMVCNVKKLINEKKEDGKVFWQNLAGYKRQEALRPYLSSEEDRKKGKKFARYQLGDLLLHLEKKHGEDWGKVYDEAWERIDKKVEGLSKHIKLEEERRSEDAQSKAALTDWLRAKASFVIEGLKEADDKDEFCRCDLKLQKWYGDLRGKPFAIEAENSILDISGFSKQYNCAFIWQKDGVKKLNLYLIINYFKGGKLRFKKIKPEAFEANRFYTVINKKSGEIVPMEVNFNFDDPNLIILPLAFGKRQGREFIWNDLLSLETGSLKLANGRVIEKTLYNRRTRQDEPALFVALTFERREVLDSSNIKPMNLIGVDRGENIPAVIALTDPEGCPLSRFKDSLGNPTHILRIGESYKEKQRTIQAKKEVEQRRAGGYSRKYASKAKNLADDMVRNTARDLLYYAVTQDAMLIFENLSRGFGRQGKRTFMAERQYTRMEDWLTAKLAYEGLPSKTYLSKTLAQYTSKTCSNCGFTITSADYDRVLEKLKKTATGWMTTINGKELKVEGQITYYNRYKRQNVVKDLSVELDRLSEESVNNDISSWTKGRSGEALSLLKKRFSHRPVQEKFVCLNCGFETHADEQAALNIARSWLFLRSQEYKKYQTNKTTGNTDKRAFVETWQSFYRKKLKEVWKPAV

SEQ ID NO: 29598 - protein, 979 aa, synthetic construct
  REGION 1..979: note = engineered CasX variant
QEIKRINKIRRRLVKDSNTKKAGKTGPMKTLLVRVMTPDLRERLENLRKKPENIPQPISNTSRANLNKLLTDYTEMKKAILHVYWEEFQKDPVGLMSRVAQPASKKIDQNKLKPEMDEKGNLTTAGFACSQCGQPLFVYKLEQVSEKGKAYTNYFGRCNVAEHEKLILLAQLKPEKDSDEAVTYSLGKFGQRALDFYSIHVTKESTHPVKPLAQIAGNRYASGPVGKALSDACMGTIASFLSKYQDIIIEHQKVVKGNQKRLESLRELAGKENLEYPSVTLPPQPHTKEGVDAYNEVIARVRMWVNLNLWQKLKLSRDDAKPLLRLKGFPSFPLVERQANEVDWWDMVCNVKKLINEKKEDGKVFWQNLAGYKRQEALRPYLSSEEDRKKGKKFARYQLGDLLLHLEKKHGEDWGKVYDEAWERIDKKVEGLSKHIKLEEERRSEDAQSKAALTDWLRAKASFVIEGLKEADKDEFCRCDLKLQKWYGDLRGKPFAIEAENSILDISGFSKQYNCAFIWQKDGVKKLNLYLIINYFKGGKLRFKKIKPEAFEANRFYTVINKKSGEIVPMEVNFNFDDPNLIILPLAFGKRQGREFIWNDLLSLETGSLKLANGRVIEKTLYNRRTRQDEPALFVALTFERREVLDSSNIKPMNLIGVDRGENIPAVIALTDPEGCPLSRFKDSLGNPTHILRIGESYKEKQRTIQAKKEVEQRRAGGYSRKYASKAKNLADDMVRNTARDLLYYAVTQDAMLIFENLSRGFGRQGKRTFMAERQYTRMEDWLTAKLAYEGLPSKTYLSKTLAQYTSKTCSNCGFTITSADYDRVLEKLKKTATGWMTTINGKELKVEGQITYYNRYKRQNVVKDLSVELDRLSEESVNNDISSWTKGRSGNEALSLLKKRFSHRPVQEKFVCLNCGFETHADEQAALNIARSWLFLRSQEYKKYQTNKTTGNTDKRAFVETWQSFYRKKLKEVWKPAV

SEQ ID NO: 29599 - protein, 978 aa, synthetic construct
  REGION 1..978: note = engineered CasX variant
QEIKRINKIRRRLVKDSNTKKAGKTGPMKTLLVRVMTPDLRERLENLRKKPENIPQPISNTSRANLNKLLTDYTEMKKAILHVYWEEFQKDPVGLMSRVAQPASKKIDQNKLKPEMDEKGNLTTAGFACSQCGQPLFVYKLEQVSEKGKAYTNYFGRCNVAEHEKLILLAQLKPEKDSDEAVTYSLGKFGQRALDFYSIHVTKESTHPVKPLAQIAGNRYASGPVGKALSDACMGTIASFLSKYQDIIIEHQKVVKGNQKRLESLRELAGKENLEYPSVTLPPQPHTKEGVDAYNEVIARVRMWVNLNLWQKLKLSRDDAKPLLRLKGFPSFPLVERQANEVDWWDMVCNVKKLINEKKEDGKVFWQNLAGYKRQEALRPYLSSEEDRQKGKKFARYQLGDLLLHLEKKHGEDWGKVYDEAWERIDKKVEGLSKHIKLEEERRSEDAQSKAALTDWLRAKASFVIEGLKEADKDEFCRCDLKLQKWYGDLRGKPFAIEAENSILDISGFSKQYNCAFIWQKDGVKKLNLYLIINYFKGGKLRFKKIKPEAFEANRFYTVINKKSGEIVPMEVNFNFDDPNLIILPLAFGKRQGREFIWNDLLSLETGSLKLANGRVIEKTLYNRRTRQDEPALFVALTFERREVLDSSNIKPMNLIGVDRGENIPAVIALTDPEGCPLSRFKDSLGNPTHILRIGESYKEKQRTIQAKKEVEQRRAGGYSRKYASKAKNLADDMVRNTARDLLYYAVTQDAMLIFENLSRGFGRQGKRTFMAERQYTRMEDWLTAKLAYEGLPSKTYLSKTLAQYTSKTCSNCGFTITSADYDRVLEKLKKTATGWMTTINGKELKVEGQITYYNRYKRQNVVKDLSVELDRLSEESVNNDISSWTKGRSGEALSLLKKRFSHRPVQEKFVCLNCGFETHADEQAALNIARSWLFLRSQEYKKYQTNKTTGNTDKRAFVETWQSFYRKKLKEVWKPAV

SEQ ID NO: 29600 - protein, 978 aa, synthetic construct
  REGION 1..978: note = engineered CasX variant
QEIKRINKIRRRLVKDSNTKKAGKTGPMKTLLVRVMTPDLRERLENLRKKPENIPQPISNTSRANLNKLLTDYTEMKKAILHVYWEEFQKDPVGLMSRVAQPASKKIDQNKLKPEMDEKGNLTTAGFACSQCGQPLFVYKLEQVSEKGKAYTNYFGRCNVAEHEKLILLAQLKPEKDSDEAVTYSLGKFGQRALDFYSIHVTKESTHPVKPLAQIAGNRYASGPVGKALSDACMGTIASFLSKYQDIIIEHQKVVKGNQKRLESLRELAGKENLEYPSVTLPPQPHTKEGVDAYNEVIARVRMWVNLNLWQKLKLSRDDAKPLLRLKGFPSFPLVERQANEVDWWDMVCNVKKLINEKKEDGKVFWQNLAGYKRQEALRPYLSSEEDRKKGKKFARYQLGDLLLHLEKKHGEDWGKVYDEAWERIDKKVEGLSKHIKLEEERRSEDAQSKAALTDWLRAKASFVIEGLKEADKDEFCRCDLKLQKWYGDLRGKPFAIEAENSILDISGFSKQYNCAFIWQKDGVKKLNLYLIINYFKGGKLRFKKIKPEAFEANRFYTVINKKSGEIVPMEVNFNFDDPNLIILPLAFGKRQGREFIWNDLLSLETGSLKLANGRVIEKTLYNRRTRQDEPALFVALTFERREVLDSSNIKPMNLIGVDRGENIPAVIALTDPEGCPLSRFKDSLGNPTHILRIGESYKEKQRTIQAKKEVEQRRAGGYSRKYASKAKNLADDMVRNTARDLLYYAVTQDAMLIFENLSRGFGRQGKRTFMAERQYTRMEDWLTAKLAYEGLPSQTYLSKTLAQYTSKTCSNCGFTITSADYDRVLEKLKKTATGWMTTINGKELKVEGQITYYNRYKRQNVVKDLSVELDRLSEESVNNDISSWTKGRSGEALSLLKKRFSHRPVQEKFVCLNCGFETHADEQAALNIARSWLFLRSQEYKKYQTNKTTGNTDKRAFVETWQSFYRKKLKEVWKPAV

SEQ ID NO: 29601 - protein, 978 aa, synthetic construct
  REGION 1..978: note = engineered CasX variant
QEIKRINKIRRRLVKDSNTKKAGKTGPMKTLLVRVMTPDLRERLENLRKKPENIPQPISNTSRANLNKLLTDYTEMKKAILHVYWEEFQKDPVGLMSRVAQPASKKIDQNKLKPEMDEKGNLTTAGFACSQCGQPLFVYKLEQVSEKGKAYTNYFGRCNVAEHEKLILLAQLKPEKDSDEAVTYSLGKFGQRALDFYSIHVTKESTHPVKPLAQIAGNRYASGPVGKALSDACMGTIASFLSKYQDIIIEHQKVVKGNQKRLESLRELAGKENLEYPSVTLPPQPHTKEGVDAYNEVIARVRMWVNLNLWQKLKLSRDDAKPLLRLKGFPSFPLVERQANEVDWWDMVCNVKKLINEKKEDGKVFWQNLAGYKRQEALRPYLSSEEDRKKGKKFARYQLGDLLLHLEKKHGEDWGKVYDEAWERIDKKVEGLSKHIKLEEERRSEDAQSKAALTDWLRAKASFVIEGLKEADKDEFCRCDLKLQKWYGDLRGKPFAIEAENSILDISGFSKQYNCAFIWQKDGVKKLNLYLIINYFKGGKLRFKKIKPEAFEANRFYTVINKKSGEIVPMEVNFNFDDPNLIILPLAFGKRQGREFIWNDLLSLETGSLKLANGRVIEKTLYNRRTRQDEPALFVALTFERREVLDSSNIKPMNLIGVDRGENIPAVIALTDPEGCPLSRFKDSLGNPTHILRIGESYKEKQRTIQAKKEVEQRRAGGYSRKYASKAKNLADDMVRNTARDLLYYAVTQDAMLIFENLSRGFGRQGKRTFMAERQYTRMEDWLTAKLAYNGLPSKTYLSKTLAQYTSKTCSNCGFTITSADYDRVLEKLKKTATGWMTTINGKELKVEGQITYYNRYKRQNVVKDLSVELDRLSEESVNNDISSWTKGRSGEALSLLKKRFSHRPVQEKFVCLNCGFETHADEQAALNIARSWLFLRSQEYKKYQTNKTTGNTDKRAFVETWQSFYRKKLKEVWKPAV

SEQ ID NO: 29602 - protein, 978 aa, synthetic construct
  REGION 1..978: note = engineered CasX variant
QEIKRINKIRRRLVKDSNTKKAGKTGPMKTLLVRVMTPDLRERLENLRKKPENIPQPISNTSRANLNKLLTDYTEMKKAILHVYWEEFQKDPVGLMSRVAQPASKKIDQNKLKPEMDEKGNLTTAGFACSQCGQPLFVYKLEQVSEKGKAYTNYFGRCNVAEHEKLIQLAQLKPEKDSDEAVTYSLGKFGQRALDFYSIHVTKESTHPVKPLAQIAGNRYASGPVGKALSDACMGTIASFLSKYQDIIIEHQKVVKGNQKRLESLRELAGKENLEYPSVTLPPQPHTKEGVDAYNEVIARVRMWVNLNLWQKLKLSRDDAKPLLRLKGFPSFPLVERQANEVDWWDMVCNVKKLINEKKEDGKVFWQNLAGYKRQEALRPYLSSEEDRKKGKKFARYQLGDLLLHLEKKHGEDWGKVYDEAWERIDKKVEGLSKHIKLEEERRSEDAQSKAALTDWLRAKASFVIEGLKEADKDEFCRCDLKLQKWYGDLRGKPFAIEAENSILDISGFSKQYNCAFIWQKDGVKKLNLYLIINYFKGGKLRFKKIKPEAFEANRFYTVINKKSGEIVPMEVNFNFDDPNLIILPLAFGKRQGREFIWNDLLSLETGSLKLANGRVIEKTLYNRRTRQDEPALFVALTFERREVLDSSNIKPMNLIGVDRGENIPAVIALTDPEGCPLSRFKDSLGNPTHILRIGESYKEKQRTIQAKKEVEQRRAGGYSRKYASKAKNLADDMVRNTARDLLYYAVTQDAMLIFENLSRGFGRQGKRTFMAERQYTRMEDWLTAKLAYEGLPSKTYLSKTLAQYTSKTCSNCGFTITSADYDRVLEKLKKTATGWMTTINGKELKVEGQITYYNRYKRQNVVKDLSVELDRLSEESVNNDISSWTKGRSGEALSLLKKRFSHRPVQEKFVCLNCGFETHADEQAALNIARSWLFLRSQEYKKYQTNKTTGNTDKRAFVETWQSFYRKKLKEVWKPAV

SEQ ID NO: 29603 - protein, 978 aa, synthetic construct
  REGION 1..978: note = engineered CasX variant
QEIKRINKIRRRLVKDSNTKKAGKTGPMKTLLVRVMTPDLRERLENLRKKPENIPQPISNTSRANLNKLLTDYTEMKKAILHVYWEEFQKDPVGLMSRVAQPASKKIDQNKLKPEMDEKGNLTTAGFACSQCGQPLFVYKLEQVSEKGKAYTNYFGRCNVAEHEKLILLAQLKPEKDSDEAVTYSLGKFGQRALDFYSIHVTKESTHPVKPLAQIAGNRYASGPVGKALSDACMGTIASFLSKYQDIIIEHQKVVKGNQKRLESLRELAGKENLEYPSVTLPPQPHTKEGVDAYNEVIARVRMWVNLNLWQKLKLSRDDAKPLLRLKGFPSFPLVERQANEVDWWDMVCNVKKLINEKKEDGKVFWQNLAIYKRQEALRPYLSSEEDRKKGKKFARYQLGDLLLHLEKKHGEDWGKVYDEAWERIDKKVEGLSKHIKLEEERRSEDAQSKAALTDWLRAKASFVIEGLKEADKDEFCRCDLKLQKWYGDLRGKPFAIEAENSILDISGFSKQYNCAFIWQKDGVKKLNLYLIINYFKGGKLRFKKIKPEAFEANRFYTVINKKSGEIVPMEVNFNFDDPNLIILPLAFGKRQGREFIWNDLLSLETGSLKLANGRVIEKTLYNRRTRQDEPALFVALTFERREVLDSSNIKPMNLIGVDRGENIPAVIALTDPEGCPLSRFKDSLGNPTHILRIGESYKEKQRTIQAKKEVEQRRAGGYSRKYASKAKNLADDMVRNTARDLLYYAVTQDAMLIFENLSRGFGRQGKRTFMAERQYTRMEDWLTAKLAYEGLPSKTYLSKTLAQYTSKTCSNCGFTITSADYDRVLEKLKKTATGWMTTINGKELKVEGQITYYNRYKRQNVVKDLSVELDRLSEESVNNDISSWTKGRSGEALSLLKKRFSHRPVQEKFVCLNCGFETHADEQAALNIARSWLFLRSQEYKKYQTNKTTGNTDKRAFVETWQSFYRKKLKEVWKPAV

SEQ ID NO: 29604 - protein, 978 aa, synthetic construct
  REGION 1..978: note = engineered CasX variant
QEIKRINKIRRRLVKDSNTKKAGKTGPMKTLLVRVMTPDLRERLENLRKKPENIPQPISNTSRANLNKLLTDYTEMKKAILHVYWEEFQKDPVGLMSRVAQPASKKIDQNKLKPEMDEKGNLTTAGFACSQCGQPLFVYKLEQVSEKGKAYTNYFGRCNVAEHEKLILLAQLKPEKDSDEAVTYSLGKFGQRALDFYSIHVTKESTHPVKPLAQIAGNRYASGPVGKALSDACMGTIASFLSKYQDIIIEHQKVVKGNQKRLESLRELAGKENLEYPSVTLPPQPHTKEGVDAYNEVIARVRMWVNLNLWQKLKLSRDDAKPLLRLKGFPSFPLVERQANEVDWWDMVCNVKKLINEKKEDGKVFWQNLAGYKRQEALRPYLSSEEDREKGKKFARYQLGDLLLHLEKKHGEDWGKVYDEAWERIDKKVEGLSKHIKLEEERRSEDAQSKAALTDWLRAKASFVIEGLKEADKDEFCRCDLKLQKWYGDLRGKPFAIEAENSILDISGFSKQYNCAFIWQKDGVKKLNLYLIINYFKGGKLRFKKIKPEAFEANRFYTVINKKSGEIVPMEVNFNFDDPNLIILPLAFGKRQGREFIWNDLLSLETGSLKLANGRVIEKTLYNRRTRQDEPALFVALTFERREVLDSSNIKPMNLIGVDRGENIPAVIALTDPEGCPLSRFKDSLGNPTHILRIGESYKEKQRTIQAKKEVEQRRAGGYSRKYASKAKNLADDMVRNTARDLLYYAVTQDAMLIFENLSRGFGRQGKRTFMAERQYTRMEDWLTAKLAYEGLPSKTYLSKTLAQYTSKTCSNCGFTITSADYDRVLEKLKKTATGWMTTINGKELKVEGQITYYNRYKRQNVVKDLSVELDRLSEESVNNDISSWTKGRSGEALSLLKKRFSHRPVQEKFVCLNCGFETHADEQAALNIARSWLFLRSQEYKKYQTNKTTGNTDKRAFVETWQSFYRKKLKEVWKPAV

SEQ ID NO: 29605 - protein, 978 aa, synthetic construct
  REGION 1..978: note = engineered CasX variant
QEIKRINKIRRRLVKDSNTKKAGKTGPMKTLLVRVMTPDLRERLENLRKKPENIPQPISNTSRANLNKLLTDYTEMKKAILHVYWEEFQKDPVGLMSRVAQPASKKIDQNKLKPEMDEKGNLTTAGFACSQCGQPLFVYKLEQVSEKGKAYTNYFGRCNVAEHEKLILLAQLKPEKDSDEAVTYSLGKFGQRALDFYSIHVTKESTHPVKPLAQIAGNRYASGPVGKALSDACMGTIASFLSKYQDIIIEHQKVVKGNQKRLESLRELAGKENLEYPSVTLPPQPHTKEGVDAYNEVIARVRMWVNLNLWQKLKLSRDDAKPLLRLKGFPSFPLVERQANEVDWWDMVCNVKKLINEKKEDGKVFWQNLAGYKRQEALRPYLSSEEDRKKGKKFARYQLGDLLLHLEKKHGEDWGKVYDEAWERIDKKVEGLSKHIKLEEERRSEDAQSKAALTDWLRAKASFVIEGLKEADKDEFCRCDLKLQKWYGDLRGKPFAIEAENSILDISGFSKQYNCAFIWQKDGVKKLNLYLIINYFKGGKLRFKKIKPEAFEANRFYTVINKKSGEIVIMEVNFNFDDPNLIILPLAFGKRQGREFIWNDLLSLETGSLKLANGRVIEKTLYNRRTRQDEPALFVALTFERREVLDSSNIKPMNLIGVDRGENIPAVIALTDPEGCPLSRFKDSLGNPTHILRIGESYKEKQRTIQAKKEVEQRRAGGYSRKYASKAKNLADDMVRNTARDLLYYAVTQDAMLIFENLSRGFGRQGKRTFMAERQYTRMEDWLTAKLAYEGLPSKTYLSKTLAQYTSKTCSNCGFTITSADYDRVLEKLKKTATGWMTTINGKELKVEGQITYYNRYKRQNVVKDLSVELDRLSEESVNNDISSWTKGRSGEALSLLKKRFSHRPVQEKFVCLNCGFETHADEQAALNIARSWLFLRSQEYKKYQTNKTTGNTDKRAFVETWQSFYRKKLKEVWKPAV

SEQ ID NO: 29606 - protein, 978 aa, synthetic construct
  REGION 1..978: note = engineered CasX variant
QEIKRINKIRRRLVKDSNTKKAGKTGPMKTLLVRVMTPDLRERLENLRKKPENIPQPISNTSRANLNKLLTDYTEMKKAILHVYWEEFQKDPVGLMSRVAQPASKKIDQNKLKPEMDEKGNLTTAGFACSQCGQPLFVYKLEQVSEKGKAYTNYFGRCNVAEHEKLILLAQLKPEKDSDEAVTYSLGKFGQRALDFYSIHVTKESTHPVKPLAQIAGNRYASGPVGKALSGACMGTIASFLSKYQDIIIEHQKVVKGNQKRLESLRELAGKENLEYPSVTLPPQPHTKEGVDAYNEVIARVRMWVNLNLWQKLKLSRDDAKPLLRLKGFPSFPLVERQANEVDWWDMVCNVKKLINEKKEDGKVFWQNLAGYKRQEALRPYLSSEEDRKKGKKFARYQLGDLLLHLEKKHGEDWGKVYDEAWERIDKKVEGLSKHIKLEEERRSEDAQSKAALTDWLRAKASFVIEGLKEADKDEFCRCELKLQKWYGDLRGKPFAIEAENSILDISGFSKQYNCAFIWQKDGVKKLNLYLIINYFKGGKLRFKKIKPEAFEANRFYTVINKKSGEIVPMEVNFNFDDPNLIILPLAFGKRFGREFIWNDLLSLETGSLKLANGRVIEKTLYNRRTRQDEPALFVALTFERREVLDSSNIKPMNLIGVDRGENIPAVIALTDPEGCPLSRFKDSLGNPTHILRIGESYKEKQRTIQAKKEVEQRRAGGYSRKYASKAKNLADDMVRNTARDLLYYAVTQDAMLIFENLSRGFGRQGKRTFMAERQYTRMEDWLTAKLAYEGLPSKTYLSKTLAQYTSKTCSNCGFTITSADYDRVLEKLKKTATGWMTTINGKELKVEGQITYYNRYKRQNVVKDLSVELDRLSEESVNNDISSWTKGRSGEALSLLKKRFSHRPVQEKFVCLNCGFETHADEQAALNIARSWLFLRSQEYKKYQTNKTTGNTDKRAFVETWQSFYRKKLKEVWKPAV

SEQ ID NO: 29607 - protein, 978 aa, synthetic construct
  REGION 1..978: note = engineered CasX variant
QEIKRINKIRRRLVKDSNTKKAGKTGPMKTLLVRVMTPDLRERLENLRKKPENIPQPISNTSRANLNKLLTDYTEMKKAILHVYWEEFQKDPVGLMSRVAQPASKKIDQNKLKPEMDEKGNLTTAGFACSQCGQPLFVYKLEQVSEKGKAYTNYFGRCNVAEHEKLILLAQLKPEKDSDEAVTYSLGKFGQRALDFYSIHVTKESTHPVKPLAQIAGNRYASGPVGKALSDACMGTIASFLSKYQDIIIEHQKVVKGNQKRLESLRELAGKENLEYPSVTLPPQPHTKEGVDAYNEVIARVRMWVNLNLWQKLKLSRDDAKPLLRLKNFPSFPLVERQANEVDWWDMVCNVKKLINEKKEDGKVFWQNLAGYKRQEALRPYLSSEEDRKKGKKFARYQLGDLLLHLEKKHGEDWGKVYDEAWERIDKKVEGLSKHIKLEEERRSEDAQSKAALTDWLRAKASFVIEGLKEADKDEFCRCELKLQKWYGDLRGKPFAIEAENSILDISGFSKQYNCAFIWQKDGVKKLNLYLIINYFKGGKLRFKKIKPEAFEANRFYTVINKKSGEIVPMEVNFNFDDPNLIILPLAFGKRFGREFIWNDLLSLETGSLKLANGRVIEKTLYNRRTRQDEPALFVALTFERREVLDSSNIKPMNLIGVDRGENIPAVIALTDPEGCPLSRFKDSLGNPTHILRIGESYKEKQRTIQAKKEVEQRRAGGYSRKYASKAKNLADDMVRNTARDLLYYAVTQDAMLIFENLSRGFGRQGKRTFMAERQYTRMEDWLTAKLAYEGLPSKTYLSKTLAQYTSKTCSNCGFTITSADYDRVLEKLKKTATGWMTTINGKELKVEGQITYYNRYKRQNVVKDLSVELDRLSEESVNNDISSWTKGRSGEALSLLKKRFSHRPVQEKFVCLNCGFETHADEQAALNIARSWLFLRSQEYKKYQTNKTTGNTDKRAFVETWQSFYRKKLKEVWKPAV

SEQ ID NO: 29608 - protein, 978 aa, synthetic construct
  REGION 1..978: note = engineered CasX variant
QEIKRINKIRRRLVKDSNTKKAGKTGPMKTLLVRVMTPDLRERLENLRKKPENIPQPISNTSRANLNKLLTDYTEMKKAILHVYWEEFQKDPVGLMSRVAQPASKKIDQNKLKPEMDEKGNLTTAGFACSQCGQPLFVYKLEQVSEKGKAYTNYFGRCNVAEHEKLILLAQLKPEKDSDEAVTYSLGKFGQRALDFYSIHVTKESTHPVKPLAQIAGNRYASGPVGKALSDACMGTIASFLSKYQDIIIEHQKVVKGNQKRLESLRELAGKENLEYPSVTLPPQPHTKEGVDAYNEVIARVRMWVNLNLWQKLKLSRDDAKPLLRLKGFPSFPLVERQANEVDWWDMVCNVKKLINEKKEDGKVFWQNLAGYKRQEALRPYLSSEEDRKKGKKFARYQLGDLLNHLEKKHGEDWGKVYDEAWERIDKKVEGLSKHIKLEEERRSEDAQSKAALTDWLRAKASFVIEGLKEADKDEFCRCELKLQKWYGDLRGKPFAIEAENSILDISGFSKQYNCAFIWQKDGVKKLNLYLIINYFKGGKLRFKKIKPEAFEANRFYTVINKKSGEIVPMEVNFNFDDPNLIILPLAFGKRFGREFIWNDLLSLETGSLKLANGRVIEKTLYNRRTRQDEPALFVALTFERREVLDSSNIKPMNLIGVDRGENIPAVIALTDPEGCPLSRFKDSLGNPTHILRIGESYKEKQRTIQAKKEVEQRRAGGYSRKYASKAKNLADDMVRNTARDLLYYAVTQDAMLIFENLSRGFGRQGKRTFMAERQYTRMEDWLTAKLAYEGLPSKTYLSKTLAQYTSKTCSNCGFTITSADYDRVLEKLKKTATGWMTTINGKELKVEGQITYYNRYKRQNVVKDLSVELDRLSEESVNNDISSWTKGRSGEALSLLKKRFSHRPVQEKFVCLNCGFETHADEQAALNIARSWLFLRSQEYKKYQTNKTTGNTDKRAFVETWQSFYRKKLKEVWKPAV

SEQ ID NO: 29609 - protein, 978 aa, synthetic construct
  REGION 1..978: note = engineered CasX variant
QEIKRINKIRRRLVKDSNTKKAGKTGPMKTLLVRVMTPDLRERLENLRKKPENIPQPISNTSRANLNKLLTDYTEMKKAILHVYWEEFQKDPVGLMSRVAQPASKKIDQNKLKPEMDEKGNLTTAGFACSQCGQPLFVYKLEQVSEKGKAYTNYFGRCNVAEHEKLILLAQLKPEKDSDEAVTYSLGKFGQRALDFYSIHVTKESTHPVKPLAQIAGNRYASGPVGKALSDACMGTIASFLSKYQDIIIEHQKVVKGNQKRLESLRELAGKENLEYPSVTLPPQPHTKEGVDAYNEVIARVRMWVNLNLWQKLKLSRDDAKPLLRLKGFPSFPLVERQANEVDWWDMVCNVKKLINEKKEDGKVFWQNLAGYKRQEALRPYLSSEEDRKKGKKFARYQLGDLLWHLEKKHGEDWGKVYDEAWERIDKKVEGLSKHIKLEEERRSEDAQSKAALTDWLRAKASFVIEGLKEADKDEFCRCELKLQKWYGDLRGKPFAIEAENSILDISGFSKQYNCAFIWQKDGVKKLNLYLIINYFKGGKLRFKKIKPEAFEANRFYTVINKKSGEIVPMEVNFNFDDPNLIILPLAFGKRFGREFIWNDLLSLETGSLKLANGRVIEKTLYNRRTRQDEPALFVALTFERREVLDSSNIKPMNLIGVDRGENIPAVIALTDPEGCPLSRFKDSLGNPTHILRIGESYKEKQRTIQAKKEVEQRRAGGYSRKYASKAKNLADDMVRNTARDLLYYAVTQDAMLIFENLSRGFGRQGKRTFMAERQYTRMEDWLTAKLAYEGLPSKTYLSKTLAQYTSKTCSNCGFTITSADYDRVLEKLKKTATGWMTTINGKELKVEGQITYYNRYKRQNVVKDLSVELDRLSEESVNNDISSWTKGRSGEALSLLKKRFSHRPVQEKFVCLNCGFETHADEQAALNIARSWLFLRSQEYKKYQTNKTTGNTDKRAFVETWQSFYRKKLKEVWKPAV

SEQ ID NO: 29610 - protein, 978 aa, synthetic construct
  REGION 1..978: note = engineered CasX variant
QEIKRINKIRRRLVKDSNTKKAGKTGPMKTLLVRVMTPDLRERLENLRKKPENIPQPISNTSRANLNKLLTDYTEMKKAILHVYWEEFQKDPVGLMSRVAQPASKKIDQNKLKPEMDEKGNLTTAGFACSQCGQPLFVYKLEQVSEKGKAYTNYFGRCNVAEHEKLILLAQLKPEKDSDEAVTYSLGKFGQRALDFYSIHVTKESTHPVKPLAQIAGNRYASGPVGKALSDACMGTIASFLSKYQDIIIEHQKVVKGNQKRLESLRELAGKENLEYPSVTLPPQPHTKEGVDAYNEVIARVRMWVNLNLWQKLKLSRDDAKPLLRLKGFPSFPLVERQANEVDWWDMVCNVKKLINEKKEDGKVFWQNLAGYKRQEALRPYLSSEEDRKKGKKFARYQLGDLLLHLYKKHGEDWGKVYDEAWERIDKKVEGLSKHIKLEEERRSEDAQSKAALTDWLRAKASFVIEGLKEADKDEFCRCELKLQKWYGDLRGKPFAIEAENSILDISGFSKQYNCAFIWQKDGVKKLNLYLIINYFKGGKLRFKKIKPEAFEANRFYTVINKKSGEIVPMEVNFNFDDPNLIILPLAFGKRFGREFIWNDLLSLETGSLKLANGRVIEKTLYNRRTRQDEPALFVALTFERREVLDSSNIKPMNLIGVDRGENIPAVIALTDPEGCPLSRFKDSLGNPTHILRIGESYKEKQRTIQAKKEVEQRRAGGYSRKYASKAKNLADDMVRNTARDLLYYAVTQDAMLIFENLSRGFGRQGKRTFMAERQYTRMEDWLTAKLAYEGLPSKTYLSKTLAQYTSKTCSNCGFTITSADYDRVLEKLKKTATGWMTTINGKELKVEGQITYYNRYKRQNVVKDLSVELDRLSEESVNNDISSWTKGRSGEALSLLKKRFSHRPVQEKFVCLNCGFETHADEQAALNIARSWLFLRSQEYKKYQTNKTTGNTDKRAFVETWQSFYRKKLKEVWKPAV

SEQ ID NO: 29611 - protein, 978 aa, synthetic construct
  REGION 1..978: note = engineered CasX variant
QEIKRINKIRRRLVKDSNTKKAGKTGPMKTLLVRVMTPDLRERLENLRKKPENIPQPISNTSRANLNKLLTDYTEMKKAILHVYWEEFQKDPVGLMSRVAQPASKKIDQNKLKPEMDEKGNLTTAGFACSQCGQPLFVYKLEQVSEKGKAYTNYFGRCNVAEHEKLILLAQLKPEKDSDEAVTYSLGKFGQRALDFYSIHVTKESTHPVKPLAQIAGNRYASGPVGKALSDACMGTIASFLSKYQDIIIEHQKVVKGNQKRLESLRELAGKENLEYPSVTLPPQPHTKEGVDAYNEVIARVRMWVNLNLWQKLKLSRDDAKPLLRLKGFPSFPLVERQANEVDWWDMVCNVKKLINEKKEDGKVFWQNLAGYKRQEALRPYLSSEEDRKKGKKFARYQLGDLLLHLEKKHPEDWGKVYDEAWERIDKKVEGLSKHIKLEEERRSEDAQSKAALTDWLRAKASFVIEGLKEADKDEFCRCELKLQKWYGDLRGKPFAIEAENSILDISGFSKQYNCAFIWQKDGVKKLNLYLIINYFKGGKLRFKKIKPEAFEANRFYTVINKKSGEIVPMEVNFNFDDPNLIILPLAFGKRFGREFIWNDLLSLETGSLKLANGRVIEKTLYNRRTRQDEPALFVALTFERREVLDSSNIKPMNLIGVDRGENIPAVIALTDPEGCPLSRFKDSLGNPTHILRIGESYKEKQRTIQAKKEVEQRRAGGYSRKYASKAKNLADDMVRNTARDLLYYAVTQDAMLIFENLSRGFGRQGKRTFMAERQYTRMEDWLTAKLAYEGLPSKTYLSKTLAQYTSKTCSNCGFTITSADYDRVLEKLKKTATGWMTTINGKELKVEGQITYYNRYKRQNVVKDLSVELDRLSEESVNNDISSWTKGRSGEALSLLKKRFSHRPVQEKFVCLNCGFETHADEQAALNIARSWLFLRSQEYKKYQTNKTTGNTDKRAFVETWQSFYRKKLKEVWKPAV

SEQ ID NO: 29612 - protein, 979 aa, synthetic construct
  REGION 1..979: note = engineered CasX variant
QEIKRINKIRRRLVKDSNTKKAGKTGPMKTLLVRVMTPDLRERLENLRKKPENIPQPISNTSRANLNKLLTDYTEMKKAILHVYWEEFQKDPVGLMSRVAQPASKKIDQNKLKPEMDEKGNLTTAGFACSQCGQPLFVYKLEQVSEKGKAYTNYFGRCNVAEHEKLILLAQLKPEKDSDEAVTYSLGKFGQRALDFYSIHVTKESTHPVKPLAQIAGNRYASGPVGKALSDACMGTIASFLSKYQDIIIEHQKVVKGNQKRLESLRELAGKENLEYPSVTLPPQPHTKEGVDAYNEVIARVRMWVNLNLWQKLKLSRDDAKPLLRLKGFPSFPLVERQANEVDWWDMVCNVKKLINEKKEDGKVFWQNLAGYKRQEALRPYLSSEEDRKKGKKFARYQLGDLLLHLEKKHGERDWGKVYDEAWERIDKKVEGLSKHIKLEEERRSEDAQSKAALTDWLRAKASFVIEGLKEADKDEFCRCELKLQKWYGDLRGKPFAIEAENSILDISGFSKQYNCAFIWQKDGVKKLNLYLIINYFKGGKLRFKKIKPEAFEANRFYTVINKKSGEIVPMEVNFNFDDPNLIILPLAFGKRFGREFIWNDLLSLETGSLKLANGRVIEKTLYNRRTRQDEPALFVALTFERREVLDSSNIKPMNLIGVDRGENIPAVIALTDPEGCPLSRFKDSLGNPTHILRIGESYKEKQRTIQAKKEVEQRRAGGYSRKYASKAKNLADDMVRNTARDLLYYAVTQDAMLIFENLSRGFGRQGKRTFMAERQYTRMEDWLTAKLAYEGLPSKTYLSKTLAQYTSKTCSNCGFTITSADYDRVLEKLKKTATGWMTTINGKELKVEGQITYYNRYKRQNVVKDLSVELDRLSEESVNNDISSWTKGRSGEALSLLKKRFSHRPVQEKFVCLNCGFETHADEQAALNIARSWLFLRSQEYKKYQTNKTTGNTDKRAFVETWQSFYRKKLKEVWKPAV

SEQ ID NO: 29613 - protein, 979 aa, synthetic construct
  REGION 1..979: note = engineered CasX variant
QEIKRINKIRRRLVKDSNTKKAGKTGPMKTLLVRVMTPDLRERLENLRKKPENIPQPISNTSRANLNKLLTDYTEMKKAILHVYWEEFQKDPVGLMSRVAQPASKKIDQNKLKPEMDEKGNLTTAGFACSQCGQPLFVYKLEQVSEKGKAYTNYFGRCNVAEHEKLILLAQLKPEKDSDEAVTYSLGKFGQRALDFYSIHVTKESTHPVKPLAQIAGNRYASGPVGKALSDACMGTIASFLSKYQDIIIEHQKVVKGNQKRLESLRELAGKENLEYPSVTLPPQPHTKEGVDAYNEVIARVRMWVNLNLWQKLKLSRDDAKPLLRLKGFPSFPLVERQANEVDWWDMVCNVKKLINEKKEDGKVFWQNLAGYKRQEALRPYLSSEEDRKKGKKFARYQLGDLLLHLEKKHGEYDWGKVYDEAWERIDKKVEGLSKHIKLEEERRSEDAQSKAALTDWLRAKASFVIEGLKEADKDEFCRCELKLQKWYGDLRGKPFAIEAENSILDISGFSKQYNCAFIWQKDGVKKLNLYLIINYFKGGKLRFKKIKPEAFEANRFYTVINKKSGEIVPMEVNFNFDDPNLIILPLAFGKRFGREFIWNDLLSLETGSLKLANGRVIEKTLYNRRTRQDEPALFVALTFERREVLDSSNIKPMNLIGVDRGENIPAVIALTDPEGCPLSRFKDSLGNPTHILRIGESYKEKQRTIQAKKEVEQRRAGGYSRKYASKAKNLADDMVRNTARDLLYYAVTQDAMLIFENLSRGFGRQGKRTFMAERQYTRMEDWLTAKLAYEGLPSKTYLSKTLAQYTSKTCSNCGFTITSADYDRVLEKLKKTATGWMTTINGKELKVEGQITYYNRYKRQNVVKDLSVELDRLSEESVNNDISSWTKGRSGEALSLLKKRFSHRPVQEKFVCLNCGFETHADEQAALNIARSWLFLRSQEYKKYQTNKTTGNTDKRAFVETWQSFYRKKLKEVWKPAV

SEQ ID NO: 29614 - protein, 978 aa, synthetic construct
  REGION 1..978: note = engineered CasX variant
QEIKRINKIRRRLVKDSNTKKAGKTGPMKTLLVRVMTPDLRERLENLRKKPENIPQPISNTSRANLNKLLTDYTEMKKAILHVYWEEFQKDPVGLMSRVAQPASKKIDQNKLKPEMDEKGNLTTAGFACSQCGQPLFVYKLEQVSEKGKAYTNYFGRCNVAEHEKLILLAQLKPEKDSDEAVTYSLGKFGQRALDFYSIHVTKESTHPVKPLAQIAGNRYASGPVGKALSDACMGTIASFLSKYQDIIIEHQKVVKGNQKRLESLRELAGKENLEYPSVTLPPQPHTKEGVDAYNEVIARVRMWVNLNLWQKLKLSRDDAKPLLRLKGFPSFPLVERQANEVDWWDMVCNVKKLINEKKEDGKVFWQNLAGYKRQEALRPYLSSEEDRKKGKKFARYQLGDLLLHLEKKHGEDWGDVYDEAWERIDKKVEGLSKHIKLEEERRSEDAQSKAALTDWLRAKASFVIEGLKEADKDEFCRCELKLQKWYGDLRGKPFAIEAENSILDISGFSKQYNCAFIWQKDGVKKLNLYLIINYFKGGKLRFKKIKPEAFEANRFYTVINKKSGEIVPMEVNFNFDDPNLIILPLAFGKRFGREFIWNDLLSLETGSLKLANGRVIEKTLYNRRTRQDEPALFVALTFERREVLDSSNIKPMNLIGVDRGENIPAVIALTDPEGCPLSRFKDSLGNPTHILRIGESYKEKQRTIQAKKEVEQRRAGGYSRKYASKAKNLADDMVRNTARDLLYYAVTQDAMLIFENLSRGFGRQGKRTFMAERQYTRMEDWLTAKLAYEGLPSKTYLSKTLAQYTSKTCSNCGFTITSADYDRVLEKLKKTATGWMTTINGKELKVEGQITYYNRYKRQNVVKDLSVELDRLSEESVNNDISSWTKGRSGEALSLLKKRFSHRPVQEKFVCLNCGFETHADEQAALNIARSWLFLRSQEYKKYQTNKTTGNTDKRAFVETWQSFYRKKLKEVWKPAV

SEQ ID NO: 29615 - protein, 978 aa, synthetic construct
  REGION 1..978: note = engineered CasX variant
QEIKRINKIRRRLVKDSNTKKAGKTGPMKTLLVRVMTPDLRERLENLRKKPENIPQPISNTSRANLNKLLTDYTEMKKAILHVYWEEFQKDPVGLMSRVAQPASKKIDQNKLKPEMDEKGNLTTAGFACSQCGQPLFVYKLEQVSEKGKAYTNYFGRCNVAEHEKLILLAQLKPEKDSDEAVTYSLGKFGQRALDFYSIHVTKESTHPVKPLAQIAGNRYASGPVGKALSDACMGTIASFLSKYQDIIIEHQKVVKGNQKRLESLRELAGKENLEYPSVTLPPQPHTKEGVDAYNEVIARVRMWVNLNLWQKLKLSRDDAKPLLRLKGFPSFPLVERQANEVDWWDMVCNVKKLINEKKEDGKVFWQNLAGYKRQEALRPYLSSEEDRKKGKKFARYQLGDLLLHLEKKHGEDWGKVYGEAWERIDKKVEGLSKHIKLEEERRSEDAQSKAALTDWLRAKASFVIEGLKEADKDEFCRCELKLQKWYGDLRGKPFAIEAENSILDISGFSKQYNCAFIWQKDGVKKLNLYLIINYFKGGKLRFKKIKPEAFEANRFYTVINKKSGEIVPMEVNFNFDDPNLIILPLAFGKRFGREFIWNDLLSLETGSLKLANGRVIEKTLYNRRTRQDEPALFVALTFERREVLDSSNIKPMNLIGVDRGENIPAVIALTDPEGCPLSRFKDSLGNPTHILRIGESYKEKQRTIQAKKEVEQRRAGGYSRKYASKAKNLADDMVRNTARDLLYYAVTQDAMLIFENLSRGFGRQGKRTFMAERQYTRMEDWLTAKLAYEGLPSKTYLSKTLAQYTSKTCSNCGFTITSADYDRVLEKLKKTATGWMTTINGKELKVEGQITYYNRYKRQNVVKDLSVELDRLSEESVNNDISSWTKGRSGEALSLLKKRFSHRPVQEKFVCLNCGFETHADEQAALNIARSWLFLRSQEYKKYQTNKTTGNTDKRAFVETWQSFYRKKLKEVWKPAV

SEQ ID NO: 29616 - protein, 978 aa, synthetic construct
  REGION 1..978: note = engineered CasX variant
QEIKRINKIRRRLVKDSNTKKAGKTGPMKTLLVRVMTPDLRERLENLRKKPENIPQPISNTSRANLNKLLTDYTEMKKAILHVYWEEFQKDPVGLMSRVAQPASKKIDQNKLKPEMDEKGNLTTAGFACSQCGQPLFVYKLEQVSEKGKAYTNYFGRCNVAEHEKLILLAQLKPEKDSDEAVTYSLGKFGQRALDFYSIHVTKESTHPVKPLAQIAGNRYASGPVGKALSDACMGTIASFLSKYQDIIIEHQKVVKGNQKRLESLRELAGKENLEYPSVTLPPQPHTKEGVDAYNEVIARVRMWVNLNLWQKLKLSRDDAKPLLRLKGFPSFPLVERQANEVDWWDMVCNVKKLINEKKEDGKVFWQNLAGYKRQEALRPYLSSEEDRKKGKKFARYQLGDLLLHLEKKHGEDWGKVYDEAWERIDKKVEGLSKHIKLEEERRSEDAQSKAALTDWLRAKASFVIEGKKEADKDEFCRCELKLQKWYGDLRGKPFAIEAENSILDISGFSKQYNCAFIWQKDGVKKLNLYLIINYFKGGKLRFKKIKPEAFEANRFYTVINKKSGEIVPMEVNFNFDDPNLIILPLAFGKRFGREFIWNDLLSLETGSLKLANGRVIEKTLYNRRTRQDEPALFVALTFERREVLDSSNIKPMNLIGVDRGENIPAVIALTDPEGCPLSRFKDSLGNPTHILRIGESYKEKQRTIQAKKEVEQRRAGGYSRKYASKAKNLADDMVRNTARDLLYYAVTQDAMLIFENLSRGFGRQGKRTFMAERQYTRMEDWLTAKLAYEGLPSKTYLSKTLAQYTSKTCSNCGFTITSADYDRVLEKLKKTATGWMTTINGKELKVEGQITYYNRYKRQNVVKDLSVELDRLSEESVNNDISSWTKGRSGEALSLLKKRFSHRPVQEKFVCLNCGFETHADEQAALNIARSWLFLRSQEYKKYQTNKTTGNTDKRAFVETWQSFYRKKLKEVWKPAV

SEQ ID NO: 29617 - protein, 978 aa, synthetic construct
  REGION 1..978: note = engineered CasX variant
QEIKRINKIRRRLVKDSNTKKAGKTGPMKTLLVRVMTPDLRERLENLRKKPENIPQPISNTSRANLNKLLTDYTEMKKAILHVYWEEFQKDPVGLMSRVAQPASKKIDQNKLKPEMDEKGNLTTAGFACSQCGQPLFVYKLEQVSEKGKAYTNYFGRCNVAEHEKLILLAQLKPEKDSDEAVTYSLGKFGQRALDFYSIHVTKESTHPVKPLAQIAGNRYASGPVGKALSDACMGTIASFLSKYQDIIIEHQKVVKGNQKRLESLRELAGKENLEYPSVTLPPQPHTKEGVDAYNEVIARVRMWVNLNLWQKLKLSRDDAKPLLRLKGFPSFPLVERQANEVDWWDMVCNVKKLINEKKEDGKVFWQNLAGYKRQEALRPYLSSEEDRKKGKKFARYQLGDLLLHLEKKHGEDWGKVYDEAWERIDKKVEGLSKHIKLEEERRSEDAQSKAALTDWLRAKASFVIEGSKEADKDEFCRCELKLQKWYGDLRGKPFAIEAENSILDISGFSKQYNCAFIWQKDGVKKLNLYLIINYFKGGKLRFKKIKPEAFEANRFYTVINKKSGEIVPMEVNFNFDDPNLIILPLAFGKRFGREFIWNDLLSLETGSLKLANGRVIEKTLYNRRTRQDEPALFVALTFERREVLDSSNIKPMNLIGVDRGENIPAVIALTDPEGCPLSRFKDSLGNPTHILRIGESYKEKQRTIQAKKEVEQRRAGGYSRKYASKAKNLADDMVRNTARDLLYYAVTQDAMLIFENLSRGFGRQGKRTFMAERQYTRMEDWLTAKLAYEGLPSKTYLSKTLAQYTSKTCSNCGFTITSADYDRVLEKLKKTATGWMTTINGKELKVEGQITYYNRYKRQNVVKDLSVELDRLSEESVNNDISSWTKGRSGEALSLLKKRFSHRPVQEKFVCLNCGFETHADEQAALNIARSWLFLRSQEYKKYQTNKTTGNTDKRAFVETWQSFYRKKLKEVWKPAV

SEQ ID NO: 29618 - protein, 979 aa, synthetic construct
  REGION 1..979: note = engineered CasX variant
QEIKRINKIRRRLVKDSNTKKAGKTGPMKTLLVRVMTPDLRERLENLRKKPENIPQPISNTSRANLNKLLTDYTEMKKAILHVYWEEFQKDPVGLMSRVAQPASKKIDQNKLKPEMDEKGNLTTAGFACSQCGQPLFVYKLEQVSEKGKAYTNYFGRCNVAEHEKLILLAQLKPEKDSDEAVTYSLGKFGQRALDFYSIHVTKESTHPVKPLAQIAGNRYASGPVGKALSDACMGTIASFLSKYQDIIIEHQKVVKGNQKRLESLRELAGKENLEYPSVTLPPQPHTKEGVDAYNEVIARVRMWVNLNLWQKLKLSRDDAKPLLRLKGFPSFPLVERQANEVDWWDMVCNVKKLINEKKEDGKVFWQNLAGYKRQEALRPYLSSEEDRKKGKKFARYQLGDLLLHLEKKHGEDWGKVYDEAWERIDKKVEGLSKHIKLEEERRSEDAQSKAALTDWLRAKASFVIEGLKEADDKDEFCRCELKLQKWYGDLRGKPFAIEAENSILDISGFSKQYNCAFIWQKDGVKKLNLYLIINYFKGGKLRFKKIKPEAFEANRFYTVINKKSGEIVPMEVNFNFDDPNLIILPLAFGKRFGREFIWNDLLSLETGSLKLANGRVIEKTLYNRRTRQDEPALFVALTFERREVLDSSNIKPMNLIGVDRGENIPAVIALTDPEGCPLSRFKDSLGNPTHILRIGESYKEKQRTIQAKKEVEQRRAGGYSRKYASKAKNLADDMVRNTARDLLYYAVTQDAMLIFENLSRGFGRQGKRTFMAERQYTRMEDWLTAKLAYEGLPSKTYLSKTLAQYTSKTCSNCGFTITSADYDRVLEKLKKTATGWMTTINGKELKVEGQITYYNRYKRQNVVKDLSVELDRLSEESVNNDISSWTKGRSGEALSLLKKRFSHRPVQEKFVCLNCGFETHADEQAALNIARSWLFLRSQEYKKYQTNKTTGNTDKRAFVETWQSFYRKKLKEVWKPAV

SEQ ID NO: 29619 - protein, 979 aa, synthetic construct
  REGION 1..979: note = engineered CasX variant
QEIKRINKIRRRLVKDSNTKKAGKTGPMKTLLVRVMTPDLRERLENLRKKPENIPQPISNTSRANLNKLLTDYTEMKKAILHVYWEEFQKDPVGLMSRVAQPASKKIDQNKLKPEMDEKGNLTTAGFACSQCGQPLFVYKLEQVSEKGKAYTNYFGRCNVAEHEKLILLAQLKPEKDSDEAVTYSLGKFGQRALDFYSIHVTKESTHPVKPLAQIAGNRYASGPVGKALSDACMGTIASFLSKYQDIIIEHQKVVKGNQKRLESLRELAGKENLEYPSVTLPPQPHTKEGVDAYNEVIARVRMWVNLNLWQKLKLSRDDAKPLLRLKGFPSFPLVERQANEVDWWDMVCNVKKLINEKKEDGKVFWQNLAGYKRQEALRPYLSSEEDRKKGKKFARYQLGDLLLHLEKKHGEDWGKVYDEAWERIDKKVEGLSKHIKLEEERRSEDAQSKAALTDWLRAKASFVIEGLKEADKDEFCRCELKLQKWYGDLRGKPFAIEAENSILDISGFSKQYNCAFIWQKDGVKKLNLYLIINYFKGGKLRFKKIKPEAFEANRFYTVINKKSGEIVPMEVNFNFDDPNLIILPLAFGKRFGREFIWNDLLSLETGSLKLANGRVIEKTLYNRRTRQDEPALFVALTFERREVLDSSNIKPMNLIGVDRGENIPAVIALTDPEGCPLSRFKDSLGNPTHILRIGESYKEKQRTIQAKKEVEQRRAGGYSRKYASKAKNLADDMVRNTARDLLYYAVTQDAMLIFENLSRGFGRQGKRTFMAERQYTRMEDWLTAKLAYEGLPSKTYLSKTLAQYTSKTCSNCGFTITSADYDRVLEKLKKTATGWMTTINGKELKVEGQITYYNRYKRQNVVKDLSVELDRLSEESVNNDISSWTKGRSGNEALSLLKKRFSHRPVQEKFVCLNCGFETHADEQAALNIARSWLFLRSQEYKKYQTNKTTGNTDKRAFVETWQSFYRKKLKEVWKPAV

SEQ ID NO: 29620 - protein, 978 aa, synthetic construct
  REGION 1..978: note = engineered CasX variant
QEIKRINKIRRRLVKDSNTKKAGKTGPMKTLLVRVMTPDLRERLENLRKKPENIPQPISNTSRANLNKLLTDYTEMKKAILHVYWEEFQKDPVGLMSRVAQPASKKIDQNKLKPEMDEKGNLTTAGFACSQCGQPLFVYKLEQVSEKGKAYTNYFGRCNVAEHEKLILLAQLKPEKDSDEAVTYSLGKFGQRALDFYSIHVTKESTHPVKPLAQIAGNRYASGPVGKALSDACMGTIASFLSKYQDIIIEHQKVVKGNQKRLESLRELAGKENLEYPSVTLPPQPHTKEGVDAYNEVIARVRMWVNLNLWQKLKLSRDDAKPLLRLKGFPSFPLVERQANEVDWWDMVCNVKKLINEKKEDGKVFWQNLAGYKRQEALRPYLSSEEDRQKGKKFARYQLGDLLLHLEKKHGEDWGKVYDEAWERIDKKVEGLSKHIKLEEERRSEDAQSKAALTDWLRAKASFVIEGLKEADKDEFCRCELKLQKWYGDLRGKPFAIEAENSILDISGFSKQYNCAFIWQKDGVKKLNLYLIINYFKGGKLRFKKIKPEAFEANRFYTVINKKSGEIVPMEVNFNFDDPNLIILPLAFGKRFGREFIWNDLLSLETGSLKLANGRVIEKTLYNRRTRQDEPALFVALTFERREVLDSSNIKPMNLIGVDRGENIPAVIALTDPEGCPLSRFKDSLGNPTHILRIGESYKEKQRTIQAKKEVEQRRAGGYSRKYASKAKNLADDMVRNTARDLLYYAVTQDAMLIFENLSRGFGRQGKRTFMAERQYTRMEDWLTAKLAYEGLPSKTYLSKTLAQYTSKTCSNCGFTITSADYDRVLEKLKKTATGWMTTINGKELKVEGQITYYNRYKRQNVVKDLSVELDRLSEESVNNDISSWTKGRSGEALSLLKKRFSHRPVQEKFVCLNCGFETHADEQAALNIARSWLFLRSQEYKKYQTNKTTGNTDKRAFVETWQSFYRKKLKEVWKPAV

SEQ ID NO: 29621 - protein, 978 aa, synthetic construct
  REGION 1..978: note = engineered CasX variant
QEIKRINKIRRRLVKDSNTKKAGKTGPMKTLLVRVMTPDLRERLENLRKKPENIPQPISNTSRANLNKLLTDYTEMKKAILHVYWEEFQKDPVGLMSRVAQPASKKIDQNKLKPEMDEKGNLTTAGFACSQCGQPLFVYKLEQVSEKGKAYTNYFGRCNVAEHEKLILLAQLKPEKDSDEAVTYSLGKFGQRALDFYSIHVTKESTHPVKPLAQIAGNRYASGPVGKALSDACMGTIASFLSKYQDIIIEHQKVVKGNQKRLESLRELAGKENLEYPSVTLPPQPHTKEGVDAYNEVIARVRMWVNLNLWQKLKLSRDDAKPLLRLKGFPSFPLVERQANEVDWWDMVCNVKKLINEKKEDGKVFWQNLAGYKRQEALRPYLSSEEDRKKGKKFARYQLGDLLLHLEKKHGEDWGKVYDEAWERIDKKVEGLSKHIKLEEERRSEDAQSKAALTDWLRAKASFVIEGLKEADKDEFCRCELKLQKWYGDLRGKPFAIEAENSILDISGFSKQYNCAFIWQKDGVKKLNLYLIINYFKGGKLRFKKIKPEAFEANRFYTVINKKSGEIVPMEVNFNFDDPNLIILPLAFGKRFGREFIWNDLLSLETGSLKLANGRVIEKTLYNRRTRQDEPALFVALTFERREVLDSSNIKPMNLIGVDRGENIPAVIALTDPEGCPLSRFKDSLGNPTHILRIGESYKEKQRTIQAKKEVEQRRAGGYSRKYASKAKNLADDMVRNTARDLLYYAVTQDAMLIFENLSRGFGRQGKRTFMAERQYTRMEDWLTAKLAYEGLPSQTYLSKTLAQYTSKTCSNCGFTITSADYDRVLEKLKKTATGWMTTINGKELKVEGQITYYNRYKRQNVVKDLSVELDRLSEESVNNDISSWTKGRSGEALSLLKKRFSHRPVQEKFVCLNCGFETHADEQAALNIARSWLFLRSQEYKKYQTNKTTGNTDKRAFVETWQSFYRKKLKEVWKPAV

SEQ ID NO: 29622 - protein, 978 aa, synthetic construct
  REGION 1..978: note = engineered CasX variant
QEIKRINKIRRRLVKDSNTKKAGKTGPMKTLLVRVMTPDLRERLENLRKKPENIPQPISNTSRANLNKLLTDYTEMKKAILHVYWEEFQKDPVGLMSRVAQPASKKIDQNKLKPEMDEKGNLTTAGFACSQCGQPLFVYKLEQVSEKGKAYTNYFGRCNVAEHEKLILLAQLKPEKDSDEAVTYSLGKFGQRALDFYSIHVTKESTHPVKPLAQIAGNRYASGPVGKALSDACMGTIASFLSKYQDIIIEHQKVVKGNQKRLESLRELAGKENLEYPSVTLPPQPHTKEGVDAYNEVIARVRMWVNLNLWQKLKLSRDDAKPLLRLKGFPSFPLVERQANEVDWWDMVCNVKKLINEKKEDGKVFWQNLAGYKRQEALRPYLSSEEDRKKGKKFARYQLGDLLLHLEKKHGEDWGKVYDEAWERIDKKVEGLSKHIKLEEERRSEDAQSKAALTDWLRAKASFVIEGLKEADKDEFCRCELKLQKWYGDLRGKPFAIEAENSILDISGFSKQYNCAFIWQKDGVKKLNLYLIINYFKGGKLRFKKIKPEAFEANRFYTVINKKSGEIVPMEVNFNFDDPNLIILPLAFGKRFGREFIWNDLLSLETGSLKLANGRVIEKTLYNRRTRQDEPALFVALTFERREVLDSSNIKPMNLIGVDRGENIPAVIALTDPEGCPLSRFKDSLGNPTHILRIGESYKEKQRTIQAKKEVEQRRAGGYSRKYASKAKNLADDMVRNTARDLLYYAVTQDAMLIFENLSRGFGRQGKRTFMAERQYTRMEDWLTAKLAYNGLPSKTYLSKTLAQYTSKTCSNCGFTITSADYDRVLEKLKKTATGWMTTINGKELKVEGQITYYNRYKRQNVVKDLSVELDRLSEESVNNDISSWTKGRSGEALSLLKKRFSHRPVQEKFVCLNCGFETHADEQAALNIARSWLFLRSQEYKKYQTNKTTGNTDKRAFVETWQSFYRKKLKEVWKPAV

SEQ ID NO: 29623 - protein, 978 aa, synthetic construct
  REGION 1..978: note = engineered CasX variant
QEIKRINKIRRRLVKDSNTKKAGKTGPMKTLLVRVMTPDLRERLENLRKKPENIPQPISNTSRANLNKLLTDYTEMKKAILHVYWEEFQKDPVGLMSRVAQPASKKIDQNKLKPEMDEKGNLTTAGFACSQCGQPLFVYKLEQVSEKGKAYTNYFGRCNVAEHEKLIQLAQLKPEKDSDEAVTYSLGKFGQRALDFYSIHVTKESTHPVKPLAQIAGNRYASGPVGKALSDACMGTIASFLSKYQDIIIEHQKVVKGNQKRLESLRELAGKENLEYPSVTLPPQPHTKEGVDAYNEVIARVRMWVNLNLWQKLKLSRDDAKPLLRLKGFPSFPLVERQANEVDWWDMVCNVKKLINEKKEDGKVFWQNLAGYKRQEALRPYLSSEEDRKKGKKFARYQLGDLLLHLEKKHGEDWGKVYDEAWERIDKKVEGLSKHIKLEEERRSEDAQSKAALTDWLRAKASFVIEGLKEADKDEFCRCELKLQKWYGDLRGKPFAIEAENSILDISGFSKQYNCAFIWQKDGVKKLNLYLIINYFKGGKLRFKKIKPEAFEANRFYTVINKKSGEIVPMEVNFNFDDPNLIILPLAFGKRFGREFIWNDLLSLETGSLKLANGRVIEKTLYNRRTRQDEPALFVALTFERREVLDSSNIKPMNLIGVDRGENIPAVIALTDPEGCPLSRFKDSLGNPTHILRIGESYKEKQRTIQAKKEVEQRRAGGYSRKYASKAKNLADDMVRNTARDLLYYAVTQDAMLIFENLSRGFGRQGKRTFMAERQYTRMEDWLTAKLAYEGLPSKTYLSKTLAQYTSKTCSNCGFTITSADYDRVLEKLKKTATGWMTTINGKELKVEGQITYYNRYKRQNVVKDLSVELDRLSEESVNNDISSWTKGRSGEALSLLKKRFSHRPVQEKFVCLNCGFETHADEQAALNIARSWLFLRSQEYKKYQTNKTTGNTDKRAFVETWQSFYRKKLKEVWKPAV

SEQ ID NO: 29624 - protein, 978 aa, synthetic construct
  REGION 1..978: note = engineered CasX variant
QEIKRINKIRRRLVKDSNTKKAGKTGPMKTLLVRVMTPDLRERLENLRKKPENIPQPISNTSRANLNKLLTDYTEMKKAILHVYWEEFQKDPVGLMSRVAQPASKKIDQNKLKPEMDEKGNLTTAGFACSQCGQPLFVYKLEQVSEKGKAYTNYFGRCNVAEHEKLILLAQLKPEKDSDEAVTYSLGKFGQRALDFYSIHVTKESTHPVKPLAQIAGNRYASGPVGKALSDACMGTIASFLSKYQDIIIEHQKVVKGNQKRLESLRELAGKENLEYPSVTLPPQPHTKEGVDAYNEVIARVRMWVNLNLWQKLKLSRDDAKPLLRLKGFPSFPLVERQANEVDWWDMVCNVKKLINEKKEDGKVFWQNLAIYKRQEALRPYLSSEEDRKKGKKFARYQLGDLLLHLEKKHGEDWGKVYDEAWERIDKKVEGLSKHIKLEEERRSEDAQSKAALTDWLRAKASFVIEGLKEADKDEFCRCELKLQKWYGDLRGKPFAIEAENSILDISGFSKQYNCAFIWQKDGVKKLNLYLIINYFKGGKLRFKKIKPEAFEANRFYTVINKKSGEIVPMEVNFNFDDPNLIILPLAFGKRFGREFIWNDLLSLETGSLKLANGRVIEKTLYNRRTRQDEPALFVALTFERREVLDSSNIKPMNLIGVDRGENIPAVIALTDPEGCPLSRFKDSLGNPTHILRIGESYKEKQRTIQAKKEVEQRRAGGYSRKYASKAKNLADDMVRNTARDLLYYAVTQDAMLIFENLSRGFGRQGKRTFMAERQYTRMEDWLTAKLAYEGLPSKTYLSKTLAQYTSKTCSNCGFTITSADYDRVLEKLKKTATGWMTTINGKELKVEGQITYYNRYKRQNVVKDLSVELDRLSEESVNNDISSWTKGRSGEALSLLKKRFSHRPVQEKFVCLNCGFETHADEQAALNIARSWLFLRSQEYKKYQTNKTTGNTDKRAFVETWQSFYRKKLKEVWKPAV

SEQ ID NO: 29625 - protein, 978 aa, synthetic construct
  REGION 1..978: note = engineered CasX variant
QEIKRINKIRRRLVKDSNTKKAGKTGPMKTLLVRVMTPDLRERLENLRKKPENIPQPISNTSRANLNKLLTDYTEMKKAILHVYWEEFQKDPVGLMSRVAQPASKKIDQNKLKPEMDEKGNLTTAGFACSQCGQPLFVYKLEQVSEKGKAYTNYFGRCNVAEHEKLILLAQLKPEKDSDEAVTYSLGKFGQRALDFYSIHVTKESTHPVKPLAQIAGNRYASGPVGKALSDACMGTIASFLSKYQDIIIEHQKVVKGNQKRLESLRELAGKENLEYPSVTLPPQPHTKEGVDAYNEVIARVRMWVNLNLWQKLKLSRDDAKPLLRLKGFPSFPLVERQANEVDWWDMVCNVKKLINEKKEDGKVFWQNLAGYKRQEALRPYLSSEEDREKGKKFARYQLGDLLLHLEKKHGEDWGKVYDEAWERIDKKVEGLSKHIKLEEERRSEDAQSKAALTDWLRAKASFVIEGLKEADKDEFCRCELKLQKWYGDLRGKPFAIEAENSILDISGFSKQYNCAFIWQKDGVKKLNLYLIINYFKGGKLRFKKIKPEAFEANRFYTVINKKSGEIVPMEVNFNFDDPNLIILPLAFGKRFGREFIWNDLLSLETGSLKLANGRVIEKTLYNRRTRQDEPALFVALTFERREVLDSSNIKPMNLIGVDRGENIPAVIALTDPEGCPLSRFKDSLGNPTHILRIGESYKEKQRTIQAKKEVEQRRAGGYSRKYASKAKNLADDMVRNTARDLLYYAVTQDAMLIFENLSRGFGRQGKRTFMAERQYTRMEDWLTAKLAYEGLPSKTYLSKTLAQYTSKTCSNCGFTITSADYDRVLEKLKKTATGWMTTINGKELKVEGQITYYNRYKRQNVVKDLSVELDRLSEESVNNDISSWTKGRSGEALSLLKKRFSHRPVQEKFVCLNCGFETHADEQAALNIARSWLFLRSQEYKKYQTNKTTGNTDKRAFVETWQSFYRKKLKEVWKPAV

SEQ ID NO: 29626 - protein, 978 aa, synthetic construct
  REGION 1..978: note = engineered CasX variant
QEIKRINKIRRRLVKDSNTKKAGKTGPMKTLLVRVMTPDLRERLENLRKKPENIPQPISNTSRANLNKLLTDYTEMKKAILHVYWEEFQKDPVGLMSRVAQPASKKIDQNKLKPEMDEKGNLTTAGFACSQCGQPLFVYKLEQVSEKGKAYTNYFGRCNVAEHEKLILLAQLKPEKDSDEAVTYSLGKFGQRALDFYSIHVTKESTHPVKPLAQIAGNRYASGPVGKALSDACMGTIASFLSKYQDIIIEHQKVVKGNQKRLESLRELAGKENLEYPSVTLPPQPHTKEGVDAYNEVIARVRMWVNLNLWQKLKLSRDDAKPLLRLKGFPSFPLVERQANEVDWWDMVCNVKKLINEKKEDGKVFWQNLAGYKRQEALRPYLSSEEDRKKGKKFARYQLGDLLLHLEKKHGEDWGKVYDEAWERIDKKVEGLSKHIKLEEERRSEDAQSKAALTDWLRAKASFVIEGLKEADKDEFCRCELKLQKWYGDLRGKPFAIEAENSILDISGFSKQYNCAFIWQKDGVKKLNLYLIINYFKGGKLRFKKIKPEAFEANRFYTVINKKSGEIVIMEVNFNFDDPNLIILPLAFGKRFGREFIWNDLLSLETGSLKLANGRVIEKTLYNRRTRQDEPALFVALTFERREVLDSSNIKPMNLIGVDRGENIPAVIALTDPEGCPLSRFKDSLGNPTHILRIGESYKEKQRTIQAKKEVEQRRAGGYSRKYASKAKNLADDMVRNTARDLLYYAVTQDAMLIFENLSRGFGRQGKRTFMAERQYTRMEDWLTAKLAYEGLPSKTYLSKTLAQYTSKTCSNCGFTITSADYDRVLEKLKKTATGWMTTINGKELKVEGQITYYNRYKRQNVVKDLSVELDRLSEESVNNDISSWTKGRSGEALSLLKKRFSHRPVQEKFVCLNCGFETHADEQAALNIARSWLFLRSQEYKKYQTNKTTGNTDKRAFVETWQSFYRKKLKEVWKPAV

SEQ ID NO: 29627 - protein, 978 aa, synthetic construct
  REGION 1..978: note = engineered CasX variant
QEIKRINKIRRRLVKDSNTKKAGKTGPMKTLLVRVMTPDLRERLENLRKKPENIPQPISNTSRANLNKLLTDYTEMKKAILHVYWEEFQKDPVGLMSRVAQPASKKIDQNKLKPEMDEKGNLTTAGFACSQCGQPLFVYKLEQVSEKGKAYTNYFGRCNVAEHEKLILLAQLKPEKDSDEAVTYSLGKFGQRALDFYSIHVTKESTHPVKPLAQIAGNRYASGPVGKALSGACMGTIASFLSKYQDIIIEHQKVVKGNQKRLESLRELAGKENLEYPSVTLPPQPHTKEGVDAYNEVIARVRMWVNLNLWQKLKLSRDDAKPLLRLKGFPSFPLVERQANEVDWWDMVCNVKKLINEKKEDGKVFWQNLAGYKRQEALRPYLSSEEDRKKGKKFARYQLGDLLLHLEKKHGEDWGKVYDEAWERIDKKVEGLSKHIKLEEERRSEDAQSKAALTDWLRAKASFVIEGLKEADKDEFCRCELKLQKWYGDLRGKPFAIEAENSILDISGFSKQYNCAFIWQKDGVKKLNLYLIINYFKGGKLRFKKIKPEAFEANRFYTVINKKSGEIVPMEVNFNFDDPNLIILPLAFGKRVGREFIWNDLLSLETGSLKLANGRVIEKTLYNRRTRQDEPALFVALTFERREVLDSSNIKPMNLIGVDRGENIPAVIALTDPEGCPLSRFKDSLGNPTHILRIGESYKEKQRTIQAKKEVEQRRAGGYSRKYASKAKNLADDMVRNTARDLLYYAVTQDAMLIFENLSRGFGRQGKRTFMAERQYTRMEDWLTAKLAYEGLPSKTYLSKTLAQYTSKTCSNCGFTITSADYDRVLEKLKKTATGWMTTINGKELKVEGQITYYNRYKRQNVVKDLSVELDRLSEESVNNDISSWTKGRSGEALSLLKKRFSHRPVQEKFVCLNCGFETHADEQAALNIARSWLFLRSQEYKKYQTNKTTGNTDKRAFVETWQSFYRKKLKEVWKPAV

SEQ ID NO: 29628 - protein, 978 aa, synthetic construct
  REGION 1..978: note = engineered CasX variant
QEIKRINKIRRRLVKDSNTKKAGKTGPMKTLLVRVMTPDLRERLENLRKKPENIPQPISNTSRANLNKLLTDYTEMKKAILHVYWEEFQKDPVGLMSRVAQPASKKIDQNKLKPEMDEKGNLTTAGFACSQCGQPLFVYKLEQVSEKGKAYTNYFGRCNVAEHEKLILLAQLKPEKDSDEAVTYSLGKFGQRALDFYSIHVTKESTHPVKPLAQIAGNRYASGPVGKALSDACMGTIASFLSKYQDIIIEHQKVVKGNQKRLESLRELAGKENLEYPSVTLPPQPHTKEGVDAYNEVIARVRMWVNLNLWQKLKLSRDDAKPLLRLKNFPSFPLVERQANEVDWWDMVCNVKKLINEKKEDGKVFWQNLAGYKRQEALRPYLSSEEDRKKGKKFARYQLGDLLLHLEKKHGEDWGKVYDEAWERIDKKVEGLSKHIKLEEERRSEDAQSKAALTDWLRAKASFVIEGLKEADKDEFCRCELKLQKWYGDLRGKPFAIEAENSILDISGFSKQYNCAFIWQKDGVKKLNLYLIINYFKGGKLRFKKIKPEAFEANRFYTVINKKSGEIVPMEVNFNFDDPNLIILPLAFGKRVGREFIWNDLLSLETGSLKLANGRVIEKTLYNRRTRQDEPALFVALTFERREVLDSSNIKPMNLIGVDRGENIPAVIALTDPEGCPLSRFKDSLGNPTHILRIGESYKEKQRTIQAKKEVEQRRAGGYSRKYASKAKNLADDMVRNTARDLLYYAVTQDAMLIFENLSRGFGRQGKRTFMAERQYTRMEDWLTAKLAYEGLPSKTYLSKTLAQYTSKTCSNCGFTITSADYDRVLEKLKKTATGWMTTINGKELKVEGQITYYNRYKRQNVVKDLSVELDRLSEESVNNDISSWTKGRSGEALSLLKKRFSHRPVQEKFVCLNCGFETHADEQAALNIARSWLFLRSQEYKKYQTNKTTGNTDKRAFVETWQSFYRKKLKEVWKPAV

SEQ ID NO: 29629 - protein, 978 aa, synthetic construct
  REGION 1..978: note = engineered CasX variant
QEIKRINKIRRRLVKDSNTKKAGKTGPMKTLLVRVMTPDLRERLENLRKKPENIPQPISNTSRANLNKLLTDYTEMKKAILHVYWEEFQKDPVGLMSRVAQPASKKIDQNKLKPEMDEKGNLTTAGFACSQCGQPLFVYKLEQVSEKGKAYTNYFGRCNVAEHEKLILLAQLKPEKDSDEAVTYSLGKFGQRALDFYSIHVTKESTHPVKPLAQIAGNRYASGPVGKALSDACMGTIASFLSKYQDIIIEHQKVVKGNQKRLESLRELAGKENLEYPSVTLPPQPHTKEGVDAYNEVIARVRMWVNLNLWQKLKLSRDDAKPLLRLKGFPSFPLVERQANEVDWWDMVCNVKKLINEKKEDGKVFWQNLAGYKRQEALRPYLSSEEDRKKGKKFARYQLGDLLNHLEKKHGEDWGKVYDEAWERIDKKVEGLSKHIKLEEERRSEDAQSKAALTDWLRAKASFVIEGLKEADKDEFCRCELKLQKWYGDLRGKPFAIEAENSILDISGFSKQYNCAFIWQKDGVKKLNLYLIINYFKGGKLRFKKIKPEAFEANRFYTVINKKSGEIVPMEVNFNFDDPNLIILPLAFGKRVGREFIWNDLLSLETGSLKLANGRVIEKTLYNRRTRQDEPALFVALTFERREVLDSSNIKPMNLIGVDRGENIPAVIALTDPEGCPLSRFKDSLGNPTHILRIGESYKEKQRTIQAKKEVEQRRAGGYSRKYASKAKNLADDMVRNTARDLLYYAVTQDAMLIFENLSRGFGRQGKRTFMAERQYTRMEDWLTAKLAYEGLPSKTYLSKTLAQYTSKTCSNCGFTITSADYDRVLEKLKKTATGWMTTINGKELKVEGQITYYNRYKRQNVVKDLSVELDRLSEESVNNDISSWTKGRSGEALSLLKKRFSHRPVQEKFVCLNCGFETHADEQAALNIARSWLFLRSQEYKKYQTNKTTGNTDKRAFVETWQSFYRKKLKEVWKPAV

SEQ ID NO: 29630 - protein, 978 aa, synthetic construct
  REGION 1..978: note = engineered CasX variant
QEIKRINKIRRRLVKDSNTKKAGKTGPMKTLLVRVMTPDLRERLENLRKKPENIPQPISNTSRANLNKLLTDYTEMKKAILHVYWEEFQKDPVGLMSRVAQPASKKIDQNKLKPEMDEKGNLTTAGFACSQCGQPLFVYKLEQVSEKGKAYTNYFGRCNVAEHEKLILLAQLKPEKDSDEAVTYSLGKFGQRALDFYSIHVTKESTHPVKPLAQIAGNRYASGPVGKALSDACMGTIASFLSKYQDIIIEHQKVVKGNQKRLESLRELAGKENLEYPSVTLPPQPHTKEGVDAYNEVIARVRMWVNLNLWQKLKLSRDDAKPLLRLKGFPSFPLVERQANEVDWWDMVCNVKKLINEKKEDGKVFWQNLAGYKRQEALRPYLSSEEDRKKGKKFARYQLGDLLWHLEKKHGEDWGKVYDEAWERIDKKVEGLSKHIKLEEERRSEDAQSKAALTDWLRAKASFVIEGLKEADKDEFCRCELKLQKWYGDLRGKPFAIEAENSILDISGFSKQYNCAFIWQKDGVKKLNLYLIINYFKGGKLRFKKIKPEAFEANRFYTVINKKSGEIVPMEVNFNFDDPNLIILPLAFGKRVGREFIWNDLLSLETGSLKLANGRVIEKTLYNRRTRQDEPALFVALTFERREVLDSSNIKPMNLIGVDRGENIPAVIALTDPEGCPLSRFKDSLGNPTHILRIGESYKEKQRTIQAKKEVEQRRAGGYSRKYASKAKNLADDMVRNTARDLLYYAVTQDAMLIFENLSRGFGRQGKRTFMAERQYTRMEDWLTAKLAYEGLPSKTYLSKTLAQYTSKTCSNCGFTITSADYDRVLEKLKKTATGWMTTINGKELKVEGQITYYNRYKRQNVVKDLSVELDRLSEESVNNDISSWTKGRSGEALSLLKKRFSHRPVQEKFVCLNCGFETHADEQAALNIARSWLFLRSQEYKKYQTNKTTGNTDKRAFVETWQSFYRKKLKEVWKPAV

SEQ ID NO: 29631 - protein, 978 aa, synthetic construct
  REGION 1..978: note = engineered CasX variant
QEIKRINKIRRRLVKDSNTKKAGKTGPMKTLLVRVMTPDLRERLENLRKKPENIPQPISNTSRANLNKLLTDYTEMKKAILHVYWEEFQKDPVGLMSRVAQPASKKIDQNKLKPEMDEKGNLTTAGFACSQCGQPLFVYKLEQVSEKGKAYTNYFGRCNVAEHEKLILLAQLKPEKDSDEAVTYSLGKFGQRALDFYSIHVTKESTHPVKPLAQIAGNRYASGPVGKALSDACMGTIASFLSKYQDIIIEHQKVVKGNQKRLESLRELAGKENLEYPSVTLPPQPHTKEGVDAYNEVIARVRMWVNLNLWQKLKLSRDDAKPLLRLKGFPSFPLVERQANEVDWWDMVCNVKKLINEKKEDGKVFWQNLAGYKRQEALRPYLSSEEDRKKGKKFARYQLGDLLLHLYKKHGEDWGKVYDEAWERIDKKVEGLSKHIKLEEERRSEDAQSKAALTDWLRAKASFVIEGLKEADKDEFCRCELKLQKWYGDLRGKPFAIEAENSILDISGFSKQYNCAFIWQKDGVKKLNLYLIINYFKGGKLRFKKIKPEAFEANRFYTVINKKSGEIVPMEVNFNFDDPNLIILPLAFGKRVGREFIWNDLLSLETGSLKLANGRVIEKTLYNRRTRQDEPALFVALTFERREVLDSSNIKPMNLIGVDRGENIPAVIALTDPEGCPLSRFKDSLGNPTHILRIGESYKEKQRTIQAKKEVEQRRAGGYSRKYASKAKNLADDMVRNTARDLLYYAVTQDAMLIFENLSRGFGRQGKRTFMAERQYTRMEDWLTAKLAYEGLPSKTYLSKTLAQYTSKTCSNCGFTITSADYDRVLEKLKKTATGWMTTINGKELKVEGQITYYNRYKRQNVVKDLSVELDRLSEESVNNDISSWTKGRSGEALSLLKKRFSHRPVQEKFVCLNCGFETHADEQAALNIARSWLFLRSQEYKKYQTNKTTGNTDKRAFVETWQSFYRKKLKEVWKPAV

SEQ ID NO: 29632 - protein, 978 aa, synthetic construct
  REGION 1..978: note = engineered CasX variant
QEIKRINKIRRRLVKDSNTKKAGKTGPMKTLLVRVMTPDLRERLENLRKKPENIPQPISNTSRANLNKLLTDYTEMKKAILHVYWEEFQKDPVGLMSRVAQPASKKIDQNKLKPEMDEKGNLTTAGFACSQCGQPLFVYKLEQVSEKGKAYTNYFGRCNVAEHEKLILLAQLKPEKDSDEAVTYSLGKFGQRALDFYSIHVTKESTHPVKPLAQIAGNRYASGPVGKALSDACMGTIASFLSKYQDIIIEHQKVVKGNQKRLESLRELAGKENLEYPSVTLPPQPHTKEGVDAYNEVIARVRMWVNLNLWQKLKLSRDDAKPLLRLKGFPSFPLVERQANEVDWWDMVCNVKKLINEKKEDGKVFWQNLAGYKRQEALRPYLSSEEDRKKGKKFARYQLGDLLLHLEKKHPEDWGKVYDEAWERIDKKVEGLSKHIKLEEERRSEDAQSKAALTDWLRAKASFVIEGLKEADKDEFCRCELKLQKWYGDLRGKPFAIEAENSILDISGFSKQYNCAFIWQKDGVKKLNLYLIINYFKGGKLRFKKIKPEAFEANRFYTVINKKSGEIVPMEVNFNFDDPNLIILPLAFGKRVGREFIWNDLLSLETGSLKLANGRVIEKTLYNRRTRQDEPALFVALTFERREVLDSSNIKPMNLIGVDRGENIPAVIALTDPEGCPLSRFKDSLGNPTHILRIGESYKEKQRTIQAKKEVEQRRAGGYSRKYASKAKNLADDMVRNTARDLLYYAVTQDAMLIFENLSRGFGRQGKRTFMAERQYTRMEDWLTAKLAYEGLPSKTYLSKTLAQYTSKTCSNCGFTITSADYDRVLEKLKKTATGWMTTINGKELKVEGQITYYNRYKRQNVVKDLSVELDRLSEESVNNDISSWTKGRSGEALSLLKKRFSHRPVQEKFVCLNCGFETHADEQAALNIARSWLFLRSQEYKKYQTNKTTGNTDKRAFVETWQSFYRKKLKEVWKPAV

SEQ ID NO: 29633 - protein, 979 aa, synthetic construct
  REGION 1..979: note = engineered CasX variant
QEIKRINKIRRRLVKDSNTKKAGKTGPMKTLLVRVMTPDLRERLENLRKKPENIPQPISNTSRANLNKLLTDYTEMKKAILHVYWEEFQKDPVGLMSRVAQPASKKIDQNKLKPEMDEKGNLTTAGFACSQCGQPLFVYKLEQVSEKGKAYTNYFGRCNVAEHEKLILLAQLKPEKDSDEAVTYSLGKFGQRALDFYSIHVTKESTHPVKPLAQIAGNRYASGPVGKALSDACMGTIASFLSKYQDIIIEHQKVVKGNQKRLESLRELAGKENLEYPSVTLPPQPHTKEGVDAYNEVIARVRMWVNLNLWQKLKLSRDDAKPLLRLKGFPSFPLVERQANEVDWWDMVCNVKKLINEKKEDGKVFWQNLAGYKRQEALRPYLSSEEDRKKGKKFARYQLGDLLLHLEKKHGERDWGKVYDEAWERIDKKVEGLSKHIKLEEERRSEDAQSKAALTDWLRAKASFVIEGLKEADKDEFCRCELKLQKWYGDLRGKPFAIEAENSILDISGFSKQYNCAFIWQKDGVKKLNLYLIINYFKGGKLRFKKIKPEAFEANRFYTVINKKSGEIVPMEVNFNFDDPNLIILPLAFGKRVGREFIWNDLLSLETGSLKLANGRVIEKTLYNRRTRQDEPALFVALTFERREVLDSSNIKPMNLIGVDRGENIPAVIALTDPEGCPLSRFKDSLGNPTHILRIGESYKEKQRTIQAKKEVEQRRAGGYSRKYASKAKNLADDMVRNTARDLLYYAVTQDAMLIFENLSRGFGRQGKRTFMAERQYTRMEDWLTAKLAYEGLPSKTYLSKTLAQYTSKTCSNCGFTITSADYDRVLEKLKKTATGWMTTINGKELKVEGQITYYNRYKRQNVVKDLSVELDRLSEESVNNDISSWTKGRSGEALSLLKKRFSHRPVQEKFVCLNCGFETHADEQAALNIARSWLFLRSQEYKKYQTNKTTGNTDKRAFVETWQSFYRKKLKEVWKPAV

SEQ ID NO: 29634 - protein, 979 aa, synthetic construct
  REGION 1..979: note = engineered CasX variant
QEIKRINKIRRRLVKDSNTKKAGKTGPMKTLLVRVMTPDLRERLENLRKKPENIPQPISNTSRANLNKLLTDYTEMKKAILHVYWEEFQKDPVGLMSRVAQPASKKIDQNKLKPEMDEKGNLTTAGFACSQCGQPLFVYKLEQVSEKGKAYTNYFGRCNVAEHEKLILLAQLKPEKDSDEAVTYSLGKFGQRALDFYSIHVTKESTHPVKPLAQIAGNRYASGPVGKALSDACMGTIASFLSKYQDIIIEHQKVVKGNQKRLESLRELAGKENLEYPSVTLPPQPHTKEGVDAYNEVIARVRMWVNLNLWQKLKLSRDDAKPLLRLKGFPSFPLVERQANEVDWWDMVCNVKKLINEKKEDGKVFWQNLAGYKRQEALRPYLSSEEDRKKGKKFARYQLGDLLLHLEKKHGEYDWGKVYDEAWERIDKKVEGLSKHIKLEEERRSEDAQSKAALTDWLRAKASFVIEGLKEADKDEFCRCELKLQKWYGDLRGKPFAIEAENSILDISGFSKQYNCAFIWQKDGVKKLNLYLIINYFKGGKLRFKKIKPEAFEANRFYTVINKKSGEIVPMEVNFNFDDPNLIILPLAFGKRVGREFIWNDLLSLETGSLKLANGRVIEKTLYNRRTRQDEPALFVALTFERREVLDSSNIKPMNLIGVDRGENIPAVIALTDPEGCPLSRFKDSLGNPTHILRIGESYKEKQRTIQAKKEVEQRRAGGYSRKYASKAKNLADDMVRNTARDLLYYAVTQDAMLIFENLSRGFGRQGKRTFMAERQYTRMEDWLTAKLAYEGLPSKTYLSKTLAQYTSKTCSNCGFTITSADYDRVLEKLKKTATGWMTTINGKELKVEGQITYYNRYKRQNVVKDLSVELDRLSEESVNNDISSWTKGRSGEALSLLKKRFSHRPVQEKFVCLNCGFETHADEQAALNIARSWLFLRSQEYKKYQTNKTTGNTDKRAFVETWQSFYRKKLKEVWKPAV

SEQ ID NO: 29635 - protein, 978 aa, synthetic construct
  REGION 1..978: note = engineered CasX variant
QEIKRINKIRRRLVKDSNTKKAGKTGPMKTLLVRVMTPDLRERLENLRKKPENIPQPISNTSRANLNKLLTDYTEMKKAILHVYWEEFQKDPVGLMSRVAQPASKKIDQNKLKPEMDEKGNLTTAGFACSQCGQPLFVYKLEQVSEKGKAYTNYFGRCNVAEHEKLILLAQLKPEKDSDEAVTYSLGKFGQRALDFYSIHVTKESTHPVKPLAQIAGNRYASGPVGKALSDACMGTIASFLSKYQDIIIEHQKVVKGNQKRLESLRELAGKENLEYPSVTLPPQPHTKEGVDAYNEVIARVRMWVNLNLWQKLKLSRDDAKPLLRLKGFPSFPLVERQANEVDWWDMVCNVKKLINEKKEDGKVFWQNLAGYKRQEALRPYLSSEEDRKKGKKFARYQLGDLLLHLEKKHGEDWGDVYDEAWERIDKKVEGLSKHIKLEEERRSEDAQSKAALTDWLRAKASFVIEGLKEADKDEFCRCELKLQKWYGDLRGKPFAIEAENSILDISGFSKQYNCAFIWQKDGVKKLNLYLIINYFKGGKLRFKKIKPEAFEANRFYTVINKKSGEIVPMEVNFNFDDPNLIILPLAFGKRVGREFIWNDLLSLETGSLKLANGRVIEKTLYNRRTRQDEPALFVALTFERREVLDSSNIKPMNLIGVDRGENIPAVIALTDPEGCPLSRFKDSLGNPTHILRIGESYKEKQRTIQAKKEVEQRRAGGYSRKYASKAKNLADDMVRNTARDLLYYAVTQDAMLIFENLSRGFGRQGKRTFMAERQYTRMEDWLTAKLAYEGLPSKTYLSKTLAQYTSKTCSNCGFTITSADYDRVLEKLKKTATGWMTTINGKELKVEGQITYYNRYKRQNVVKDLSVELDRLSEESVNNDISSWTKGRSGEALSLLKKRFSHRPVQEKFVCLNCGFETHADEQAALNIARSWLFLRSQEYKKYQTNKTTGNTDKRAFVETWQSFYRKKLKEVWKPAV

SEQ ID NO: 29636 - protein, 978 aa, synthetic construct
  REGION 1..978: note = engineered CasX variant
QEIKRINKIRRRLVKDSNTKKAGKTGPMKTLLVRVMTPDLRERLENLRKKPENIPQPISNTSRANLNKLLTDYTEMKKAILHVYWEEFQKDPVGLMSRVAQPASKKIDQNKLKPEMDEKGNLTTAGFACSQCGQPLFVYKLEQVSEKGKAYTNYFGRCNVAEHEKLILLAQLKPEKDSDEAVTYSLGKFGQRALDFYSIHVTKESTHPVKPLAQIAGNRYASGPVGKALSDACMGTIASFLSKYQDIIIEHQKVVKGNQKRLESLRELAGKENLEYPSVTLPPQPHTKEGVDAYNEVIARVRMWVNLNLWQKLKLSRDDAKPLLRLKGFPSFPLVERQANEVDWWDMVCNVKKLINEKKEDGKVFWQNLAGYKRQEALRPYLSSEEDRKKGKKFARYQLGDLLLHLEKKHGEDWGKVYGEAWERIDKKVEGLSKHIKLEEERRSEDAQSKAALTDWLRAKASFVIEGLKEADKDEFCRCELKLQKWYGDLRGKPFAIEAENSILDISGFSKQYNCAFIWQKDGVKKLNLYLIINYFKGGKLRFKKIKPEAFEANRFYTVINKKSGEIVPMEVNFNFDDPNLIILPLAFGKRVGREFIWNDLLSLETGSLKLANGRVIEKTLYNRRTRQDEPALFVALTFERREVLDSSNIKPMNLIGVDRGENIPAVIALTDPEGCPLSRFKDSLGNPTHILRIGESYKEKQRTIQAKKEVEQRRAGGYSRKYASKAKNLADDMVRNTARDLLYYAVTQDAMLIFENLSRGFGRQGKRTFMAERQYTRMEDWLTAKLAYEGLPSKTYLSKTLAQYTSKTCSNCGFTITSADYDRVLEKLKKTATGWMTTINGKELKVEGQITYYNRYKRQNVVKDLSVELDRLSEESVNNDISSWTKGRSGEALSLLKKRFSHRPVQEKFVCLNCGFETHADEQAALNIARSWLFLRSQEYKKYQTNKTTGNTDKRAFVETWQSFYRKKLKEVWKPAV

SEQ ID NO: 29637 - protein, 978 aa, synthetic construct
  REGION 1..978: note = engineered CasX variant
QEIKRINKIRRRLVKDSNTKKAGKTGPMKTLLVRVMTPDLRERLENLRKKPENIPQPISNTSRANLNKLLTDYTEMKKAILHVYWEEFQKDPVGLMSRVAQPASKKIDQNKLKPEMDEKGNLTTAGFACSQCGQPLFVYKLEQVSEKGKAYTNYFGRCNVAEHEKLILLAQLKPEKDSDEAVTYSLGKFGQRALDFYSIHVTKESTHPVKPLAQIAGNRYASGPVGKALSDACMGTIASFLSKYQDIIIEHQKVVKGNQKRLESLRELAGKENLEYPSVTLPPQPHTKEGVDAYNEVIARVRMWVNLNLWQKLKLSRDDAKPLLRLKGFPSFPLVERQANEVDWWDMVCNVKKLINEKKEDGKVFWQNLAGYKRQEALRPYLSSEEDRKKGKKFARYQLGDLLLHLEKKHGEDWGKVYDEAWERIDKKVEGLSKHIKLEEERRSEDAQSKAALTDWLRAKASFVIEGKKEADKDEFCRCELKLQKWYGDLRGKPFAIEAENSILDISGFSKQYNCAFIWQKDGVKKLNLYLIINYFKGGKLRFKKIKPEAFEANRFYTVINKKSGEIVPMEVNFNFDDPNLIILPLAFGKRVGREFIWNDLLSLETGSLKLANGRVIEKTLYNRRTRQDEPALFVALTFERREVLDSSNIKPMNLIGVDRGENIPAVIALTDPEGCPLSRFKDSLGNPTHILRIGESYKEKQRTIQAKKEVEQRRAGGYSRKYASKAKNLADDMVRNTARDLLYYAVTQDAMLIFENLSRGFGRQGKRTFMAERQYTRMEDWLTAKLAYEGLPSKTYLSKTLAQYTSKTCSNCGFTITSADYDRVLEKLKKTATGWMTTINGKELKVEGQITYYNRYKRQNVVKDLSVELDRLSEESVNNDISSWTKGRSGEALSLLKKRFSHRPVQEKFVCLNCGFETHADEQAALNIARSWLFLRSQEYKKYQTNKTTGNTDKRAFVETWQSFYRKKLKEVWKPAV

SEQ ID NO: 29638 - protein, 978 aa, synthetic construct
  REGION 1..978: note = engineered CasX variant
QEIKRINKIRRRLVKDSNTKKAGKTGPMKTLLVRVMTPDLRERLENLRKKPENIPQPISNTSRANLNKLLTDYTEMKKAILHVYWEEFQKDPVGLMSRVAQPASKKIDQNKLKPEMDEKGNLTTAGFACSQCGQPLFVYKLEQVSEKGKAYTNYFGRCNVAEHEKLILLAQLKPEKDSDEAVTYSLGKFGQRALDFYSIHVTKESTHPVKPLAQIAGNRYASGPVGKALSDACMGTIASFLSKYQDIIIEHQKVVKGNQKRLESLRELAGKENLEYPSVTLPPQPHTKEGVDAYNEVIARVRMWVNLNLWQKLKLSRDDAKPLLRLKGFPSFPLVERQANEVDWWDMVCNVKKLINEKKEDGKVFWQNLAGYKRQEALRPYLSSEEDRKKGKKFARYQLGDLLLHLEKKHGEDWGKVYDEAWERIDKKVEGLSKHIKLEEERRSEDAQSKAALTDWLRAKASFVIEGSKEADKDEFCRCELKLQKWYGDLRGKPFAIEAENSILDISGFSKQYNCAFIWQKDGVKKLNLYLIINYFKGGKLRFKKIKPEAFEANRFYTVINKKSGEIVPMEVNFNFDDPNLIILPLAFGKRVGREFIWNDLLSLETGSLKLANGRVIEKTLYNRRTRQDEPALFVALTFERREVLDSSNIKPMNLIGVDRGENIPAVIALTDPEGCPLSRFKDSLGNPTHILRIGESYKEKQRTIQAKKEVEQRRAGGYSRKYASKAKNLADDMVRNTARDLLYYAVTQDAMLIFENLSRGFGRQGKRTFMAERQYTRMEDWLTAKLAYEGLPSKTYLSKTLAQYTSKTCSNCGFTITSADYDRVLEKLKKTATGWMTTINGKELKVEGQITYYNRYKRQNVVKDLSVELDRLSEESVNNDISSWTKGRSGEALSLLKKRFSHRPVQEKFVCLNCGFETHADEQAALNIARSWLFLRSQEYKKYQTNKTTGNTDKRAFVETWQSFYRKKLKEVWKPAV

SEQ ID NO: 29639 - protein, 979 aa, synthetic construct
  REGION 1..979: note = engineered CasX variant
QEIKRINKIRRRLVKDSNTKKAGKTGPMKTLLVRVMTPDLRERLENLRKKPENIPQPISNTSRANLNKLLTDYTEMKKAILHVYWEEFQKDPVGLMSRVAQPASKKIDQNKLKPEMDEKGNLTTAGFACSQCGQPLFVYKLEQVSEKGKAYTNYFGRCNVAEHEKLILLAQLKPEKDSDEAVTYSLGKFGQRALDFYSIHVTKESTHPVKPLAQIAGNRYASGPVGKALSDACMGTIASFLSKYQDIIIEHQKVVKGNQKRLESLRELAGKENLEYPSVTLPPQPHTKEGVDAYNEVIARVRMWVNLNLWQKLKLSRDDAKPLLRLKGFPSFPLVERQANEVDWWDMVCNVKKLINEKKEDGKVFWQNLAGYKRQEALRPYLSSEEDRKKGKKFARYQLGDLLLHLEKKHGEDWGKVYDEAWERIDKKVEGLSKHIKLEEERRSEDAQSKAALTDWLRAKASFVIEGLKEADDKDEFCRCELKLQKWYGDLRGKPFAIEAENSILDISGFSKQYNCAFIWQKDGVKKLNLYLIINYFKGGKLRFKKIKPEAFEANRFYTVINKKSGEIVPMEVNFNFDDPNLIILPLAFGKRVGREFIWNDLLSLETGSLKLANGRVIEKTLYNRRTRQDEPALFVALTFERREVLDSSNIKPMNLIGVDRGENIPAVIALTDPEGCPLSRFKDSLGNPTHILRIGESYKEKQRTIQAKKEVEQRRAGGYSRKYASKAKNLADDMVRNTARDLLYYAVTQDAMLIFENLSRGFGRQGKRTFMAERQYTRMEDWLTAKLAYEGLPSKTYLSKTLAQYTSKTCSNCGFTITSADYDRVLEKLKKTATGWMTTINGKELKVEGQITYYNRYKRQNVVKDLSVELDRLSEESVNNDISSWTKGRSGEALSLLKKRFSHRPVQEKFVCLNCGFETHADEQAALNIARSWLFLRSQEYKKYQTNKTTGNTDKRAFVETWQSFYRKKLKEVWKPAV

SEQ ID NO: 29640 - protein, 979 aa, synthetic construct
  REGION 1..979: note = engineered CasX variant
QEIKRINKIRRRLVKDSNTKKAGKTGPMKTLLVRVMTPDLRERLENLRKKPENIPQPISNTSRANLNKLLTDYTEMKKAILHVYWEEFQKDPVGLMSRVAQPASKKIDQNKLKPEMDEKGNLTTAGFACSQCGQPLFVYKLEQVSEKGKAYTNYFGRCNVAEHEKLILLAQLKPEKDSDEAVTYSLGKFGQRALDFYSIHVTKESTHPVKPLAQIAGNRYASGPVGKALSDACMGTIASFLSKYQDIIIEHQKVVKGNQKRLESLRELAGKENLEYPSVTLPPQPHTKEGVDAYNEVIARVRMWVNLNLWQKLKLSRDDAKPLLRLKGFPSFPLVERQANEVDWWDMVCNVKKLINEKKEDGKVFWQNLAGYKRQEALRPYLSSEEDRKKGKKFARYQLGDLLLHLEKKHGEDWGKVYDEAWERIDKKVEGLSKHIKLEEERRSEDAQSKAALTDWLRAKASFVIEGLKEADKDEFCRCELKLQKWYGDLRGKPFAIEAENSILDISGFSKQYNCAFIWQKDGVKKLNLYLIINYFKGGKLRFKKIKPEAFEANRFYTVINKKSGEIVPMEVNFNFDDPNLIILPLAFGKRVGREFIWNDLLSLETGSLKLANGRVIEKTLYNRRTRQDEPALFVALTFERREVLDSSNIKPMNLIGVDRGENIPAVIALTDPEGCPLSRFKDSLGNPTHILRIGESYKEKQRTIQAKKEVEQRRAGGYSRKYASKAKNLADDMVRNTARDLLYYAVTQDAMLIFENLSRGFGRQGKRTFMAERQYTRMEDWLTAKLAYEGLPSKTYLSKTLAQYTSKTCSNCGFTITSADYDRVLEKLKKTATGWMTTINGKELKVEGQITYYNRYKRQNVVKDLSVELDRLSEESVNNDISSWTKGRSGNEALSLLKKRFSHRPVQEKFVCLNCGFETHADEQAALNIARSWLFLRSQEYKKYQTNKTTGNTDKRAFVETWQSFYRKKLKEVWKPAV

SEQ ID NO: 29641 - protein, 978 aa, synthetic construct
  REGION 1..978: note = engineered CasX variant
QEIKRINKIRRRLVKDSNTKKAGKTGPMKTLLVRVMTPDLRERLENLRKKPENIPQPISNTSRANLNKLLTDYTEMKKAILHVYWEEFQKDPVGLMSRVAQPASKKIDQNKLKPEMDEKGNLTTAGFACSQCGQPLFVYKLEQVSEKGKAYTNYFGRCNVAEHEKLILLAQLKPEKDSDEAVTYSLGKFGQRALDFYSIHVTKESTHPVKPLAQIAGNRYASGPVGKALSDACMGTIASFLSKYQDIIIEHQKVVKGNQKRLESLRELAGKENLEYPSVTLPPQPHTKEGVDAYNEVIARVRMWVNLNLWQKLKLSRDDAKPLLRLKGFPSFPLVERQANEVDWWDMVCNVKKLINEKKEDGKVFWQNLAGYKRQEALRPYLSSEEDRQKGKKFARYQLGDLLLHLEKKHGEDWGKVYDEAWERIDKKVEGLSKHIKLEEERRSEDAQSKAALTDWLRAKASFVIEGLKEADKDEFCRCELKLQKWYGDLRGKPFAIEAENSILDISGFSKQYNCAFIWQKDGVKKLNLYLIINYFKGGKLRFKKIKPEAFEANRFYTVINKKSGEIVPMEVNFNFDDPNLIILPLAFGKRVGREFIWNDLLSLETGSLKLANGRVIEKTLYNRRTRQDEPALFVALTFERREVLDSSNIKPMNLIGVDRGENIPAVIALTDPEGCPLSRFKDSLGNPTHILRIGESYKEKQRTIQAKKEVEQRRAGGYSRKYASKAKNLADDMVRNTARDLLYYAVTQDAMLIFENLSRGFGRQGKRTFMAERQYTRMEDWLTAKLAYEGLPSKTYLSKTLAQYTSKTCSNCGFTITSADYDRVLEKLKKTATGWMTTINGKELKVEGQITYYNRYKRQNVVKDLSVELDRLSEESVNNDISSWTKGRSGEALSLLKKRFSHRPVQEKFVCLNCGFETHADEQAALNIARSWLFLRSQEYKKYQTNKTTGNTDKRAFVETWQSFYRKKLKEVWKPAV

SEQ ID NO: 29642 - protein, 978 aa, synthetic construct
  REGION 1..978: note = engineered CasX variant
QEIKRINKIRRRLVKDSNTKKAGKTGPMKTLLVRVMTPDLRERLENLRKKPENIPQPISNTSRANLNKLLTDYTEMKKAILHVYWEEFQKDPVGLMSRVAQPASKKIDQNKLKPEMDEKGNLTTAGFACSQCGQPLFVYKLEQVSEKGKAYTNYFGRCNVAEHEKLILLAQLKPEKDSDEAVTYSLGKFGQRALDFYSIHVTKESTHPVKPLAQIAGNRYASGPVGKALSDACMGTIASFLSKYQDIIIEHQKVVKGNQKRLESLRELAGKENLEYPSVTLPPQPHTKEGVDAYNEVIARVRMWVNLNLWQKLKLSRDDAKPLLRLKGFPSFPLVERQANEVDWWDMVCNVKKLINEKKEDGKVFWQNLAGYKRQEALRPYLSSEEDRKKGKKFARYQLGDLLLHLEKKHGEDWGKVYDEAWERIDKKVEGLSKHIKLEEERRSEDAQSKAALTDWLRAKASFVIEGLKEADKDEFCRCELKLQKWYGDLRGKPFAIEAENSILDISGFSKQYNCAFIWQKDGVKKLNLYLIINYFKGGKLRFKKIKPEAFEANRFYTVINKKSGEIVPMEVNFNFDDPNLIILPLAFGKRVGREFIWNDLLSLETGSLKLANGRVIEKTLYNRRTRQDEPALFVALTFERREVLDSSNIKPMNLIGVDRGENIPAVIALTDPEGCPLSRFKDSLGNPTHILRIGESYKEKQRTIQAKKEVEQRRAGGYSRKYASKAKNLADDMVRNTARDLLYYAVTQDAMLIFENLSRGFGRQGKRTFMAERQYTRMEDWLTAKLAYEGLPSQTYLSKTLAQYTSKTCSNCGFTITSADYDRVLEKLKKTATGWMTTINGKELKVEGQITYYNRYKRQNVVKDLSVELDRLSEESVNNDISSWTKGRSGEALSLLKKRFSHRPVQEKFVCLNCGFETHADEQAALNIARSWLFLRSQEYKKYQTNKTTGNTDKRAFVETWQSFYRKKLKEVWKPAV

SEQ ID NO: 29643 - protein, 978 aa, synthetic construct
  REGION 1..978: note = engineered CasX variant
QEIKRINKIRRRLVKDSNTKKAGKTGPMKTLLVRVMTPDLRERLENLRKKPENIPQPISNTSRANLNKLLTDYTEMKKAILHVYWEEFQKDPVGLMSRVAQPASKKIDQNKLKPEMDEKGNLTTAGFACSQCGQPLFVYKLEQVSEKGKAYTNYFGRCNVAEHEKLILLAQLKPEKDSDEAVTYSLGKFGQRALDFYSIHVTKESTHPVKPLAQIAGNRYASGPVGKALSDACMGTIASFLSKYQDIIIEHQKVVKGNQKRLESLRELAGKENLEYPSVTLPPQPHTKEGVDAYNEVIARVRMWVNLNLWQKLKLSRDDAKPLLRLKGFPSFPLVERQANEVDWWDMVCNVKKLINEKKEDGKVFWQNLAGYKRQEALRPYLSSEEDRKKGKKFARYQLGDLLLHLEKKHGEDWGKVYDEAWERIDKKVEGLSKHIKLEEERRSEDAQSKAALTDWLRAKASFVIEGLKEADKDEFCRCELKLQKWYGDLRGKPFAIEAENSILDISGFSKQYNCAFIWQKDGVKKLNLYLIINYFKGGKLRFKKIKPEAFEANRFYTVINKKSGEIVPMEVNFNFDDPNLIILPLAFGKRVGREFIWNDLLSLETGSLKLANGRVIEKTLYNRRTRQDEPALFVALTFERREVLDSSNIKPMNLIGVDRGENIPAVIALTDPEGCPLSRFKDSLGNPTHILRIGESYKEKQRTIQAKKEVEQRRAGGYSRKYASKAKNLADDMVRNTARDLLYYAVTQDAMLIFENLSRGFGRQGKRTFMAERQYTRMEDWLTAKLAYNGLPSKTYLSKTLAQYTSKTCSNCGFTITSADYDRVLEKLKKTATGWMTTINGKELKVEGQITYYNRYKRQNVVKDLSVELDRLSEESVNNDISSWTKGRSGEALSLLKKRFSHRPVQEKFVCLNCGFETHADEQAALNIARSWLFLRSQEYKKYQTNKTTGNTDKRAFVETWQSFYRKKLKEVWKPAV

SEQ ID NO: 29644 - protein, 978 aa, synthetic construct
  REGION 1..978: note = engineered CasX variant
QEIKRINKIRRRLVKDSNTKKAGKTGPMKTLLVRVMTPDLRERLENLRKKPENIPQPISNTSRANLNKLLTDYTEMKKAILHVYWEEFQKDPVGLMSRVAQPASKKIDQNKLKPEMDEKGNLTTAGFACSQCGQPLFVYKLEQVSEKGKAYTNYFGRCNVAEHEKLIQLAQLKPEKDSDEAVTYSLGKFGQRALDFYSIHVTKESTHPVKPLAQIAGNRYASGPVGKALSDACMGTIASFLSKYQDIIIEHQKVVKGNQKRLESLRELAGKENLEYPSVTLPPQPHTKEGVDAYNEVIARVRMWVNLNLWQKLKLSRDDAKPLLRLKGFPSFPLVERQANEVDWWDMVCNVKKLINEKKEDGKVFWQNLAGYKRQEALRPYLSSEEDRKKGKKFARYQLGDLLLHLEKKHGEDWGKVYDEAWERIDKKVEGLSKHIKLEEERRSEDAQSKAALTDWLRAKASFVIEGLKEADKDEFCRCELKLQKWYGDLRGKPFAIEAENSILDISGFSKQYNCAFIWQKDGVKKLNLYLIINYFKGGKLRFKKIKPEAFEANRFYTVINKKSGEIVPMEVNFNFDDPNLIILPLAFGKRVGREFIWNDLLSLETGSLKLANGRVIEKTLYNRRTRQDEPALFVALTFERREVLDSSNIKPMNLIGVDRGENIPAVIALTDPEGCPLSRFKDSLGNPTHILRIGESYKEKQRTIQAKKEVEQRRAGGYSRKYASKAKNLADDMVRNTARDLLYYAVTQDAMLIFENLSRGFGRQGKRTFMAERQYTRMEDWLTAKLAYEGLPSKTYLSKTLAQYTSKTCSNCGFTITSADYDRVLEKLKKTATGWMTTINGKELKVEGQITYYNRYKRQNVVKDLSVELDRLSEESVNNDISSWTKGRSGEALSLLKKRFSHRPVQEKFVCLNCGFETHADEQAALNIARSWLFLRSQEYKKYQTNKTTGNTDKRAFVETWQSFYRKKLKEVWKPAV

SEQ ID NO: 29645 - protein, 978 aa, synthetic construct
  REGION 1..978: note = engineered CasX variant
QEIKRINKIRRRLVKDSNTKKAGKTGPMKTLLVRVMTPDLRERLENLRKKPENIPQPISNTSRANLNKLLTDYTEMKKAILHVYWEEFQKDPVGLMSRVAQPASKKIDQNKLKPEMDEKGNLTTAGFACSQCGQPLFVYKLEQVSEKGKAYTNYFGRCNVAEHEKLILLAQLKPEKDSDEAVTYSLGKFGQRALDFYSIHVTKESTHPVKPLAQIAGNRYASGPVGKALSDACMGTIASFLSKYQDIIIEHQKVVKGNQKRLESLRELAGKENLEYPSVTLPPQPHTKEGVDAYNEVIARVRMWVNLNLWQKLKLSRDDAKPLLRLKGFPSFPLVERQANEVDWWDMVCNVKKLINEKKEDGKVFWQNLAIYKRQEALRPYLSSEEDRKKGKKFARYQLGDLLLHLEKKHGEDWGKVYDEAWERIDKKVEGLSKHIKLEEERRSEDAQSKAALTDWLRAKASFVIEGLKEADKDEFCRCELKLQKWYGDLRGKPFAIEAENSILDISGFSKQYNCAFIWQKDGVKKLNLYLIINYFKGGKLRFKKIKPEAFEANRFYTVINKKSGEIVPMEVNFNFDDPNLIILPLAFGKRVGREFIWNDLLSLETGSLKLANGRVIEKTLYNRRTRQDEPALFVALTFERREVLDSSNIKPMNLIGVDRGENIPAVIALTDPEGCPLSRFKDSLGNPTHILRIGESYKEKQRTIQAKKEVEQRRAGGYSRKYASKAKNLADDMVRNTARDLLYYAVTQDAMLIFENLSRGFGRQGKRTFMAERQYTRMEDWLTAKLAYEGLPSKTYLSKTLAQYTSKTCSNCGFTITSADYDRVLEKLKKTATGWMTTINGKELKVEGQITYYNRYKRQNVVKDLSVELDRLSEESVNNDISSWTKGRSGEALSLLKKRFSHRPVQEKFVCLNCGFETHADEQAALNIARSWLFLRSQEYKKYQTNKTTGNTDKRAFVETWQSFYRKKLKEVWKPAV

SEQ ID NO: 29646 - protein, 978 aa, synthetic construct
  REGION 1..978: note = engineered CasX variant
QEIKRINKIRRRLVKDSNTKKAGKTGPMKTLLVRVMTPDLRERLENLRKKPENIPQPISNTSRANLNKLLTDYTEMKKAILHVYWEEFQKDPVGLMSRVAQPASKKIDQNKLKPEMDEKGNLTTAGFACSQCGQPLFVYKLEQVSEKGKAYTNYFGRCNVAEHEKLILLAQLKPEKDSDEAVTYSLGKFGQRALDFYSIHVTKESTHPVKPLAQIAGNRYASGPVGKALSDACMGTIASFLSKYQDIIIEHQKVVKGNQKRLESLRELAGKENLEYPSVTLPPQPHTKEGVDAYNEVIARVRMWVNLNLWQKLKLSRDDAKPLLRLKGFPSFPLVERQANEVDWWDMVCNVKKLINEKKEDGKVFWQNLAGYKRQEALRPYLSSEEDREKGKKFARYQLGDLLLHLEKKHGEDWGKVYDEAWERIDKKVEGLSKHIKLEEERRSEDAQSKAALTDWLRAKASFVIEGLKEADKDEFCRCELKLQKWYGDLRGKPFAIEAENSILDISGFSKQYNCAFIWQKDGVKKLNLYLIINYFKGGKLRFKKIKPEAFEANRFYTVINKKSGEIVPMEVNFNFDDPNLIILPLAFGKRVGREFIWNDLLSLETGSLKLANGRVIEKTLYNRRTRQDEPALFVALTFERREVLDSSNIKPMNLIGVDRGENIPAVIALTDPEGCPLSRFKDSLGNPTHILRIGESYKEKQRTIQAKKEVEQRRAGGYSRKYASKAKNLADDMVRNTARDLLYYAVTQDAMLIFENLSRGFGRQGKRTFMAERQYTRMEDWLTAKLAYEGLPSKTYLSKTLAQYTSKTCSNCGFTITSADYDRVLEKLKKTATGWMTTINGKELKVEGQITYYNRYKRQNVVKDLSVELDRLSEESVNNDISSWTKGRSGEALSLLKKRFSHRPVQEKFVCLNCGFETHADEQAALNIARSWLFLRSQEYKKYQTNKTTGNTDKRAFVETWQSFYRKKLKEVWKPAV

SEQ ID NO: 29647 - protein, 978 aa, synthetic construct
  REGION 1..978: note = engineered CasX variant
QEIKRINKIRRRLVKDSNTKKAGKTGPMKTLLVRVMTPDLRERLENLRKKPENIPQPISNTSRANLNKLLTDYTEMKKAILHVYWEEFQKDPVGLMSRVAQPASKKIDQNKLKPEMDEKGNLTTAGFACSQCGQPLFVYKLEQVSEKGKAYTNYFGRCNVAEHEKLILLAQLKPEKDSDEAVTYSLGKFGQRALDFYSIHVTKESTHPVKPLAQIAGNRYASGPVGKALSDACMGTIASFLSKYQDIIIEHQKVVKGNQKRLESLRELAGKENLEYPSVTLPPQPHTKEGVDAYNEVIARVRMWVNLNLWQKLKLSRDDAKPLLRLKGFPSFPLVERQANEVDWWDMVCNVKKLINEKKEDGKVFWQNLAGYKRQEALRPYLSSEEDRKKGKKFARYQLGDLLLHLEKKHGEDWGKVYDEAWERIDKKVEGLSKHIKLEEERRSEDAQSKAALTDWLRAKASFVIEGLKEADKDEFCRCELKLQKWYGDLRGKPFAIEAENSILDISGFSKQYNCAFIWQKDGVKKLNLYLIINYFKGGKLRFKKIKPEAFEANRFYTVINKKSGEIVIMEVNFNFDDPNLIILPLAFGKRVGREFIWNDLLSLETGSLKLANGRVIEKTLYNRRTRQDEPALFVALTFERREVLDSSNIKPMNLIGVDRGENIPAVIALTDPEGCPLSRFKDSLGNPTHILRIGESYKEKQRTIQAKKEVEQRRAGGYSRKYASKAKNLADDMVRNTARDLLYYAVTQDAMLIFENLSRGFGRQGKRTFMAERQYTRMEDWLTAKLAYEGLPSKTYLSKTLAQYTSKTCSNCGFTITSADYDRVLEKLKKTATGWMTTINGKELKVEGQITYYNRYKRQNVVKDLSVELDRLSEESVNNDISSWTKGRSGEALSLLKKRFSHRPVQEKFVCLNCGFETHADEQAALNIARSWLFLRSQEYKKYQTNKTTGNTDKRAFVETWQSFYRKKLKEVWKPAV

SEQ ID NO: 29648 - protein, 979 aa, synthetic construct
  REGION 1..979: note = engineered CasX variant
QEIKRINKIRRRLVKDSNTKKAGKTGPMKTLLVRVMTPDLRERLENLRKKPENIPQPISNTSRANLNKLLTDYTEMKKAILHVYWEEFQKDPVGLMSRVAQPASKKIDQNKLKPEMDEKGNLTTAGFACSQCGQPLFVYKLEQVSEKGKAYTNYFGRCNVAEHEKLILLAQLKPEKDSDEAVTYSLGKFGQRALDFYSIHVTKESTHPVKPLAQIAGNRYASGPVGKALSGACMGTIASFLSKYQDIIIEHQKVVKGNQKRLESLRELAGKENLEYPSVTLPPQPHTKEGVDAYNEVIARVRMWVNLNLWQKLKLSRDDAKPLLRLKGFPSFPLVERQANEVDWWDMVCNVKKLINEKKEDGKVFWQNLAGYKRQEALRPYLSSEEDRKKGKKFARYQLGDLLLHLEKKHGEDWGKVYDEAWERIDKKVEGLSKHIKLEEERRSEDAQSKAALTDWLRAKASFVIEGLKEADKDEFCRCELKLQKWYGDLRGKPFAIEAENSILDISGFSKQYNCAFIWQKDGVKKLNLYLIINYFKGGKLRFKKIKPEAFEANRFYTVINKKSGEIVPMEVNFNFDDPNLIILPLAFGKRQGREFIWNDLLSLETGSLKLANGRVIEKTLYNRRTRQDEPALFVALTFERREVLDSSNIKTPMNLIGVDRGENIPAVIALTDPEGCPLSRFKDSLGNPTHILRIGESYKEKQRTIQAKKEVEQRRAGGYSRKYASKAKNLADDMVRNTARDLLYYAVTQDAMLIFENLSRGFGRQGKRTFMAERQYTRMEDWLTAKLAYEGLPSKTYLSKTLAQYTSKTCSNCGFTITSADYDRVLEKLKKTATGWMTTINGKELKVEGQITYYNRYKRQNVVKDLSVELDRLSEESVNNDISSWTKGRSGEALSLLKKRFSHRPVQEKFVCLNCGFETHADEQAALNIARSWLFLRSQEYKKYQTNKTTGNTDKRAFVETWQSFYRKKLKEVWKPAV

SEQ ID NO: 29649 - protein, 979 aa, synthetic construct
  REGION 1..979: note = engineered CasX variant
QEIKRINKIRRRLVKDSNTKKAGKTGPMKTLLVRVMTPDLRERLENLRKKPENIPQPISNTSRANLNKLLTDYTEMKKAILHVYWEEFQKDPVGLMSRVAQPASKKIDQNKLKPEMDEKGNLTTAGFACSQCGQPLFVYKLEQVSEKGKAYTNYFGRCNVAEHEKLILLAQLKPEKDSDEAVTYSLGKFGQRALDFYSIHVTKESTHPVKPLAQIAGNRYASGPVGKALSDACMGTIASFLSKYQDIIIEHQKVVKGNQKRLESLRELAGKENLEYPSVTLPPQPHTKEGVDAYNEVIARVRMWVNLNLWQKLKLSRDDAKPLLRLKNFPSFPLVERQANEVDWWDMVCNVKKLINEKKEDGKVFWQNLAGYKRQEALRPYLSSEEDRKKGKKFARYQLGDLLLHLEKKHGEDWGKVYDEAWERIDKKVEGLSKHIKLEEERRSEDAQSKAALTDWLRAKASFVIEGLKEADKDEFCRCELKLQKWYGDLRGKPFAIEAENSILDISGFSKQYNCAFIWQKDGVKKLNLYLIINYFKGGKLRFKKIKPEAFEANRFYTVINKKSGEIVPMEVNFNFDDPNLIILPLAFGKRQGREFIWNDLLSLETGSLKLANGRVIEKTLYNRRTRQDEPALFVALTFERREVLDSSNIKTPMNLIGVDRGENIPAVIALTDPEGCPLSRFKDSLGNPTHILRIGESYKEKQRTIQAKKEVEQRRAGGYSRKYASKAKNLADDMVRNTARDLLYYAVTQDAMLIFENLSRGFGRQGKRTFMAERQYTRMEDWLTAKLAYEGLPSKTYLSKTLAQYTSKTCSNCGFTITSADYDRVLEKLKKTATGWMTTINGKELKVEGQITYYNRYKRQNVVKDLSVELDRLSEESVNNDISSWTKGRSGEALSLLKKRFSHRPVQEKFVCLNCGFETHADEQAALNIARSWLFLRSQEYKKYQTNKTTGNTDKRAFVETWQSFYRKKLKEVWKPAV

SEQ ID NO: 29650 - protein, 979 aa, synthetic construct
  REGION 1..979: note = engineered CasX variant
QEIKRINKIRRRLVKDSNTKKAGKTGPMKTLLVRVMTPDLRERLENLRKKPENIPQPISNTSRANLNKLLTDYTEMKKAILHVYWEEFQKDPVGLMSRVAQPASKKIDQNKLKPEMDEKGNLTTAGFACSQCGQPLFVYKLEQVSEKGKAYTNYFGRCNVAEHEKLILLAQLKPEKDSDEAVTYSLGKFGQRALDFYSIHVTKESTHPVKPLAQIAGNRYASGPVGKALSDACMGTIASFLSKYQDIIIEHQKVVKGNQKRLESLRELAGKENLEYPSVTLPPQPHTKEGVDAYNEVIARVRMWVNLNLWQKLKLSRDDAKPLLRLKGFPSFPLVERQANEVDWWDMVCNVKKLINEKKEDGKVFWQNLAGYKRQEALRPYLSSEEDRKKGKKFARYQLGDLLNHLEKKHGEDWGKVYDEAWERIDKKVEGLSKHIKLEEERRSEDAQSKAALTDWLRAKASFVIEGLKEADKDEFCRCELKLQKWYGDLRGKPFAIEAENSILDISGFSKQYNCAFIWQKDGVKKLNLYLIINYFKGGKLRFKKIKPEAFEANRFYTVINKKSGEIVPMEVNFNFDDPNLIILPLAFGKRQGREFIWNDLLSLETGSLKLANGRVIEKTLYNRRTRQDEPALFVALTFERREVLDSSNIKTPMNLIGVDRGENIPAVIALTDPEGCPLSRFKDSLGNPTHILRIGESYKEKQRTIQAKKEVEQRRAGGYSRKYASKAKNLADDMVRNTARDLLYYAVTQDAMLIFENLSRGFGRQGKRTFMAERQYTRMEDWLTAKLAYEGLPSKTYLSKTLAQYTSKTCSNCGFTITSADYDRVLEKLKKTATGWMTTINGKELKVEGQITYYNRYKRQNVVKDLSVELDRLSEESVNNDISSWTKGRSGEALSLLKKRFSHRPVQEKFVCLNCGFETHADEQAALNIARSWLFLRSQEYKKYQTNKTTGNTDKRAFVETWQSFYRKKLKEVWKPAV

SEQ ID NO: 29651 - protein, 979 aa, synthetic construct
  REGION 1..979: note = engineered CasX variant
QEIKRINKIRRRLVKDSNTKKAGKTGPMKTLLVRVMTPDLRERLENLRKKPENIPQPISNTSRANLNKLLTDYTEMKKAILHVYWEEFQKDPVGLMSRVAQPASKKIDQNKLKPEMDEKGNLTTAGFACSQCGQPLFVYKLEQVSEKGKAYTNYFGRCNVAEHEKLILLAQLKPEKDSDEAVTYSLGKFGQRALDFYSIHVTKESTHPVKPLAQIAGNRYASGPVGKALSDACMGTIASFLSKYQDIIIEHQKVVKGNQKRLESLRELAGKENLEYPSVTLPPQPHTKEGVDAYNEVIARVRMWVNLNLWQKLKLSRDDAKPLLRLKGFPSFPLVERQANEVDWWDMVCNVKKLINEKKEDGKVFWQNLAGYKRQEALRPYLSSEEDRKKGKKFARYQLGDLLWHLEKKHGEDWGKVYDEAWERIDKKVEGLSKHIKLEEERRSEDAQSKAALTDWLRAKASFVIEGLKEADKDEFCRCELKLQKWYGDLRGKPFAIEAENSILDISGFSKQYNCAFIWQKDGVKKLNLYLIINYFKGGKLRFKKIKPEAFEANRFYTVINKKSGEIVPMEVNFNFDDPNLIILPLAFGKRQGREFIWNDLLSLETGSLKLANGRVIEKTLYNRRTRQDEPALFVALTFERREVLDSSNIKTPMNLIGVDRGENIPAVIALTDPEGCPLSRFKDSLGNPTHILRIGESYKEKQRTIQAKKEVEQRRAGGYSRKYASKAKNLADDMVRNTARDLLYYAVTQDAMLIFENLSRGFGRQGKRTFMAERQYTRMEDWLTAKLAYEGLPSKTYLSKTLAQYTSKTCSNCGFTITSADYDRVLEKLKKTATGWMTTINGKELKVEGQITYYNRYKRQNVVKDLSVELDRLSEESVNNDISSWTKGRSGEALSLLKKRFSHRPVQEKFVCLNCGFETHADEQAALNIARSWLFLRSQEYKKYQTNKTTGNTDKRAFVETWQSFYRKKLKEVWKPAV

SEQ ID NO: 29652 - protein, 979 aa, synthetic construct
  REGION 1..979: note = engineered CasX variant
QEIKRINKIRRRLVKDSNTKKAGKTGPMKTLLVRVMTPDLRERLENLRKKPENIPQPISNTSRANLNKLLTDYTEMKKAILHVYWEEFQKDPVGLMSRVAQPASKKIDQNKLKPEMDEKGNLTTAGFACSQCGQPLFVYKLEQVSEKGKAYTNYFGRCNVAEHEKLILLAQLKPEKDSDEAVTYSLGKFGQRALDFYSIHVTKESTHPVKPLAQIAGNRYASGPVGKALSDACMGTIASFLSKYQDIIIEHQKVVKGNQKRLESLRELAGKENLEYPSVTLPPQPHTKEGVDAYNEVIARVRMWVNLNLWQKLKLSRDDAKPLLRLKGFPSFPLVERQANEVDWWDMVCNVKKLINEKKEDGKVFWQNLAGYKRQEALRPYLSSEEDRKKGKKFARYQLGDLLLHLYKKHGEDWGKVYDEAWERIDKKVEGLSKHIKLEEERRSEDAQSKAALTDWLRAKASFVIEGLKEADKDEFCRCELKLQKWYGDLRGKPFAIEAENSILDISGFSKQYNCAFIWQKDGVKKLNLYLIINYFKGGKLRFKKIKPEAFEANRFYTVINKKSGEIVPMEVNFNFDDPNLIILPLAFGKRQGREFIWNDLLSLETGSLKLANGRVIEKTLYNRRTRQDEPALFVALTFERREVLDSSNIKTPMNLIGVDRGENIPAVIALTDPEGCPLSRFKDSLGNPTHILRIGESYKEKQRTIQAKKEVEQRRAGGYSRKYASKAKNLADDMVRNTARDLLYYAVTQDAMLIFENLSRGFGRQGKRTFMAERQYTRMEDWLTAKLAYEGLPSKTYLSKTLAQYTSKTCSNCGFTITSADYDRVLEKLKKTATGWMTTINGKELKVEGQITYYNRYKRQNVVKDLSVELDRLSEESVNNDISSWTKGRSGEALSLLKKRFSHRPVQEKFVCLNCGFETHADEQAALNIARSWLFLRSQEYKKYQTNKTTGNTDKRAFVETWQSFYRKKLKEVWKPAV

SEQ ID NO: 29653 - protein, 979 aa, synthetic construct
  REGION 1..979: note = engineered CasX variant
QEIKRINKIRRRLVKDSNTKKAGKTGPMKTLLVRVMTPDLRERLENLRKKPENIPQPISNTSRANLNKLLTDYTEMKKAILHVYWEEFQKDPVGLMSRVAQPASKKIDQNKLKPEMDEKGNLTTAGFACSQCGQPLFVYKLEQVSEKGKAYTNYFGRCNVAEHEKLILLAQLKPEKDSDEAVTYSLGKFGQRALDFYSIHVTKESTHPVKPLAQIAGNRYASGPVGKALSDACMGTIASFLSKYQDIIIEHQKVVKGNQKRLESLRELAGKENLEYPSVTLPPQPHTKEGVDAYNEVIARVRMWVNLNLWQKLKLSRDDAKPLLRLKGFPSFPLVERQANEVDWWDMVCNVKKLINEKKEDGKVFWQNLAGYKRQEALRPYLSSEEDRKKGKKFARYQLGDLLLHLEKKHPEDWGKVYDEAWERIDKKVEGLSKHIKLEEERRSEDAQSKAALTDWLRAKASFVIEGLKEADKDEFCRCELKLQKWYGDLRGKPFAIEAENSILDISGFSKQYNCAFIWQKDGVKKLNLYLIINYFKGGKLRFKKIKPEAFEANRFYTVINKKSGEIVPMEVNFNFDDPNLIILPLAFGKRQGREFIWNDLLSLETGSLKLANGRVIEKTLYNRRTRQDEPALFVALTFERREVLDSSNIKTPMNLIGVDRGENIPAVIALTDPEGCPLSRFKDSLGNPTHILRIGESYKEKQRTIQAKKEVEQRRAGGYSRKYASKAKNLADDMVRNTARDLLYYAVTQDAMLIFENLSRGFGRQGKRTFMAERQYTRMEDWLTAKLAYEGLPSKTYLSKTLAQYTSKTCSNCGFTITSADYDRVLEKLKKTATGWMTTINGKELKVEGQITYYNRYKRQNVVKDLSVELDRLSEESVNNDISSWTKGRSGEALSLLKKRFSHRPVQEKFVCLNCGFETHADEQAALNIARSWLFLRSQEYKKYQTNKTTGNTDKRAFVETWQSFYRKKLKEVWKPAV

SEQ ID NO: 29654 - protein, 980 aa, synthetic construct
  REGION 1..980: note = engineered CasX variant
QEIKRINKIRRRLVKDSNTKKAGKTGPMKTLLVRVMTPDLRERLENLRKKPENIPQPISNTSRANLNKLLTDYTEMKKAILHVYWEEFQKDPVGLMSRVAQPASKKIDQNKLKPEMDEKGNLTTAGFACSQCGQPLFVYKLEQVSEKGKAYTNYFGRCNVAEHEKLILLAQLKPEKDSDEAVTYSLGKFGQRALDFYSIHVTKESTHPVKPLAQIAGNRYASGPVGKALSDACMGTIASFLSKYQDIIIEHQKVVKGNQKRLESLRELAGKENLEYPSVTLPPQPHTKEGVDAYNEVIARVRMWVNLNLWQKLKLSRDDAKPLLRLKGFPSFPLVERQANEVDWWDMVCNVKKLINEKKEDGKVFWQNLAGYKRQEALRPYLSSEEDRKKGKKFARYQLGDLLLHLEKKHGERDWGKVYDEAWERIDKKVEGLSKHIKLEEERRSEDAQSKAALTDWLRAKASFVIEGLKEADKDEFCRCELKLQKWYGDLRGKPFAIEAENSILDISGFSKQYNCAFIWQKDGVKKLNLYLIINYFKGGKLRFKKIKPEAFEANRFYTVINKKSGEIVPMEVNFNFDDPNLIILPLAFGKRQGREFIWNDLLSLETGSLKLANGRVIEKTLYNRRTRQDEPALFVALTFERREVLDSSNIKTPMNLIGVDRGENIPAVIALTDPEGCPLSRFKDSLGNPTHILRIGESYKEKQRTIQAKKEVEQRRAGGYSRKYASKAKNLADDMVRNTARDLLYYAVTQDAMLIFENLSRGFGRQGKRTFMAERQYTRMEDWLTAKLAYEGLPSKTYLSKTLAQYTSKTCSNCGFTITSADYDRVLEKLKKTATGWMTTINGKELKVEGQITYYNRYKRQNVVKDLSVELDRLSEESVNNDISSWTKGRSGEALSLLKKRFSHRPVQEKFVCLNCGFETHADEQAALNIARSWLFLRSQEYKKYQTNKTTGNTDKRAFVETWQSFYRKKLKEVWKPAV

SEQ ID NO: 29655 - protein, 980 aa, synthetic construct
  REGION 1..980: note = engineered CasX variant
QEIKRINKIRRRLVKDSNTKKAGKTGPMKTLLVRVMTPDLRERLENLRKKPENIPQPISNTSRANLNKLLTDYTEMKKAILHVYWEEFQKDPVGLMSRVAQPASKKIDQNKLKPEMDEKGNLTTAGFACSQCGQPLFVYKLEQVSEKGKAYTNYFGRCNVAEHEKLILLAQLKPEKDSDEAVTYSLGKFGQRALDFYSIHVTKESTHPVKPLAQIAGNRYASGPVGKALSDACMGTIASFLSKYQDIIIEHQKVVKGNQKRLESLRELAGKENLEYPSVTLPPQPHTKEGVDAYNEVIARVRMWVNLNLWQKLKLSRDDAKPLLRLKGFPSFPLVERQANEVDWWDMVCNVKKLINEKKEDGKVFWQNLAGYKRQEALRPYLSSEEDRKKGKKFARYQLGDLLLHLEKKHGEYDWGKVYDEAWERIDKKVEGLSKHIKLEEERRSEDAQSKAALTDWLRAKASFVIEGLKEADKDEFCRCELKLQKWYGDLRGKPFAIEAENSILDISGFSKQYNCAFIWQKDGVKKLNLYLIINYFKGGKLRFKKIKPEAFEANRFYTVINKKSGEIVPMEVNFNFDDPNLIILPLAFGKRQGREFIWNDLLSLETGSLKLANGRVIEKTLYNRRTRQDEPALFVALTFERREVLDSSNIKTPMNLIGVDRGENIPAVIALTDPEGCPLSRFKDSLGNPTHILRIGESYKEKQRTIQAKKEVEQRRAGGYSRKYASKAKNLADDMVRNTARDLLYYAVTQDAMLIFENLSRGFGRQGKRTFMAERQYTRMEDWLTAKLAYEGLPSKTYLSKTLAQYTSKTCSNCGFTITSADYDRVLEKLKKTATGWMTTINGKELKVEGQITYYNRYKRQNVVKDLSVELDRLSEESVNNDISSWTKGRSGEALSLLKKRFSHRPVQEKFVCLNCGFETHADEQAALNIARSWLFLRSQEYKKYQTNKTTGNTDKRAFVETWQSFYRKKLKEVWKPAV

SEQ ID NO: 29656 - protein, 979 aa, synthetic construct
  REGION 1..979: note = engineered CasX variant
QEIKRINKIRRRLVKDSNTKKAGKTGPMKTLLVRVMTPDLRERLENLRKKPENIPQPISNTSRANLNKLLTDYTEMKKAILHVYWEEFQKDPVGLMSRVAQPASKKIDQNKLKPEMDEKGNLTTAGFACSQCGQPLFVYKLEQVSEKGKAYTNYFGRCNVAEHEKLILLAQLKPEKDSDEAVTYSLGKFGQRALDFYSIHVTKESTHPVKPLAQIAGNRYASGPVGKALSDACMGTIASFLSKYQDIIIEHQKVVKGNQKRLESLRELAGKENLEYPSVTLPPQPHTKEGVDAYNEVIARVRMWVNLNLWQKLKLSRDDAKPLLRLKGFPSFPLVERQANEVDWWDMVCNVKKLINEKKEDGKVFWQNLAGYKRQEALRPYLSSEEDRKKGKKFARYQLGDLLLHLEKKHGEDWGDVYDEAWERIDKKVEGLSKHIKLEEERRSEDAQSKAALTDWLRAKASFVIEGLKEADKDEFCRCELKLQKWYGDLRGKPFAIEAENSILDISGFSKQYNCAFIWQKDGVKKLNLYLIINYFKGGKLRFKKIKPEAFEANRFYTVINKKSGEIVPMEVNFNFDDPNLIILPLAFGKRQGREFIWNDLLSLETGSLKLANGRVIEKTLYNRRTRQDEPALFVALTFERREVLDSSNIKTPMNLIGVDRGENIPAVIALTDPEGCPLSRFKDSLGNPTHILRIGESYKEKQRTIQAKKEVEQRRAGGYSRKYASKAKNLADDMVRNTARDLLYYAVTQDAMLIFENLSRGFGRQGKRTFMAERQYTRMEDWLTAKLAYEGLPSKTYLSKTLAQYTSKTCSNCGFTITSADYDRVLEKLKKTATGWMTTINGKELKVEGQITYYNRYKRQNVVKDLSVELDRLSEESVNNDISSWTKGRSGEALSLLKKRFSHRPVQEKFVCLNCGFETHADEQAALNIARSWLFLRSQEYKKYQTNKTTGNTDKRAFVETWQSFYRKKLKEVWKPAV

SEQ ID NO: 29657 - protein, 979 aa, synthetic construct
  REGION 1..979: note = engineered CasX variant
QEIKRINKIRRRLVKDSNTKKAGKTGPMKTLLVRVMTPDLRERLENLRKKPENIPQPISNTSRANLNKLLTDYTEMKKAILHVYWEEFQKDPVGLMSRVAQPASKKIDQNKLKPEMDEKGNLTTAGFACSQCGQPLFVYKLEQVSEKGKAYTNYFGRCNVAEHEKLILLAQLKPEKDSDEAVTYSLGKFGQRALDFYSIHVTKESTHPVKPLAQIAGNRYASGPVGKALSDACMGTIASFLSKYQDIIIEHQKVVKGNQKRLESLRELAGKENLEYPSVTLPPQPHTKEGVDAYNEVIARVRMWVNLNLWQKLKLSRDDAKPLLRLKGFPSFPLVERQANEVDWWDMVCNVKKLINEKKEDGKVFWQNLAGYKRQEALRPYLSSEEDRKKGKKFARYQLGDLLLHLEKKHGEDWGKVYGEAWERIDKKVEGLSKHIKLEEERRSEDAQSKAALTDWLRAKASFVIEGLKEADKDEFCRCELKLQKWYGDLRGKPFAIEAENSILDISGFSKQYNCAFIWQKDGVKKLNLYLIINYFKGGKLRFKKIKPEAFEANRFYTVINKKSGEIVPMEVNFNFDDPNLIILPLAFGKRQGREFIWNDLLSLETGSLKLANGRVIEKTLYNRRTRQDEPALFVALTFERREVLDSSNIKTPMNLIGVDRGENIPAVIALTDPEGCPLSRFKDSLGNPTHILRIGESYKEKQRTIQAKKEVEQRRAGGYSRKYASKAKNLADDMVRNTARDLLYYAVTQDAMLIFENLSRGFGRQGKRTFMAERQYTRMEDWLTAKLAYEGLPSKTYLSKTLAQYTSKTCSNCGFTITSADYDRVLEKLKKTATGWMTTINGKELKVEGQITYYNRYKRQNVVKDLSVELDRLSEESVNNDISSWTKGRSGEALSLLKKRFSHRPVQEKFVCLNCGFETHADEQAALNIARSWLFLRSQEYKKYQTNKTTGNTDKRAFVETWQSFYRKKLKEVWKPAV

SEQ ID NO: 29658 - protein, 979 aa, synthetic construct
  REGION 1..979: note = engineered CasX variant
QEIKRINKIRRRLVKDSNTKKAGKTGPMKTLLVRVMTPDLRERLENLRKKPENIPQPISNTSRANLNKLLTDYTEMKKAILHVYWEEFQKDPVGLMSRVAQPASKKIDQNKLKPEMDEKGNLTTAGFACSQCGQPLFVYKLEQVSEKGKAYTNYFGRCNVAEHEKLILLAQLKPEKDSDEAVTYSLGKFGQRALDFYSIHVTKESTHPVKPLAQIAGNRYASGPVGKALSDACMGTIASFLSKYQDIIIEHQKVVKGNQKRLESLRELAGKENLEYPSVTLPPQPHTKEGVDAYNEVIARVRMWVNLNLWQKLKLSRDDAKPLLRLKGFPSFPLVERQANEVDWWDMVCNVKKLINEKKEDGKVFWQNLAGYKRQEALRPYLSSEEDRKKGKKFARYQLGDLLLHLEKKHGEDWGKVYDEAWERIDKKVEGLSKHIKLEEERRSEDAQSKAALTDWLRAKASFVIEGKKEADKDEFCRCELKLQKWYGDLRGKPFAIEAENSILDISGFSKQYNCAFIWQKDGVKKLNLYLIINYFKGGKLRFKKIKPEAFEANRFYTVINKKSGEIVPMEVNFNFDDPNLIILPLAFGKRQGREFIWNDLLSLETGSLKLANGRVIEKTLYNRRTRQDEPALFVALTFERREVLDSSNIKTPMNLIGVDRGENIPAVIALTDPEGCPLSRFKDSLGNPTHILRIGESYKEKQRTIQAKKEVEQRRAGGYSRKYASKAKNLADDMVRNTARDLLYYAVTQDAMLIFENLSRGFGRQGKRTFMAERQYTRMEDWLTAKLAYEGLPSKTYLSKTLAQYTSKTCSNCGFTITSADYDRVLEKLKKTATGWMTTINGKELKVEGQITYYNRYKRQNVVKDLSVELDRLSEESVNNDISSWTKGRSGEALSLLKKRFSHRPVQEKFVCLNCGFETHADEQAALNIARSWLFLRSQEYKKYQTNKTTGNTDKRAFVETWQSFYRKKLKEVWKPAV

SEQ ID NO: 29659 - protein, 979 aa, synthetic construct
  REGION 1..979: note = engineered CasX variant
QEIKRINKIRRRLVKDSNTKKAGKTGPMKTLLVRVMTPDLRERLENLRKKPENIPQPISNTSRANLNKLLTDYTEMKKAILHVYWEEFQKDPVGLMSRVAQPASKKIDQNKLKPEMDEKGNLTTAGFACSQCGQPLFVYKLEQVSEKGKAYTNYFGRCNVAEHEKLILLAQLKPEKDSDEAVTYSLGKFGQRALDFYSIHVTKESTHPVKPLAQIAGNRYASGPVGKALSDACMGTIASFLSKYQDIIIEHQKVVKGNQKRLESLRELAGKENLEYPSVTLPPQPHTKEGVDAYNEVIARVRMWVNLNLWQKLKLSRDDAKPLLRLKGFPSFPLVERQANEVDWWDMVCNVKKLINEKKEDGKVFWQNLAGYKRQEALRPYLSSEEDRKKGKKFARYQLGDLLLHLEKKHGEDWGKVYDEAWERIDKKVEGLSKHIKLEEERRSEDAQSKAALTDWLRAKASFVIEGSKEADKDEFCRCELKLQKWYGDLRGKPFAIEAENSILDISGFSKQYNCAFIWQKDGVKKLNLYLIINYFKGGKLRFKKIKPEAFEANRFYTVINKKSGEIVPMEVNFNFDDPNLIILPLAFGKRQGREFIWNDLLSLETGSLKLANGRVIEKTLYNRRTRQDEPALFVALTFERREVLDSSNIKTPMNLIGVDRGENIPAVIALTDPEGCPLSRFKDSLGNPTHILRIGESYKEKQRTIQAKKEVEQRRAGGYSRKYASKAKNLADDMVRNTARDLLYYAVTQDAMLIFENLSRGFGRQGKRTFMAERQYTRMEDWLTAKLAYEGLPSKTYLSKTLAQYTSKTCSNCGFTITSADYDRVLEKLKKTATGWMTTINGKELKVEGQITYYNRYKRQNVVKDLSVELDRLSEESVNNDISSWTKGRSGEALSLLKKRFSHRPVQEKFVCLNCGFETHADEQAALNIARSWLFLRSQEYKKYQTNKTTGNTDKRAFVETWQSFYRKKLKEVWKPAV

SEQ ID NO: 29660 - protein, 980 aa, synthetic construct
  REGION 1..980: note = engineered CasX variant
QEIKRINKIRRRLVKDSNTKKAGKTGPMKTLLVRVMTPDLRERLENLRKKPENIPQPISNTSRANLNKLLTDYTEMKKAILHVYWEEFQKDPVGLMSRVAQPASKKIDQNKLKPEMDEKGNLTTAGFACSQCGQPLFVYKLEQVSEKGKAYTNYFGRCNVAEHEKLILLAQLKPEKDSDEAVTYSLGKFGQRALDFYSIHVTKESTHPVKPLAQIAGNRYASGPVGKALSDACMGTIASFLSKYQDIIIEHQKVVKGNQKRLESLRELAGKENLEYPSVTLPPQPHTKEGVDAYNEVIARVRMWVNLNLWQKLKLSRDDAKPLLRLKGFPSFPLVERQANEVDWWDMVCNVKKLINEKKEDGKVFWQNLAGYKRQEALRPYLSSEEDRKKGKKFARYQLGDLLLHLEKKHGEDWGKVYDEAWERIDKKVEGLSKHIKLEEERRSEDAQSKAALTDWLRAKASFVIEGLKEADDKDEFCRCELKLQKWYGDLRGKPFAIEAENSILDISGFSKQYNCAFIWQKDGVKKLNLYLIINYFKGGKLRFKKIKPEAFEANRFYTVINKKSGEIVPMEVNFNFDDPNLIILPLAFGKRQGREFIWNDLLSLETGSLKLANGRVIEKTLYNRRTRQDEPALFVALTFERREVLDSSNIKTPMNLIGVDRGENIPAVIALTDPEGCPLSRFKDSLGNPTHILRIGESYKEKQRTIQAKKEVEQRRAGGYSRKYASKAKNLADDMVRNTARDLLYYAVTQDAMLIFENLSRGFGRQGKRTFMAERQYTRMEDWLTAKLAYEGLPSKTYLSKTLAQYTSKTCSNCGFTITSADYDRVLEKLKKTATGWMTTINGKELKVEGQITYYNRYKRQNVVKDLSVELDRLSEESVNNDISSWTKGRSGEALSLLKKRFSHRPVQEKFVCLNCGFETHADEQAALNIARSWLFLRSQEYKKYQTNKTTGNTDKRAFVETWQSFYRKKLKEVWKPAV

SEQ ID NO: 29661 - protein, 980 aa, synthetic construct
  REGION 1..980: note = engineered CasX variant
QEIKRINKIRRRLVKDSNTKKAGKTGPMKTLLVRVMTPDLRERLENLRKKPENIPQPISNTSRANLNKLLTDYTEMKKAILHVYWEEFQKDPVGLMSRVAQPASKKIDQNKLKPEMDEKGNLTTAGFACSQCGQPLFVYKLEQVSEKGKAYTNYFGRCNVAEHEKLILLAQLKPEKDSDEAVTYSLGKFGQRALDFYSIHVTKESTHPVKPLAQIAGNRYASGPVGKALSDACMGTIASFLSKYQDIIIEHQKVVKGNQKRLESLRELAGKENLEYPSVTLPPQPHTKEGVDAYNEVIARVRMWVNLNLWQKLKLSRDDAKPLLRLKGFPSFPLVERQANEVDWWDMVCNVKKLINEKKEDGKVFWQNLAGYKRQEALRPYLSSEEDRKKGKKFARYQLGDLLLHLEKKHGEDWGKVYDEAWERIDKKVEGLSKHIKLEEERRSEDAQSKAALTDWLRAKASFVIEGLKEADKDEFCRCELKLQKWYGDLRGKPFAIEAENSILDISGFSKQYNCAFIWQKDGVKKLNLYLIINYFKGGKLRFKKIKPEAFEANRFYTVINKKSGEIVPMEVNFNFDDPNLIILPLAFGKRQGREFIWNDLLSLETGSLKLANGRVIEKTLYNRRTRQDEPALFVALTFERREVLDSSNIKTPMNLIGVDRGENIPAVIALTDPEGCPLSRFKDSLGNPTHILRIGESYKEKQRTIQAKKEVEQRRAGGYSRKYASKAKNLADDMVRNTARDLLYYAVTQDAMLIFENLSRGFGRQGKRTFMAERQYTRMEDWLTAKLAYEGLPSKTYLSKTLAQYTSKTCSNCGFTITSADYDRVLEKLKKTATGWMTTINGKELKVEGQITYYNRYKRQNVVKDLSVELDRLSEESVNNDISSWTKGRSGNEALSLLKKRFSHRPVQEKFVCLNCGFETHADEQAALNIARSWLFLRSQEYKKYQTNKTTGNTDKRAFVETWQSFYRKKLKEVWKPAV

SEQ ID NO: 29662 - protein, 979 aa, synthetic construct
  REGION 1..979: note = engineered CasX variant
QEIKRINKIRRRLVKDSNTKKAGKTGPMKTLLVRVMTPDLRERLENLRKKPENIPQPISNTSRANLNKLLTDYTEMKKAILHVYWEEFQKDPVGLMSRVAQPASKKIDQNKLKPEMDEKGNLTTAGFACSQCGQPLFVYKLEQVSEKGKAYTNYFGRCNVAEHEKLILLAQLKPEKDSDEAVTYSLGKFGQRALDFYSIHVTKESTHPVKPLAQIAGNRYASGPVGKALSDACMGTIASFLSKYQDIIIEHQKVVKGNQKRLESLRELAGKENLEYPSVTLPPQPHTKEGVDAYNEVIARVRMWVNLNLWQKLKLSRDDAKPLLRLKGFPSFPLVERQANEVDWWDMVCNVKKLINEKKEDGKVFWQNLAGYKRQEALRPYLSSEEDRQKGKKFARYQLGDLLLHLEKKHGEDWGKVYDEAWERIDKKVEGLSKHIKLEEERRSEDAQSKAALTDWLRAKASFVIEGLKEADKDEFCRCELKLQKWYGDLRGKPFAIEAENSILDISGFSKQYNCAFIWQKDGVKKLNLYLIINYFKGGKLRFKKIKPEAFEANRFYTVINKKSGEIVPMEVNFNFDDPNLIILPLAFGKRQGREFIWNDLLSLETGSLKLANGRVIEKTLYNRRTRQDEPALFVALTFERREVLDSSNIKTPMNLIGVDRGENIPAVIALTDPEGCPLSRFKDSLGNPTHILRIGESYKEKQRTIQAKKEVEQRRAGGYSRKYASKAKNLADDMVRNTARDLLYYAVTQDAMLIFENLSRGFGRQGKRTFMAERQYTRMEDWLTAKLAYEGLPSKTYLSKTLAQYTSKTCSNCGFTITSADYDRVLEKLKKTATGWMTTINGKELKVEGQITYYNRYKRQNVVKDLSVELDRLSEESVNNDISSWTKGRSGEALSLLKKRFSHRPVQEKFVCLNCGFETHADEQAALNIARSWLFLRSQEYKKYQTNKTTGNTDKRAFVETWQSFYRKKLKEVWKPAV

SEQ ID NO: 29663 - protein, 979 aa, synthetic construct
  REGION 1..979: note = engineered CasX variant
QEIKRINKIRRRLVKDSNTKKAGKTGPMKTLLVRVMTPDLRERLENLRKKPENIPQPISNTSRANLNKLLTDYTEMKKAILHVYWEEFQKDPVGLMSRVAQPASKKIDQNKLKPEMDEKGNLTTAGFACSQCGQPLFVYKLEQVSEKGKAYTNYFGRCNVAEHEKLILLAQLKPEKDSDEAVTYSLGKFGQRALDFYSIHVTKESTHPVKPLAQIAGNRYASGPVGKALSDACMGTIASFLSKYQDIIIEHQKVVKGNQKRLESLRELAGKENLEYPSVTLPPQPHTKEGVDAYNEVIARVRMWVNLNLWQKLKLSRDDAKPLLRLKGFPSFPLVERQANEVDWWDMVCNVKKLINEKKEDGKVFWQNLAGYKRQEALRPYLSSEEDRKKGKKFARYQLGDLLLHLEKKHGEDWGKVYDEAWERIDKKVEGLSKHIKLEEERRSEDAQSKAALTDWLRAKASFVIEGLKEADKDEFCRCELKLQKWYGDLRGKPFAIEAENSILDISGFSKQYNCAFIWQKDGVKKLNLYLIINYFKGGKLRFKKIKPEAFEANRFYTVINKKSGEIVPMEVNFNFDDPNLIILPLAFGKRQGREFIWNDLLSLETGSLKLANGRVIEKTLYNRRTRQDEPALFVALTFERREVLDSSNIKTPMNLIGVDRGENIPAVIALTDPEGCPLSRFKDSLGNPTHILRIGESYKEKQRTIQAKKEVEQRRAGGYSRKYASKAKNLADDMVRNTARDLLYYAVTQDAMLIFENLSRGFGRQGKRTFMAERQYTRMEDWLTAKLAYEGLPSQTYLSKTLAQYTSKTCSNCGFTITSADYDRVLEKLKKTATGWMTTINGKELKVEGQITYYNRYKRQNVVKDLSVELDRLSEESVNNDISSWTKGRSGEALSLLKKRFSHRPVQEKFVCLNCGFETHADEQAALNIARSWLFLRSQEYKKYQTNKTTGNTDKRAFVETWQSFYRKKLKEVWKPAV

SEQ ID NO: 29664 - protein, 979 aa, synthetic construct
  REGION 1..979: note = engineered CasX variant
QEIKRINKIRRRLVKDSNTKKAGKTGPMKTLLVRVMTPDLRERLENLRKKPENIPQPISNTSRANLNKLLTDYTEMKKAILHVYWEEFQKDPVGLMSRVAQPASKKIDQNKLKPEMDEKGNLTTAGFACSQCGQPLFVYKLEQVSEKGKAYTNYFGRCNVAEHEKLILLAQLKPEKDSDEAVTYSLGKFGQRALDFYSIHVTKESTHPVKPLAQIAGNRYASGPVGKALSDACMGTIASFLSKYQDIIIEHQKVVKGNQKRLESLRELAGKENLEYPSVTLPPQPHTKEGVDAYNEVIARVRMWVNLNLWQKLKLSRDDAKPLLRLKGFPSFPLVERQANEVDWWDMVCNVKKLINEKKEDGKVFWQNLAGYKRQEALRPYLSSEEDRKKGKKFARYQLGDLLLHLEKKHGEDWGKVYDEAWERIDKKVEGLSKHIKLEEERRSEDAQSKAALTDWLRAKASFVIEGLKEADKDEFCRCELKLQKWYGDLRGKPFAIEAENSILDISGFSKQYNCAFIWQKDGVKKLNLYLIINYFKGGKLRFKKIKPEAFEANRFYTVINKKSGEIVPMEVNFNFDDPNLIILPLAFGKRQGREFIWNDLLSLETGSLKLANGRVIEKTLYNRRTRQDEPALFVALTFERREVLDSSNIKTPMNLIGVDRGENIPAVIALTDPEGCPLSRFKDSLGNPTHILRIGESYKEKQRTIQAKKEVEQRRAGGYSRKYASKAKNLADDMVRNTARDLLYYAVTQDAMLIFENLSRGFGRQGKRTFMAERQYTRMEDWLTAKLAYNGLPSKTYLSKTLAQYTSKTCSNCGFTITSADYDRVLEKLKKTATGWMTTINGKELKVEGQITYYNRYKRQNVVKDLSVELDRLSEESVNNDISSWTKGRSGEALSLLKKRFSHRPVQEKFVCLNCGFETHADEQAALNIARSWLFLRSQEYKKYQTNKTTGNTDKRAFVETWQSFYRKKLKEVWKPAV

SEQ ID NO: 29665 - protein, 979 aa, synthetic construct
  REGION 1..979: note = engineered CasX variant
QEIKRINKIRRRLVKDSNTKKAGKTGPMKTLLVRVMTPDLRERLENLRKKPENIPQPISNTSRANLNKLLTDYTEMKKAILHVYWEEFQKDPVGLMSRVAQPASKKIDQNKLKPEMDEKGNLTTAGFACSQCGQPLFVYKLEQVSEKGKAYTNYFGRCNVAEHEKLIQLAQLKPEKDSDEAVTYSLGKFGQRALDFYSIHVTKESTHPVKPLAQIAGNRYASGPVGKALSDACMGTIASFLSKYQDIIIEHQKVVKGNQKRLESLRELAGKENLEYPSVTLPPQPHTKEGVDAYNEVIARVRMWVNLNLWQKLKLSRDDAKPLLRLKGFPSFPLVERQANEVDWWDMVCNVKKLINEKKEDGKVFWQNLAGYKRQEALRPYLSSEEDRKKGKKFARYQLGDLLLHLEKKHGEDWGKVYDEAWERIDKKVEGLSKHIKLEEERRSEDAQSKAALTDWLRAKASFVIEGLKEADKDEFCRCELKLQKWYGDLRGKPFAIEAENSILDISGFSKQYNCAFIWQKDGVKKLNLYLIINYFKGGKLRFKKIKPEAFEANRFYTVINKKSGEIVPMEVNFNFDDPNLIILPLAFGKRQGREFIWNDLLSLETGSLKLANGRVIEKTLYNRRTRQDEPALFVALTFERREVLDSSNIKTPMNLIGVDRGENIPAVIALTDPEGCPLSRFKDSLGNPTHILRIGESYKEKQRTIQAKKEVEQRRAGGYSRKYASKAKNLADDMVRNTARDLLYYAVTQDAMLIFENLSRGFGRQGKRTFMAERQYTRMEDWLTAKLAYEGLPSKTYLSKTLAQYTSKTCSNCGFTITSADYDRVLEKLKKTATGWMTTINGKELKVEGQITYYNRYKRQNVVKDLSVELDRLSEESVNNDISSWTKGRSGEALSLLKKRFSHRPVQEKFVCLNCGFETHADEQAALNIARSWLFLRSQEYKKYQTNKTTGNTDKRAFVETWQSFYRKKLKEVWKPAV

SEQ ID NO: 29666 - protein, 979 aa, synthetic construct
  REGION 1..979: note = engineered CasX variant
QEIKRINKIRRRLVKDSNTKKAGKTGPMKTLLVRVMTPDLRERLENLRKKPENIPQPISNTSRANLNKLLTDYTEMKKAILHVYWEEFQKDPVGLMSRVAQPASKKIDQNKLKPEMDEKGNLTTAGFACSQCGQPLFVYKLEQVSEKGKAYTNYFGRCNVAEHEKLILLAQLKPEKDSDEAVTYSLGKFGQRALDFYSIHVTKESTHPVKPLAQIAGNRYASGPVGKALSDACMGTIASFLSKYQDIIIEHQKVVKGNQKRLESLRELAGKENLEYPSVTLPPQPHTKEGVDAYNEVIARVRMWVNLNLWQKLKLSRDDAKPLLRLKGFPSFPLVERQANEVDWWDMVCNVKKLINEKKEDGKVFWQNLAIYKRQEALRPYLSSEEDRKKGKKFARYQLGDLLLHLEKKHGEDWGKVYDEAWERIDKKVEGLSKHIKLEEERRSEDAQSKAALTDWLRAKASFVIEGLKEADKDEFCRCELKLQKWYGDLRGKPFAIEAENSILDISGFSKQYNCAFIWQKDGVKKLNLYLIINYFKGGKLRFKKIKPEAFEANRFYTVINKKSGEIVPMEVNFNFDDPNLIILPLAFGKRQGREFIWNDLLSLETGSLKLANGRVIEKTLYNRRTRQDEPALFVALTFERREVLDSSNIKTPMNLIGVDRGENIPAVIALTDPEGCPLSRFKDSLGNPTHILRIGESYKEKQRTIQAKKEVEQRRAGGYSRKYASKAKNLADDMVRNTARDLLYYAVTQDAMLIFENLSRGFGRQGKRTFMAERQYTRMEDWLTAKLAYEGLPSKTYLSKTLAQYTSKTCSNCGFTITSADYDRVLEKLKKTATGWMTTINGKELKVEGQITYYNRYKRQNVVKDLSVELDRLSEESVNNDISSWTKGRSGEALSLLKKRFSHRPVQEKFVCLNCGFETHADEQAALNIARSWLFLRSQEYKKYQTNKTTGNTDKRAFVETWQSFYRKKLKEVWKPAV

SEQ ID NO: 29667 - protein, 979 aa, synthetic construct
  REGION 1..979: note = engineered CasX variant
QEIKRINKIRRRLVKDSNTKKAGKTGPMKTLLVRVMTPDLRERLENLRKKPENIPQPISNTSRANLNKLLTDYTEMKKAILHVYWEEFQKDPVGLMSRVAQPASKKIDQNKLKPEMDEKGNLTTAGFACSQCGQPLFVYKLEQVSEKGKAYTNYFGRCNVAEHEKLILLAQLKPEKDSDEAVTYSLGKFGQRALDFYSIHVTKESTHPVKPLAQIAGNRYASGPVGKALSDACMGTIASFLSKYQDIIIEHQKVVKGNQKRLESLRELAGKENLEYPSVTLPPQPHTKEGVDAYNEVIARVRMWVNLNLWQKLKLSRDDAKPLLRLKGFPSFPLVERQANEVDWWDMVCNVKKLINEKKEDGKVFWQNLAGYKRQEALRPYLSSEEDREKGKKFARYQLGDLLLHLEKKHGEDWGKVYDEAWERIDKKVEGLSKHIKLEEERRSEDAQSKAALTDWLRAKASFVIEGLKEADKDEFCRCELKLQKWYGDLRGKPFAIEAENSILDISGFSKQYNCAFIWQKDGVKKLNLYLIINYFKGGKLRFKKIKPEAFEANRFYTVINKKSGEIVPMEVNFNFDDPNLIILPLAFGKRQGREFIWNDLLSLETGSLKLANGRVIEKTLYNRRTRQDEPALFVALTFERREVLDSSNIKTPMNLIGVDRGENIPAVIALTDPEGCPLSRFKDSLGNPTHILRIGESYKEKQRTIQAKKEVEQRRAGGYSRKYASKAKNLADDMVRNTARDLLYYAVTQDAMLIFENLSRGFGRQGKRTFMAERQYTRMEDWLTAKLAYEGLPSKTYLSKTLAQYTSKTCSNCGFTITSADYDRVLEKLKKTATGWMTTINGKELKVEGQITYYNRYKRQNVVKDLSVELDRLSEESVNNDISSWTKGRSGEALSLLKKRFSHRPVQEKFVCLNCGFETHADEQAALNIARSWLFLRSQEYKKYQTNKTTGNTDKRAFVETWQSFYRKKLKEVWKPAV

SEQ ID NO: 29668 - protein, 979 aa, synthetic construct
  REGION 1..979: note = engineered CasX variant
QEIKRINKIRRRLVKDSNTKKAGKTGPMKTLLVRVMTPDLRERLENLRKKPENIPQPISNTSRANLNKLLTDYTEMKKAILHVYWEEFQKDPVGLMSRVAQPASKKIDQNKLKPEMDEKGNLTTAGFACSQCGQPLFVYKLEQVSEKGKAYTNYFGRCNVAEHEKLILLAQLKPEKDSDEAVTYSLGKFGQRALDFYSIHVTKESTHPVKPLAQIAGNRYASGPVGKALSDACMGTIASFLSKYQDIIIEHQKVVKGNQKRLESLRELAGKENLEYPSVTLPPQPHTKEGVDAYNEVIARVRMWVNLNLWQKLKLSRDDAKPLLRLKGFPSFPLVERQANEVDWWDMVCNVKKLINEKKEDGKVFWQNLAGYKRQEALRPYLSSEEDRKKGKKFARYQLGDLLLHLEKKHGEDWGKVYDEAWERIDKKVEGLSKHIKLEEERRSEDAQSKAALTDWLRAKASFVIEGLKEADKDEFCRCELKLQKWYGDLRGKPFAIEAENSILDISGFSKQYNCAFIWQKDGVKKLNLYLIINYFKGGKLRFKKIKPEAFEANRFYTVINKKSGEIVIMEVNFNFDDPNLIILPLAFGKRQGREFIWNDLLSLETGSLKLANGRVIEKTLYNRRTRQDEPALFVALTFERREVLDSSNIKTPMNLIGVDRGENIPAVIALTDPEGCPLSRFKDSLGNPTHILRIGESYKEKQRTIQAKKEVEQRRAGGYSRKYASKAKNLADDMVRNTARDLLYYAVTQDAMLIFENLSRGFGRQGKRTFMAERQYTRMEDWLTAKLAYEGLPSKTYLSKTLAQYTSKTCSNCGFTITSADYDRVLEKLKKTATGWMTTINGKELKVEGQITYYNRYKRQNVVKDLSVELDRLSEESVNNDISSWTKGRSGEALSLLKKRFSHRPVQEKFVCLNCGFETHADEQAALNIARSWLFLRSQEYKKYQTNKTTGNTDKRAFVETWQSFYRKKLKEVWKPAV

SEQ ID NO: 29669 - protein, 979 aa, synthetic construct
  REGION 1..979: note = engineered CasX variant
QEIKRINKIRRRLVKDSNTKKAGKTGPMKTLLVRVMTPDLRERLENLRKKPENIPQPISNTSRANLNKLLTDYTEMKKAILHVYWEEFQKDPVGLMSRVAQPASKKIDQNKLKPEMDEKGNLTTAGFACSQCGQPLFVYKLEQVSEKGKAYTNYFGRCNVAEHEKLILLAQLKPEKDSDEAVTYSLGKFGQRALDFYSIHVTKESTHPVKPLAQIAGNRYASGPVGKALSGACMGTIASFLSKYQDIIIEHQKVVKGNQKRLESLRELAGKENLEYPSVTLPPQPHTKEGVDAYNEVIARVRMWVNLNLWQKLKLSRDDAKPLLRLKGFPSFPLVERQANEVDWWDMVCNVKKLINEKKEDGKVFWQNLAGYKRQEALRPYLSSEEDRKKGKKFARYQLGDLLLHLEKKHGEDWGKVYDEAWERIDKKVEGLSKHIKLEEERRSEDAQSKAALTDWLRAKASFVIEGLKEADKDEFCRCELKLQKWYGDLRGKPFAIEAENSILDISGFSKQYNCAFIWQKDGVKKLNLYLIINYFKGGKLRFKKIKPEAFEANRFYTVINKKSGEIVPMEVNFNFDDPNLIILPLAFGKRQGREFIWNDLLSLETGSLKLANGRVIEKTLYNRRTRQDEPALFVALTFERREVLDSSNIKPMSNLIGVDRGENIPAVIALTDPEGCPLSRFKDSLGNPTHILRIGESYKEKQRTIQAKKEVEQRRAGGYSRKYASKAKNLADDMVRNTARDLLYYAVTQDAMLIFENLSRGFGRQGKRTFMAERQYTRMEDWLTAKLAYEGLPSKTYLSKTLAQYTSKTCSNCGFTITSADYDRVLEKLKKTATGWMTTINGKELKVEGQITYYNRYKRQNVVKDLSVELDRLSEESVNNDISSWTKGRSGEALSLLKKRFSHRPVQEKFVCLNCGFETHADEQAALNIARSWLFLRSQEYKKYQTNKTTGNTDKRAFVETWQSFYRKKLKEVWKPAV

SEQ ID NO: 29670 - protein, 979 aa, synthetic construct
  REGION 1..979: note = engineered CasX variant
QEIKRINKIRRRLVKDSNTKKAGKTGPMKTLLVRVMTPDLRERLENLRKKPENIPQPISNTSRANLNKLLTDYTEMKKAILHVYWEEFQKDPVGLMSRVAQPASKKIDQNKLKPEMDEKGNLTTAGFACSQCGQPLFVYKLEQVSEKGKAYTNYFGRCNVAEHEKLILLAQLKPEKDSDEAVTYSLGKFGQRALDFYSIHVTKESTHPVKPLAQIAGNRYASGPVGKALSDACMGTIASFLSKYQDIIIEHQKVVKGNQKRLESLRELAGKENLEYPSVTLPPQPHTKEGVDAYNEVIARVRMWVNLNLWQKLKLSRDDAKPLLRLKNFPSFPLVERQANEVDWWDMVCNVKKLINEKKEDGKVFWQNLAGYKRQEALRPYLSSEEDRKKGKKFARYQLGDLLLHLEKKHGEDWGKVYDEAWERIDKKVEGLSKHIKLEEERRSEDAQSKAALTDWLRAKASFVIEGLKEADKDEFCRCELKLQKWYGDLRGKPFAIEAENSILDISGFSKQYNCAFIWQKDGVKKLNLYLIINYFKGGKLRFKKIKPEAFEANRFYTVINKKSGEIVPMEVNFNFDDPNLIILPLAFGKRQGREFIWNDLLSLETGSLKLANGRVIEKTLYNRRTRQDEPALFVALTFERREVLDSSNIKPMSNLIGVDRGENIPAVIALTDPEGCPLSRFKDSLGNPTHILRIGESYKEKQRTIQAKKEVEQRRAGGYSRKYASKAKNLADDMVRNTARDLLYYAVTQDAMLIFENLSRGFGRQGKRTFMAERQYTRMEDWLTAKLAYEGLPSKTYLSKTLAQYTSKTCSNCGFTITSADYDRVLEKLKKTATGWMTTINGKELKVEGQITYYNRYKRQNVVKDLSVELDRLSEESVNNDISSWTKGRSGEALSLLKKRFSHRPVQEKFVCLNCGFETHADEQAALNIARSWLFLRSQEYKKYQTNKTTGNTDKRAFVETWQSFYRKKLKEVWKPAV

SEQ ID NO: 29671 - protein, 979 aa, synthetic construct
  REGION 1..979: note = engineered CasX variant
QEIKRINKIRRRLVKDSNTKKAGKTGPMKTLLVRVMTPDLRERLENLRKKPENIPQPISNTSRANLNKLLTDYTEMKKAILHVYWEEFQKDPVGLMSRVAQPASKKIDQNKLKPEMDEKGNLTTAGFACSQCGQPLFVYKLEQVSEKGKAYTNYFGRCNVAEHEKLILLAQLKPEKDSDEAVTYSLGKFGQRALDFYSIHVTKESTHPVKPLAQIAGNRYASGPVGKALSDACMGTIASFLSKYQDIIIEHQKVVKGNQKRLESLRELAGKENLEYPSVTLPPQPHTKEGVDAYNEVIARVRMWVNLNLWQKLKLSRDDAKPLLRLKGFPSFPLVERQANEVDWWDMVCNVKKLINEKKEDGKVFWQNLAGYKRQEALRPYLSSEEDRKKGKKFARYQLGDLLNHLEKKHGEDWGKVYDEAWERIDKKVEGLSKHIKLEEERRSEDAQSKAALTDWLRAKASFVIEGLKEADKDEFCRCELKLQKWYGDLRGKPFAIEAENSILDISGFSKQYNCAFIWQKDGVKKLNLYLIINYFKGGKLRFKKIKPEAFEANRFYTVINKKSGEIVPMEVNFNFDDPNLIILPLAFGKRQGREFIWNDLLSLETGSLKLANGRVIEKTLYNRRTRQDEPALFVALTFERREVLDSSNIKPMSNLIGVDRGENIPAVIALTDPEGCPLSRFKDSLGNPTHILRIGESYKEKQRTIQAKKEVEQRRAGGYSRKYASKAKNLADDMVRNTARDLLYYAVTQDAMLIFENLSRGFGRQGKRTFMAERQYTRMEDWLTAKLAYEGLPSKTYLSKTLAQYTSKTCSNCGFTITSADYDRVLEKLKKTATGWMTTINGKELKVEGQITYYNRYKRQNVVKDLSVELDRLSEESVNNDISSWTKGRSGEALSLLKKRFSHRPVQEKFVCLNCGFETHADEQAALNIARSWLFLRSQEYKKYQTNKTTGNTDKRAFVETWQSFYRKKLKEVWKPAV

SEQ ID NO: 29672 - protein, 979 aa, synthetic construct
  REGION 1..979: note = engineered CasX variant
QEIKRINKIRRRLVKDSNTKKAGKTGPMKTLLVRVMTPDLRERLENLRKKPENIPQPISNTSRANLNKLLTDYTEMKKAILHVYWEEFQKDPVGLMSRVAQPASKKIDQNKLKPEMDEKGNLTTAGFACSQCGQPLFVYKLEQVSEKGKAYTNYFGRCNVAEHEKLILLAQLKPEKDSDEAVTYSLGKFGQRALDFYSIHVTKESTHPVKPLAQIAGNRYASGPVGKALSDACMGTIASFLSKYQDIIIEHQKVVKGNQKRLESLRELAGKENLEYPSVTLPPQPHTKEGVDAYNEVIARVRMWVNLNLWQKLKLSRDDAKPLLRLKGFPSFPLVERQANEVDWWDMVCNVKKLINEKKEDGKVFWQNLAGYKRQEALRPYLSSEEDRKKGKKFARYQLGDLLWHLEKKHGEDWGKVYDEAWERIDKKVEGLSKHIKLEEERRSEDAQSKAALTDWLRAKASFVIEGLKEADKDEFCRCELKLQKWYGDLRGKPFAIEAENSILDISGFSKQYNCAFIWQKDGVKKLNLYLIINYFKGGKLRFKKIKPEAFEANRFYTVINKKSGEIVPMEVNFNFDDPNLIILPLAFGKRQGREFIWNDLLSLETGSLKLANGRVIEKTLYNRRTRQDEPALFVALTFERREVLDSSNIKPMSNLIGVDRGENIPAVIALTDPEGCPLSRFKDSLGNPTHILRIGESYKEKQRTIQAKKEVEQRRAGGYSRKYASKAKNLADDMVRNTARDLLYYAVTQDAMLIFENLSRGFGRQGKRTFMAERQYTRMEDWLTAKLAYEGLPSKTYLSKTLAQYTSKTCSNCGFTITSADYDRVLEKLKKTATGWMTTINGKELKVEGQITYYNRYKRQNVVKDLSVELDRLSEESVNNDISSWTKGRSGEALSLLKKRFSHRPVQEKFVCLNCGFETHADEQAALNIARSWLFLRSQEYKKYQTNKTTGNTDKRAFVETWQSFYRKKLKEVWKPAV

SEQ ID NO: 29673 - protein, 979 aa, synthetic construct
  REGION 1..979: note = engineered CasX variant
QEIKRINKIRRRLVKDSNTKKAGKTGPMKTLLVRVMTPDLRERLENLRKKPENIPQPISNTSRANLNKLLTDYTEMKKAILHVYWEEFQKDPVGLMSRVAQPASKKIDQNKLKPEMDEKGNLTTAGFACSQCGQPLFVYKLEQVSEKGKAYTNYFGRCNVAEHEKLILLAQLKPEKDSDEAVTYSLGKFGQRALDFYSIHVTKESTHPVKPLAQIAGNRYASGPVGKALSDACMGTIASFLSKYQDIIIEHQKVVKGNQKRLESLRELAGKENLEYPSVTLPPQPHTKEGVDAYNEVIARVRMWVNLNLWQKLKLSRDDAKPLLRLKGFPSFPLVERQANEVDWWDMVCNVKKLINEKKEDGKVFWQNLAGYKRQEALRPYLSSEEDRKKGKKFARYQLGDLLLHLYKKHGEDWGKVYDEAWERIDKKVEGLSKHIKLEEERRSEDAQSKAALTDWLRAKASFVIEGLKEADKDEFCRCELKLQKWYGDLRGKPFAIEAENSILDISGFSKQYNCAFIWQKDGVKKLNLYLIINYFKGGKLRFKKIKPEAFEANRFYTVINKKSGEIVPMEVNFNFDDPNLIILPLAFGKRQGREFIWNDLLSLETGSLKLANGRVIEKTLYNRRTRQDEPALFVALTFERREVLDSSNIKPMSNLIGVDRGENIPAVIALTDPEGCPLSRFKDSLGNPTHILRIGESYKEKQRTIQAKKEVEQRRAGGYSRKYASKAKNLADDMVRNTARDLLYYAVTQDAMLIFENLSRGFGRQGKRTFMAERQYTRMEDWLTAKLAYEGLPSKTYLSKTLAQYTSKTCSNCGFTITSADYDRVLEKLKKTATGWMTTINGKELKVEGQITYYNRYKRQNVVKDLSVELDRLSEESVNNDISSWTKGRSGEALSLLKKRFSHRPVQEKFVCLNCGFETHADEQAALNIARSWLFLRSQEYKKYQTNKTTGNTDKRAFVETWQSFYRKKLKEVWKPAV

SEQ ID NO: 29674 - protein, 979 aa, synthetic construct
  REGION 1..979: note = engineered CasX variant
QEIKRINKIRRRLVKDSNTKKAGKTGPMKTLLVRVMTPDLRERLENLRKKPENIPQPISNTSRANLNKLLTDYTEMKKAILHVYWEEFQKDPVGLMSRVAQPASKKIDQNKLKPEMDEKGNLTTAGFACSQCGQPLFVYKLEQVSEKGKAYTNYFGRCNVAEHEKLILLAQLKPEKDSDEAVTYSLGKFGQRALDFYSIHVTKESTHPVKPLAQIAGNRYASGPVGKALSDACMGTIASFLSKYQDIIIEHQKVVKGNQKRLESLRELAGKENLEYPSVTLPPQPHTKEGVDAYNEVIARVRMWVNLNLWQKLKLSRDDAKPLLRLKGFPSFPLVERQANEVDWWDMVCNVKKLINEKKEDGKVFWQNLAGYKRQEALRPYLSSEEDRKKGKKFARYQLGDLLLHLEKKHPEDWGKVYDEAWERIDKKVEGLSKHIKLEEERRSEDAQSKAALTDWLRAKASFVIEGLKEADKDEFCRCELKLQKWYGDLRGKPFAIEAENSILDISGFSKQYNCAFIWQKDGVKKLNLYLIINYFKGGKLRFKKIKPEAFEANRFYTVINKKSGEIVPMEVNFNFDDPNLIILPLAFGKRQGREFIWNDLLSLETGSLKLANGRVIEKTLYNRRTRQDEPALFVALTFERREVLDSSNIKPMSNLIGVDRGENIPAVIALTDPEGCPLSRFKDSLGNPTHILRIGESYKEKQRTIQAKKEVEQRRAGGYSRKYASKAKNLADDMVRNTARDLLYYAVTQDAMLIFENLSRGFGRQGKRTFMAERQYTRMEDWLTAKLAYEGLPSKTYLSKTLAQYTSKTCSNCGFTITSADYDRVLEKLKKTATGWMTTINGKELKVEGQITYYNRYKRQNVVKDLSVELDRLSEESVNNDISSWTKGRSGEALSLLKKRFSHRPVQEKFVCLNCGFETHADEQAALNIARSWLFLRSQEYKKYQTNKTTGNTDKRAFVETWQSFYRKKLKEVWKPAV

SEQ ID NO: 29675 - protein, 980 aa, synthetic construct
  REGION 1..980: note = engineered CasX variant
QEIKRINKIRRRLVKDSNTKKAGKTGPMKTLLVRVMTPDLRERLENLRKKPENIPQPISNTSRANLNKLLTDYTEMKKAILHVYWEEFQKDPVGLMSRVAQPASKKIDQNKLKPEMDEKGNLTTAGFACSQCGQPLFVYKLEQVSEKGKAYTNYFGRCNVAEHEKLILLAQLKPEKDSDEAVTYSLGKFGQRALDFYSIHVTKESTHPVKPLAQIAGNRYASGPVGKALSDACMGTIASFLSKYQDIIIEHQKVVKGNQKRLESLRELAGKENLEYPSVTLPPQPHTKEGVDAYNEVIARVRMWVNLNLWQKLKLSRDDAKPLLRLKGFPSFPLVERQANEVDWWDMVCNVKKLINEKKEDGKVFWQNLAGYKRQEALRPYLSSEEDRKKGKKFARYQLGDLLLHLEKKHGERDWGKVYDEAWERIDKKVEGLSKHIKLEEERRSEDAQSKAALTDWLRAKASFVIEGLKEADKDEFCRCELKLQKWYGDLRGKPFAIEAENSILDISGFSKQYNCAFIWQKDGVKKLNLYLIINYFKGGKLRFKKIKPEAFEANRFYTVINKKSGEIVPMEVNFNFDDPNLIILPLAFGKRQGREFIWNDLLSLETGSLKLANGRVIEKTLYNRRTRQDEPALFVALTFERREVLDSSNIKPMSNLIGVDRGENIPAVIALTDPEGCPLSRFKDSLGNPTHILRIGESYKEKQRTIQAKKEVEQRRAGGYSRKYASKAKNLADDMVRNTARDLLYYAVTQDAMLIFENLSRGFGRQGKRTFMAERQYTRMEDWLTAKLAYEGLPSKTYLSKTLAQYTSKTCSNCGFTITSADYDRVLEKLKKTATGWMTTINGKELKVEGQITYYNRYKRQNVVKDLSVELDRLSEESVNNDISSWTKGRSGEALSLLKKRFSHRPVQEKFVCLNCGFETHADEQAALNIARSWLFLRSQEYKKYQTNKTTGNTDKRAFVETWQSFYRKKLKEVWKPAV

SEQ ID NO: 29676 - protein, 980 aa, synthetic construct
  REGION 1..980: note = engineered CasX variant
QEIKRINKIRRRLVKDSNTKKAGKTGPMKTLLVRVMTPDLRERLENLRKKPENIPQPISNTSRANLNKLLTDYTEMKKAILHVYWEEFQKDPVGLMSRVAQPASKKIDQNKLKPEMDEKGNLTTAGFACSQCGQPLFVYKLEQVSEKGKAYTNYFGRCNVAEHEKLILLAQLKPEKDSDEAVTYSLGKFGQRALDFYSIHVTKESTHPVKPLAQIAGNRYASGPVGKALSDACMGTIASFLSKYQDIIIEHQKVVKGNQKRLESLRELAGKENLEYPSVTLPPQPHTKEGVDAYNEVIARVRMWVNLNLWQKLKLSRDDAKPLLRLKGFPSFPLVERQANEVDWWDMVCNVKKLINEKKEDGKVFWQNLAGYKRQEALRPYLSSEEDRKKGKKFARYQLGDLLLHLEKKHGEYDWGKVYDEAWERIDKKVEGLSKHIKLEEERRSEDAQSKAALTDWLRAKASFVIEGLKEADKDEFCRCELKLQKWYGDLRGKPFAIEAENSILDISGFSKQYNCAFIWQKDGVKKLNLYLIINYFKGGKLRFKKIKPEAFEANRFYTVINKKSGEIVPMEVNFNFDDPNLIILPLAFGKRQGREFIWNDLLSLETGSLKLANGRVIEKTLYNRRTRQDEPALFVALTFERREVLDSSNIKPMSNLIGVDRGENIPAVIALTDPEGCPLSRFKDSLGNPTHILRIGESYKEKQRTIQAKKEVEQRRAGGYSRKYASKAKNLADDMVRNTARDLLYYAVTQDAMLIFENLSRGFGRQGKRTFMAERQYTRMEDWLTAKLAYEGLPSKTYLSKTLAQYTSKTCSNCGFTITSADYDRVLEKLKKTATGWMTTINGKELKVEGQITYYNRYKRQNVVKDLSVELDRLSEESVNNDISSWTKGRSGEALSLLKKRFSHRPVQEKFVCLNCGFETHADEQAALNIARSWLFLRSQEYKKYQTNKTTGNTDKRAFVETWQSFYRKKLKEVWKPAV

SEQ ID NO: 29677 - protein, 979 aa, synthetic construct
  REGION 1..979: note = engineered CasX variant
QEIKRINKIRRRLVKDSNTKKAGKTGPMKTLLVRVMTPDLRERLENLRKKPENIPQPISNTSRANLNKLLTDYTEMKKAILHVYWEEFQKDPVGLMSRVAQPASKKIDQNKLKPEMDEKGNLTTAGFACSQCGQPLFVYKLEQVSEKGKAYTNYFGRCNVAEHEKLILLAQLKPEKDSDEAVTYSLGKFGQRALDFYSIHVTKESTHPVKPLAQIAGNRYASGPVGKALSDACMGTIASFLSKYQDIIIEHQKVVKGNQKRLESLRELAGKENLEYPSVTLPPQPHTKEGVDAYNEVIARVRMWVNLNLWQKLKLSRDDAKPLLRLKGFPSFPLVERQANEVDWWDMVCNVKKLINEKKEDGKVFWQNLAGYKRQEALRPYLSSEEDRKKGKKFARYQLGDLLLHLEKKHGEDWGDVYDEAWERIDKKVEGLSKHIKLEEERRSEDAQSKAALTDWLRAKASFVIEGLKEADKDEFCRCELKLQKWYGDLRGKPFAIEAENSILDISGFSKQYNCAFIWQKDGVKKLNLYLIINYFKGGKLRFKKIKPEAFEANRFYTVINKKSGEIVPMEVNFNFDDPNLIILPLAFGKRQGREFIWNDLLSLETGSLKLANGRVIEKTLYNRRTRQDEPALFVALTFERREVLDSSNIKPMSNLIGVDRGENIPAVIALTDPEGCPLSRFKDSLGNPTHILRIGESYKEKQRTIQAKKEVEQRRAGGYSRKYASKAKNLADDMVRNTARDLLYYAVTQDAMLIFENLSRGFGRQGKRTFMAERQYTRMEDWLTAKLAYEGLPSKTYLSKTLAQYTSKTCSNCGFTITSADYDRVLEKLKKTATGWMTTINGKELKVEGQITYYNRYKRQNVVKDLSVELDRLSEESVNNDISSWTKGRSGEALSLLKKRFSHRPVQEKFVCLNCGFETHADEQAALNIARSWLFLRSQEYKKYQTNKTTGNTDKRAFVETWQSFYRKKLKEVWKPAV

SEQ ID NO: 29678 - protein, 979 aa, synthetic construct
  REGION 1..979: note = engineered CasX variant
QEIKRINKIRRRLVKDSNTKKAGKTGPMKTLLVRVMTPDLRERLENLRKKPENIPQPISNTSRANLNKLLTDYTEMKKAILHVYWEEFQKDPVGLMSRVAQPASKKIDQNKLKPEMDEKGNLTTAGFACSQCGQPLFVYKLEQVSEKGKAYTNYFGRCNVAEHEKLILLAQLKPEKDSDEAVTYSLGKFGQRALDFYSIHVTKESTHPVKPLAQIAGNRYASGPVGKALSDACMGTIASFLSKYQDIIIEHQKVVKGNQKRLESLRELAGKENLEYPSVTLPPQPHTKEGVDAYNEVIARVRMWVNLNLWQKLKLSRDDAKPLLRLKGFPSFPLVERQANEVDWWDMVCNVKKLINEKKEDGKVFWQNLAGYKRQEALRPYLSSEEDRKKGKKFARYQLGDLLLHLEKKHGEDWGKVYGEAWERIDKKVEGLSKHIKLEEERRSEDAQSKAALTDWLRAKASFVIEGLKEADKDEFCRCELKLQKWYGDLRGKPFAIEAENSILDISGFSKQYNCAFIWQKDGVKKLNLYLIINYFKGGKLRFKKIKPEAFEANRFYTVINKKSGEIVPMEVNFNFDDPNLIILPLAFGKRQGREFIWNDLLSLETGSLKLANGRVIEKTLYNRRTRQDEPALFVALTFERREVLDSSNIKPMSNLIGVDRGENIPAVIALTDPEGCPLSRFKDSLGNPTHILRIGESYKEKQRTIQAKKEVEQRRAGGYSRKYASKAKNLADDMVRNTARDLLYYAVTQDAMLIFENLSRGFGRQGKRTFMAERQYTRMEDWLTAKLAYEGLPSKTYLSKTLAQYTSKTCSNCGFTITSADYDRVLEKLKKTATGWMTTINGKELKVEGQITYYNRYKRQNVVKDLSVELDRLSEESVNNDISSWTKGRSGEALSLLKKRFSHRPVQEKFVCLNCGFETHADEQAALNIARSWLFLRSQEYKKYQTNKTTGNTDKRAFVETWQSFYRKKLKEVWKPAV

SEQ ID NO: 29679 - protein, 979 aa, synthetic construct
  REGION 1..979: note = engineered CasX variant
QEIKRINKIRRRLVKDSNTKKAGKTGPMKTLLVRVMTPDLRERLENLRKKPENIPQPISNTSRANLNKLLTDYTEMKKAILHVYWEEFQKDPVGLMSRVAQPASKKIDQNKLKPEMDEKGNLTTAGFACSQCGQPLFVYKLEQVSEKGKAYTNYFGRCNVAEHEKLILLAQLKPEKDSDEAVTYSLGKFGQRALDFYSIHVTKESTHPVKPLAQIAGNRYASGPVGKALSDACMGTIASFLSKYQDIIIEHQKVVKGNQKRLESLRELAGKENLEYPSVTLPPQPHTKEGVDAYNEVIARVRMWVNLNLWQKLKLSRDDAKPLLRLKGFPSFPLVERQANEVDWWDMVCNVKKLINEKKEDGKVFWQNLAGYKRQEALRPYLSSEEDRKKGKKFARYQLGDLLLHLEKKHGEDWGKVYDEAWERIDKKVEGLSKHIKLEEERRSEDAQSKAALTDWLRAKASFVIEGKKEADKDEFCRCELKLQKWYGDLRGKPFAIEAENSILDISGFSKQYNCAFIWQKDGVKKLNLYLIINYFKGGKLRFKKIKPEAFEANRFYTVINKKSGEIVPMEVNFNFDDPNLIILPLAFGKRQGREFIWNDLLSLETGSLKLANGRVIEKTLYNRRTRQDEPALFVALTFERREVLDSSNIKPMSNLIGVDRGENIPAVIALTDPEGCPLSRFKDSLGNPTHILRIGESYKEKQRTIQAKKEVEQRRAGGYSRKYASKAKNLADDMVRNTARDLLYYAVTQDAMLIFENLSRGFGRQGKRTFMAERQYTRMEDWLTAKLAYEGLPSKTYLSKTLAQYTSKTCSNCGFTITSADYDRVLEKLKKTATGWMTTINGKELKVEGQITYYNRYKRQNVVKDLSVELDRLSEESVNNDISSWTKGRSGEALSLLKKRFSHRPVQEKFVCLNCGFETHADEQAALNIARSWLFLRSQEYKKYQTNKTTGNTDKRAFVETWQSFYRKKLKEVWKPAV

SEQ ID NO: 29680 - protein, 979 aa, synthetic construct
  REGION 1..979: note = engineered CasX variant
QEIKRINKIRRRLVKDSNTKKAGKTGPMKTLLVRVMTPDLRERLENLRKKPENIPQPISNTSRANLNKLLTDYTEMKKAILHVYWEEFQKDPVGLMSRVAQPASKKIDQNKLKPEMDEKGNLTTAGFACSQCGQPLFVYKLEQVSEKGKAYTNYFGRCNVAEHEKLILLAQLKPEKDSDEAVTYSLGKFGQRALDFYSIHVTKESTHPVKPLAQIAGNRYASGPVGKALSDACMGTIASFLSKYQDIIIEHQKVVKGNQKRLESLRELAGKENLEYPSVTLPPQPHTKEGVDAYNEVIARVRMWVNLNLWQKLKLSRDDAKPLLRLKGFPSFPLVERQANEVDWWDMVCNVKKLINEKKEDGKVFWQNLAGYKRQEALRPYLSSEEDRKKGKKFARYQLGDLLLHLEKKHGEDWGKVYDEAWERIDKKVEGLSKHIKLEEERRSEDAQSKAALTDWLRAKASFVIEGSKEADKDEFCRCELKLQKWYGDLRGKPFAIEAENSILDISGFSKQYNCAFIWQKDGVKKLNLYLIINYFKGGKLRFKKIKPEAFEANRFYTVINKKSGEIVPMEVNFNFDDPNLIILPLAFGKRQGREFIWNDLLSLETGSLKLANGRVIEKTLYNRRTRQDEPALFVALTFERREVLDSSNIKPMSNLIGVDRGENIPAVIALTDPEGCPLSRFKDSLGNPTHILRIGESYKEKQRTIQAKKEVEQRRAGGYSRKYASKAKNLADDMVRNTARDLLYYAVTQDAMLIFENLSRGFGRQGKRTFMAERQYTRMEDWLTAKLAYEGLPSKTYLSKTLAQYTSKTCSNCGFTITSADYDRVLEKLKKTATGWMTTINGKELKVEGQITYYNRYKRQNVVKDLSVELDRLSEESVNNDISSWTKGRSGEALSLLKKRFSHRPVQEKFVCLNCGFETHADEQAALNIARSWLFLRSQEYKKYQTNKTTGNTDKRAFVETWQSFYRKKLKEVWKPAV

SEQ ID NO: 29681 - protein, 980 aa, synthetic construct
  REGION 1..980: note = engineered CasX variant
QEIKRINKIRRRLVKDSNTKKAGKTGPMKTLLVRVMTPDLRERLENLRKKPENIPQPISNTSRANLNKLLTDYTEMKKAILHVYWEEFQKDPVGLMSRVAQPASKKIDQNKLKPEMDEKGNLTTAGFACSQCGQPLFVYKLEQVSEKGKAYTNYFGRCNVAEHEKLILLAQLKPEKDSDEAVTYSLGKFGQRALDFYSIHVTKESTHPVKPLAQIAGNRYASGPVGKALSDACMGTIASFLSKYQDIIIEHQKVVKGNQKRLESLRELAGKENLEYPSVTLPPQPHTKEGVDAYNEVIARVRMWVNLNLWQKLKLSRDDAKPLLRLKGFPSFPLVERQANEVDWWDMVCNVKKLINEKKEDGKVFWQNLAGYKRQEALRPYLSSEEDRKKGKKFARYQLGDLLLHLEKKHGEDWGKVYDEAWERIDKKVEGLSKHIKLEEERRSEDAQSKAALTDWLRAKASFVIEGLKEADDKDEFCRCELKLQKWYGDLRGKPFAIEAENSILDISGFSKQYNCAFIWQKDGVKKLNLYLIINYFKGGKLRFKKIKPEAFEANRFYTVINKKSGEIVPMEVNFNFDDPNLIILPLAFGKRQGREFIWNDLLSLETGSLKLANGRVIEKTLYNRRTRQDEPALFVALTFERREVLDSSNIKPMSNLIGVDRGENIPAVIALTDPEGCPLSRFKDSLGNPTHILRIGESYKEKQRTIQAKKEVEQRRAGGYSRKYASKAKNLADDMVRNTARDLLYYAVTQDAMLIFENLSRGFGRQGKRTFMAERQYTRMEDWLTAKLAYEGLPSKTYLSKTLAQYTSKTCSNCGFTITSADYDRVLEKLKKTATGWMTTINGKELKVEGQITYYNRYKRQNVVKDLSVELDRLSEESVNNDISSWTKGRSGEALSLLKKRFSHRPVQEKFVCLNCGFETHADEQAALNIARSWLFLRSQEYKKYQTNKTTGNTDKRAFVETWQSFYRKKLKEVWKPAV

SEQ ID NO: 29682 - protein, 980 aa, synthetic construct
  REGION 1..980: note = engineered CasX variant
QEIKRINKIRRRLVKDSNTKKAGKTGPMKTLLVRVMTPDLRERLENLRKKPENIPQPISNTSRANLNKLLTDYTEMKKAILHVYWEEFQKDPVGLMSRVAQPASKKIDQNKLKPEMDEKGNLTTAGFACSQCGQPLFVYKLEQVSEKGKAYTNYFGRCNVAEHEKLILLAQLKPEKDSDEAVTYSLGKFGQRALDFYSIHVTKESTHPVKPLAQIAGNRYASGPVGKALSDACMGTIASFLSKYQDIIIEHQKVVKGNQKRLESLRELAGKENLEYPSVTLPPQPHTKEGVDAYNEVIARVRMWVNLNLWQKLKLSRDDAKPLLRLKGFPSFPLVERQANEVDWWDMVCNVKKLINEKKEDGKVFWQNLAGYKRQEALRPYLSSEEDRKKGKKFARYQLGDLLLHLEKKHGEDWGKVYDEAWERIDKKVEGLSKHIKLEEERRSEDAQSKAALTDWLRAKASFVIEGLKEADKDEFCRCELKLQKWYGDLRGKPFAIEAENSILDISGFSKQYNCAFIWQKDGVKKLNLYLIINYFKGGKLRFKKIKPEAFEANRFYTVINKKSGEIVPMEVNFNFDDPNLIILPLAFGKRQGREFIWNDLLSLETGSLKLANGRVIEKTLYNRRTRQDEPALFVALTFERREVLDSSNIKPMSNLIGVDRGENIPAVIALTDPEGCPLSRFKDSLGNPTHILRIGESYKEKQRTIQAKKEVEQRRAGGYSRKYASKAKNLADDMVRNTARDLLYYAVTQDAMLIFENLSRGFGRQGKRTFMAERQYTRMEDWLTAKLAYEGLPSKTYLSKTLAQYTSKTCSNCGFTITSADYDRVLEKLKKTATGWMTTINGKELKVEGQITYYNRYKRQNVVKDLSVELDRLSEESVNNDISSWTKGRSGNEALSLLKKRFSHRPVQEKFVCLNCGFETHADEQAALNIARSWLFLRSQEYKKYQTNKTTGNTDKRAFVETWQSFYRKKLKEVWKPAV

SEQ ID NO: 29683 - protein, 979 aa, synthetic construct
  REGION 1..979: note = engineered CasX variant
QEIKRINKIRRRLVKDSNTKKAGKTGPMKTLLVRVMTPDLRERLENLRKKPENIPQPISNTSRANLNKLLTDYTEMKKAILHVYWEEFQKDPVGLMSRVAQPASKKIDQNKLKPEMDEKGNLTTAGFACSQCGQPLFVYKLEQVSEKGKAYTNYFGRCNVAEHEKLILLAQLKPEKDSDEAVTYSLGKFGQRALDFYSIHVTKESTHPVKPLAQIAGNRYASGPVGKALSDACMGTIASFLSKYQDIIIEHQKVVKGNQKRLESLRELAGKENLEYPSVTLPPQPHTKEGVDAYNEVIARVRMWVNLNLWQKLKLSRDDAKPLLRLKGFPSFPLVERQANEVDWWDMVCNVKKLINEKKEDGKVFWQNLAGYKRQEALRPYLSSEEDRQKGKKFARYQLGDLLLHLEKKHGEDWGKVYDEAWERIDKKVEGLSKHIKLEEERRSEDAQSKAALTDWLRAKASFVIEGLKEADKDEFCRCELKLQKWYGDLRGKPFAIEAENSILDISGFSKQYNCAFIWQKDGVKKLNLYLIINYFKGGKLRFKKIKPEAFEANRFYTVINKKSGEIVPMEVNFNFDDPNLIILPLAFGKRQGREFIWNDLLSLETGSLKLANGRVIEKTLYNRRTRQDEPALFVALTFERREVLDSSNIKPMSNLIGVDRGENIPAVIALTDPEGCPLSRFKDSLGNPTHILRIGESYKEKQRTIQAKKEVEQRRAGGYSRKYASKAKNLADDMVRNTARDLLYYAVTQDAMLIFENLSRGFGRQGKRTFMAERQYTRMEDWLTAKLAYEGLPSKTYLSKTLAQYTSKTCSNCGFTITSADYDRVLEKLKKTATGWMTTINGKELKVEGQITYYNRYKRQNVVKDLSVELDRLSEESVNNDISSWTKGRSGEALSLLKKRFSHRPVQEKFVCLNCGFETHADEQAALNIARSWLFLRSQEYKKYQTNKTTGNTDKRAFVETWQSFYRKKLKEVWKPAV

SEQ ID NO: 29684 - protein, 979 aa, synthetic construct
  REGION 1..979: note = engineered CasX variant
QEIKRINKIRRRLVKDSNTKKAGKTGPMKTLLVRVMTPDLRERLENLRKKPENIPQPISNTSRANLNKLLTDYTEMKKAILHVYWEEFQKDPVGLMSRVAQPASKKIDQNKLKPEMDEKGNLTTAGFACSQCGQPLFVYKLEQVSEKGKAYTNYFGRCNVAEHEKLILLAQLKPEKDSDEAVTYSLGKFGQRALDFYSIHVTKESTHPVKPLAQIAGNRYASGPVGKALSDACMGTIASFLSKYQDIIIEHQKVVKGNQKRLESLRELAGKENLEYPSVTLPPQPHTKEGVDAYNEVIARVRMWVNLNLWQKLKLSRDDAKPLLRLKGFPSFPLVERQANEVDWWDMVCNVKKLINEKKEDGKVFWQNLAGYKRQEALRPYLSSEEDRKKGKKFARYQLGDLLLHLEKKHGEDWGKVYDEAWERIDKKVEGLSKHIKLEEERRSEDAQSKAALTDWLRAKASFVIEGLKEADKDEFCRCELKLQKWYGDLRGKPFAIEAENSILDISGFSKQYNCAFIWQKDGVKKLNLYLIINYFKGGKLRFKKIKPEAFEANRFYTVINKKSGEIVPMEVNFNFDDPNLIILPLAFGKRQGREFIWNDLLSLETGSLKLANGRVIEKTLYNRRTRQDEPALFVALTFERREVLDSSNIKPMSNLIGVDRGENIPAVIALTDPEGCPLSRFKDSLGNPTHILRIGESYKEKQRTIQAKKEVEQRRAGGYSRKYASKAKNLADDMVRNTARDLLYYAVTQDAMLIFENLSRGFGRQGKRTFMAERQYTRMEDWLTAKLAYEGLPSQTYLSKTLAQYTSKTCSNCGFTITSADYDRVLEKLKKTATGWMTTINGKELKVEGQITYYNRYKRQNVVKDLSVELDRLSEESVNNDISSWTKGRSGEALSLLKKRFSHRPVQEKFVCLNCGFETHADEQAALNIARSWLFLRSQEYKKYQTNKTTGNTDKRAFVETWQSFYRKKLKEVWKPAV

SEQ ID NO: 29685 - protein, 979 aa, synthetic construct
  REGION 1..979: note = engineered CasX variant
QEIKRINKIRRRLVKDSNTKKAGKTGPMKTLLVRVMTPDLRERLENLRKKPENIPQPISNTSRANLNKLLTDYTEMKKAILHVYWEEFQKDPVGLMSRVAQPASKKIDQNKLKPEMDEKGNLTTAGFACSQCGQPLFVYKLEQVSEKGKAYTNYFGRCNVAEHEKLILLAQLKPEKDSDEAVTYSLGKFGQRALDFYSIHVTKESTHPVKPLAQIAGNRYASGPVGKALSDACMGTIASFLSKYQDIIIEHQKVVKGNQKRLESLRELAGKENLEYPSVTLPPQPHTKEGVDAYNEVIARVRMWVNLNLWQKLKLSRDDAKPLLRLKGFPSFPLVERQANEVDWWDMVCNVKKLINEKKEDGKVFWQNLAGYKRQEALRPYLSSEEDRKKGKKFARYQLGDLLLHLEKKHGEDWGKVYDEAWERIDKKVEGLSKHIKLEEERRSEDAQSKAALTDWLRAKASFVIEGLKEADKDEFCRCELKLQKWYGDLRGKPFAIEAENSILDISGFSKQYNCAFIWQKDGVKKLNLYLIINYFKGGKLRFKKIKPEAFEANRFYTVINKKSGEIVPMEVNFNFDDPNLIILPLAFGKRQGREFIWNDLLSLETGSLKLANGRVIEKTLYNRRTRQDEPALFVALTFERREVLDSSNIKPMSNLIGVDRGENIPAVIALTDPEGCPLSRFKDSLGNPTHILRIGESYKEKQRTIQAKKEVEQRRAGGYSRKYASKAKNLADDMVRNTARDLLYYAVTQDAMLIFENLSRGFGRQGKRTFMAERQYTRMEDWLTAKLAYNGLPSKTYLSKTLAQYTSKTCSNCGFTITSADYDRVLEKLKKTATGWMTTINGKELKVEGQITYYNRYKRQNVVKDLSVELDRLSEESVNNDISSWTKGRSGEALSLLKKRFSHRPVQEKFVCLNCGFETHADEQAALNIARSWLFLRSQEYKKYQTNKTTGNTDKRAFVETWQSFYRKKLKEVWKPAV

SEQ ID NO: 29686 - protein, 979 aa, synthetic construct
  REGION 1..979: note = engineered CasX variant
QEIKRINKIRRRLVKDSNTKKAGKTGPMKTLLVRVMTPDLRERLENLRKKPENIPQPISNTSRANLNKLLTDYTEMKKAILHVYWEEFQKDPVGLMSRVAQPASKKIDQNKLKPEMDEKGNLTTAGFACSQCGQPLFVYKLEQVSEKGKAYTNYFGRCNVAEHEKLIQLAQLKPEKDSDEAVTYSLGKFGQRALDFYSIHVTKESTHPVKPLAQIAGNRYASGPVGKALSDACMGTIASFLSKYQDIIIEHQKVVKGNQKRLESLRELAGKENLEYPSVTLPPQPHTKEGVDAYNEVIARVRMWVNLNLWQKLKLSRDDAKPLLRLKGFPSFPLVERQANEVDWWDMVCNVKKLINEKKEDGKVFWQNLAGYKRQEALRPYLSSEEDRKKGKKFARYQLGDLLLHLEKKHGEDWGKVYDEAWERIDKKVEGLSKHIKLEEERRSEDAQSKAALTDWLRAKASFVIEGLKEADKDEFCRCELKLQKWYGDLRGKPFAIEAENSILDISGFSKQYNCAFIWQKDGVKKLNLYLIINYFKGGKLRFKKIKPEAFEANRFYTVINKKSGEIVPMEVNFNFDDPNLIILPLAFGKRQGREFIWNDLLSLETGSLKLANGRVIEKTLYNRRTRQDEPALFVALTFERREVLDSSNIKPMSNLIGVDRGENIPAVIALTDPEGCPLSRFKDSLGNPTHILRIGESYKEKQRTIQAKKEVEQRRAGGYSRKYASKAKNLADDMVRNTARDLLYYAVTQDAMLIFENLSRGFGRQGKRTFMAERQYTRMEDWLTAKLAYEGLPSKTYLSKTLAQYTSKTCSNCGFTITSADYDRVLEKLKKTATGWMTTINGKELKVEGQITYYNRYKRQNVVKDLSVELDRLSEESVNNDISSWTKGRSGEALSLLKKRFSHRPVQEKFVCLNCGFETHADEQAALNIARSWLFLRSQEYKKYQTNKTTGNTDKRAFVETWQSFYRKKLKEVWKPAV

SEQ ID NO: 29687 - protein, 979 aa, synthetic construct
  REGION 1..979: note = engineered CasX variant
QEIKRINKIRRRLVKDSNTKKAGKTGPMKTLLVRVMTPDLRERLENLRKKPENIPQPISNTSRANLNKLLTDYTEMKKAILHVYWEEFQKDPVGLMSRVAQPASKKIDQNKLKPEMDEKGNLTTAGFACSQCGQPLFVYKLEQVSEKGKAYTNYFGRCNVAEHEKLILLAQLKPEKDSDEAVTYSLGKFGQRALDFYSIHVTKESTHPVKPLAQIAGNRYASGPVGKALSDACMGTIASFLSKYQDIIIEHQKVVKGNQKRLESLRELAGKENLEYPSVTLPPQPHTKEGVDAYNEVIARVRMWVNLNLWQKLKLSRDDAKPLLRLKGFPSFPLVERQANEVDWWDMVCNVKKLINEKKEDGKVFWQNLAIYKRQEALRPYLSSEEDRKKGKKFARYQLGDLLLHLEKKHGEDWGKVYDEAWERIDKKVEGLSKHIKLEEERRSEDAQSKAALTDWLRAKASFVIEGLKEADKDEFCRCELKLQKWYGDLRGKPFAIEAENSILDISGFSKQYNCAFIWQKDGVKKLNLYLIINYFKGGKLRFKKIKPEAFEANRFYTVINKKSGEIVPMEVNFNFDDPNLIILPLAFGKRQGREFIWNDLLSLETGSLKLANGRVIEKTLYNRRTRQDEPALFVALTFERREVLDSSNIKPMSNLIGVDRGENIPAVIALTDPEGCPLSRFKDSLGNPTHILRIGESYKEKQRTIQAKKEVEQRRAGGYSRKYASKAKNLADDMVRNTARDLLYYAVTQDAMLIFENLSRGFGRQGKRTFMAERQYTRMEDWLTAKLAYEGLPSKTYLSKTLAQYTSKTCSNCGFTITSADYDRVLEKLKKTATGWMTTINGKELKVEGQITYYNRYKRQNVVKDLSVELDRLSEESVNNDISSWTKGRSGEALSLLKKRFSHRPVQEKFVCLNCGFETHADEQAALNIARSWLFLRSQEYKKYQTNKTTGNTDKRAFVETWQSFYRKKLKEVWKPAV

SEQ ID NO: 29688 - protein, 979 aa, synthetic construct
  REGION 1..979: note = engineered CasX variant
QEIKRINKIRRRLVKDSNTKKAGKTGPMKTLLVRVMTPDLRERLENLRKKPENIPQPISNTSRANLNKLLTDYTEMKKAILHVYWEEFQKDPVGLMSRVAQPASKKIDQNKLKPEMDEKGNLTTAGFACSQCGQPLFVYKLEQVSEKGKAYTNYFGRCNVAEHEKLILLAQLKPEKDSDEAVTYSLGKFGQRALDFYSIHVTKESTHPVKPLAQIAGNRYASGPVGKALSDACMGTIASFLSKYQDIIIEHQKVVKGNQKRLESLRELAGKENLEYPSVTLPPQPHTKEGVDAYNEVIARVRMWVNLNLWQKLKLSRDDAKPLLRLKGFPSFPLVERQANEVDWWDMVCNVKKLINEKKEDGKVFWQNLAGYKRQEALRPYLSSEEDREKGKKFARYQLGDLLLHLEKKHGEDWGKVYDEAWERIDKKVEGLSKHIKLEEERRSEDAQSKAALTDWLRAKASFVIEGLKEADKDEFCRCELKLQKWYGDLRGKPFAIEAENSILDISGFSKQYNCAFIWQKDGVKKLNLYLIINYFKGGKLRFKKIKPEAFEANRFYTVINKKSGEIVPMEVNFNFDDPNLIILPLAFGKRQGREFIWNDLLSLETGSLKLANGRVIEKTLYNRRTRQDEPALFVALTFERREVLDSSNIKPMSNLIGVDRGENIPAVIALTDPEGCPLSRFKDSLGNPTHILRIGESYKEKQRTIQAKKEVEQRRAGGYSRKYASKAKNLADDMVRNTARDLLYYAVTQDAMLIFENLSRGFGRQGKRTFMAERQYTRMEDWLTAKLAYEGLPSKTYLSKTLAQYTSKTCSNCGFTITSADYDRVLEKLKKTATGWMTTINGKELKVEGQITYYNRYKRQNVVKDLSVELDRLSEESVNNDISSWTKGRSGEALSLLKKRFSHRPVQEKFVCLNCGFETHADEQAALNIARSWLFLRSQEYKKYQTNKTTGNTDKRAFVETWQSFYRKKLKEVWKPAV

SEQ ID NO: 29689 - protein, 979 aa, synthetic construct
  REGION 1..979: note = engineered CasX variant
QEIKRINKIRRRLVKDSNTKKAGKTGPMKTLLVRVMTPDLRERLENLRKKPENIPQPISNTSRANLNKLLTDYTEMKKAILHVYWEEFQKDPVGLMSRVAQPASKKIDQNKLKPEMDEKGNLTTAGFACSQCGQPLFVYKLEQVSEKGKAYTNYFGRCNVAEHEKLILLAQLKPEKDSDEAVTYSLGKFGQRALDFYSIHVTKESTHPVKPLAQIAGNRYASGPVGKALSDACMGTIASFLSKYQDIIIEHQKVVKGNQKRLESLRELAGKENLEYPSVTLPPQPHTKEGVDAYNEVIARVRMWVNLNLWQKLKLSRDDAKPLLRLKGFPSFPLVERQANEVDWWDMVCNVKKLINEKKEDGKVFWQNLAGYKRQEALRPYLSSEEDRKKGKKFARYQLGDLLLHLEKKHGEDWGKVYDEAWERIDKKVEGLSKHIKLEEERRSEDAQSKAALTDWLRAKASFVIEGLKEADKDEFCRCELKLQKWYGDLRGKPFAIEAENSILDISGFSKQYNCAFIWQKDGVKKLNLYLIINYFKGGKLRFKKIKPEAFEANRFYTVINKKSGEIVIMEVNFNFDDPNLIILPLAFGKRQGREFIWNDLLSLETGSLKLANGRVIEKTLYNRRTRQDEPALFVALTFERREVLDSSNIKPMSNLIGVDRGENIPAVIALTDPEGCPLSRFKDSLGNPTHILRIGESYKEKQRTIQAKKEVEQRRAGGYSRKYASKAKNLADDMVRNTARDLLYYAVTQDAMLIFENLSRGFGRQGKRTFMAERQYTRMEDWLTAKLAYEGLPSKTYLSKTLAQYTSKTCSNCGFTITSADYDRVLEKLKKTATGWMTTINGKELKVEGQITYYNRYKRQNVVKDLSVELDRLSEESVNNDISSWTKGRSGEALSLLKKRFSHRPVQEKFVCLNCGFETHADEQAALNIARSWLFLRSQEYKKYQTNKTTGNTDKRAFVETWQSFYRKKLKEVWKPAV

SEQ ID NO: 29690 - protein, 978 aa, synthetic construct
  REGION 1..978: note = engineered CasX variant
QEIKRINKIRRRLVKDSNTKKAGKTGPMKTLLVRVMTPDLRERLENLRKKPENIPQPISNTSRANLNKLLTDYTEMKKAILHVYWEEFQKDPVGLMSRVAQPASKKIDQNKLKPEMDEKGNLTTAGFACSQCGQPLFVYKLEQVSEKGKAYTNYFGRCNVAEHEKLILLAQLKPEKDSDEAVTYSLGKFGQRALDFYSIHVTKESTHPVKPLAQIAGNRYASGPVGKALSGACMGTIASFLSKYQDIIIEHQKVVKGNQKRLESLRELAGKENLEYPSVTLPPQPHTKEGVDAYNEVIARVRMWVNLNLWQKLKLSRDDAKPLLRLKGFPSFPLVERQANEVDWWDMVCNVKKLINEKKEDGKVFWQNLAGYKRQEALRPYLSSEEDRKKGKKFARYQLGDLLLHLEKKHGEDWGKVYDEAWERIDKKVEGLSKHIKLEEERRSEDAQSKAALTDWLRAKASFVIEGLKEADKDEFCRCELKLQKWYGDLRGKPFAIEAENSILDISGFSKQYNCAFIWQKDGVKKLNLYLIINYFKGGKLRFKKIKPEAFEANRFYTVINKKSGEIVPMEVNFNFDDPNLIILPLAFGKRQGREFIWNDLLSLETGSLKLANGRVIEKTLYNRRTRQDEPALFVALTFERREVLDSSNIKPMNLIGVDRGENIPAVIALTDPEGCPLSRFKDSLGNPTHILRIRESYKEKQRTIQAKKEVEQRRAGGYSRKYASKAKNLADDMVRNTARDLLYYAVTQDAMLIFENLSRGFGRQGKRTFMAERQYTRMEDWLTAKLAYEGLPSKTYLSKTLAQYTSKTCSNCGFTITSADYDRVLEKLKKTATGWMTTINGKELKVEGQITYYNRYKRQNVVKDLSVELDRLSEESVNNDISSWTKGRSGEALSLLKKRFSHRPVQEKFVCLNCGFETHADEQAALNIARSWLFLRSQEYKKYQTNKTTGNTDKRAFVETWQSFYRKKLKEVWKPAV

SEQ ID NO: 29691 - protein, 978 aa, synthetic construct
  REGION 1..978: note = engineered CasX variant
QEIKRINKIRRRLVKDSNTKKAGKTGPMKTLLVRVMTPDLRERLENLRKKPENIPQPISNTSRANLNKLLTDYTEMKKAILHVYWEEFQKDPVGLMSRVAQPASKKIDQNKLKPEMDEKGNLTTAGFACSQCGQPLFVYKLEQVSEKGKAYTNYFGRCNVAEHEKLILLAQLKPEKDSDEAVTYSLGKFGQRALDFYSIHVTKESTHPVKPLAQIAGNRYASGPVGKALSDACMGTIASFLSKYQDIIIEHQKVVKGNQKRLESLRELAGKENLEYPSVTLPPQPHTKEGVDAYNEVIARVRMWVNLNLWQKLKLSRDDAKPLLRLKNFPSFPLVERQANEVDWWDMVCNVKKLINEKKEDGKVFWQNLAGYKRQEALRPYLSSEEDRKKGKKFARYQLGDLLLHLEKKHGEDWGKVYDEAWERIDKKVEGLSKHIKLEEERRSEDAQSKAALTDWLRAKASFVIEGLKEADKDEFCRCELKLQKWYGDLRGKPFAIEAENSILDISGFSKQYNCAFIWQKDGVKKLNLYLIINYFKGGKLRFKKIKPEAFEANRFYTVINKKSGEIVPMEVNFNFDDPNLIILPLAFGKRQGREFIWNDLLSLETGSLKLANGRVIEKTLYNRRTRQDEPALFVALTFERREVLDSSNIKPMNLIGVDRGENIPAVIALTDPEGCPLSRFKDSLGNPTHILRIRESYKEKQRTIQAKKEVEQRRAGGYSRKYASKAKNLADDMVRNTARDLLYYAVTQDAMLIFENLSRGFGRQGKRTFMAERQYTRMEDWLTAKLAYEGLPSKTYLSKTLAQYTSKTCSNCGFTITSADYDRVLEKLKKTATGWMTTINGKELKVEGQITYYNRYKRQNVVKDLSVELDRLSEESVNNDISSWTKGRSGEALSLLKKRFSHRPVQEKFVCLNCGFETHADEQAALNIARSWLFLRSQEYKKYQTNKTTGNTDKRAFVETWQSFYRKKLKEVWKPAV

SEQ ID NO: 29692 - protein, 978 aa, synthetic construct
  REGION 1..978: note = engineered CasX variant
QEIKRINKIRRRLVKDSNTKKAGKTGPMKTLLVRVMTPDLRERLENLRKKPENIPQPISNTSRANLNKLLTDYTEMKKAILHVYWEEFQKDPVGLMSRVAQPASKKIDQNKLKPEMDEKGNLTTAGFACSQCGQPLFVYKLEQVSEKGKAYTNYFGRCNVAEHEKLILLAQLKPEKDSDEAVTYSLGKFGQRALDFYSIHVTKESTHPVKPLAQIAGNRYASGPVGKALSDACMGTIASFLSKYQDIIIEHQKVVKGNQKRLESLRELAGKENLEYPSVTLPPQPHTKEGVDAYNEVIARVRMWVNLNLWQKLKLSRDDAKPLLRLKGFPSFPLVERQANEVDWWDMVCNVKKLINEKKEDGKVFWQNLAGYKRQEALRPYLSSEEDRKKGKKFARYQLGDLLNHLEKKHGEDWGKVYDEAWERIDKKVEGLSKHIKLEEERRSEDAQSKAALTDWLRAKASFVIEGLKEADKDEFCRCELKLQKWYGDLRGKPFAIEAENSILDISGFSKQYNCAFIWQKDGVKKLNLYLIINYFKGGKLRFKKIKPEAFEANRFYTVINKKSGEIVPMEVNFNFDDPNLIILPLAFGKRQGREFIWNDLLSLETGSLKLANGRVIEKTLYNRRTRQDEPALFVALTFERREVLDSSNIKPMNLIGVDRGENIPAVIALTDPEGCPLSRFKDSLGNPTHILRIRESYKEKQRTIQAKKEVEQRRAGGYSRKYASKAKNLADDMVRNTARDLLYYAVTQDAMLIFENLSRGFGRQGKRTFMAERQYTRMEDWLTAKLAYEGLPSKTYLSKTLAQYTSKTCSNCGFTITSADYDRVLEKLKKTATGWMTTINGKELKVEGQITYYNRYKRQNVVKDLSVELDRLSEESVNNDISSWTKGRSGEALSLLKKRFSHRPVQEKFVCLNCGFETHADEQAALNIARSWLFLRSQEYKKYQTNKTTGNTDKRAFVETWQSFYRKKLKEVWKPAV

SEQ ID NO: 29693 - protein, 978 aa, synthetic construct
  REGION 1..978: note = engineered CasX variant
QEIKRINKIRRRLVKDSNTKKAGKTGPMKTLLVRVMTPDLRERLENLRKKPENIPQPISNTSRANLNKLLTDYTEMKKAILHVYWEEFQKDPVGLMSRVAQPASKKIDQNKLKPEMDEKGNLTTAGFACSQCGQPLFVYKLEQVSEKGKAYTNYFGRCNVAEHEKLILLAQLKPEKDSDEAVTYSLGKFGQRALDFYSIHVTKESTHPVKPLAQIAGNRYASGPVGKALSDACMGTIASFLSKYQDIIIEHQKVVKGNQKRLESLRELAGKENLEYPSVTLPPQPHTKEGVDAYNEVIARVRMWVNLNLWQKLKLSRDDAKPLLRLKGFPSFPLVERQANEVDWWDMVCNVKKLINEKKEDGKVFWQNLAGYKRQEALRPYLSSEEDRKKGKKFARYQLGDLLWHLEKKHGEDWGKVYDEAWERIDKKVEGLSKHIKLEEERRSEDAQSKAALTDWLRAKASFVIEGLKEADKDEFCRCELKLQKWYGDLRGKPFAIEAENSILDISGFSKQYNCAFIWQKDGVKKLNLYLIINYFKGGKLRFKKIKPEAFEANRFYTVINKKSGEIVPMEVNFNFDDPNLIILPLAFGKRQGREFIWNDLLSLETGSLKLANGRVIEKTLYNRRTRQDEPALFVALTFERREVLDSSNIKPMNLIGVDRGENIPAVIALTDPEGCPLSRFKDSLGNPTHILRIRESYKEKQRTIQAKKEVEQRRAGGYSRKYASKAKNLADDMVRNTARDLLYYAVTQDAMLIFENLSRGFGRQGKRTFMAERQYTRMEDWLTAKLAYEGLPSKTYLSKTLAQYTSKTCSNCGFTITSADYDRVLEKLKKTATGWMTTINGKELKVEGQITYYNRYKRQNVVKDLSVELDRLSEESVNNDISSWTKGRSGEALSLLKKRFSHRPVQEKFVCLNCGFETHADEQAALNIARSWLFLRSQEYKKYQTNKTTGNTDKRAFVETWQSFYRKKLKEVWKPAV

SEQ ID NO: 29694 - protein, 978 aa, synthetic construct
  REGION 1..978: note = engineered CasX variant
QEIKRINKIRRRLVKDSNTKKAGKTGPMKTLLVRVMTPDLRERLENLRKKPENIPQPISNTSRANLNKLLTDYTEMKKAILHVYWEEFQKDPVGLMSRVAQPASKKIDQNKLKPEMDEKGNLTTAGFACSQCGQPLFVYKLEQVSEKGKAYTNYFGRCNVAEHEKLILLAQLKPEKDSDEAVTYSLGKFGQRALDFYSIHVTKESTHPVKPLAQIAGNRYASGPVGKALSDACMGTIASFLSKYQDIIIEHQKVVKGNQKRLESLRELAGKENLEYPSVTLPPQPHTKEGVDAYNEVIARVRMWVNLNLWQKLKLSRDDAKPLLRLKGFPSFPLVERQANEVDWWDMVCNVKKLINEKKEDGKVFWQNLAGYKRQEALRPYLSSEEDRKKGKKFARYQLGDLLLHLYKKHGEDWGKVYDEAWERIDKKVEGLSKHIKLEEERRSEDAQSKAALTDWLRAKASFVIEGLKEADKDEFCRCELKLQKWYGDLRGKPFAIEAENSILDISGFSKQYNCAFIWQKDGVKKLNLYLIINYFKGGKLRFKKIKPEAFEANRFYTVINKKSGEIVPMEVNFNFDDPNLIILPLAFGKRQGREFIWNDLLSLETGSLKLANGRVIEKTLYNRRTRQDEPALFVALTFERREVLDSSNIKPMNLIGVDRGENIPAVIALTDPEGCPLSRFKDSLGNPTHILRIRESYKEKQRTIQAKKEVEQRRAGGYSRKYASKAKNLADDMVRNTARDLLYYAVTQDAMLIFENLSRGFGRQGKRTFMAERQYTRMEDWLTAKLAYEGLPSKTYLSKTLAQYTSKTCSNCGFTITSADYDRVLEKLKKTATGWMTTINGKELKVEGQITYYNRYKRQNVVKDLSVELDRLSEESVNNDISSWTKGRSGEALSLLKKRFSHRPVQEKFVCLNCGFETHADEQAALNIARSWLFLRSQEYKKYQTNKTTGNTDKRAFVETWQSFYRKKLKEVWKPAV

SEQ ID NO: 29695 - protein, 978 aa, synthetic construct
  REGION 1..978: note = engineered CasX variant
QEIKRINKIRRRLVKDSNTKKAGKTGPMKTLLVRVMTPDLRERLENLRKKPENIPQPISNTSRANLNKLLTDYTEMKKAILHVYWEEFQKDPVGLMSRVAQPASKKIDQNKLKPEMDEKGNLTTAGFACSQCGQPLFVYKLEQVSEKGKAYTNYFGRCNVAEHEKLILLAQLKPEKDSDEAVTYSLGKFGQRALDFYSIHVTKESTHPVKPLAQIAGNRYASGPVGKALSDACMGTIASFLSKYQDIIIEHQKVVKGNQKRLESLRELAGKENLEYPSVTLPPQPHTKEGVDAYNEVIARVRMWVNLNLWQKLKLSRDDAKPLLRLKGFPSFPLVERQANEVDWWDMVCNVKKLINEKKEDGKVFWQNLAGYKRQEALRPYLSSEEDRKKGKKFARYQLGDLLLHLEKKHPEDWGKVYDEAWERIDKKVEGLSKHIKLEEERRSEDAQSKAALTDWLRAKASFVIEGLKEADKDEFCRCELKLQKWYGDLRGKPFAIEAENSILDISGFSKQYNCAFIWQKDGVKKLNLYLIINYFKGGKLRFKKIKPEAFEANRFYTVINKKSGEIVPMEVNFNFDDPNLIILPLAFGKRQGREFIWNDLLSLETGSLKLANGRVIEKTLYNRRTRQDEPALFVALTFERREVLDSSNIKPMNLIGVDRGENIPAVIALTDPEGCPLSRFKDSLGNPTHILRIRESYKEKQRTIQAKKEVEQRRAGGYSRKYASKAKNLADDMVRNTARDLLYYAVTQDAMLIFENLSRGFGRQGKRTFMAERQYTRMEDWLTAKLAYEGLPSKTYLSKTLAQYTSKTCSNCGFTITSADYDRVLEKLKKTATGWMTTINGKELKVEGQITYYNRYKRQNVVKDLSVELDRLSEESVNNDISSWTKGRSGEALSLLKKRFSHRPVQEKFVCLNCGFETHADEQAALNIARSWLFLRSQEYKKYQTNKTTGNTDKRAFVETWQSFYRKKLKEVWKPAV

SEQ ID NO: 29696 - protein, 979 aa, synthetic construct
  REGION 1..979: note = engineered CasX variant
QEIKRINKIRRRLVKDSNTKKAGKTGPMKTLLVRVMTPDLRERLENLRKKPENIPQPISNTSRANLNKLLTDYTEMKKAILHVYWEEFQKDPVGLMSRVAQPASKKIDQNKLKPEMDEKGNLTTAGFACSQCGQPLFVYKLEQVSEKGKAYTNYFGRCNVAEHEKLILLAQLKPEKDSDEAVTYSLGKFGQRALDFYSIHVTKESTHPVKPLAQIAGNRYASGPVGKALSDACMGTIASFLSKYQDIIIEHQKVVKGNQKRLESLRELAGKENLEYPSVTLPPQPHTKEGVDAYNEVIARVRMWVNLNLWQKLKLSRDDAKPLLRLKGFPSFPLVERQANEVDWWDMVCNVKKLINEKKEDGKVFWQNLAGYKRQEALRPYLSSEEDRKKGKKFARYQLGDLLLHLEKKHGERDWGKVYDEAWERIDKKVEGLSKHIKLEEERRSEDAQSKAALTDWLRAKASFVIEGLKEADKDEFCRCELKLQKWYGDLRGKPFAIEAENSILDISGFSKQYNCAFIWQKDGVKKLNLYLIINYFKGGKLRFKKIKPEAFEANRFYTVINKKSGEIVPMEVNFNFDDPNLIILPLAFGKRQGREFIWNDLLSLETGSLKLANGRVIEKTLYNRRTRQDEPALFVALTFERREVLDSSNIKPMNLIGVDRGENIPAVIALTDPEGCPLSRFKDSLGNPTHILRIRESYKEKQRTIQAKKEVEQRRAGGYSRKYASKAKNLADDMVRNTARDLLYYAVTQDAMLIFENLSRGFGRQGKRTFMAERQYTRMEDWLTAKLAYEGLPSKTYLSKTLAQYTSKTCSNCGFTITSADYDRVLEKLKKTATGWMTTINGKELKVEGQITYYNRYKRQNVVKDLSVELDRLSEESVNNDISSWTKGRSGEALSLLKKRFSHRPVQEKFVCLNCGFETHADEQAALNIARSWLFLRSQEYKKYQTNKTTGNTDKRAFVETWQSFYRKKLKEVWKPAV

SEQ ID NO: 29697 - protein, 979 aa, synthetic construct
  REGION 1..979: note = engineered CasX variant
QEIKRINKIRRRLVKDSNTKKAGKTGPMKTLLVRVMTPDLRERLENLRKKPENIPQPISNTSRANLNKLLTDYTEMKKAILHVYWEEFQKDPVGLMSRVAQPASKKIDQNKLKPEMDEKGNLTTAGFACSQCGQPLFVYKLEQVSEKGKAYTNYFGRCNVAEHEKLILLAQLKPEKDSDEAVTYSLGKFGQRALDFYSIHVTKESTHPVKPLAQIAGNRYASGPVGKALSDACMGTIASFLSKYQDIIIEHQKVVKGNQKRLESLRELAGKENLEYPSVTLPPQPHTKEGVDAYNEVIARVRMWVNLNLWQKLKLSRDDAKPLLRLKGFPSFPLVERQANEVDWWDMVCNVKKLINEKKEDGKVFWQNLAGYKRQEALRPYLSSEEDRKKGKKFARYQLGDLLLHLEKKHGEYDWGKVYDEAWERIDKKVEGLSKHIKLEEERRSEDAQSKAALTDWLRAKASFVIEGLKEADKDEFCRCELKLQKWYGDLRGKPFAIEAENSILDISGFSKQYNCAFIWQKDGVKKLNLYLIINYFKGGKLRFKKIKPEAFEANRFYTVINKKSGEIVPMEVNFNFDDPNLIILPLAFGKRQGREFIWNDLLSLETGSLKLANGRVIEKTLYNRRTRQDEPALFVALTFERREVLDSSNIKPMNLIGVDRGENIPAVIALTDPEGCPLSRFKDSLGNPTHILRIRESYKEKQRTIQAKKEVEQRRAGGYSRKYASKAKNLADDMVRNTARDLLYYAVTQDAMLIFENLSRGFGRQGKRTFMAERQYTRMEDWLTAKLAYEGLPSKTYLSKTLAQYTSKTCSNCGFTITSADYDRVLEKLKKTATGWMTTINGKELKVEGQITYYNRYKRQNVVKDLSVELDRLSEESVNNDISSWTKGRSGEALSLLKKRFSHRPVQEKFVCLNCGFETHADEQAALNIARSWLFLRSQEYKKYQTNKTTGNTDKRAFVETWQSFYRKKLKEVWKPAV

SEQ ID NO: 29698 - protein, 978 aa, synthetic construct
  REGION 1..978: note = engineered CasX variant
QEIKRINKIRRRLVKDSNTKKAGKTGPMKTLLVRVMTPDLRERLENLRKKPENIPQPISNTSRANLNKLLTDYTEMKKAILHVYWEEFQKDPVGLMSRVAQPASKKIDQNKLKPEMDEKGNLTTAGFACSQCGQPLFVYKLEQVSEKGKAYTNYFGRCNVAEHEKLILLAQLKPEKDSDEAVTYSLGKFGQRALDFYSIHVTKESTHPVKPLAQIAGNRYASGPVGKALSDACMGTIASFLSKYQDIIIEHQKVVKGNQKRLESLRELAGKENLEYPSVTLPPQPHTKEGVDAYNEVIARVRMWVNLNLWQKLKLSRDDAKPLLRLKGFPSFPLVERQANEVDWWDMVCNVKKLINEKKEDGKVFWQNLAGYKRQEALRPYLSSEEDRKKGKKFARYQLGDLLLHLEKKHGEDWGDVYDEAWERIDKKVEGLSKHIKLEEERRSEDAQSKAALTDWLRAKASFVIEGLKEADKDEFCRCELKLQKWYGDLRGKPFAIEAENSILDISGFSKQYNCAFIWQKDGVKKLNLYLIINYFKGGKLRFKKIKPEAFEANRFYTVINKKSGEIVPMEVNFNFDDPNLIILPLAFGKRQGREFIWNDLLSLETGSLKLANGRVIEKTLYNRRTRQDEPALFVALTFERREVLDSSNIKPMNLIGVDRGENIPAVIALTDPEGCPLSRFKDSLGNPTHILRIRESYKEKQRTIQAKKEVEQRRAGGYSRKYASKAKNLADDMVRNTARDLLYYAVTQDAMLIFENLSRGFGRQGKRTFMAERQYTRMEDWLTAKLAYEGLPSKTYLSKTLAQYTSKTCSNCGFTITSADYDRVLEKLKKTATGWMTTINGKELKVEGQITYYNRYKRQNVVKDLSVELDRLSEESVNNDISSWTKGRSGEALSLLKKRFSHRPVQEKFVCLNCGFETHADEQAALNIARSWLFLRSQEYKKYQTNKTTGNTDKRAFVETWQSFYRKKLKEVWKPAV

SEQ ID NO: 29699 - protein, 978 aa, synthetic construct
  REGION 1..978: note = engineered CasX variant
QEIKRINKIRRRLVKDSNTKKAGKTGPMKTLLVRVMTPDLRERLENLRKKPENIPQPISNTSRANLNKLLTDYTEMKKAILHVYWEEFQKDPVGLMSRVAQPASKKIDQNKLKPEMDEKGNLTTAGFACSQCGQPLFVYKLEQVSEKGKAYTNYFGRCNVAEHEKLILLAQLKPEKDSDEAVTYSLGKFGQRALDFYSIHVTKESTHPVKPLAQIAGNRYASGPVGKALSDACMGTIASFLSKYQDIIIEHQKVVKGNQKRLESLRELAGKENLEYPSVTLPPQPHTKEGVDAYNEVIARVRMWVNLNLWQKLKLSRDDAKPLLRLKGFPSFPLVERQANEVDWWDMVCNVKKLINEKKEDGKVFWQNLAGYKRQEALRPYLSSEEDRKKGKKFARYQLGDLLLHLEKKHGEDWGKVYGEAWERIDKKVEGLSKHIKLEEERRSEDAQSKAALTDWLRAKASFVIEGLKEADKDEFCRCELKLQKWYGDLRGKPFAIEAENSILDISGFSKQYNCAFIWQKDGVKKLNLYLIINYFKGGKLRFKKIKPEAFEANRFYTVINKKSGEIVPMEVNFNFDDPNLIILPLAFGKRQGREFIWNDLLSLETGSLKLANGRVIEKTLYNRRTRQDEPALFVALTFERREVLDSSNIKPMNLIGVDRGENIPAVIALTDPEGCPLSRFKDSLGNPTHILRIRESYKEKQRTIQAKKEVEQRRAGGYSRKYASKAKNLADDMVRNTARDLLYYAVTQDAMLIFENLSRGFGRQGKRTFMAERQYTRMEDWLTAKLAYEGLPSKTYLSKTLAQYTSKTCSNCGFTITSADYDRVLEKLKKTATGWMTTINGKELKVEGQITYYNRYKRQNVVKDLSVELDRLSEESVNNDISSWTKGRSGEALSLLKKRFSHRPVQEKFVCLNCGFETHADEQAALNIARSWLFLRSQEYKKYQTNKTTGNTDKRAFVETWQSFYRKKLKEVWKPAV

SEQ ID NO: 29700 - protein, 978 aa, synthetic construct
  REGION 1..978: note = engineered CasX variant
QEIKRINKIRRRLVKDSNTKKAGKTGPMKTLLVRVMTPDLRERLENLRKKPENIPQPISNTSRANLNKLLTDYTEMKKAILHVYWEEFQKDPVGLMSRVAQPASKKIDQNKLKPEMDEKGNLTTAGFACSQCGQPLFVYKLEQVSEKGKAYTNYFGRCNVAEHEKLILLAQLKPEKDSDEAVTYSLGKFGQRALDFYSIHVTKESTHPVKPLAQIAGNRYASGPVGKALSDACMGTIASFLSKYQDIIIEHQKVVKGNQKRLESLRELAGKENLEYPSVTLPPQPHTKEGVDAYNEVIARVRMWVNLNLWQKLKLSRDDAKPLLRLKGFPSFPLVERQANEVDWWDMVCNVKKLINEKKEDGKVFWQNLAGYKRQEALRPYLSSEEDRKKGKKFARYQLGDLLLHLEKKHGEDWGKVYDEAWERIDKKVEGLSKHIKLEEERRSEDAQSKAALTDWLRAKASFVIEGKKEADKDEFCRCELKLQKWYGDLRGKPFAIEAENSILDISGFSKQYNCAFIWQKDGVKKLNLYLIINYFKGGKLRFKKIKPEAFEANRFYTVINKKSGEIVPMEVNFNFDDPNLIILPLAFGKRQGREFIWNDLLSLETGSLKLANGRVIEKTLYNRRTRQDEPALFVALTFERREVLDSSNIKPMNLIGVDRGENIPAVIALTDPEGCPLSRFKDSLGNPTHILRIRESYKEKQRTIQAKKEVEQRRAGGYSRKYASKAKNLADDMVRNTARDLLYYAVTQDAMLIFENLSRGFGRQGKRTFMAERQYTRMEDWLTAKLAYEGLPSKTYLSKTLAQYTSKTCSNCGFTITSADYDRVLEKLKKTATGWMTTINGKELKVEGQITYYNRYKRQNVVKDLSVELDRLSEESVNNDISSWTKGRSGEALSLLKKRFSHRPVQEKFVCLNCGFETHADEQAALNIARSWLFLRSQEYKKYQTNKTTGNTDKRAFVETWQSFYRKKLKEVWKPAV

SEQ ID NO: 29701 - protein, 978 aa, synthetic construct
  REGION 1..978: note = engineered CasX variant
QEIKRINKIRRRLVKDSNTKKAGKTGPMKTLLVRVMTPDLRERLENLRKKPENIPQPISNTSRANLNKLLTDYTEMKKAILHVYWEEFQKDPVGLMSRVAQPASKKIDQNKLKPEMDEKGNLTTAGFACSQCGQPLFVYKLEQVSEKGKAYTNYFGRCNVAEHEKLILLAQLKPEKDSDEAVTYSLGKFGQRALDFYSIHVTKESTHPVKPLAQIAGNRYASGPVGKALSDACMGTIASFLSKYQDIIIEHQKVVKGNQKRLESLRELAGKENLEYPSVTLPPQPHTKEGVDAYNEVIARVRMWVNLNLWQKLKLSRDDAKPLLRLKGFPSFPLVERQANEVDWWDMVCNVKKLINEKKEDGKVFWQNLAGYKRQEALRPYLSSEEDRKKGKKFARYQLGDLLLHLEKKHGEDWGKVYDEAWERIDKKVEGLSKHIKLEEERRSEDAQSKAALTDWLRAKASFVIEGSKEADKDEFCRCELKLQKWYGDLRGKPFAIEAENSILDISGFSKQYNCAFIWQKDGVKKLNLYLIINYFKGGKLRFKKIKPEAFEANRFYTVINKKSGEIVPMEVNFNFDDPNLIILPLAFGKRQGREFIWNDLLSLETGSLKLANGRVIEKTLYNRRTRQDEPALFVALTFERREVLDSSNIKPMNLIGVDRGENIPAVIALTDPEGCPLSRFKDSLGNPTHILRIRESYKEKQRTIQAKKEVEQRRAGGYSRKYASKAKNLADDMVRNTARDLLYYAVTQDAMLIFENLSRGFGRQGKRTFMAERQYTRMEDWLTAKLAYEGLPSKTYLSKTLAQYTSKTCSNCGFTITSADYDRVLEKLKKTATGWMTTINGKELKVEGQITYYNRYKRQNVVKDLSVELDRLSEESVNNDISSWTKGRSGEALSLLKKRFSHRPVQEKFVCLNCGFETHADEQAALNIARSWLFLRSQEYKKYQTNKTTGNTDKRAFVETWQSFYRKKLKEVWKPAV

SEQ ID NO: 29702 - protein, 979 aa, synthetic construct
  REGION 1..979: note = engineered CasX variant
QEIKRINKIRRRLVKDSNTKKAGKTGPMKTLLVRVMTPDLRERLENLRKKPENIPQPISNTSRANLNKLLTDYTEMKKAILHVYWEEFQKDPVGLMSRVAQPASKKIDQNKLKPEMDEKGNLTTAGFACSQCGQPLFVYKLEQVSEKGKAYTNYFGRCNVAEHEKLILLAQLKPEKDSDEAVTYSLGKFGQRALDFYSIHVTKESTHPVKPLAQIAGNRYASGPVGKALSDACMGTIASFLSKYQDIIIEHQKVVKGNQKRLESLRELAGKENLEYPSVTLPPQPHTKEGVDAYNEVIARVRMWVNLNLWQKLKLSRDDAKPLLRLKGFPSFPLVERQANEVDWWDMVCNVKKLINEKKEDGKVFWQNLAGYKRQEALRPYLSSEEDRKKGKKFARYQLGDLLLHLEKKHGEDWGKVYDEAWERIDKKVEGLSKHIKLEEERRSEDAQSKAALTDWLRAKASFVIEGLKEADDKDEFCRCELKLQKWYGDLRGKPFAIEAENSILDISGFSKQYNCAFIWQKDGVKKLNLYLIINYFKGGKLRFKKIKPEAFEANRFYTVINKKSGEIVPMEVNFNFDDPNLIILPLAFGKRQGREFIWNDLLSLETGSLKLANGRVIEKTLYNRRTRQDEPALFVALTFERREVLDSSNIKPMNLIGVDRGENIPAVIALTDPEGCPLSRFKDSLGNPTHILRIRESYKEKQRTIQAKKEVEQRRAGGYSRKYASKAKNLADDMVRNTARDLLYYAVTQDAMLIFENLSRGFGRQGKRTFMAERQYTRMEDWLTAKLAYEGLPSKTYLSKTLAQYTSKTCSNCGFTITSADYDRVLEKLKKTATGWMTTINGKELKVEGQITYYNRYKRQNVVKDLSVELDRLSEESVNNDISSWTKGRSGEALSLLKKRFSHRPVQEKFVCLNCGFETHADEQAALNIARSWLFLRSQEYKKYQTNKTTGNTDKRAFVETWQSFYRKKLKEVWKPAV

SEQ ID NO: 29703 - protein, 979 aa, synthetic construct
  REGION 1..979: note = engineered CasX variant
QEIKRINKIRRRLVKDSNTKKAGKTGPMKTLLVRVMTPDLRERLENLRKKPENIPQPISNTSRANLNKLLTDYTEMKKAILHVYWEEFQKDPVGLMSRVAQPASKKIDQNKLKPEMDEKGNLTTAGFACSQCGQPLFVYKLEQVSEKGKAYTNYFGRCNVAEHEKLILLAQLKPEKDSDEAVTYSLGKFGQRALDFYSIHVTKESTHPVKPLAQIAGNRYASGPVGKALSDACMGTIASFLSKYQDIIIEHQKVVKGNQKRLESLRELAGKENLEYPSVTLPPQPHTKEGVDAYNEVIARVRMWVNLNLWQKLKLSRDDAKPLLRLKGFPSFPLVERQANEVDWWDMVCNVKKLINEKKEDGKVFWQNLAGYKRQEALRPYLSSEEDRKKGKKFARYQLGDLLLHLEKKHGEDWGKVYDEAWERIDKKVEGLSKHIKLEEERRSEDAQSKAALTDWLRAKASFVIEGLKEADKDEFCRCELKLQKWYGDLRGKPFAIEAENSILDISGFSKQYNCAFIWQKDGVKKLNLYLIINYFKGGKLRFKKIKPEAFEANRFYTVINKKSGEIVPMEVNFNFDDPNLIILPLAFGKRQGREFIWNDLLSLETGSLKLANGRVIEKTLYNRRTRQDEPALFVALTFERREVLDSSNIKPMNLIGVDRGENIPAVIALTDPEGCPLSRFKDSLGNPTHILRIRESYKEKQRTIQAKKEVEQRRAGGYSRKYASKAKNLADDMVRNTARDLLYYAVTQDAMLIFENLSRGFGRQGKRTFMAERQYTRMEDWLTAKLAYEGLPSKTYLSKTLAQYTSKTCSNCGFTITSADYDRVLEKLKKTATGWMTTINGKELKVEGQITYYNRYKRQNVVKDLSVELDRLSEESVNNDISSWTKGRSGNEALSLLKKRFSHRPVQEKFVCLNCGFETHADEQAALNIARSWLFLRSQEYKKYQTNKTTGNTDKRAFVETWQSFYRKKLKEVWKPAV

SEQ ID NO: 29704 - protein, 978 aa, synthetic construct
  REGION 1..978: note = engineered CasX variant
QEIKRINKIRRRLVKDSNTKKAGKTGPMKTLLVRVMTPDLRERLENLRKKPENIPQPISNTSRANLNKLLTDYTEMKKAILHVYWEEFQKDPVGLMSRVAQPASKKIDQNKLKPEMDEKGNLTTAGFACSQCGQPLFVYKLEQVSEKGKAYTNYFGRCNVAEHEKLILLAQLKPEKDSDEAVTYSLGKFGQRALDFYSIHVTKESTHPVKPLAQIAGNRYASGPVGKALSDACMGTIASFLSKYQDIIIEHQKVVKGNQKRLESLRELAGKENLEYPSVTLPPQPHTKEGVDAYNEVIARVRMWVNLNLWQKLKLSRDDAKPLLRLKGFPSFPLVERQANEVDWWDMVCNVKKLINEKKEDGKVFWQNLAGYKRQEALRPYLSSEEDRQKGKKFARYQLGDLLLHLEKKHGEDWGKVYDEAWERIDKKVEGLSKHIKLEEERRSEDAQSKAALTDWLRAKASFVIEGLKEADKDEFCRCELKLQKWYGDLRGKPFAIEAENSILDISGFSKQYNCAFIWQKDGVKKLNLYLIINYFKGGKLRFKKIKPEAFEANRFYTVINKKSGEIVPMEVNFNFDDPNLIILPLAFGKRQGREFIWNDLLSLETGSLKLANGRVIEKTLYNRRTRQDEPALFVALTFERREVLDSSNIKPMNLIGVDRGENIPAVIALTDPEGCPLSRFKDSLGNPTHILRIRESYKEKQRTIQAKKEVEQRRAGGYSRKYASKAKNLADDMVRNTARDLLYYAVTQDAMLIFENLSRGFGRQGKRTFMAERQYTRMEDWLTAKLAYEGLPSKTYLSKTLAQYTSKTCSNCGFTITSADYDRVLEKLKKTATGWMTTINGKELKVEGQITYYNRYKRQNVVKDLSVELDRLSEESVNNDISSWTKGRSGEALSLLKKRFSHRPVQEKFVCLNCGFETHADEQAALNIARSWLFLRSQEYKKYQTNKTTGNTDKRAFVETWQSFYRKKLKEVWKPAV

SEQ ID NO: 29705 - protein, 978 aa, synthetic construct
  REGION 1..978: note = engineered CasX variant
QEIKRINKIRRRLVKDSNTKKAGKTGPMKTLLVRVMTPDLRERLENLRKKPENIPQPISNTSRANLNKLLTDYTEMKKAILHVYWEEFQKDPVGLMSRVAQPASKKIDQNKLKPEMDEKGNLTTAGFACSQCGQPLFVYKLEQVSEKGKAYTNYFGRCNVAEHEKLILLAQLKPEKDSDEAVTYSLGKFGQRALDFYSIHVTKESTHPVKPLAQIAGNRYASGPVGKALSDACMGTIASFLSKYQDIIIEHQKVVKGNQKRLESLRELAGKENLEYPSVTLPPQPHTKEGVDAYNEVIARVRMWVNLNLWQKLKLSRDDAKPLLRLKGFPSFPLVERQANEVDWWDMVCNVKKLINEKKEDGKVFWQNLAGYKRQEALRPYLSSEEDRKKGKKFARYQLGDLLLHLEKKHGEDWGKVYDEAWERIDKKVEGLSKHIKLEEERRSEDAQSKAALTDWLRAKASFVIEGLKEADKDEFCRCELKLQKWYGDLRGKPFAIEAENSILDISGFSKQYNCAFIWQKDGVKKLNLYLIINYFKGGKLRFKKIKPEAFEANRFYTVINKKSGEIVPMEVNFNFDDPNLIILPLAFGKRQGREFIWNDLLSLETGSLKLANGRVIEKTLYNRRTRQDEPALFVALTFERREVLDSSNIKPMNLIGVDRGENIPAVIALTDPEGCPLSRFKDSLGNPTHILRIRESYKEKQRTIQAKKEVEQRRAGGYSRKYASKAKNLADDMVRNTARDLLYYAVTQDAMLIFENLSRGFGRQGKRTFMAERQYTRMEDWLTAKLAYEGLPSQTYLSKTLAQYTSKTCSNCGFTITSADYDRVLEKLKKTATGWMTTINGKELKVEGQITYYNRYKRQNVVKDLSVELDRLSEESVNNDISSWTKGRSGEALSLLKKRFSHRPVQEKFVCLNCGFETHADEQAALNIARSWLFLRSQEYKKYQTNKTTGNTDKRAFVETWQSFYRKKLKEVWKPAV

SEQ ID NO: 29706 - protein, 978 aa, synthetic construct
  REGION 1..978: note = engineered CasX variant
QEIKRINKIRRRLVKDSNTKKAGKTGPMKTLLVRVMTPDLRERLENLRKKPENIPQPISNTSRANLNKLLTDYTEMKKAILHVYWEEFQKDPVGLMSRVAQPASKKIDQNKLKPEMDEKGNLTTAGFACSQCGQPLFVYKLEQVSEKGKAYTNYFGRCNVAEHEKLILLAQLKPEKDSDEAVTYSLGKFGQRALDFYSIHVTKESTHPVKPLAQIAGNRYASGPVGKALSDACMGTIASFLSKYQDIIIEHQKVVKGNQKRLESLRELAGKENLEYPSVTLPPQPHTKEGVDAYNEVIARVRMWVNLNLWQKLKLSRDDAKPLLRLKGFPSFPLVERQANEVDWWDMVCNVKKLINEKKEDGKVFWQNLAGYKRQEALRPYLSSEEDRKKGKKFARYQLGDLLLHLEKKHGEDWGKVYDEAWERIDKKVEGLSKHIKLEEERRSEDAQSKAALTDWLRAKASFVIEGLKEADKDEFCRCELKLQKWYGDLRGKPFAIEAENSILDISGFSKQYNCAFIWQKDGVKKLNLYLIINYFKGGKLRFKKIKPEAFEANRFYTVINKKSGEIVPMEVNFNFDDPNLIILPLAFGKRQGREFIWNDLLSLETGSLKLANGRVIEKTLYNRRTRQDEPALFVALTFERREVLDSSNIKPMNLIGVDRGENIPAVIALTDPEGCPLSRFKDSLGNPTHILRIRESYKEKQRTIQAKKEVEQRRAGGYSRKYASKAKNLADDMVRNTARDLLYYAVTQDAMLIFENLSRGFGRQGKRTFMAERQYTRMEDWLTAKLAYNGLPSKTYLSKTLAQYTSKTCSNCGFTITSADYDRVLEKLKKTATGWMTTINGKELKVEGQITYYNRYKRQNVVKDLSVELDRLSEESVNNDISSWTKGRSGEALSLLKKRFSHRPVQEKFVCLNCGFETHADEQAALNIARSWLFLRSQEYKKYQTNKTTGNTDKRAFVETWQSFYRKKLKEVWKPAV

SEQ ID NO: 29707 - protein, 978 aa, synthetic construct
  REGION 1..978: note = engineered CasX variant
QEIKRINKIRRRLVKDSNTKKAGKTGPMKTLLVRVMTPDLRERLENLRKKPENIPQPISNTSRANLNKLLTDYTEMKKAILHVYWEEFQKDPVGLMSRVAQPASKKIDQNKLKPEMDEKGNLTTAGFACSQCGQPLFVYKLEQVSEKGKAYTNYFGRCNVAEHEKLIQLAQLKPEKDSDEAVTYSLGKFGQRALDFYSIHVTKESTHPVKPLAQIAGNRYASGPVGKALSDACMGTIASFLSKYQDIIIEHQKVVKGNQKRLESLRELAGKENLEYPSVTLPPQPHTKEGVDAYNEVIARVRMWVNLNLWQKLKLSRDDAKPLLRLKGFPSFPLVERQANEVDWWDMVCNVKKLINEKKEDGKVFWQNLAGYKRQEALRPYLSSEEDRKKGKKFARYQLGDLLLHLEKKHGEDWGKVYDEAWERIDKKVEGLSKHIKLEEERRSEDAQSKAALTDWLRAKASFVIEGLKEADKDEFCRCELKLQKWYGDLRGKPFAIEAENSILDISGFSKQYNCAFIWQKDGVKKLNLYLIINYFKGGKLRFKKIKPEAFEANRFYTVINKKSGEIVPMEVNFNFDDPNLIILPLAFGKRQGREFIWNDLLSLETGSLKLANGRVIEKTLYNRRTRQDEPALFVALTFERREVLDSSNIKPMNLIGVDRGENIPAVIALTDPEGCPLSRFKDSLGNPTHILRIRESYKEKQRTIQAKKEVEQRRAGGYSRKYASKAKNLADDMVRNTARDLLYYAVTQDAMLIFENLSRGFGRQGKRTFMAERQYTRMEDWLTAKLAYEGLPSKTYLSKTLAQYTSKTCSNCGFTITSADYDRVLEKLKKTATGWMTTINGKELKVEGQITYYNRYKRQNVVKDLSVELDRLSEESVNNDISSWTKGRSGEALSLLKKRFSHRPVQEKFVCLNCGFETHADEQAALNIARSWLFLRSQEYKKYQTNKTTGNTDKRAFVETWQSFYRKKLKEVWKPAV

SEQ ID NO: 29708 - protein, 978 aa, synthetic construct
  REGION 1..978: note = engineered CasX variant
QEIKRINKIRRRLVKDSNTKKAGKTGPMKTLLVRVMTPDLRERLENLRKKPENIPQPISNTSRANLNKLLTDYTEMKKAILHVYWEEFQKDPVGLMSRVAQPASKKIDQNKLKPEMDEKGNLTTAGFACSQCGQPLFVYKLEQVSEKGKAYTNYFGRCNVAEHEKLILLAQLKPEKDSDEAVTYSLGKFGQRALDFYSIHVTKESTHPVKPLAQIAGNRYASGPVGKALSDACMGTIASFLSKYQDIIIEHQKVVKGNQKRLESLRELAGKENLEYPSVTLPPQPHTKEGVDAYNEVIARVRMWVNLNLWQKLKLSRDDAKPLLRLKGFPSFPLVERQANEVDWWDMVCNVKKLINEKKEDGKVFWQNLAIYKRQEALRPYLSSEEDRKKGKKFARYQLGDLLLHLEKKHGEDWGKVYDEAWERIDKKVEGLSKHIKLEEERRSEDAQSKAALTDWLRAKASFVIEGLKEADKDEFCRCELKLQKWYGDLRGKPFAIEAENSILDISGFSKQYNCAFIWQKDGVKKLNLYLIINYFKGGKLRFKKIKPEAFEANRFYTVINKKSGEIVPMEVNFNFDDPNLIILPLAFGKRQGREFIWNDLLSLETGSLKLANGRVIEKTLYNRRTRQDEPALFVALTFERREVLDSSNIKPMNLIGVDRGENIPAVIALTDPEGCPLSRFKDSLGNPTHILRIRESYKEKQRTIQAKKEVEQRRAGGYSRKYASKAKNLADDMVRNTARDLLYYAVTQDAMLIFENLSRGFGRQGKRTFMAERQYTRMEDWLTAKLAYEGLPSKTYLSKTLAQYTSKTCSNCGFTITSADYDRVLEKLKKTATGWMTTINGKELKVEGQITYYNRYKRQNVVKDLSVELDRLSEESVNNDISSWTKGRSGEALSLLKKRFSHRPVQEKFVCLNCGFETHADEQAALNIARSWLFLRSQEYKKYQTNKTTGNTDKRAFVETWQSFYRKKLKEVWKPAV

SEQ ID NO: 29709 - protein, 978 aa, synthetic construct
  REGION 1..978: note = engineered CasX variant
QEIKRINKIRRRLVKDSNTKKAGKTGPMKTLLVRVMTPDLRERLENLRKKPENIPQPISNTSRANLNKLLTDYTEMKKAILHVYWEEFQKDPVGLMSRVAQPASKKIDQNKLKPEMDEKGNLTTAGFACSQCGQPLFVYKLEQVSEKGKAYTNYFGRCNVAEHEKLILLAQLKPEKDSDEAVTYSLGKFGQRALDFYSIHVTKESTHPVKPLAQIAGNRYASGPVGKALSDACMGTIASFLSKYQDIIIEHQKVVKGNQKRLESLRELAGKENLEYPSVTLPPQPHTKEGVDAYNEVIARVRMWVNLNLWQKLKLSRDDAKPLLRLKGFPSFPLVERQANEVDWWDMVCNVKKLINEKKEDGKVFWQNLAGYKRQEALRPYLSSEEDREKGKKFARYQLGDLLLHLEKKHGEDWGKVYDEAWERIDKKVEGLSKHIKLEEERRSEDAQSKAALTDWLRAKASFVIEGLKEADKDEFCRCELKLQKWYGDLRGKPFAIEAENSILDISGFSKQYNCAFIWQKDGVKKLNLYLIINYFKGGKLRFKKIKPEAFEANRFYTVINKKSGEIVPMEVNFNFDDPNLIILPLAFGKRQGREFIWNDLLSLETGSLKLANGRVIEKTLYNRRTRQDEPALFVALTFERREVLDSSNIKPMNLIGVDRGENIPAVIALTDPEGCPLSRFKDSLGNPTHILRIRESYKEKQRTIQAKKEVEQRRAGGYSRKYASKAKNLADDMVRNTARDLLYYAVTQDAMLIFENLSRGFGRQGKRTFMAERQYTRMEDWLTAKLAYEGLPSKTYLSKTLAQYTSKTCSNCGFTITSADYDRVLEKLKKTATGWMTTINGKELKVEGQITYYNRYKRQNVVKDLSVELDRLSEESVNNDISSWTKGRSGEALSLLKKRFSHRPVQEKFVCLNCGFETHADEQAALNIARSWLFLRSQEYKKYQTNKTTGNTDKRAFVETWQSFYRKKLKEVWKPAV

SEQ ID NO: 29710 - protein, 978 aa, synthetic construct
  REGION 1..978: note = engineered CasX variant
QEIKRINKIRRRLVKDSNTKKAGKTGPMKTLLVRVMTPDLRERLENLRKKPENIPQPISNTSRANLNKLLTDYTEMKKAILHVYWEEFQKDPVGLMSRVAQPASKKIDQNKLKPEMDEKGNLTTAGFACSQCGQPLFVYKLEQVSEKGKAYTNYFGRCNVAEHEKLILLAQLKPEKDSDEAVTYSLGKFGQRALDFYSIHVTKESTHPVKPLAQIAGNRYASGPVGKALSDACMGTIASFLSKYQDIIIEHQKVVKGNQKRLESLRELAGKENLEYPSVTLPPQPHTKEGVDAYNEVIARVRMWVNLNLWQKLKLSRDDAKPLLRLKGFPSFPLVERQANEVDWWDMVCNVKKLINEKKEDGKVFWQNLAGYKRQEALRPYLSSEEDRKKGKKFARYQLGDLLLHLEKKHGEDWGKVYDEAWERIDKKVEGLSKHIKLEEERRSEDAQSKAALTDWLRAKASFVIEGLKEADKDEFCRCELKLQKWYGDLRGKPFAIEAENSILDISGFSKQYNCAFIWQKDGVKKLNLYLIINYFKGGKLRFKKIKPEAFEANRFYTVINKKSGEIVIMEVNFNFDDPNLIILPLAFGKRQGREFIWNDLLSLETGSLKLANGRVIEKTLYNRRTRQDEPALFVALTFERREVLDSSNIKPMNLIGVDRGENIPAVIALTDPEGCPLSRFKDSLGNPTHILRIRESYKEKQRTIQAKKEVEQRRAGGYSRKYASKAKNLADDMVRNTARDLLYYAVTQDAMLIFENLSRGFGRQGKRTFMAERQYTRMEDWLTAKLAYEGLPSKTYLSKTLAQYTSKTCSNCGFTITSADYDRVLEKLKKTATGWMTTINGKELKVEGQITYYNRYKRQNVVKDLSVELDRLSEESVNNDISSWTKGRSGEALSLLKKRFSHRPVQEKFVCLNCGFETHADEQAALNIARSWLFLRSQEYKKYQTNKTTGNTDKRAFVETWQSFYRKKLKEVWKPAV

SEQ ID NO: 29711 - protein, 978 aa, synthetic construct
  REGION 1..978: note = engineered CasX variant
QEIKRINKIRRRLVKDSNTKKAGKTGPMKTLLVRVMTPDLRERLENLRKKPENIPQPISNTSRANLNKLLTDYTEMKKAILHVYWEEFQKDPVGLMSRVAQPASKKIDQNKLKPEMDEKGNLTTAGFACSQCGQPLFVYKLEQVSEKGKAYTNYFGRCNVAEHEKLILLAQLKPEKDSDEAVTYSLGKFGQRALDFYSIHVTKESTHPVKPLAQIAGNRYASGPVGKALSGACMGTIASFLSKYQDIIIEHQKVVKGNQKRLESLRELAGKENLEYPSVTLPPQPHTKEGVDAYNEVIARVRMWVNLNLWQKLKLSRDDAKPLLRLKGFPSFPLVERQANEVDWWDMVCNVKKLINEKKEDGKVFWQNLAGYKRQEALRPYLSSEEDRKKGKKFARYQLGDLLLHLEKKHGEDWGKVYDEAWERIDKKVEGLSKHIKLEEERRSEDAQSKAALTDWLRAKASFVIEGLKEADKDEFCRCELKLQKWYGDLRGKPFAIEAENSILDISGFSKQYNCAFIWQKDGVKKLNLYLIINYFKGGKLRFKKIKPEAFEANRFYTVINKKSGEIVPMEVNFNFDDPNLIILPLAFGKRQGREFIWNDLLSLETGSLKLANGRVIEKTLYNRRTRQDEPALFVALTFERREVLDSSNIKPMNLIGVDRGENIPAVIALTDPEGCPLSRFKDSLGNPTHILRIGESYKEKQRTIQAKKEVEQRRAGGYSRKYASKAKNLADDMVRNTARDLLYYAVTQDAMLIFENLSRGFGRQGKRTFSAERQYTRMEDWLTAKLAYEGLPSKTYLSKTLAQYTSKTCSNCGFTITSADYDRVLEKLKKTATGWMTTINGKELKVEGQITYYNRYKRQNVVKDLSVELDRLSEESVNNDISSWTKGRSGEALSLLKKRFSHRPVQEKFVCLNCGFETHADEQAALNIARSWLFLRSQEYKKYQTNKTTGNTDKRAFVETWQSFYRKKLKEVWKPAV

SEQ ID NO: 29712 - protein, 978 aa, synthetic construct
  REGION 1..978: note = engineered CasX variant
QEIKRINKIRRRLVKDSNTKKAGKTGPMKTLLVRVMTPDLRERLENLRKKPENIPQPISNTSRANLNKLLTDYTEMKKAILHVYWEEFQKDPVGLMSRVAQPASKKIDQNKLKPEMDEKGNLTTAGFACSQCGQPLFVYKLEQVSEKGKAYTNYFGRCNVAEHEKLILLAQLKPEKDSDEAVTYSLGKFGQRALDFYSIHVTKESTHPVKPLAQIAGNRYASGPVGKALSDACMGTIASFLSKYQDIIIEHQKVVKGNQKRLESLRELAGKENLEYPSVTLPPQPHTKEGVDAYNEVIARVRMWVNLNLWQKLKLSRDDAKPLLRLKNFPSFPLVERQANEVDWWDMVCNVKKLINEKKEDGKVFWQNLAGYKRQEALRPYLSSEEDRKKGKKFARYQLGDLLLHLEKKHGEDWGKVYDEAWERIDKKVEGLSKHIKLEEERRSEDAQSKAALTDWLRAKASFVIEGLKEADKDEFCRCELKLQKWYGDLRGKPFAIEAENSILDISGFSKQYNCAFIWQKDGVKKLNLYLIINYFKGGKLRFKKIKPEAFEANRFYTVINKKSGEIVPMEVNFNFDDPNLIILPLAFGKRQGREFIWNDLLSLETGSLKLANGRVIEKTLYNRRTRQDEPALFVALTFERREVLDSSNIKPMNLIGVDRGENIPAVIALTDPEGCPLSRFKDSLGNPTHILRIGESYKEKQRTIQAKKEVEQRRAGGYSRKYASKAKNLADDMVRNTARDLLYYAVTQDAMLIFENLSRGFGRQGKRTFSAERQYTRMEDWLTAKLAYEGLPSKTYLSKTLAQYTSKTCSNCGFTITSADYDRVLEKLKKTATGWMTTINGKELKVEGQITYYNRYKRQNVVKDLSVELDRLSEESVNNDISSWTKGRSGEALSLLKKRFSHRPVQEKFVCLNCGFETHADEQAALNIARSWLFLRSQEYKKYQTNKTTGNTDKRAFVETWQSFYRKKLKEVWKPAV

SEQ ID NO: 29713 - protein, 978 aa, synthetic construct
  REGION 1..978: note = engineered CasX variant
QEIKRINKIRRRLVKDSNTKKAGKTGPMKTLLVRVMTPDLRERLENLRKKPENIPQPISNTSRANLNKLLTDYTEMKKAILHVYWEEFQKDPVGLMSRVAQPASKKIDQNKLKPEMDEKGNLTTAGFACSQCGQPLFVYKLEQVSEKGKAYTNYFGRCNVAEHEKLILLAQLKPEKDSDEAVTYSLGKFGQRALDFYSIHVTKESTHPVKPLAQIAGNRYASGPVGKALSDACMGTIASFLSKYQDIIIEHQKVVKGNQKRLESLRELAGKENLEYPSVTLPPQPHTKEGVDAYNEVIARVRMWVNLNLWQKLKLSRDDAKPLLRLKGFPSFPLVERQANEVDWWDMVCNVKKLINEKKEDGKVFWQNLAGYKRQEALRPYLSSEEDRKKGKKFARYQLGDLLNHLEKKHGEDWGKVYDEAWERIDKKVEGLSKHIKLEEERRSEDAQSKAALTDWLRAKASFVIEGLKEADKDEFCRCELKLQKWYGDLRGKPFAIEAENSILDISGFSKQYNCAFIWQKDGVKKLNLYLIINYFKGGKLRFKKIKPEAFEANRFYTVINKKSGEIVPMEVNFNFDDPNLIILPLAFGKRQGREFIWNDLLSLETGSLKLANGRVIEKTLYNRRTRQDEPALFVALTFERREVLDSSNIKPMNLIGVDRGENIPAVIALTDPEGCPLSRFKDSLGNPTHILRIGESYKEKQRTIQAKKEVEQRRAGGYSRKYASKAKNLADDMVRNTARDLLYYAVTQDAMLIFENLSRGFGRQGKRTFSAERQYTRMEDWLTAKLAYEGLPSKTYLSKTLAQYTSKTCSNCGFTITSADYDRVLEKLKKTATGWMTTINGKELKVEGQITYYNRYKRQNVVKDLSVELDRLSEESVNNDISSWTKGRSGEALSLLKKRFSHRPVQEKFVCLNCGFETHADEQAALNIARSWLFLRSQEYKKYQTNKTTGNTDKRAFVETWQSFYRKKLKEVWKPAV

SEQ ID NO: 29714 - protein, 978 aa, synthetic construct
  REGION 1..978: note = engineered CasX variant
QEIKRINKIRRRLVKDSNTKKAGKTGPMKTLLVRVMTPDLRERLENLRKKPENIPQPISNTSRANLNKLLTDYTEMKKAILHVYWEEFQKDPVGLMSRVAQPASKKIDQNKLKPEMDEKGNLTTAGFACSQCGQPLFVYKLEQVSEKGKAYTNYFGRCNVAEHEKLILLAQLKPEKDSDEAVTYSLGKFGQRALDFYSIHVTKESTHPVKPLAQIAGNRYASGPVGKALSDACMGTIASFLSKYQDIIIEHQKVVKGNQKRLESLRELAGKENLEYPSVTLPPQPHTKEGVDAYNEVIARVRMWVNLNLWQKLKLSRDDAKPLLRLKGFPSFPLVERQANEVDWWDMVCNVKKLINEKKEDGKVFWQNLAGYKRQEALRPYLSSEEDRKKGKKFARYQLGDLLWHLEKKHGEDWGKVYDEAWERIDKKVEGLSKHIKLEEERRSEDAQSKAALTDWLRAKASFVIEGLKEADKDEFCRCELKLQKWYGDLRGKPFAIEAENSILDISGFSKQYNCAFIWQKDGVKKLNLYLIINYFKGGKLRFKKIKPEAFEANRFYTVINKKSGEIVPMEVNFNFDDPNLIILPLAFGKRQGREFIWNDLLSLETGSLKLANGRVIEKTLYNRRTRQDEPALFVALTFERREVLDSSNIKPMNLIGVDRGENIPAVIALTDPEGCPLSRFKDSLGNPTHILRIGESYKEKQRTIQAKKEVEQRRAGGYSRKYASKAKNLADDMVRNTARDLLYYAVTQDAMLIFENLSRGFGRQGKRTFSAERQYTRMEDWLTAKLAYEGLPSKTYLSKTLAQYTSKTCSNCGFTITSADYDRVLEKLKKTATGWMTTINGKELKVEGQITYYNRYKRQNVVKDLSVELDRLSEESVNNDISSWTKGRSGEALSLLKKRFSHRPVQEKFVCLNCGFETHADEQAALNIARSWLFLRSQEYKKYQTNKTTGNTDKRAFVETWQSFYRKKLKEVWKPAV

SEQ ID NO: 29715 - protein, 978 aa, synthetic construct
  REGION 1..978: note = engineered CasX variant
QEIKRINKIRRRLVKDSNTKKAGKTGPMKTLLVRVMTPDLRERLENLRKKPENIPQPISNTSRANLNKLLTDYTEMKKAILHVYWEEFQKDPVGLMSRVAQPASKKIDQNKLKPEMDEKGNLTTAGFACSQCGQPLFVYKLEQVSEKGKAYTNYFGRCNVAEHEKLILLAQLKPEKDSDEAVTYSLGKFGQRALDFYSIHVTKESTHPVKPLAQIAGNRYASGPVGKALSDACMGTIASFLSKYQDIIIEHQKVVKGNQKRLESLRELAGKENLEYPSVTLPPQPHTKEGVDAYNEVIARVRMWVNLNLWQKLKLSRDDAKPLLRLKGFPSFPLVERQANEVDWWDMVCNVKKLINEKKEDGKVFWQNLAGYKRQEALRPYLSSEEDRKKGKKFARYQLGDLLLHLYKKHGEDWGKVYDEAWERIDKKVEGLSKHIKLEEERRSEDAQSKAALTDWLRAKASFVIEGLKEADKDEFCRCELKLQKWYGDLRGKPFAIEAENSILDISGFSKQYNCAFIWQKDGVKKLNLYLIINYFKGGKLRFKKIKPEAFEANRFYTVINKKSGEIVPMEVNFNFDDPNLIILPLAFGKRQGREFIWNDLLSLETGSLKLANGRVIEKTLYNRRTRQDEPALFVALTFERREVLDSSNIKPMNLIGVDRGENIPAVIALTDPEGCPLSRFKDSLGNPTHILRIGESYKEKQRTIQAKKEVEQRRAGGYSRKYASKAKNLADDMVRNTARDLLYYAVTQDAMLIFENLSRGFGRQGKRTFSAERQYTRMEDWLTAKLAYEGLPSKTYLSKTLAQYTSKTCSNCGFTITSADYDRVLEKLKKTATGWMTTINGKELKVEGQITYYNRYKRQNVVKDLSVELDRLSEESVNNDISSWTKGRSGEALSLLKKRFSHRPVQEKFVCLNCGFETHADEQAALNIARSWLFLRSQEYKKYQTNKTTGNTDKRAFVETWQSFYRKKLKEVWKPAV

SEQ ID NO: 29716 - protein, 978 aa, synthetic construct
  REGION 1..978: note = engineered CasX variant
QEIKRINKIRRRLVKDSNTKKAGKTGPMKTLLVRVMTPDLRERLENLRKKPENIPQPISNTSRANLNKLLTDYTEMKKAILHVYWEEFQKDPVGLMSRVAQPASKKIDQNKLKPEMDEKGNLTTAGFACSQCGQPLFVYKLEQVSEKGKAYTNYFGRCNVAEHEKLILLAQLKPEKDSDEAVTYSLGKFGQRALDFYSIHVTKESTHPVKPLAQIAGNRYASGPVGKALSDACMGTIASFLSKYQDIIIEHQKVVKGNQKRLESLRELAGKENLEYPSVTLPPQPHTKEGVDAYNEVIARVRMWVNLNLWQKLKLSRDDAKPLLRLKGFPSFPLVERQANEVDWWDMVCNVKKLINEKKEDGKVFWQNLAGYKRQEALRPYLSSEEDRKKGKKFARYQLGDLLLHLEKKHPEDWGKVYDEAWERIDKKVEGLSKHIKLEEERRSEDAQSKAALTDWLRAKASFVIEGLKEADKDEFCRCELKLQKWYGDLRGKPFAIEAENSILDISGFSKQYNCAFIWQKDGVKKLNLYLIINYFKGGKLRFKKIKPEAFEANRFYTVINKKSGEIVPMEVNFNFDDPNLIILPLAFGKRQGREFIWNDLLSLETGSLKLANGRVIEKTLYNRRTRQDEPALFVALTFERREVLDSSNIKPMNLIGVDRGENIPAVIALTDPEGCPLSRFKDSLGNPTHILRIGESYKEKQRTIQAKKEVEQRRAGGYSRKYASKAKNLADDMVRNTARDLLYYAVTQDAMLIFENLSRGFGRQGKRTFSAERQYTRMEDWLTAKLAYEGLPSKTYLSKTLAQYTSKTCSNCGFTITSADYDRVLEKLKKTATGWMTTINGKELKVEGQITYYNRYKRQNVVKDLSVELDRLSEESVNNDISSWTKGRSGEALSLLKKRFSHRPVQEKFVCLNCGFETHADEQAALNIARSWLFLRSQEYKKYQTNKTTGNTDKRAFVETWQSFYRKKLKEVWKPAV

SEQ ID NO: 29717 - protein, 979 aa, synthetic construct
  REGION 1..979: note = engineered CasX variant
QEIKRINKIRRRLVKDSNTKKAGKTGPMKTLLVRVMTPDLRERLENLRKKPENIPQPISNTSRANLNKLLTDYTEMKKAILHVYWEEFQKDPVGLMSRVAQPASKKIDQNKLKPEMDEKGNLTTAGFACSQCGQPLFVYKLEQVSEKGKAYTNYFGRCNVAEHEKLILLAQLKPEKDSDEAVTYSLGKFGQRALDFYSIHVTKESTHPVKPLAQIAGNRYASGPVGKALSDACMGTIASFLSKYQDIIIEHQKVVKGNQKRLESLRELAGKENLEYPSVTLPPQPHTKEGVDAYNEVIARVRMWVNLNLWQKLKLSRDDAKPLLRLKGFPSFPLVERQANEVDWWDMVCNVKKLINEKKEDGKVFWQNLAGYKRQEALRPYLSSEEDRKKGKKFARYQLGDLLLHLEKKHGERDWGKVYDEAWERIDKKVEGLSKHIKLEEERRSEDAQSKAALTDWLRAKASFVIEGLKEADKDEFCRCELKLQKWYGDLRGKPFAIEAENSILDISGFSKQYNCAFIWQKDGVKKLNLYLIINYFKGGKLRFKKIKPEAFEANRFYTVINKKSGEIVPMEVNFNFDDPNLIILPLAFGKRQGREFIWNDLLSLETGSLKLANGRVIEKTLYNRRTRQDEPALFVALTFERREVLDSSNIKPMNLIGVDRGENIPAVIALTDPEGCPLSRFKDSLGNPTHILRIGESYKEKQRTIQAKKEVEQRRAGGYSRKYASKAKNLADDMVRNTARDLLYYAVTQDAMLIFENLSRGFGRQGKRTFSAERQYTRMEDWLTAKLAYEGLPSKTYLSKTLAQYTSKTCSNCGFTITSADYDRVLEKLKKTATGWMTTINGKELKVEGQITYYNRYKRQNVVKDLSVELDRLSEESVNNDISSWTKGRSGEALSLLKKRFSHRPVQEKFVCLNCGFETHADEQAALNIARSWLFLRSQEYKKYQTNKTTGNTDKRAFVETWQSFYRKKLKEVWKPAV

SEQ ID NO: 29718 - protein, 979 aa, synthetic construct
  REGION 1..979: note = engineered CasX variant
QEIKRINKIRRRLVKDSNTKKAGKTGPMKTLLVRVMTPDLRERLENLRKKPENIPQPISNTSRANLNKLLTDYTEMKKAILHVYWEEFQKDPVGLMSRVAQPASKKIDQNKLKPEMDEKGNLTTAGFACSQCGQPLFVYKLEQVSEKGKAYTNYFGRCNVAEHEKLILLAQLKPEKDSDEAVTYSLGKFGQRALDFYSIHVTKESTHPVKPLAQIAGNRYASGPVGKALSDACMGTIASFLSKYQDIIIEHQKVVKGNQKRLESLRELAGKENLEYPSVTLPPQPHTKEGVDAYNEVIARVRMWVNLNLWQKLKLSRDDAKPLLRLKGFPSFPLVERQANEVDWWDMVCNVKKLINEKKEDGKVFWQNLAGYKRQEALRPYLSSEEDRKKGKKFARYQLGDLLLHLEKKHGEYDWGKVYDEAWERIDKKVEGLSKHIKLEEERRSEDAQSKAALTDWLRAKASFVIEGLKEADKDEFCRCELKLQKWYGDLRGKPFAIEAENSILDISGFSKQYNCAFIWQKDGVKKLNLYLIINYFKGGKLRFKKIKPEAFEANRFYTVINKKSGEIVPMEVNFNFDDPNLIILPLAFGKRQGREFIWNDLLSLETGSLKLANGRVIEKTLYNRRTRQDEPALFVALTFERREVLDSSNIKPMNLIGVDRGENIPAVIALTDPEGCPLSRFKDSLGNPTHILRIGESYKEKQRTIQAKKEVEQRRAGGYSRKYASKAKNLADDMVRNTARDLLYYAVTQDAMLIFENLSRGFGRQGKRTFSAERQYTRMEDWLTAKLAYEGLPSKTYLSKTLAQYTSKTCSNCGFTITSADYDRVLEKLKKTATGWMTTINGKELKVEGQITYYNRYKRQNVVKDLSVELDRLSEESVNNDISSWTKGRSGEALSLLKKRFSHRPVQEKFVCLNCGFETHADEQAALNIARSWLFLRSQEYKKYQTNKTTGNTDKRAFVETWQSFYRKKLKEVWKPAV

SEQ ID NO: 29719 - protein, 978 aa, synthetic construct
  REGION 1..978: note = engineered CasX variant
QEIKRINKIRRRLVKDSNTKKAGKTGPMKTLLVRVMTPDLRERLENLRKKPENIPQPISNTSRANLNKLLTDYTEMKKAILHVYWEEFQKDPVGLMSRVAQPASKKIDQNKLKPEMDEKGNLTTAGFACSQCGQPLFVYKLEQVSEKGKAYTNYFGRCNVAEHEKLILLAQLKPEKDSDEAVTYSLGKFGQRALDFYSIHVTKESTHPVKPLAQIAGNRYASGPVGKALSDACMGTIASFLSKYQDIIIEHQKVVKGNQKRLESLRELAGKENLEYPSVTLPPQPHTKEGVDAYNEVIARVRMWVNLNLWQKLKLSRDDAKPLLRLKGFPSFPLVERQANEVDWWDMVCNVKKLINEKKEDGKVFWQNLAGYKRQEALRPYLSSEEDRKKGKKFARYQLGDLLLHLEKKHGEDWGDVYDEAWERIDKKVEGLSKHIKLEEERRSEDAQSKAALTDWLRAKASFVIEGLKEADKDEFCRCELKLQKWYGDLRGKPFAIEAENSILDISGFSKQYNCAFIWQKDGVKKLNLYLIINYFKGGKLRFKKIKPEAFEANRFYTVINKKSGEIVPMEVNFNFDDPNLIILPLAFGKRQGREFIWNDLLSLETGSLKLANGRVIEKTLYNRRTRQDEPALFVALTFERREVLDSSNIKPMNLIGVDRGENIPAVIALTDPEGCPLSRFKDSLGNPTHILRIGESYKEKQRTIQAKKEVEQRRAGGYSRKYASKAKNLADDMVRNTARDLLYYAVTQDAMLIFENLSRGFGRQGKRTFSAERQYTRMEDWLTAKLAYEGLPSKTYLSKTLAQYTSKTCSNCGFTITSADYDRVLEKLKKTATGWMTTINGKELKVEGQITYYNRYKRQNVVKDLSVELDRLSEESVNNDISSWTKGRSGEALSLLKKRFSHRPVQEKFVCLNCGFETHADEQAALNIARSWLFLRSQEYKKYQTNKTTGNTDKRAFVETWQSFYRKKLKEVWKPAV

SEQ ID NO: 29720 - protein, 978 aa, synthetic construct
  REGION 1..978: note = engineered CasX variant
QEIKRINKIRRRLVKDSNTKKAGKTGPMKTLLVRVMTPDLRERLENLRKKPENIPQPISNTSRANLNKLLTDYTEMKKAILHVYWEEFQKDPVGLMSRVAQPASKKIDQNKLKPEMDEKGNLTTAGFACSQCGQPLFVYKLEQVSEKGKAYTNYFGRCNVAEHEKLILLAQLKPEKDSDEAVTYSLGKFGQRALDFYSIHVTKESTHPVKPLAQIAGNRYASGPVGKALSDACMGTIASFLSKYQDIIIEHQKVVKGNQKRLESLRELAGKENLEYPSVTLPPQPHTKEGVDAYNEVIARVRMWVNLNLWQKLKLSRDDAKPLLRLKGFPSFPLVERQANEVDWWDMVCNVKKLINEKKEDGKVFWQNLAGYKRQEALRPYLSSEEDRKKGKKFARYQLGDLLLHLEKKHGEDWGKVYGEAWERIDKKVEGLSKHIKLEEERRSEDAQSKAALTDWLRAKASFVIEGLKEADKDEFCRCELKLQKWYGDLRGKPFAIEAENSILDISGFSKQYNCAFIWQKDGVKKLNLYLIINYFKGGKLRFKKIKPEAFEANRFYTVINKKSGEIVPMEVNFNFDDPNLIILPLAFGKRQGREFIWNDLLSLETGSLKLANGRVIEKTLYNRRTRQDEPALFVALTFERREVLDSSNIKPMNLIGVDRGENIPAVIALTDPEGCPLSRFKDSLGNPTHILRIGESYKEKQRTIQAKKEVEQRRAGGYSRKYASKAKNLADDMVRNTARDLLYYAVTQDAMLIFENLSRGFGRQGKRTFSAERQYTRMEDWLTAKLAYEGLPSKTYLSKTLAQYTSKTCSNCGFTITSADYDRVLEKLKKTATGWMTTINGKELKVEGQITYYNRYKRQNVVKDLSVELDRLSEESVNNDISSWTKGRSGEALSLLKKRFSHRPVQEKFVCLNCGFETHADEQAALNIARSWLFLRSQEYKKYQTNKTTGNTDKRAFVETWQSFYRKKLKEVWKPAV

SEQ ID NO: 29721 - protein, 978 aa, synthetic construct
  REGION 1..978: note = engineered CasX variant
QEIKRINKIRRRLVKDSNTKKAGKTGPMKTLLVRVMTPDLRERLENLRKKPENIPQPISNTSRANLNKLLTDYTEMKKAILHVYWEEFQKDPVGLMSRVAQPASKKIDQNKLKPEMDEKGNLTTAGFACSQCGQPLFVYKLEQVSEKGKAYTNYFGRCNVAEHEKLILLAQLKPEKDSDEAVTYSLGKFGQRALDFYSIHVTKESTHPVKPLAQIAGNRYASGPVGKALSDACMGTIASFLSKYQDIIIEHQKVVKGNQKRLESLRELAGKENLEYPSVTLPPQPHTKEGVDAYNEVIARVRMWVNLNLWQKLKLSRDDAKPLLRLKGFPSFPLVERQANEVDWWDMVCNVKKLINEKKEDGKVFWQNLAGYKRQEALRPYLSSEEDRKKGKKFARYQLGDLLLHLEKKHGEDWGKVYDEAWERIDKKVEGLSKHIKLEEERRSEDAQSKAALTDWLRAKASFVIEGKKEADKDEFCRCELKLQKWYGDLRGKPFAIEAENSILDISGFSKQYNCAFIWQKDGVKKLNLYLIINYFKGGKLRFKKIKPEAFEANRFYTVINKKSGEIVPMEVNFNFDDPNLIILPLAFGKRQGREFIWNDLLSLETGSLKLANGRVIEKTLYNRRTRQDEPALFVALTFERREVLDSSNIKPMNLIGVDRGENIPAVIALTDPEGCPLSRFKDSLGNPTHILRIGESYKEKQRTIQAKKEVEQRRAGGYSRKYASKAKNLADDMVRNTARDLLYYAVTQDAMLIFENLSRGFGRQGKRTFSAERQYTRMEDWLTAKLAYEGLPSKTYLSKTLAQYTSKTCSNCGFTITSADYDRVLEKLKKTATGWMTTINGKELKVEGQITYYNRYKRQNVVKDLSVELDRLSEESVNNDISSWTKGRSGEALSLLKKRFSHRPVQEKFVCLNCGFETHADEQAALNIARSWLFLRSQEYKKYQTNKTTGNTDKRAFVETWQSFYRKKLKEVWKPAV

SEQ ID NO: 29722 - protein, 978 aa, synthetic construct
  REGION 1..978: note = engineered CasX variant
QEIKRINKIRRRLVKDSNTKKAGKTGPMKTLLVRVMTPDLRERLENLRKKPENIPQPISNTSRANLNKLLTDYTEMKKAILHVYWEEFQKDPVGLMSRVAQPASKKIDQNKLKPEMDEKGNLTTAGFACSQCGQPLFVYKLEQVSEKGKAYTNYFGRCNVAEHEKLILLAQLKPEKDSDEAVTYSLGKFGQRALDFYSIHVTKESTHPVKPLAQIAGNRYASGPVGKALSDACMGTIASFLSKYQDIIIEHQKVVKGNQKRLESLRELAGKENLEYPSVTLPPQPHTKEGVDAYNEVIARVRMWVNLNLWQKLKLSRDDAKPLLRLKGFPSFPLVERQANEVDWWDMVCNVKKLINEKKEDGKVFWQNLAGYKRQEALRPYLSSEEDRKKGKKFARYQLGDLLLHLEKKHGEDWGKVYDEAWERIDKKVEGLSKHIKLEEERRSEDAQSKAALTDWLRAKASFVIEGSKEADKDEFCRCELKLQKWYGDLRGKPFAIEAENSILDISGFSKQYNCAFIWQKDGVKKLNLYLIINYFKGGKLRFKKIKPEAFEANRFYTVINKKSGEIVPMEVNFNFDDPNLIILPLAFGKRQGREFIWNDLLSLETGSLKLANGRVIEKTLYNRRTRQDEPALFVALTFERREVLDSSNIKPMNLIGVDRGENIPAVIALTDPEGCPLSRFKDSLGNPTHILRIGESYKEKQRTIQAKKEVEQRRAGGYSRKYASKAKNLADDMVRNTARDLLYYAVTQDAMLIFENLSRGFGRQGKRTFSAERQYTRMEDWLTAKLAYEGLPSKTYLSKTLAQYTSKTCSNCGFTITSADYDRVLEKLKKTATGWMTTINGKELKVEGQITYYNRYKRQNVVKDLSVELDRLSEESVNNDISSWTKGRSGEALSLLKKRFSHRPVQEKFVCLNCGFETHADEQAALNIARSWLFLRSQEYKKYQTNKTTGNTDKRAFVETWQSFYRKKLKEVWKPAV

SEQ ID NO: 29723 - protein, 979 aa, synthetic construct
  REGION 1..979: note = engineered CasX variant
QEIKRINKIRRRLVKDSNTKKAGKTGPMKTLLVRVMTPDLRERLENLRKKPENIPQPISNTSRANLNKLLTDYTEMKKAILHVYWEEFQKDPVGLMSRVAQPASKKIDQNKLKPEMDEKGNLTTAGFACSQCGQPLFVYKLEQVSEKGKAYTNYFGRCNVAEHEKLILLAQLKPEKDSDEAVTYSLGKFGQRALDFYSIHVTKESTHPVKPLAQIAGNRYASGPVGKALSDACMGTIASFLSKYQDIIIEHQKVVKGNQKRLESLRELAGKENLEYPSVTLPPQPHTKEGVDAYNEVIARVRMWVNLNLWQKLKLSRDDAKPLLRLKGFPSFPLVERQANEVDWWDMVCNVKKLINEKKEDGKVFWQNLAGYKRQEALRPYLSSEEDRKKGKKFARYQLGDLLLHLEKKHGEDWGKVYDEAWERIDKKVEGLSKHIKLEEERRSEDAQSKAALTDWLRAKASFVIEGLKEADDKDEFCRCELKLQKWYGDLRGKPFAIEAENSILDISGFSKQYNCAFIWQKDGVKKLNLYLIINYFKGGKLRFKKIKPEAFEANRFYTVINKKSGEIVPMEVNFNFDDPNLIILPLAFGKRQGREFIWNDLLSLETGSLKLANGRVIEKTLYNRRTRQDEPALFVALTFERREVLDSSNIKPMNLIGVDRGENIPAVIALTDPEGCPLSRFKDSLGNPTHILRIGESYKEKQRTIQAKKEVEQRRAGGYSRKYASKAKNLADDMVRNTARDLLYYAVTQDAMLIFENLSRGFGRQGKRTFSAERQYTRMEDWLTAKLAYEGLPSKTYLSKTLAQYTSKTCSNCGFTITSADYDRVLEKLKKTATGWMTTINGKELKVEGQITYYNRYKRQNVVKDLSVELDRLSEESVNNDISSWTKGRSGEALSLLKKRFSHRPVQEKFVCLNCGFETHADEQAALNIARSWLFLRSQEYKKYQTNKTTGNTDKRAFVETWQSFYRKKLKEVWKPAV

SEQ ID NO: 29724 - protein, 979 aa, synthetic construct
  REGION 1..979: note = engineered CasX variant
QEIKRINKIRRRLVKDSNTKKAGKTGPMKTLLVRVMTPDLRERLENLRKKPENIPQPISNTSRANLNKLLTDYTEMKKAILHVYWEEFQKDPVGLMSRVAQPASKKIDQNKLKPEMDEKGNLTTAGFACSQCGQPLFVYKLEQVSEKGKAYTNYFGRCNVAEHEKLILLAQLKPEKDSDEAVTYSLGKFGQRALDFYSIHVTKESTHPVKPLAQIAGNRYASGPVGKALSDACMGTIASFLSKYQDIIIEHQKVVKGNQKRLESLRELAGKENLEYPSVTLPPQPHTKEGVDAYNEVIARVRMWVNLNLWQKLKLSRDDAKPLLRLKGFPSFPLVERQANEVDWWDMVCNVKKLINEKKEDGKVFWQNLAGYKRQEALRPYLSSEEDRKKGKKFARYQLGDLLLHLEKKHGEDWGKVYDEAWERIDKKVEGLSKHIKLEEERRSEDAQSKAALTDWLRAKASFVIEGLKEADKDEFCRCELKLQKWYGDLRGKPFAIEAENSILDISGFSKQYNCAFIWQKDGVKKLNLYLIINYFKGGKLRFKKIKPEAFEANRFYTVINKKSGEIVPMEVNFNFDDPNLIILPLAFGKRQGREFIWNDLLSLETGSLKLANGRVIEKTLYNRRTRQDEPALFVALTFERREVLDSSNIKPMNLIGVDRGENIPAVIALTDPEGCPLSRFKDSLGNPTHILRIGESYKEKQRTIQAKKEVEQRRAGGYSRKYASKAKNLADDMVRNTARDLLYYAVTQDAMLIFENLSRGFGRQGKRTFSAERQYTRMEDWLTAKLAYEGLPSKTYLSKTLAQYTSKTCSNCGFTITSADYDRVLEKLKKTATGWMTTINGKELKVEGQITYYNRYKRQNVVKDLSVELDRLSEESVNNDISSWTKGRSGNEALSLLKKRFSHRPVQEKFVCLNCGFETHADEQAALNIARSWLFLRSQEYKKYQTNKTTGNTDKRAFVETWQSFYRKKLKEVWKPAV

SEQ ID NO: 29725 - protein, 978 aa, synthetic construct
  REGION 1..978: note = engineered CasX variant
QEIKRINKIRRRLVKDSNTKKAGKTGPMKTLLVRVMTPDLRERLENLRKKPENIPQPISNTSRANLNKLLTDYTEMKKAILHVYWEEFQKDPVGLMSRVAQPASKKIDQNKLKPEMDEKGNLTTAGFACSQCGQPLFVYKLEQVSEKGKAYTNYFGRCNVAEHEKLILLAQLKPEKDSDEAVTYSLGKFGQRALDFYSIHVTKESTHPVKPLAQIAGNRYASGPVGKALSDACMGTIASFLSKYQDIIIEHQKVVKGNQKRLESLRELAGKENLEYPSVTLPPQPHTKEGVDAYNEVIARVRMWVNLNLWQKLKLSRDDAKPLLRLKGFPSFPLVERQANEVDWWDMVCNVKKLINEKKEDGKVFWQNLAGYKRQEALRPYLSSEEDRQKGKKFARYQLGDLLLHLEKKHGEDWGKVYDEAWERIDKKVEGLSKHIKLEEERRSEDAQSKAALTDWLRAKASFVIEGLKEADKDEFCRCELKLQKWYGDLRGKPFAIEAENSILDISGFSKQYNCAFIWQKDGVKKLNLYLIINYFKGGKLRFKKIKPEAFEANRFYTVINKKSGEIVPMEVNFNFDDPNLIILPLAFGKRQGREFIWNDLLSLETGSLKLANGRVIEKTLYNRRTRQDEPALFVALTFERREVLDSSNIKPMNLIGVDRGENIPAVIALTDPEGCPLSRFKDSLGNPTHILRIGESYKEKQRTIQAKKEVEQRRAGGYSRKYASKAKNLADDMVRNTARDLLYYAVTQDAMLIFENLSRGFGRQGKRTFSAERQYTRMEDWLTAKLAYEGLPSKTYLSKTLAQYTSKTCSNCGFTITSADYDRVLEKLKKTATGWMTTINGKELKVEGQITYYNRYKRQNVVKDLSVELDRLSEESVNNDISSWTKGRSGEALSLLKKRFSHRPVQEKFVCLNCGFETHADEQAALNIARSWLFLRSQEYKKYQTNKTTGNTDKRAFVETWQSFYRKKLKEVWKPAV

SEQ ID NO: 29726 - protein, 978 aa, synthetic construct
  REGION 1..978: note = engineered CasX variant
QEIKRINKIRRRLVKDSNTKKAGKTGPMKTLLVRVMTPDLRERLENLRKKPENIPQPISNTSRANLNKLLTDYTEMKKAILHVYWEEFQKDPVGLMSRVAQPASKKIDQNKLKPEMDEKGNLTTAGFACSQCGQPLFVYKLEQVSEKGKAYTNYFGRCNVAEHEKLILLAQLKPEKDSDEAVTYSLGKFGQRALDFYSIHVTKESTHPVKPLAQIAGNRYASGPVGKALSDACMGTIASFLSKYQDIIIEHQKVVKGNQKRLESLRELAGKENLEYPSVTLPPQPHTKEGVDAYNEVIARVRMWVNLNLWQKLKLSRDDAKPLLRLKGFPSFPLVERQANEVDWWDMVCNVKKLINEKKEDGKVFWQNLAGYKRQEALRPYLSSEEDRKKGKKFARYQLGDLLLHLEKKHGEDWGKVYDEAWERIDKKVEGLSKHIKLEEERRSEDAQSKAALTDWLRAKASFVIEGLKEADKDEFCRCELKLQKWYGDLRGKPFAIEAENSILDISGFSKQYNCAFIWQKDGVKKLNLYLIINYFKGGKLRFKKIKPEAFEANRFYTVINKKSGEIVPMEVNFNFDDPNLIILPLAFGKRQGREFIWNDLLSLETGSLKLANGRVIEKTLYNRRTRQDEPALFVALTFERREVLDSSNIKPMNLIGVDRGENIPAVIALTDPEGCPLSRFKDSLGNPTHILRIGESYKEKQRTIQAKKEVEQRRAGGYSRKYASKAKNLADDMVRNTARDLLYYAVTQDAMLIFENLSRGFGRQGKRTFSAERQYTRMEDWLTAKLAYEGLPSQTYLSKTLAQYTSKTCSNCGFTITSADYDRVLEKLKKTATGWMTTINGKELKVEGQITYYNRYKRQNVVKDLSVELDRLSEESVNNDISSWTKGRSGEALSLLKKRFSHRPVQEKFVCLNCGFETHADEQAALNIARSWLFLRSQEYKKYQTNKTTGNTDKRAFVETWQSFYRKKLKEVWKPAV

SEQ ID NO: 29727 - protein, 978 aa, synthetic construct
  REGION 1..978: note = engineered CasX variant
QEIKRINKIRRRLVKDSNTKKAGKTGPMKTLLVRVMTPDLRERLENLRKKPENIPQPISNTSRANLNKLLTDYTEMKKAILHVYWEEFQKDPVGLMSRVAQPASKKIDQNKLKPEMDEKGNLTTAGFACSQCGQPLFVYKLEQVSEKGKAYTNYFGRCNVAEHEKLILLAQLKPEKDSDEAVTYSLGKFGQRALDFYSIHVTKESTHPVKPLAQIAGNRYASGPVGKALSDACMGTIASFLSKYQDIIIEHQKVVKGNQKRLESLRELAGKENLEYPSVTLPPQPHTKEGVDAYNEVIARVRMWVNLNLWQKLKLSRDDAKPLLRLKGFPSFPLVERQANEVDWWDMVCNVKKLINEKKEDGKVFWQNLAGYKRQEALRPYLSSEEDRKKGKKFARYQLGDLLLHLEKKHGEDWGKVYDEAWERIDKKVEGLSKHIKLEEERRSEDAQSKAALTDWLRAKASFVIEGLKEADKDEFCRCELKLQKWYGDLRGKPFAIEAENSILDISGFSKQYNCAFIWQKDGVKKLNLYLIINYFKGGKLRFKKIKPEAFEANRFYTVINKKSGEIVPMEVNFNFDDPNLIILPLAFGKRQGREFIWNDLLSLETGSLKLANGRVIEKTLYNRRTRQDEPALFVALTFERREVLDSSNIKPMNLIGVDRGENIPAVIALTDPEGCPLSRFKDSLGNPTHILRIGESYKEKQRTIQAKKEVEQRRAGGYSRKYASKAKNLADDMVRNTARDLLYYAVTQDAMLIFENLSRGFGRQGKRTFSAERQYTRMEDWLTAKLAYNGLPSKTYLSKTLAQYTSKTCSNCGFTITSADYDRVLEKLKKTATGWMTTINGKELKVEGQITYYNRYKRQNVVKDLSVELDRLSEESVNNDISSWTKGRSGEALSLLKKRFSHRPVQEKFVCLNCGFETHADEQAALNIARSWLFLRSQEYKKYQTNKTTGNTDKRAFVETWQSFYRKKLKEVWKPAV

SEQ ID NO: 29728 - protein, 978 aa, synthetic construct
  REGION 1..978: note = engineered CasX variant
QEIKRINKIRRRLVKDSNTKKAGKTGPMKTLLVRVMTPDLRERLENLRKKPENIPQPISNTSRANLNKLLTDYTEMKKAILHVYWEEFQKDPVGLMSRVAQPASKKIDQNKLKPEMDEKGNLTTAGFACSQCGQPLFVYKLEQVSEKGKAYTNYFGRCNVAEHEKLIQLAQLKPEKDSDEAVTYSLGKFGQRALDFYSIHVTKESTHPVKPLAQIAGNRYASGPVGKALSDACMGTIASFLSKYQDIIIEHQKVVKGNQKRLESLRELAGKENLEYPSVTLPPQPHTKEGVDAYNEVIARVRMWVNLNLWQKLKLSRDDAKPLLRLKGFPSFPLVERQANEVDWWDMVCNVKKLINEKKEDGKVFWQNLAGYKRQEALRPYLSSEEDRKKGKKFARYQLGDLLLHLEKKHGEDWGKVYDEAWERIDKKVEGLSKHIKLEEERRSEDAQSKAALTDWLRAKASFVIEGLKEADKDEFCRCELKLQKWYGDLRGKPFAIEAENSILDISGFSKQYNCAFIWQKDGVKKLNLYLIINYFKGGKLRFKKIKPEAFEANRFYTVINKKSGEIVPMEVNFNFDDPNLIILPLAFGKRQGREFIWNDLLSLETGSLKLANGRVIEKTLYNRRTRQDEPALFVALTFERREVLDSSNIKPMNLIGVDRGENIPAVIALTDPEGCPLSRFKDSLGNPTHILRIGESYKEKQRTIQAKKEVEQRRAGGYSRKYASKAKNLADDMVRNTARDLLYYAVTQDAMLIFENLSRGFGRQGKRTFSAERQYTRMEDWLTAKLAYEGLPSKTYLSKTLAQYTSKTCSNCGFTITSADYDRVLEKLKKTATGWMTTINGKELKVEGQITYYNRYKRQNVVKDLSVELDRLSEESVNNDISSWTKGRSGEALSLLKKRFSHRPVQEKFVCLNCGFETHADEQAALNIARSWLFLRSQEYKKYQTNKTTGNTDKRAFVETWQSFYRKKLKEVWKPAV

SEQ ID NO: 29729 - protein, 978 aa, synthetic construct
  REGION 1..978: note = engineered CasX variant
QEIKRINKIRRRLVKDSNTKKAGKTGPMKTLLVRVMTPDLRERLENLRKKPENIPQPISNTSRANLNKLLTDYTEMKKAILHVYWEEFQKDPVGLMSRVAQPASKKIDQNKLKPEMDEKGNLTTAGFACSQCGQPLFVYKLEQVSEKGKAYTNYFGRCNVAEHEKLILLAQLKPEKDSDEAVTYSLGKFGQRALDFYSIHVTKESTHPVKPLAQIAGNRYASGPVGKALSDACMGTIASFLSKYQDIIIEHQKVVKGNQKRLESLRELAGKENLEYPSVTLPPQPHTKEGVDAYNEVIARVRMWVNLNLWQKLKLSRDDAKPLLRLKGFPSFPLVERQANEVDWWDMVCNVKKLINEKKEDGKVFWQNLAIYKRQEALRPYLSSEEDRKKGKKFARYQLGDLLLHLEKKHGEDWGKVYDEAWERIDKKVEGLSKHIKLEEERRSEDAQSKAALTDWLRAKASFVIEGLKEADKDEFCRCELKLQKWYGDLRGKPFAIEAENSILDISGFSKQYNCAFIWQKDGVKKLNLYLIINYFKGGKLRFKKIKPEAFEANRFYTVINKKSGEIVPMEVNFNFDDPNLIILPLAFGKRQGREFIWNDLLSLETGSLKLANGRVIEKTLYNRRTRQDEPALFVALTFERREVLDSSNIKPMNLIGVDRGENIPAVIALTDPEGCPLSRFKDSLGNPTHILRIGESYKEKQRTIQAKKEVEQRRAGGYSRKYASKAKNLADDMVRNTARDLLYYAVTQDAMLIFENLSRGFGRQGKRTFSAERQYTRMEDWLTAKLAYEGLPSKTYLSKTLAQYTSKTCSNCGFTITSADYDRVLEKLKKTATGWMTTINGKELKVEGQITYYNRYKRQNVVKDLSVELDRLSEESVNNDISSWTKGRSGEALSLLKKRFSHRPVQEKFVCLNCGFETHADEQAALNIARSWLFLRSQEYKKYQTNKTTGNTDKRAFVETWQSFYRKKLKEVWKPAV

SEQ ID NO: 29730 - protein, 978 aa, synthetic construct
  REGION 1..978: note = engineered CasX variant
QEIKRINKIRRRLVKDSNTKKAGKTGPMKTLLVRVMTPDLRERLENLRKKPENIPQPISNTSRANLNKLLTDYTEMKKAILHVYWEEFQKDPVGLMSRVAQPASKKIDQNKLKPEMDEKGNLTTAGFACSQCGQPLFVYKLEQVSEKGKAYTNYFGRCNVAEHEKLILLAQLKPEKDSDEAVTYSLGKFGQRALDFYSIHVTKESTHPVKPLAQIAGNRYASGPVGKALSDACMGTIASFLSKYQDIIIEHQKVVKGNQKRLESLRELAGKENLEYPSVTLPPQPHTKEGVDAYNEVIARVRMWVNLNLWQKLKLSRDDAKPLLRLKGFPSFPLVERQANEVDWWDMVCNVKKLINEKKEDGKVFWQNLAGYKRQEALRPYLSSEEDREKGKKFARYQLGDLLLHLEKKHGEDWGKVYDEAWERIDKKVEGLSKHIKLEEERRSEDAQSKAALTDWLRAKASFVIEGLKEADKDEFCRCELKLQKWYGDLRGKPFAIEAENSILDISGFSKQYNCAFIWQKDGVKKLNLYLIINYFKGGKLRFKKIKPEAFEANRFYTVINKKSGEIVPMEVNFNFDDPNLIILPLAFGKRQGREFIWNDLLSLETGSLKLANGRVIEKTLYNRRTRQDEPALFVALTFERREVLDSSNIKPMNLIGVDRGENIPAVIALTDPEGCPLSRFKDSLGNPTHILRIGESYKEKQRTIQAKKEVEQRRAGGYSRKYASKAKNLADDMVRNTARDLLYYAVTQDAMLIFENLSRGFGRQGKRTFSAERQYTRMEDWLTAKLAYEGLPSKTYLSKTLAQYTSKTCSNCGFTITSADYDRVLEKLKKTATGWMTTINGKELKVEGQITYYNRYKRQNVVKDLSVELDRLSEESVNNDISSWTKGRSGEALSLLKKRFSHRPVQEKFVCLNCGFETHADEQAALNIARSWLFLRSQEYKKYQTNKTTGNTDKRAFVETWQSFYRKKLKEVWKPAV

SEQ ID NO: 29731 - protein, 978 aa, synthetic construct
  REGION 1..978: note = engineered CasX variant
QEIKRINKIRRRLVKDSNTKKAGKTGPMKTLLVRVMTPDLRERLENLRKKPENIPQPISNTSRANLNKLLTDYTEMKKAILHVYWEEFQKDPVGLMSRVAQPASKKIDQNKLKPEMDEKGNLTTAGFACSQCGQPLFVYKLEQVSEKGKAYTNYFGRCNVAEHEKLILLAQLKPEKDSDEAVTYSLGKFGQRALDFYSIHVTKESTHPVKPLAQIAGNRYASGPVGKALSDACMGTIASFLSKYQDIIIEHQKVVKGNQKRLESLRELAGKENLEYPSVTLPPQPHTKEGVDAYNEVIARVRMWVNLNLWQKLKLSRDDAKPLLRLKGFPSFPLVERQANEVDWWDMVCNVKKLINEKKEDGKVFWQNLAGYKRQEALRPYLSSEEDRKKGKKFARYQLGDLLLHLEKKHGEDWGKVYDEAWERIDKKVEGLSKHIKLEEERRSEDAQSKAALTDWLRAKASFVIEGLKEADKDEFCRCELKLQKWYGDLRGKPFAIEAENSILDISGFSKQYNCAFIWQKDGVKKLNLYLIINYFKGGKLRFKKIKPEAFEANRFYTVINKKSGEIVIMEVNFNFDDPNLIILPLAFGKRQGREFIWNDLLSLETGSLKLANGRVIEKTLYNRRTRQDEPALFVALTFERREVLDSSNIKPMNLIGVDRGENIPAVIALTDPEGCPLSRFKDSLGNPTHILRIGESYKEKQRTIQAKKEVEQRRAGGYSRKYASKAKNLADDMVRNTARDLLYYAVTQDAMLIFENLSRGFGRQGKRTFSAERQYTRMEDWLTAKLAYEGLPSKTYLSKTLAQYTSKTCSNCGFTITSADYDRVLEKLKKTATGWMTTINGKELKVEGQITYYNRYKRQNVVKDLSVELDRLSEESVNNDISSWTKGRSGEALSLLKKRFSHRPVQEKFVCLNCGFETHADEQAALNIARSWLFLRSQEYKKYQTNKTTGNTDKRAFVETWQSFYRKKLKEVWKPAV

SEQ ID NO: 29732 - protein, 978 aa, synthetic construct
  REGION 1..978: note = engineered CasX variant
QEIKRINKIRRRLVKDSNTKKAGKTGPMKTLLVRVMTPDLRERLENLRKKPENIPQPISNTSRANLNKLLTDYTEMKKAILHVYWEEFQKDPVGLMSRVAQPASKKIDQNKLKPEMDEKGNLTTAGFACSQCGQPLFVYKLEQVSEKGKAYTNYFGRCNVAEHEKLILLAQLKPEKDSDEAVTYSLGKFGQRALDFYSIHVTKESTHPVKPLAQIAGNRYASGPVGKALSGACMGTIASFLSKYQDIIIEHQKVVKGNQKRLESLRELAGKENLEYPSVTLPPQPHTKEGVDAYNEVIARVRMWVNLNLWQKLKLSRDDAKPLLRLKGFPSFPLVERQANEVDWWDMVCNVKKLINEKKEDGKVFWQNLAGYKRQEALRPYLSSEEDRKKGKKFARYQLGDLLLHLEKKHGEDWGKVYDEAWERIDKKVEGLSKHIKLEEERRSEDAQSKAALTDWLRAKASFVIEGLKEADKDEFCRCELKLQKWYGDLRGKPFAIEAENSILDISGFSKQYNCAFIWQKDGVKKLNLYLIINYFKGGKLRFKKIKPEAFEANRFYTVINKKSGEIVPMEVNFNFDDPNLIILPLAFGKRQGREFIWNDLLSLETGSLKLANGRVIEKTLYNRRTRQDEPALFVALTFERREVLDSSNIKPMNLIGVDRGENIPAVIALTDPEGCPLSRFKDSLGNPTHILRIGESYKEKQRTIQAKKEVEQRRAGGYSRKYASKAKNLADDMVRNTARDLLYYAVTQDAMLIFENLSRGFGRQGKRTFMAERQYTRMEDWLTAKLAYEGLPSKTYLSKTLAQYTSKTCSNCGFTITSADYDRVLEKLKKTATGWMTTINGKELKVEGQITYYNRYKRQNVVKDLSVELDRLSEESVNNDISSWDKGRSGEALSLLKKRFSHRPVQEKFVCLNCGFETHADEQAALNIARSWLFLRSQEYKKYQTNKTTGNTDKRAFVETWQSFYRKKLKEVWKPAV

SEQ ID NO: 29733 - protein, 978 aa, synthetic construct
  REGION 1..978: note = engineered CasX variant
QEIKRINKIRRRLVKDSNTKKAGKTGPMKTLLVRVMTPDLRERLENLRKKPENIPQPISNTSRANLNKLLTDYTEMKKAILHVYWEEFQKDPVGLMSRVAQPASKKIDQNKLKPEMDEKGNLTTAGFACSQCGQPLFVYKLEQVSEKGKAYTNYFGRCNVAEHEKLILLAQLKPEKDSDEAVTYSLGKFGQRALDFYSIHVTKESTHPVKPLAQIAGNRYASGPVGKALSDACMGTIASFLSKYQDIIIEHQKVVKGNQKRLESLRELAGKENLEYPSVTLPPQPHTKEGVDAYNEVIARVRMWVNLNLWQKLKLSRDDAKPLLRLKNFPSFPLVERQANEVDWWDMVCNVKKLINEKKEDGKVFWQNLAGYKRQEALRPYLSSEEDRKKGKKFARYQLGDLLLHLEKKHGEDWGKVYDEAWERIDKKVEGLSKHIKLEEERRSEDAQSKAALTDWLRAKASFVIEGLKEADKDEFCRCELKLQKWYGDLRGKPFAIEAENSILDISGFSKQYNCAFIWQKDGVKKLNLYLIINYFKGGKLRFKKIKPEAFEANRFYTVINKKSGEIVPMEVNFNFDDPNLIILPLAFGKRQGREFIWNDLLSLETGSLKLANGRVIEKTLYNRRTRQDEPALFVALTFERREVLDSSNIKPMNLIGVDRGENIPAVIALTDPEGCPLSRFKDSLGNPTHILRIGESYKEKQRTIQAKKEVEQRRAGGYSRKYASKAKNLADDMVRNTARDLLYYAVTQDAMLIFENLSRGFGRQGKRTFMAERQYTRMEDWLTAKLAYEGLPSKTYLSKTLAQYTSKTCSNCGFTITSADYDRVLEKLKKTATGWMTTINGKELKVEGQITYYNRYKRQNVVKDLSVELDRLSEESVNNDISSWDKGRSGEALSLLKKRFSHRPVQEKFVCLNCGFETHADEQAALNIARSWLFLRSQEYKKYQTNKTTGNTDKRAFVETWQSFYRKKLKEVWKPAV

SEQ ID NO: 29734 - protein, 978 aa, synthetic construct
  REGION 1..978: note = engineered CasX variant
QEIKRINKIRRRLVKDSNTKKAGKTGPMKTLLVRVMTPDLRERLENLRKKPENIPQPISNTSRANLNKLLTDYTEMKKAILHVYWEEFQKDPVGLMSRVAQPASKKIDQNKLKPEMDEKGNLTTAGFACSQCGQPLFVYKLEQVSEKGKAYTNYFGRCNVAEHEKLILLAQLKPEKDSDEAVTYSLGKFGQRALDFYSIHVTKESTHPVKPLAQIAGNRYASGPVGKALSDACMGTIASFLSKYQDIIIEHQKVVKGNQKRLESLRELAGKENLEYPSVTLPPQPHTKEGVDAYNEVIARVRMWVNLNLWQKLKLSRDDAKPLLRLKGFPSFPLVERQANEVDWWDMVCNVKKLINEKKEDGKVFWQNLAGYKRQEALRPYLSSEEDRKKGKKFARYQLGDLLNHLEKKHGEDWGKVYDEAWERIDKKVEGLSKHIKLEEERRSEDAQSKAALTDWLRAKASFVIEGLKEADKDEFCRCELKLQKWYGDLRGKPFAIEAENSILDISGFSKQYNCAFIWQKDGVKKLNLYLIINYFKGGKLRFKKIKPEAFEANRFYTVINKKSGEIVPMEVNFNFDDPNLIILPLAFGKRQGREFIWNDLLSLETGSLKLANGRVIEKTLYNRRTRQDEPALFVALTFERREVLDSSNIKPMNLIGVDRGENIPAVIALTDPEGCPLSRFKDSLGNPTHILRIGESYKEKQRTIQAKKEVEQRRAGGYSRKYASKAKNLADDMVRNTARDLLYYAVTQDAMLIFENLSRGFGRQGKRTFMAERQYTRMEDWLTAKLAYEGLPSKTYLSKTLAQYTSKTCSNCGFTITSADYDRVLEKLKKTATGWMTTINGKELKVEGQITYYNRYKRQNVVKDLSVELDRLSEESVNNDISSWDKGRSGEALSLLKKRFSHRPVQEKFVCLNCGFETHADEQAALNIARSWLFLRSQEYKKYQTNKTTGNTDKRAFVETWQSFYRKKLKEVWKPAV

SEQ ID NO: 29735 - protein, 978 aa, synthetic construct
  REGION 1..978: note = engineered CasX variant
QEIKRINKIRRRLVKDSNTKKAGKTGPMKTLLVRVMTPDLRERLENLRKKPENIPQPISNTSRANLNKLLTDYTEMKKAILHVYWEEFQKDPVGLMSRVAQPASKKIDQNKLKPEMDEKGNLTTAGFACSQCGQPLFVYKLEQVSEKGKAYTNYFGRCNVAEHEKLILLAQLKPEKDSDEAVTYSLGKFGQRALDFYSIHVTKESTHPVKPLAQIAGNRYASGPVGKALSDACMGTIASFLSKYQDIIIEHQKVVKGNQKRLESLRELAGKENLEYPSVTLPPQPHTKEGVDAYNEVIARVRMWVNLNLWQKLKLSRDDAKPLLRLKGFPSFPLVERQANEVDWWDMVCNVKKLINEKKEDGKVFWQNLAGYKRQEALRPYLSSEEDRKKGKKFARYQLGDLLWHLEKKHGEDWGKVYDEAWERIDKKVEGLSKHIKLEEERRSEDAQSKAALTDWLRAKASFVIEGLKEADKDEFCRCELKLQKWYGDLRGKPFAIEAENSILDISGFSKQYNCAFIWQKDGVKKLNLYLIINYFKGGKLRFKKIKPEAFEANRFYTVINKKSGEIVPMEVNFNFDDPNLIILPLAFGKRQGREFIWNDLLSLETGSLKLANGRVIEKTLYNRRTRQDEPALFVALTFERREVLDSSNIKPMNLIGVDRGENIPAVIALTDPEGCPLSRFKDSLGNPTHILRIGESYKEKQRTIQAKKEVEQRRAGGYSRKYASKAKNLADDMVRNTARDLLYYAVTQDAMLIFENLSRGFGRQGKRTFMAERQYTRMEDWLTAKLAYEGLPSKTYLSKTLAQYTSKTCSNCGFTITSADYDRVLEKLKKTATGWMTTINGKELKVEGQITYYNRYKRQNVVKDLSVELDRLSEESVNNDISSWDKGRSGEALSLLKKRFSHRPVQEKFVCLNCGFETHADEQAALNIARSWLFLRSQEYKKYQTNKTTGNTDKRAFVETWQSFYRKKLKEVWKPAV

SEQ ID NO: 29736 - protein, 978 aa, synthetic construct
  REGION 1..978: note = engineered CasX variant
QEIKRINKIRRRLVKDSNTKKAGKTGPMKTLLVRVMTPDLRERLENLRKKPENIPQPISNTSRANLNKLLTDYTEMKKAILHVYWEEFQKDPVGLMSRVAQPASKKIDQNKLKPEMDEKGNLTTAGFACSQCGQPLFVYKLEQVSEKGKAYTNYFGRCNVAEHEKLILLAQLKPEKDSDEAVTYSLGKFGQRALDFYSIHVTKESTHPVKPLAQIAGNRYASGPVGKALSDACMGTIASFLSKYQDIIIEHQKVVKGNQKRLESLRELAGKENLEYPSVTLPPQPHTKEGVDAYNEVIARVRMWVNLNLWQKLKLSRDDAKPLLRLKGFPSFPLVERQANEVDWWDMVCNVKKLINEKKEDGKVFWQNLAGYKRQEALRPYLSSEEDRKKGKKFARYQLGDLLLHLYKKHGEDWGKVYDEAWERIDKKVEGLSKHIKLEEERRSEDAQSKAALTDWLRAKASFVIEGLKEADKDEFCRCELKLQKWYGDLRGKPFAIEAENSILDISGFSKQYNCAFIWQKDGVKKLNLYLIINYFKGGKLRFKKIKPEAFEANRFYTVINKKSGEIVPMEVNFNFDDPNLIILPLAFGKRQGREFIWNDLLSLETGSLKLANGRVIEKTLYNRRTRQDEPALFVALTFERREVLDSSNIKPMNLIGVDRGENIPAVIALTDPEGCPLSRFKDSLGNPTHILRIGESYKEKQRTIQAKKEVEQRRAGGYSRKYASKAKNLADDMVRNTARDLLYYAVTQDAMLIFENLSRGFGRQGKRTFMAERQYTRMEDWLTAKLAYEGLPSKTYLSKTLAQYTSKTCSNCGFTITSADYDRVLEKLKKTATGWMTTINGKELKVEGQITYYNRYKRQNVVKDLSVELDRLSEESVNNDISSWDKGRSGEALSLLKKRFSHRPVQEKFVCLNCGFETHADEQAALNIARSWLFLRSQEYKKYQTNKTTGNTDKRAFVETWQSFYRKKLKEVWKPAV

SEQ ID NO: 29737 - protein, 978 aa, synthetic construct
  REGION 1..978: note = engineered CasX variant
QEIKRINKIRRRLVKDSNTKKAGKTGPMKTLLVRVMTPDLRERLENLRKKPENIPQPISNTSRANLNKLLTDYTEMKKAILHVYWEEFQKDPVGLMSRVAQPASKKIDQNKLKPEMDEKGNLTTAGFACSQCGQPLFVYKLEQVSEKGKAYTNYFGRCNVAEHEKLILLAQLKPEKDSDEAVTYSLGKFGQRALDFYSIHVTKESTHPVKPLAQIAGNRYASGPVGKALSDACMGTIASFLSKYQDIIIEHQKVVKGNQKRLESLRELAGKENLEYPSVTLPPQPHTKEGVDAYNEVIARVRMWVNLNLWQKLKLSRDDAKPLLRLKGFPSFPLVERQANEVDWWDMVCNVKKLINEKKEDGKVFWQNLAGYKRQEALRPYLSSEEDRKKGKKFARYQLGDLLLHLEKKHPEDWGKVYDEAWERIDKKVEGLSKHIKLEEERRSEDAQSKAALTDWLRAKASFVIEGLKEADKDEFCRCELKLQKWYGDLRGKPFAIEAENSILDISGFSKQYNCAFIWQKDGVKKLNLYLIINYFKGGKLRFKKIKPEAFEANRFYTVINKKSGEIVPMEVNFNFDDPNLIILPLAFGKRQGREFIWNDLLSLETGSLKLANGRVIEKTLYNRRTRQDEPALFVALTFERREVLDSSNIKPMNLIGVDRGENIPAVIALTDPEGCPLSRFKDSLGNPTHILRIGESYKEKQRTIQAKKEVEQRRAGGYSRKYASKAKNLADDMVRNTARDLLYYAVTQDAMLIFENLSRGFGRQGKRTFMAERQYTRMEDWLTAKLAYEGLPSKTYLSKTLAQYTSKTCSNCGFTITSADYDRVLEKLKKTATGWMTTINGKELKVEGQITYYNRYKRQNVVKDLSVELDRLSEESVNNDISSWDKGRSGEALSLLKKRFSHRPVQEKFVCLNCGFETHADEQAALNIARSWLFLRSQEYKKYQTNKTTGNTDKRAFVETWQSFYRKKLKEVWKPAV

SEQ ID NO: 29738 - protein, 979 aa, synthetic construct
  REGION 1..979: note = engineered CasX variant
QEIKRINKIRRRLVKDSNTKKAGKTGPMKTLLVRVMTPDLRERLENLRKKPENIPQPISNTSRANLNKLLTDYTEMKKAILHVYWEEFQKDPVGLMSRVAQPASKKIDQNKLKPEMDEKGNLTTAGFACSQCGQPLFVYKLEQVSEKGKAYTNYFGRCNVAEHEKLILLAQLKPEKDSDEAVTYSLGKFGQRALDFYSIHVTKESTHPVKPLAQIAGNRYASGPVGKALSDACMGTIASFLSKYQDIIIEHQKVVKGNQKRLESLRELAGKENLEYPSVTLPPQPHTKEGVDAYNEVIARVRMWVNLNLWQKLKLSRDDAKPLLRLKGFPSFPLVERQANEVDWWDMVCNVKKLINEKKEDGKVFWQNLAGYKRQEALRPYLSSEEDRKKGKKFARYQLGDLLLHLEKKHGERDWGKVYDEAWERIDKKVEGLSKHIKLEEERRSEDAQSKAALTDWLRAKASFVIEGLKEADKDEFCRCELKLQKWYGDLRGKPFAIEAENSILDISGFSKQYNCAFIWQKDGVKKLNLYLIINYFKGGKLRFKKIKPEAFEANRFYTVINKKSGEIVPMEVNFNFDDPNLIILPLAFGKRQGREFIWNDLLSLETGSLKLANGRVIEKTLYNRRTRQDEPALFVALTFERREVLDSSNIKPMNLIGVDRGENIPAVIALTDPEGCPLSRFKDSLGNPTHILRIGESYKEKQRTIQAKKEVEQRRAGGYSRKYASKAKNLADDMVRNTARDLLYYAVTQDAMLIFENLSRGFGRQGKRTFMAERQYTRMEDWLTAKLAYEGLPSKTYLSKTLAQYTSKTCSNCGFTITSADYDRVLEKLKKTATGWMTTINGKELKVEGQITYYNRYKRQNVVKDLSVELDRLSEESVNNDISSWDKGRSGEALSLLKKRFSHRPVQEKFVCLNCGFETHADEQAALNIARSWLFLRSQEYKKYQTNKTTGNTDKRAFVETWQSFYRKKLKEVWKPAV

SEQ ID NO: 29739 - protein, 979 aa, synthetic construct
  REGION 1..979: note = engineered CasX variant
QEIKRINKIRRRLVKDSNTKKAGKTGPMKTLLVRVMTPDLRERLENLRKKPENIPQPISNTSRANLNKLLTDYTEMKKAILHVYWEEFQKDPVGLMSRVAQPASKKIDQNKLKPEMDEKGNLTTAGFACSQCGQPLFVYKLEQVSEKGKAYTNYFGRCNVAEHEKLILLAQLKPEKDSDEAVTYSLGKFGQRALDFYSIHVTKESTHPVKPLAQIAGNRYASGPVGKALSDACMGTIASFLSKYQDIIIEHQKVVKGNQKRLESLRELAGKENLEYPSVTLPPQPHTKEGVDAYNEVIARVRMWVNLNLWQKLKLSRDDAKPLLRLKGFPSFPLVERQANEVDWWDMVCNVKKLINEKKEDGKVFWQNLAGYKRQEALRPYLSSEEDRKKGKKFARYQLGDLLLHLEKKHGEYDWGKVYDEAWERIDKKVEGLSKHIKLEEERRSEDAQSKAALTDWLRAKASFVIEGLKEADKDEFCRCELKLQKWYGDLRGKPFAIEAENSILDISGFSKQYNCAFIWQKDGVKKLNLYLIINYFKGGKLRFKKIKPEAFEANRFYTVINKKSGEIVPMEVNFNFDDPNLIILPLAFGKRQGREFIWNDLLSLETGSLKLANGRVIEKTLYNRRTRQDEPALFVALTFERREVLDSSNIKPMNLIGVDRGENIPAVIALTDPEGCPLSRFKDSLGNPTHILRIGESYKEKQRTIQAKKEVEQRRAGGYSRKYASKAKNLADDMVRNTARDLLYYAVTQDAMLIFENLSRGFGRQGKRTFMAERQYTRMEDWLTAKLAYEGLPSKTYLSKTLAQYTSKTCSNCGFTITSADYDRVLEKLKKTATGWMTTINGKELKVEGQITYYNRYKRQNVVKDLSVELDRLSEESVNNDISSWDKGRSGEALSLLKKRFSHRPVQEKFVCLNCGFETHADEQAALNIARSWLFLRSQEYKKYQTNKTTGNTDKRAFVETWQSFYRKKLKEVWKPAV

SEQ ID NO: 29740 - protein, 978 aa, synthetic construct
  REGION 1..978: note = engineered CasX variant
QEIKRINKIRRRLVKDSNTKKAGKTGPMKTLLVRVMTPDLRERLENLRKKPENIPQPISNTSRANLNKLLTDYTEMKKAILHVYWEEFQKDPVGLMSRVAQPASKKIDQNKLKPEMDEKGNLTTAGFACSQCGQPLFVYKLEQVSEKGKAYTNYFGRCNVAEHEKLILLAQLKPEKDSDEAVTYSLGKFGQRALDFYSIHVTKESTHPVKPLAQIAGNRYASGPVGKALSDACMGTIASFLSKYQDIIIEHQKVVKGNQKRLESLRELAGKENLEYPSVTLPPQPHTKEGVDAYNEVIARVRMWVNLNLWQKLKLSRDDAKPLLRLKGFPSFPLVERQANEVDWWDMVCNVKKLINEKKEDGKVFWQNLAGYKRQEALRPYLSSEEDRKKGKKFARYQLGDLLLHLEKKHGEDWGDVYDEAWERIDKKVEGLSKHIKLEEERRSEDAQSKAALTDWLRAKASFVIEGLKEADKDEFCRCELKLQKWYGDLRGKPFAIEAENSILDISGFSKQYNCAFIWQKDGVKKLNLYLIINYFKGGKLRFKKIKPEAFEANRFYTVINKKSGEIVPMEVNFNFDDPNLIILPLAFGKRQGREFIWNDLLSLETGSLKLANGRVIEKTLYNRRTRQDEPALFVALTFERREVLDSSNIKPMNLIGVDRGENIPAVIALTDPEGCPLSRFKDSLGNPTHILRIGESYKEKQRTIQAKKEVEQRRAGGYSRKYASKAKNLADDMVRNTARDLLYYAVTQDAMLIFENLSRGFGRQGKRTFMAERQYTRMEDWLTAKLAYEGLPSKTYLSKTLAQYTSKTCSNCGFTITSADYDRVLEKLKKTATGWMTTINGKELKVEGQITYYNRYKRQNVVKDLSVELDRLSEESVNNDISSWDKGRSGEALSLLKKRFSHRPVQEKFVCLNCGFETHADEQAALNIARSWLFLRSQEYKKYQTNKTTGNTDKRAFVETWQSFYRKKLKEVWKPAV

SEQ ID NO: 29741 - protein, 978 aa, synthetic construct
  REGION 1..978: note = engineered CasX variant
QEIKRINKIRRRLVKDSNTKKAGKTGPMKTLLVRVMTPDLRERLENLRKKPENIPQPISNTSRANLNKLLTDYTEMKKAILHVYWEEFQKDPVGLMSRVAQPASKKIDQNKLKPEMDEKGNLTTAGFACSQCGQPLFVYKLEQVSEKGKAYTNYFGRCNVAEHEKLILLAQLKPEKDSDEAVTYSLGKFGQRALDFYSIHVTKESTHPVKPLAQIAGNRYASGPVGKALSDACMGTIASFLSKYQDIIIEHQKVVKGNQKRLESLRELAGKENLEYPSVTLPPQPHTKEGVDAYNEVIARVRMWVNLNLWQKLKLSRDDAKPLLRLKGFPSFPLVERQANEVDWWDMVCNVKKLINEKKEDGKVFWQNLAGYKRQEALRPYLSSEEDRKKGKKFARYQLGDLLLHLEKKHGEDWGKVYGEAWERIDKKVEGLSKHIKLEEERRSEDAQSKAALTDWLRAKASFVIEGLKEADKDEFCRCELKLQKWYGDLRGKPFAIEAENSILDISGFSKQYNCAFIWQKDGVKKLNLYLIINYFKGGKLRFKKIKPEAFEANRFYTVINKKSGEIVPMEVNFNFDDPNLIILPLAFGKRQGREFIWNDLLSLETGSLKLANGRVIEKTLYNRRTRQDEPALFVALTFERREVLDSSNIKPMNLIGVDRGENIPAVIALTDPEGCPLSRFKDSLGNPTHILRIGESYKEKQRTIQAKKEVEQRRAGGYSRKYASKAKNLADDMVRNTARDLLYYAVTQDAMLIFENLSRGFGRQGKRTFMAERQYTRMEDWLTAKLAYEGLPSKTYLSKTLAQYTSKTCSNCGFTITSADYDRVLEKLKKTATGWMTTINGKELKVEGQITYYNRYKRQNVVKDLSVELDRLSEESVNNDISSWDKGRSGEALSLLKKRFSHRPVQEKFVCLNCGFETHADEQAALNIARSWLFLRSQEYKKYQTNKTTGNTDKRAFVETWQSFYRKKLKEVWKPAV

SEQ ID NO: 29742 - protein, 978 aa, synthetic construct
  REGION 1..978: note = engineered CasX variant
QEIKRINKIRRRLVKDSNTKKAGKTGPMKTLLVRVMTPDLRERLENLRKKPENIPQPISNTSRANLNKLLTDYTEMKKAILHVYWEEFQKDPVGLMSRVAQPASKKIDQNKLKPEMDEKGNLTTAGFACSQCGQPLFVYKLEQVSEKGKAYTNYFGRCNVAEHEKLILLAQLKPEKDSDEAVTYSLGKFGQRALDFYSIHVTKESTHPVKPLAQIAGNRYASGPVGKALSDACMGTIASFLSKYQDIIIEHQKVVKGNQKRLESLRELAGKENLEYPSVTLPPQPHTKEGVDAYNEVIARVRMWVNLNLWQKLKLSRDDAKPLLRLKGFPSFPLVERQANEVDWWDMVCNVKKLINEKKEDGKVFWQNLAGYKRQEALRPYLSSEEDRKKGKKFARYQLGDLLLHLEKKHGEDWGKVYDEAWERIDKKVEGLSKHIKLEEERRSEDAQSKAALTDWLRAKASFVIEGKKEADKDEFCRCELKLQKWYGDLRGKPFAIEAENSILDISGFSKQYNCAFIWQKDGVKKLNLYLIINYFKGGKLRFKKIKPEAFEANRFYTVINKKSGEIVPMEVNFNFDDPNLIILPLAFGKRQGREFIWNDLLSLETGSLKLANGRVIEKTLYNRRTRQDEPALFVALTFERREVLDSSNIKPMNLIGVDRGENIPAVIALTDPEGCPLSRFKDSLGNPTHILRIGESYKEKQRTIQAKKEVEQRRAGGYSRKYASKAKNLADDMVRNTARDLLYYAVTQDAMLIFENLSRGFGRQGKRTFMAERQYTRMEDWLTAKLAYEGLPSKTYLSKTLAQYTSKTCSNCGFTITSADYDRVLEKLKKTATGWMTTINGKELKVEGQITYYNRYKRQNVVKDLSVELDRLSEESVNNDISSWDKGRSGEALSLLKKRFSHRPVQEKFVCLNCGFETHADEQAALNIARSWLFLRSQEYKKYQTNKTTGNTDKRAFVETWQSFYRKKLKEVWKPAV

SEQ ID NO: 29743 - protein, 978 aa, synthetic construct
  REGION 1..978: note = engineered CasX variant
QEIKRINKIRRRLVKDSNTKKAGKTGPMKTLLVRVMTPDLRERLENLRKKPENIPQPISNTSRANLNKLLTDYTEMKKAILHVYWEEFQKDPVGLMSRVAQPASKKIDQNKLKPEMDEKGNLTTAGFACSQCGQPLFVYKLEQVSEKGKAYTNYFGRCNVAEHEKLILLAQLKPEKDSDEAVTYSLGKFGQRALDFYSIHVTKESTHPVKPLAQIAGNRYASGPVGKALSDACMGTIASFLSKYQDIIIEHQKVVKGNQKRLESLRELAGKENLEYPSVTLPPQPHTKEGVDAYNEVIARVRMWVNLNLWQKLKLSRDDAKPLLRLKGFPSFPLVERQANEVDWWDMVCNVKKLINEKKEDGKVFWQNLAGYKRQEALRPYLSSEEDRKKGKKFARYQLGDLLLHLEKKHGEDWGKVYDEAWERIDKKVEGLSKHIKLEEERRSEDAQSKAALTDWLRAKASFVIEGSKEADKDEFCRCELKLQKWYGDLRGKPFAIEAENSILDISGFSKQYNCAFIWQKDGVKKLNLYLIINYFKGGKLRFKKIKPEAFEANRFYTVINKKSGEIVPMEVNFNFDDPNLIILPLAFGKRQGREFIWNDLLSLETGSLKLANGRVIEKTLYNRRTRQDEPALFVALTFERREVLDSSNIKPMNLIGVDRGENIPAVIALTDPEGCPLSRFKDSLGNPTHILRIGESYKEKQRTIQAKKEVEQRRAGGYSRKYASKAKNLADDMVRNTARDLLYYAVTQDAMLIFENLSRGFGRQGKRTFMAERQYTRMEDWLTAKLAYEGLPSKTYLSKTLAQYTSKTCSNCGFTITSADYDRVLEKLKKTATGWMTTINGKELKVEGQITYYNRYKRQNVVKDLSVELDRLSEESVNNDISSWDKGRSGEALSLLKKRFSHRPVQEKFVCLNCGFETHADEQAALNIARSWLFLRSQEYKKYQTNKTTGNTDKRAFVETWQSFYRKKLKEVWKPAV

SEQ ID NO: 29744 - protein, 979 aa, synthetic construct
  REGION 1..979: note = engineered CasX variant
QEIKRINKIRRRLVKDSNTKKAGKTGPMKTLLVRVMTPDLRERLENLRKKPENIPQPISNTSRANLNKLLTDYTEMKKAILHVYWEEFQKDPVGLMSRVAQPASKKIDQNKLKPEMDEKGNLTTAGFACSQCGQPLFVYKLEQVSEKGKAYTNYFGRCNVAEHEKLILLAQLKPEKDSDEAVTYSLGKFGQRALDFYSIHVTKESTHPVKPLAQIAGNRYASGPVGKALSDACMGTIASFLSKYQDIIIEHQKVVKGNQKRLESLRELAGKENLEYPSVTLPPQPHTKEGVDAYNEVIARVRMWVNLNLWQKLKLSRDDAKPLLRLKGFPSFPLVERQANEVDWWDMVCNVKKLINEKKEDGKVFWQNLAGYKRQEALRPYLSSEEDRKKGKKFARYQLGDLLLHLEKKHGEDWGKVYDEAWERIDKKVEGLSKHIKLEEERRSEDAQSKAALTDWLRAKASFVIEGLKEADDKDEFCRCELKLQKWYGDLRGKPFAIEAENSILDISGFSKQYNCAFIWQKDGVKKLNLYLIINYFKGGKLRFKKIKPEAFEANRFYTVINKKSGEIVPMEVNFNFDDPNLIILPLAFGKRQGREFIWNDLLSLETGSLKLANGRVIEKTLYNRRTRQDEPALFVALTFERREVLDSSNIKPMNLIGVDRGENIPAVIALTDPEGCPLSRFKDSLGNPTHILRIGESYKEKQRTIQAKKEVEQRRAGGYSRKYASKAKNLADDMVRNTARDLLYYAVTQDAMLIFENLSRGFGRQGKRTFMAERQYTRMEDWLTAKLAYEGLPSKTYLSKTLAQYTSKTCSNCGFTITSADYDRVLEKLKKTATGWMTTINGKELKVEGQITYYNRYKRQNVVKDLSVELDRLSEESVNNDISSWDKGRSGEALSLLKKRFSHRPVQEKFVCLNCGFETHADEQAALNIARSWLFLRSQEYKKYQTNKTTGNTDKRAFVETWQSFYRKKLKEVWKPAV

SEQ ID NO: 29745 - protein, 979 aa, synthetic construct
  REGION 1..979: note = engineered CasX variant
QEIKRINKIRRRLVKDSNTKKAGKTGPMKTLLVRVMTPDLRERLENLRKKPENIPQPISNTSRANLNKLLTDYTEMKKAILHVYWEEFQKDPVGLMSRVAQPASKKIDQNKLKPEMDEKGNLTTAGFACSQCGQPLFVYKLEQVSEKGKAYTNYFGRCNVAEHEKLILLAQLKPEKDSDEAVTYSLGKFGQRALDFYSIHVTKESTHPVKPLAQIAGNRYASGPVGKALSDACMGTIASFLSKYQDIIIEHQKVVKGNQKRLESLRELAGKENLEYPSVTLPPQPHTKEGVDAYNEVIARVRMWVNLNLWQKLKLSRDDAKPLLRLKGFPSFPLVERQANEVDWWDMVCNVKKLINEKKEDGKVFWQNLAGYKRQEALRPYLSSEEDRKKGKKFARYQLGDLLLHLEKKHGEDWGKVYDEAWERIDKKVEGLSKHIKLEEERRSEDAQSKAALTDWLRAKASFVIEGLKEADKDEFCRCELKLQKWYGDLRGKPFAIEAENSILDISGFSKQYNCAFIWQKDGVKKLNLYLIINYFKGGKLRFKKIKPEAFEANRFYTVINKKSGEIVPMEVNFNFDDPNLIILPLAFGKRQGREFIWNDLLSLETGSLKLANGRVIEKTLYNRRTRQDEPALFVALTFERREVLDSSNIKPMNLIGVDRGENIPAVIALTDPEGCPLSRFKDSLGNPTHILRIGESYKEKQRTIQAKKEVEQRRAGGYSRKYASKAKNLADDMVRNTARDLLYYAVTQDAMLIFENLSRGFGRQGKRTFMAERQYTRMEDWLTAKLAYEGLPSKTYLSKTLAQYTSKTCSNCGFTITSADYDRVLEKLKKTATGWMTTINGKELKVEGQITYYNRYKRQNVVKDLSVELDRLSEESVNNDISSWDKGRSGNEALSLLKKRFSHRPVQEKFVCLNCGFETHADEQAALNIARSWLFLRSQEYKKYQTNKTTGNTDKRAFVETWQSFYRKKLKEVWKPAV

SEQ ID NO: 29746 - protein, 978 aa, synthetic construct
  REGION 1..978: note = engineered CasX variant
QEIKRINKIRRRLVKDSNTKKAGKTGPMKTLLVRVMTPDLRERLENLRKKPENIPQPISNTSRANLNKLLTDYTEMKKAILHVYWEEFQKDPVGLMSRVAQPASKKIDQNKLKPEMDEKGNLTTAGFACSQCGQPLFVYKLEQVSEKGKAYTNYFGRCNVAEHEKLILLAQLKPEKDSDEAVTYSLGKFGQRALDFYSIHVTKESTHPVKPLAQIAGNRYASGPVGKALSDACMGTIASFLSKYQDIIIEHQKVVKGNQKRLESLRELAGKENLEYPSVTLPPQPHTKEGVDAYNEVIARVRMWVNLNLWQKLKLSRDDAKPLLRLKGFPSFPLVERQANEVDWWDMVCNVKKLINEKKEDGKVFWQNLAGYKRQEALRPYLSSEEDRQKGKKFARYQLGDLLLHLEKKHGEDWGKVYDEAWERIDKKVEGLSKHIKLEEERRSEDAQSKAALTDWLRAKASFVIEGLKEADKDEFCRCELKLQKWYGDLRGKPFAIEAENSILDISGFSKQYNCAFIWQKDGVKKLNLYLIINYFKGGKLRFKKIKPEAFEANRFYTVINKKSGEIVPMEVNFNFDDPNLIILPLAFGKRQGREFIWNDLLSLETGSLKLANGRVIEKTLYNRRTRQDEPALFVALTFERREVLDSSNIKPMNLIGVDRGENIPAVIALTDPEGCPLSRFKDSLGNPTHILRIGESYKEKQRTIQAKKEVEQRRAGGYSRKYASKAKNLADDMVRNTARDLLYYAVTQDAMLIFENLSRGFGRQGKRTFMAERQYTRMEDWLTAKLAYEGLPSKTYLSKTLAQYTSKTCSNCGFTITSADYDRVLEKLKKTATGWMTTINGKELKVEGQITYYNRYKRQNVVKDLSVELDRLSEESVNNDISSWDKGRSGEALSLLKKRFSHRPVQEKFVCLNCGFETHADEQAALNIARSWLFLRSQEYKKYQTNKTTGNTDKRAFVETWQSFYRKKLKEVWKPAV

SEQ ID NO: 29747 - protein, 978 aa, synthetic construct
  REGION 1..978: note = engineered CasX variant
QEIKRINKIRRRLVKDSNTKKAGKTGPMKTLLVRVMTPDLRERLENLRKKPENIPQPISNTSRANLNKLLTDYTEMKKAILHVYWEEFQKDPVGLMSRVAQPASKKIDQNKLKPEMDEKGNLTTAGFACSQCGQPLFVYKLEQVSEKGKAYTNYFGRCNVAEHEKLILLAQLKPEKDSDEAVTYSLGKFGQRALDFYSIHVTKESTHPVKPLAQIAGNRYASGPVGKALSDACMGTIASFLSKYQDIIIEHQKVVKGNQKRLESLRELAGKENLEYPSVTLPPQPHTKEGVDAYNEVIARVRMWVNLNLWQKLKLSRDDAKPLLRLKGFPSFPLVERQANEVDWWDMVCNVKKLINEKKEDGKVFWQNLAGYKRQEALRPYLSSEEDRKKGKKFARYQLGDLLLHLEKKHGEDWGKVYDEAWERIDKKVEGLSKHIKLEEERRSEDAQSKAALTDWLRAKASFVIEGLKEADKDEFCRCELKLQKWYGDLRGKPFAIEAENSILDISGFSKQYNCAFIWQKDGVKKLNLYLIINYFKGGKLRFKKIKPEAFEANRFYTVINKKSGEIVPMEVNFNFDDPNLIILPLAFGKRQGREFIWNDLLSLETGSLKLANGRVIEKTLYNRRTRQDEPALFVALTFERREVLDSSNIKPMNLIGVDRGENIPAVIALTDPEGCPLSRFKDSLGNPTHILRIGESYKEKQRTIQAKKEVEQRRAGGYSRKYASKAKNLADDMVRNTARDLLYYAVTQDAMLIFENLSRGFGRQGKRTFMAERQYTRMEDWLTAKLAYEGLPSQTYLSKTLAQYTSKTCSNCGFTITSADYDRVLEKLKKTATGWMTTINGKELKVEGQITYYNRYKRQNVVKDLSVELDRLSEESVNNDISSWDKGRSGEALSLLKKRFSHRPVQEKFVCLNCGFETHADEQAALNIARSWLFLRSQEYKKYQTNKTTGNTDKRAFVETWQSFYRKKLKEVWKPAV

SEQ ID NO: 29748 - protein, 978 aa, synthetic construct
  REGION 1..978: note = engineered CasX variant
QEIKRINKIRRRLVKDSNTKKAGKTGPMKTLLVRVMTPDLRERLENLRKKPENIPQPISNTSRANLNKLLTDYTEMKKAILHVYWEEFQKDPVGLMSRVAQPASKKIDQNKLKPEMDEKGNLTTAGFACSQCGQPLFVYKLEQVSEKGKAYTNYFGRCNVAEHEKLILLAQLKPEKDSDEAVTYSLGKFGQRALDFYSIHVTKESTHPVKPLAQIAGNRYASGPVGKALSDACMGTIASFLSKYQDIIIEHQKVVKGNQKRLESLRELAGKENLEYPSVTLPPQPHTKEGVDAYNEVIARVRMWVNLNLWQKLKLSRDDAKPLLRLKGFPSFPLVERQANEVDWWDMVCNVKKLINEKKEDGKVFWQNLAGYKRQEALRPYLSSEEDRKKGKKFARYQLGDLLLHLEKKHGEDWGKVYDEAWERIDKKVEGLSKHIKLEEERRSEDAQSKAALTDWLRAKASFVIEGLKEADKDEFCRCELKLQKWYGDLRGKPFAIEAENSILDISGFSKQYNCAFIWQKDGVKKLNLYLIINYFKGGKLRFKKIKPEAFEANRFYTVINKKSGEIVPMEVNFNFDDPNLIILPLAFGKRQGREFIWNDLLSLETGSLKLANGRVIEKTLYNRRTRQDEPALFVALTFERREVLDSSNIKPMNLIGVDRGENIPAVIALTDPEGCPLSRFKDSLGNPTHILRIGESYKEKQRTIQAKKEVEQRRAGGYSRKYASKAKNLADDMVRNTARDLLYYAVTQDAMLIFENLSRGFGRQGKRTFMAERQYTRMEDWLTAKLAYNGLPSKTYLSKTLAQYTSKTCSNCGFTITSADYDRVLEKLKKTATGWMTTINGKELKVEGQITYYNRYKRQNVVKDLSVELDRLSEESVNNDISSWDKGRSGEALSLLKKRFSHRPVQEKFVCLNCGFETHADEQAALNIARSWLFLRSQEYKKYQTNKTTGNTDKRAFVETWQSFYRKKLKEVWKPAV

SEQ ID NO: 29749 - protein, 978 aa, synthetic construct
  REGION 1..978: note = engineered CasX variant
QEIKRINKIRRRLVKDSNTKKAGKTGPMKTLLVRVMTPDLRERLENLRKKPENIPQPISNTSRANLNKLLTDYTEMKKAILHVYWEEFQKDPVGLMSRVAQPASKKIDQNKLKPEMDEKGNLTTAGFACSQCGQPLFVYKLEQVSEKGKAYTNYFGRCNVAEHEKLIQLAQLKPEKDSDEAVTYSLGKFGQRALDFYSIHVTKESTHPVKPLAQIAGNRYASGPVGKALSDACMGTIASFLSKYQDIIIEHQKVVKGNQKRLESLRELAGKENLEYPSVTLPPQPHTKEGVDAYNEVIARVRMWVNLNLWQKLKLSRDDAKPLLRLKGFPSFPLVERQANEVDWWDMVCNVKKLINEKKEDGKVFWQNLAGYKRQEALRPYLSSEEDRKKGKKFARYQLGDLLLHLEKKHGEDWGKVYDEAWERIDKKVEGLSKHIKLEEERRSEDAQSKAALTDWLRAKASFVIEGLKEADKDEFCRCELKLQKWYGDLRGKPFAIEAENSILDISGFSKQYNCAFIWQKDGVKKLNLYLIINYFKGGKLRFKKIKPEAFEANRFYTVINKKSGEIVPMEVNFNFDDPNLIILPLAFGKRQGREFIWNDLLSLETGSLKLANGRVIEKTLYNRRTRQDEPALFVALTFERREVLDSSNIKPMNLIGVDRGENIPAVIALTDPEGCPLSRFKDSLGNPTHILRIGESYKEKQRTIQAKKEVEQRRAGGYSRKYASKAKNLADDMVRNTARDLLYYAVTQDAMLIFENLSRGFGRQGKRTFMAERQYTRMEDWLTAKLAYEGLPSKTYLSKTLAQYTSKTCSNCGFTITSADYDRVLEKLKKTATGWMTTINGKELKVEGQITYYNRYKRQNVVKDLSVELDRLSEESVNNDISSWDKGRSGEALSLLKKRFSHRPVQEKFVCLNCGFETHADEQAALNIARSWLFLRSQEYKKYQTNKTTGNTDKRAFVETWQSFYRKKLKEVWKPAV

SEQ ID NO: 29750 - protein, 978 aa, synthetic construct
  REGION 1..978: note = engineered CasX variant
QEIKRINKIRRRLVKDSNTKKAGKTGPMKTLLVRVMTPDLRERLENLRKKPENIPQPISNTSRANLNKLLTDYTEMKKAILHVYWEEFQKDPVGLMSRVAQPASKKIDQNKLKPEMDEKGNLTTAGFACSQCGQPLFVYKLEQVSEKGKAYTNYFGRCNVAEHEKLILLAQLKPEKDSDEAVTYSLGKFGQRALDFYSIHVTKESTHPVKPLAQIAGNRYASGPVGKALSDACMGTIASFLSKYQDIIIEHQKVVKGNQKRLESLRELAGKENLEYPSVTLPPQPHTKEGVDAYNEVIARVRMWVNLNLWQKLKLSRDDAKPLLRLKGFPSFPLVERQANEVDWWDMVCNVKKLINEKKEDGKVFWQNLAIYKRQEALRPYLSSEEDRKKGKKFARYQLGDLLLHLEKKHGEDWGKVYDEAWERIDKKVEGLSKHIKLEEERRSEDAQSKAALTDWLRAKASFVIEGLKEADKDEFCRCELKLQKWYGDLRGKPFAIEAENSILDISGFSKQYNCAFIWQKDGVKKLNLYLIINYFKGGKLRFKKIKPEAFEANRFYTVINKKSGEIVPMEVNFNFDDPNLIILPLAFGKRQGREFIWNDLLSLETGSLKLANGRVIEKTLYNRRTRQDEPALFVALTFERREVLDSSNIKPMNLIGVDRGENIPAVIALTDPEGCPLSRFKDSLGNPTHILRIGESYKEKQRTIQAKKEVEQRRAGGYSRKYASKAKNLADDMVRNTARDLLYYAVTQDAMLIFENLSRGFGRQGKRTFMAERQYTRMEDWLTAKLAYEGLPSKTYLSKTLAQYTSKTCSNCGFTITSADYDRVLEKLKKTATGWMTTINGKELKVEGQITYYNRYKRQNVVKDLSVELDRLSEESVNNDISSWDKGRSGEALSLLKKRFSHRPVQEKFVCLNCGFETHADEQAALNIARSWLFLRSQEYKKYQTNKTTGNTDKRAFVETWQSFYRKKLKEVWKPAV

SEQ ID NO: 29751 - protein, 978 aa, synthetic construct
  REGION 1..978: note = engineered CasX variant
QEIKRINKIRRRLVKDSNTKKAGKTGPMKTLLVRVMTPDLRERLENLRKKPENIPQPISNTSRANLNKLLTDYTEMKKAILHVYWEEFQKDPVGLMSRVAQPASKKIDQNKLKPEMDEKGNLTTAGFACSQCGQPLFVYKLEQVSEKGKAYTNYFGRCNVAEHEKLILLAQLKPEKDSDEAVTYSLGKFGQRALDFYSIHVTKESTHPVKPLAQIAGNRYASGPVGKALSDACMGTIASFLSKYQDIIIEHQKVVKGNQKRLESLRELAGKENLEYPSVTLPPQPHTKEGVDAYNEVIARVRMWVNLNLWQKLKLSRDDAKPLLRLKGFPSFPLVERQANEVDWWDMVCNVKKLINEKKEDGKVFWQNLAGYKRQEALRPYLSSEEDREKGKKFARYQLGDLLLHLEKKHGEDWGKVYDEAWERIDKKVEGLSKHIKLEEERRSEDAQSKAALTDWLRAKASFVIEGLKEADKDEFCRCELKLQKWYGDLRGKPFAIEAENSILDISGFSKQYNCAFIWQKDGVKKLNLYLIINYFKGGKLRFKKIKPEAFEANRFYTVINKKSGEIVPMEVNFNFDDPNLIILPLAFGKRQGREFIWNDLLSLETGSLKLANGRVIEKTLYNRRTRQDEPALFVALTFERREVLDSSNIKPMNLIGVDRGENIPAVIALTDPEGCPLSRFKDSLGNPTHILRIGESYKEKQRTIQAKKEVEQRRAGGYSRKYASKAKNLADDMVRNTARDLLYYAVTQDAMLIFENLSRGFGRQGKRTFMAERQYTRMEDWLTAKLAYEGLPSKTYLSKTLAQYTSKTCSNCGFTITSADYDRVLEKLKKTATGWMTTINGKELKVEGQITYYNRYKRQNVVKDLSVELDRLSEESVNNDISSWDKGRSGEALSLLKKRFSHRPVQEKFVCLNCGFETHADEQAALNIARSWLFLRSQEYKKYQTNKTTGNTDKRAFVETWQSFYRKKLKEVWKPAV

SEQ ID NO: 29752 - protein, 978 aa, synthetic construct
  REGION 1..978: note = engineered CasX variant
QEIKRINKIRRRLVKDSNTKKAGKTGPMKTLLVRVMTPDLRERLENLRKKPENIPQPISNTSRANLNKLLTDYTEMKKAILHVYWEEFQKDPVGLMSRVAQPASKKIDQNKLKPEMDEKGNLTTAGFACSQCGQPLFVYKLEQVSEKGKAYTNYFGRCNVAEHEKLILLAQLKPEKDSDEAVTYSLGKFGQRALDFYSIHVTKESTHPVKPLAQIAGNRYASGPVGKALSDACMGTIASFLSKYQDIIIEHQKVVKGNQKRLESLRELAGKENLEYPSVTLPPQPHTKEGVDAYNEVIARVRMWVNLNLWQKLKLSRDDAKPLLRLKGFPSFPLVERQANEVDWWDMVCNVKKLINEKKEDGKVFWQNLAGYKRQEALRPYLSSEEDRKKGKKFARYQLGDLLLHLEKKHGEDWGKVYDEAWERIDKKVEGLSKHIKLEEERRSEDAQSKAALTDWLRAKASFVIEGLKEADKDEFCRCELKLQKWYGDLRGKPFAIEAENSILDISGFSKQYNCAFIWQKDGVKKLNLYLIINYFKGGKLRFKKIKPEAFEANRFYTVINKKSGEIVIMEVNFNFDDPNLIILPLAFGKRQGREFIWNDLLSLETGSLKLANGRVIEKTLYNRRTRQDEPALFVALTFERREVLDSSNIKPMNLIGVDRGENIPAVIALTDPEGCPLSRFKDSLGNPTHILRIGESYKEKQRTIQAKKEVEQRRAGGYSRKYASKAKNLADDMVRNTARDLLYYAVTQDAMLIFENLSRGFGRQGKRTFMAERQYTRMEDWLTAKLAYEGLPSKTYLSKTLAQYTSKTCSNCGFTITSADYDRVLEKLKKTATGWMTTINGKELKVEGQITYYNRYKRQNVVKDLSVELDRLSEESVNNDISSWDKGRSGEALSLLKKRFSHRPVQEKFVCLNCGFETHADEQAALNIARSWLFLRSQEYKKYQTNKTTGNTDKRAFVETWQSFYRKKLKEVWKPAV

SEQ ID NO: 29753 - protein, 978 aa, synthetic construct
  REGION 1..978: note = engineered CasX variant
QEIKRINKIRRRLVKDSNTKKAGKTGPMKTLLVRVMTPDLRERLENLRKKPENIPQPISNTSRANLNKLLTDYTEMKKAILHVYWEEFQVDPVGLMSRVAQPASKKIDQNKLKPEMDEKGNLTTAGFACSQCGQPLFVYKLEQVSEKGKAYTNYFGRCNVAEHEKLILLAQLKPEKDSDEAVTYSLGKFGQRALDFYSIHVTKESTHPVKPLAQIAGNRYASGPVGKALSGACMGTIASFLSKYQDIIIEHQKVVKGNQKRLESLRELAGKENLEYPSVTLPPQPHTKEGVDAYNEVIARVRMWVNLNLWQKLKLSRDDAKPLLRLKGFPSFPLVERQANEVDWWDMVCNVKKLINEKKEDGKVFWQNLAGYKRQEALRPYLSSEEDRKKGKKFARYQLGDLLLHLEKKHGEDWGKVYDEAWERIDKKVEGLSKHIKLEEERRSEDAQSKAALTDWLRAKASFVIEGLKEADKDEFCRCELKLQKWYGDLRGKPFAIEAENSILDISGFSKQYNCAFIWQKDGVKKLNLYLIINYFKGGKLRFKKIKPEAFEANRFYTVINKKSGEIVPMEVNFNFDDPNLIILPLAFGKRQGREFIWNDLLSLETGSLKLANGRVIEKTLYNRRTRQDEPALFVALTFERREVLDSSNIKPMNLIGVDRGENIPAVIALTDPEGCPLSRFKDSLGNPTHILRIGESYKEKQRTIQAKKEVEQRRAGGYSRKYASKAKNLADDMVRNTARDLLYYAVTQDAMLIFENLSRGFGRQGKRTFMAERQYTRMEDWLTAKLAYEGLPSKTYLSKTLAQYTSKTCSNCGFTITSADYDRVLEKLKKTATGWMTTINGKELKVEGQITYYNRYKRQNVVKDLSVELDRLSEESVNNDISSWTKGRSGEALSLLKKRFSHRPVQEKFVCLNCGFETHADEQAALNIARSWLFLRSQEYKKYQTNKTTGNTDKRAFVETWQSFYRKKLKEVWKPAV

SEQ ID NO: 29754 - protein, 978 aa, synthetic construct
  REGION 1..978: note = engineered CasX variant
QEIKRINKIRRRLVKDSNTKKAGKTGPMKTLLVRVMTPDLRERLENLRKKPENIPQPISNTSRANLNKLLTDYTEMKKAILHVYWEEFQVDPVGLMSRVAQPASKKIDQNKLKPEMDEKGNLTTAGFACSQCGQPLFVYKLEQVSEKGKAYTNYFGRCNVAEHEKLILLAQLKPEKDSDEAVTYSLGKFGQRALDFYSIHVTKESTHPVKPLAQIAGNRYASGPVGKALSDACMGTIASFLSKYQDIIIEHQKVVKGNQKRLESLRELAGKENLEYPSVTLPPQPHTKEGVDAYNEVIARVRMWVNLNLWQKLKLSRDDAKPLLRLKNFPSFPLVERQANEVDWWDMVCNVKKLINEKKEDGKVFWQNLAGYKRQEALRPYLSSEEDRKKGKKFARYQLGDLLLHLEKKHGEDWGKVYDEAWERIDKKVEGLSKHIKLEEERRSEDAQSKAALTDWLRAKASFVIEGLKEADKDEFCRCELKLQKWYGDLRGKPFAIEAENSILDISGFSKQYNCAFIWQKDGVKKLNLYLIINYFKGGKLRFKKIKPEAFEANRFYTVINKKSGEIVPMEVNFNFDDPNLIILPLAFGKRQGREFIWNDLLSLETGSLKLANGRVIEKTLYNRRTRQDEPALFVALTFERREVLDSSNIKPMNLIGVDRGENIPAVIALTDPEGCPLSRFKDSLGNPTHILRIGESYKEKQRTIQAKKEVEQRRAGGYSRKYASKAKNLADDMVRNTARDLLYYAVTQDAMLIFENLSRGFGRQGKRTFMAERQYTRMEDWLTAKLAYEGLPSKTYLSKTLAQYTSKTCSNCGFTITSADYDRVLEKLKKTATGWMTTINGKELKVEGQITYYNRYKRQNVVKDLSVELDRLSEESVNNDISSWTKGRSGEALSLLKKRFSHRPVQEKFVCLNCGFETHADEQAALNIARSWLFLRSQEYKKYQTNKTTGNTDKRAFVETWQSFYRKKLKEVWKPAV

SEQ ID NO: 29755 - protein, 978 aa, synthetic construct
  REGION 1..978: note = engineered CasX variant
QEIKRINKIRRRLVKDSNTKKAGKTGPMKTLLVRVMTPDLRERLENLRKKPENIPQPISNTSRANLNKLLTDYTEMKKAILHVYWEEFQVDPVGLMSRVAQPASKKIDQNKLKPEMDEKGNLTTAGFACSQCGQPLFVYKLEQVSEKGKAYTNYFGRCNVAEHEKLILLAQLKPEKDSDEAVTYSLGKFGQRALDFYSIHVTKESTHPVKPLAQIAGNRYASGPVGKALSDACMGTIASFLSKYQDIIIEHQKVVKGNQKRLESLRELAGKENLEYPSVTLPPQPHTKEGVDAYNEVIARVRMWVNLNLWQKLKLSRDDAKPLLRLKGFPSFPLVERQANEVDWWDMVCNVKKLINEKKEDGKVFWQNLAGYKRQEALRPYLSSEEDRKKGKKFARYQLGDLLNHLEKKHGEDWGKVYDEAWERIDKKVEGLSKHIKLEEERRSEDAQSKAALTDWLRAKASFVIEGLKEADKDEFCRCELKLQKWYGDLRGKPFAIEAENSILDISGFSKQYNCAFIWQKDGVKKLNLYLIINYFKGGKLRFKKIKPEAFEANRFYTVINKKSGEIVPMEVNFNFDDPNLIILPLAFGKRQGREFIWNDLLSLETGSLKLANGRVIEKTLYNRRTRQDEPALFVALTFERREVLDSSNIKPMNLIGVDRGENIPAVIALTDPEGCPLSRFKDSLGNPTHILRIGESYKEKQRTIQAKKEVEQRRAGGYSRKYASKAKNLADDMVRNTARDLLYYAVTQDAMLIFENLSRGFGRQGKRTFMAERQYTRMEDWLTAKLAYEGLPSKTYLSKTLAQYTSKTCSNCGFTITSADYDRVLEKLKKTATGWMTTINGKELKVEGQITYYNRYKRQNVVKDLSVELDRLSEESVNNDISSWTKGRSGEALSLLKKRFSHRPVQEKFVCLNCGFETHADEQAALNIARSWLFLRSQEYKKYQTNKTTGNTDKRAFVETWQSFYRKKLKEVWKPAV

SEQ ID NO: 29756 - protein, 978 aa, synthetic construct
  REGION 1..978: note = engineered CasX variant
QEIKRINKIRRRLVKDSNTKKAGKTGPMKTLLVRVMTPDLRERLENLRKKPENIPQPISNTSRANLNKLLTDYTEMKKAILHVYWEEFQVDPVGLMSRVAQPASKKIDQNKLKPEMDEKGNLTTAGFACSQCGQPLFVYKLEQVSEKGKAYTNYFGRCNVAEHEKLILLAQLKPEKDSDEAVTYSLGKFGQRALDFYSIHVTKESTHPVKPLAQIAGNRYASGPVGKALSDACMGTIASFLSKYQDIIIEHQKVVKGNQKRLESLRELAGKENLEYPSVTLPPQPHTKEGVDAYNEVIARVRMWVNLNLWQKLKLSRDDAKPLLRLKGFPSFPLVERQANEVDWWDMVCNVKKLINEKKEDGKVFWQNLAGYKRQEALRPYLSSEEDRKKGKKFARYQLGDLLWHLEKKHGEDWGKVYDEAWERIDKKVEGLSKHIKLEEERRSEDAQSKAALTDWLRAKASFVIEGLKEADKDEFCRCELKLQKWYGDLRGKPFAIEAENSILDISGFSKQYNCAFIWQKDGVKKLNLYLIINYFKGGKLRFKKIKPEAFEANRFYTVINKKSGEIVPMEVNFNFDDPNLIILPLAFGKRQGREFIWNDLLSLETGSLKLANGRVIEKTLYNRRTRQDEPALFVALTFERREVLDSSNIKPMNLIGVDRGENIPAVIALTDPEGCPLSRFKDSLGNPTHILRIGESYKEKQRTIQAKKEVEQRRAGGYSRKYASKAKNLADDMVRNTARDLLYYAVTQDAMLIFENLSRGFGRQGKRTFMAERQYTRMEDWLTAKLAYEGLPSKTYLSKTLAQYTSKTCSNCGFTITSADYDRVLEKLKKTATGWMTTINGKELKVEGQITYYNRYKRQNVVKDLSVELDRLSEESVNNDISSWTKGRSGEALSLLKKRFSHRPVQEKFVCLNCGFETHADEQAALNIARSWLFLRSQEYKKYQTNKTTGNTDKRAFVETWQSFYRKKLKEVWKPAV

SEQ ID NO: 29757 - protein, 978 aa, synthetic construct
  REGION 1..978: note = engineered CasX variant
QEIKRINKIRRRLVKDSNTKKAGKTGPMKTLLVRVMTPDLRERLENLRKKPENIPQPISNTSRANLNKLLTDYTEMKKAILHVYWEEFQVDPVGLMSRVAQPASKKIDQNKLKPEMDEKGNLTTAGFACSQCGQPLFVYKLEQVSEKGKAYTNYFGRCNVAEHEKLILLAQLKPEKDSDEAVTYSLGKFGQRALDFYSIHVTKESTHPVKPLAQIAGNRYASGPVGKALSDACMGTIASFLSKYQDIIIEHQKVVKGNQKRLESLRELAGKENLEYPSVTLPPQPHTKEGVDAYNEVIARVRMWVNLNLWQKLKLSRDDAKPLLRLKGFPSFPLVERQANEVDWWDMVCNVKKLINEKKEDGKVFWQNLAGYKRQEALRPYLSSEEDRKKGKKFARYQLGDLLLHLYKKHGEDWGKVYDEAWERIDKKVEGLSKHIKLEEERRSEDAQSKAALTDWLRAKASFVIEGLKEADKDEFCRCELKLQKWYGDLRGKPFAIEAENSILDISGFSKQYNCAFIWQKDGVKKLNLYLIINYFKGGKLRFKKIKPEAFEANRFYTVINKKSGEIVPMEVNFNFDDPNLIILPLAFGKRQGREFIWNDLLSLETGSLKLANGRVIEKTLYNRRTRQDEPALFVALTFERREVLDSSNIKPMNLIGVDRGENIPAVIALTDPEGCPLSRFKDSLGNPTHILRIGESYKEKQRTIQAKKEVEQRRAGGYSRKYASKAKNLADDMVRNTARDLLYYAVTQDAMLIFENLSRGFGRQGKRTFMAERQYTRMEDWLTAKLAYEGLPSKTYLSKTLAQYTSKTCSNCGFTITSADYDRVLEKLKKTATGWMTTINGKELKVEGQITYYNRYKRQNVVKDLSVELDRLSEESVNNDISSWTKGRSGEALSLLKKRFSHRPVQEKFVCLNCGFETHADEQAALNIARSWLFLRSQEYKKYQTNKTTGNTDKRAFVETWQSFYRKKLKEVWKPAV

SEQ ID NO: 29758 - protein, 978 aa, synthetic construct
  REGION 1..978: note = engineered CasX variant
QEIKRINKIRRRLVKDSNTKKAGKTGPMKTLLVRVMTPDLRERLENLRKKPENIPQPISNTSRANLNKLLTDYTEMKKAILHVYWEEFQVDPVGLMSRVAQPASKKIDQNKLKPEMDEKGNLTTAGFACSQCGQPLFVYKLEQVSEKGKAYTNYFGRCNVAEHEKLILLAQLKPEKDSDEAVTYSLGKFGQRALDFYSIHVTKESTHPVKPLAQIAGNRYASGPVGKALSDACMGTIASFLSKYQDIIIEHQKVVKGNQKRLESLRELAGKENLEYPSVTLPPQPHTKEGVDAYNEVIARVRMWVNLNLWQKLKLSRDDAKPLLRLKGFPSFPLVERQANEVDWWDMVCNVKKLINEKKEDGKVFWQNLAGYKRQEALRPYLSSEEDRKKGKKFARYQLGDLLLHLEKKHPEDWGKVYDEAWERIDKKVEGLSKHIKLEEERRSEDAQSKAALTDWLRAKASFVIEGLKEADKDEFCRCELKLQKWYGDLRGKPFAIEAENSILDISGFSKQYNCAFIWQKDGVKKLNLYLIINYFKGGKLRFKKIKPEAFEANRFYTVINKKSGEIVPMEVNFNFDDPNLIILPLAFGKRQGREFIWNDLLSLETGSLKLANGRVIEKTLYNRRTRQDEPALFVALTFERREVLDSSNIKPMNLIGVDRGENIPAVIALTDPEGCPLSRFKDSLGNPTHILRIGESYKEKQRTIQAKKEVEQRRAGGYSRKYASKAKNLADDMVRNTARDLLYYAVTQDAMLIFENLSRGFGRQGKRTFMAERQYTRMEDWLTAKLAYEGLPSKTYLSKTLAQYTSKTCSNCGFTITSADYDRVLEKLKKTATGWMTTINGKELKVEGQITYYNRYKRQNVVKDLSVELDRLSEESVNNDISSWTKGRSGEALSLLKKRFSHRPVQEKFVCLNCGFETHADEQAALNIARSWLFLRSQEYKKYQTNKTTGNTDKRAFVETWQSFYRKKLKEVWKPAV

SEQ ID NO: 29759 - protein, 979 aa, synthetic construct
  REGION 1..979: note = engineered CasX variant
QEIKRINKIRRRLVKDSNTKKAGKTGPMKTLLVRVMTPDLRERLENLRKKPENIPQPISNTSRANLNKLLTDYTEMKKAILHVYWEEFQVDPVGLMSRVAQPASKKIDQNKLKPEMDEKGNLTTAGFACSQCGQPLFVYKLEQVSEKGKAYTNYFGRCNVAEHEKLILLAQLKPEKDSDEAVTYSLGKFGQRALDFYSIHVTKESTHPVKPLAQIAGNRYASGPVGKALSDACMGTIASFLSKYQDIIIEHQKVVKGNQKRLESLRELAGKENLEYPSVTLPPQPHTKEGVDAYNEVIARVRMWVNLNLWQKLKLSRDDAKPLLRLKGFPSFPLVERQANEVDWWDMVCNVKKLINEKKEDGKVFWQNLAGYKRQEALRPYLSSEEDRKKGKKFARYQLGDLLLHLEKKHGERDWGKVYDEAWERIDKKVEGLSKHIKLEEERRSEDAQSKAALTDWLRAKASFVIEGLKEADKDEFCRCELKLQKWYGDLRGKPFAIEAENSILDISGFSKQYNCAFIWQKDGVKKLNLYLIINYFKGGKLRFKKIKPEAFEANRFYTVINKKSGEIVPMEVNFNFDDPNLIILPLAFGKRQGREFIWNDLLSLETGSLKLANGRVIEKTLYNRRTRQDEPALFVALTFERREVLDSSNIKPMNLIGVDRGENIPAVIALTDPEGCPLSRFKDSLGNPTHILRIGESYKEKQRTIQAKKEVEQRRAGGYSRKYASKAKNLADDMVRNTARDLLYYAVTQDAMLIFENLSRGFGRQGKRTFMAERQYTRMEDWLTAKLAYEGLPSKTYLSKTLAQYTSKTCSNCGFTITSADYDRVLEKLKKTATGWMTTINGKELKVEGQITYYNRYKRQNVVKDLSVELDRLSEESVNNDISSWTKGRSGEALSLLKKRFSHRPVQEKFVCLNCGFETHADEQAALNIARSWLFLRSQEYKKYQTNKTTGNTDKRAFVETWQSFYRKKLKEVWKPAV

SEQ ID NO: 29760 - protein, 979 aa, synthetic construct
  REGION 1..979: note = engineered CasX variant
QEIKRINKIRRRLVKDSNTKKAGKTGPMKTLLVRVMTPDLRERLENLRKKPENIPQPISNTSRANLNKLLTDYTEMKKAILHVYWEEFQVDPVGLMSRVAQPASKKIDQNKLKPEMDEKGNLTTAGFACSQCGQPLFVYKLEQVSEKGKAYTNYFGRCNVAEHEKLILLAQLKPEKDSDEAVTYSLGKFGQRALDFYSIHVTKESTHPVKPLAQIAGNRYASGPVGKALSDACMGTIASFLSKYQDIIIEHQKVVKGNQKRLESLRELAGKENLEYPSVTLPPQPHTKEGVDAYNEVIARVRMWVNLNLWQKLKLSRDDAKPLLRLKGFPSFPLVERQANEVDWWDMVCNVKKLINEKKEDGKVFWQNLAGYKRQEALRPYLSSEEDRKKGKKFARYQLGDLLLHLEKKHGEYDWGKVYDEAWERIDKKVEGLSKHIKLEEERRSEDAQSKAALTDWLRAKASFVIEGLKEADKDEFCRCELKLQKWYGDLRGKPFAIEAENSILDISGFSKQYNCAFIWQKDGVKKLNLYLIINYFKGGKLRFKKIKPEAFEANRFYTVINKKSGEIVPMEVNFNFDDPNLIILPLAFGKRQGREFIWNDLLSLETGSLKLANGRVIEKTLYNRRTRQDEPALFVALTFERREVLDSSNIKPMNLIGVDRGENIPAVIALTDPEGCPLSRFKDSLGNPTHILRIGESYKEKQRTIQAKKEVEQRRAGGYSRKYASKAKNLADDMVRNTARDLLYYAVTQDAMLIFENLSRGFGRQGKRTFMAERQYTRMEDWLTAKLAYEGLPSKTYLSKTLAQYTSKTCSNCGFTITSADYDRVLEKLKKTATGWMTTINGKELKVEGQITYYNRYKRQNVVKDLSVELDRLSEESVNNDISSWTKGRSGEALSLLKKRFSHRPVQEKFVCLNCGFETHADEQAALNIARSWLFLRSQEYKKYQTNKTTGNTDKRAFVETWQSFYRKKLKEVWKPAV

SEQ ID NO: 29761 - protein, 978 aa, synthetic construct
  REGION 1..978: note = engineered CasX variant
QEIKRINKIRRRLVKDSNTKKAGKTGPMKTLLVRVMTPDLRERLENLRKKPENIPQPISNTSRANLNKLLTDYTEMKKAILHVYWEEFQVDPVGLMSRVAQPASKKIDQNKLKPEMDEKGNLTTAGFACSQCGQPLFVYKLEQVSEKGKAYTNYFGRCNVAEHEKLILLAQLKPEKDSDEAVTYSLGKFGQRALDFYSIHVTKESTHPVKPLAQIAGNRYASGPVGKALSDACMGTIASFLSKYQDIIIEHQKVVKGNQKRLESLRELAGKENLEYPSVTLPPQPHTKEGVDAYNEVIARVRMWVNLNLWQKLKLSRDDAKPLLRLKGFPSFPLVERQANEVDWWDMVCNVKKLINEKKEDGKVFWQNLAGYKRQEALRPYLSSEEDRKKGKKFARYQLGDLLLHLEKKHGEDWGDVYDEAWERIDKKVEGLSKHIKLEEERRSEDAQSKAALTDWLRAKASFVIEGLKEADKDEFCRCELKLQKWYGDLRGKPFAIEAENSILDISGFSKQYNCAFIWQKDGVKKLNLYLIINYFKGGKLRFKKIKPEAFEANRFYTVINKKSGEIVPMEVNFNFDDPNLIILPLAFGKRQGREFIWNDLLSLETGSLKLANGRVIEKTLYNRRTRQDEPALFVALTFERREVLDSSNIKPMNLIGVDRGENIPAVIALTDPEGCPLSRFKDSLGNPTHILRIGESYKEKQRTIQAKKEVEQRRAGGYSRKYASKAKNLADDMVRNTARDLLYYAVTQDAMLIFENLSRGFGRQGKRTFMAERQYTRMEDWLTAKLAYEGLPSKTYLSKTLAQYTSKTCSNCGFTITSADYDRVLEKLKKTATGWMTTINGKELKVEGQITYYNRYKRQNVVKDLSVELDRLSEESVNNDISSWTKGRSGEALSLLKKRFSHRPVQEKFVCLNCGFETHADEQAALNIARSWLFLRSQEYKKYQTNKTTGNTDKRAFVETWQSFYRKKLKEVWKPAV

SEQ ID NO: 29762 - protein, 978 aa, synthetic construct
  REGION 1..978: note = engineered CasX variant
QEIKRINKIRRRLVKDSNTKKAGKTGPMKTLLVRVMTPDLRERLENLRKKPENIPQPISNTSRANLNKLLTDYTEMKKAILHVYWEEFQVDPVGLMSRVAQPASKKIDQNKLKPEMDEKGNLTTAGFACSQCGQPLFVYKLEQVSEKGKAYTNYFGRCNVAEHEKLILLAQLKPEKDSDEAVTYSLGKFGQRALDFYSIHVTKESTHPVKPLAQIAGNRYASGPVGKALSDACMGTIASFLSKYQDIIIEHQKVVKGNQKRLESLRELAGKENLEYPSVTLPPQPHTKEGVDAYNEVIARVRMWVNLNLWQKLKLSRDDAKPLLRLKGFPSFPLVERQANEVDWWDMVCNVKKLINEKKEDGKVFWQNLAGYKRQEALRPYLSSEEDRKKGKKFARYQLGDLLLHLEKKHGEDWGKVYGEAWERIDKKVEGLSKHIKLEEERRSEDAQSKAALTDWLRAKASFVIEGLKEADKDEFCRCELKLQKWYGDLRGKPFAIEAENSILDISGFSKQYNCAFIWQKDGVKKLNLYLIINYFKGGKLRFKKIKPEAFEANRFYTVINKKSGEIVPMEVNFNFDDPNLIILPLAFGKRQGREFIWNDLLSLETGSLKLANGRVIEKTLYNRRTRQDEPALFVALTFERREVLDSSNIKPMNLIGVDRGENIPAVIALTDPEGCPLSRFKDSLGNPTHILRIGESYKEKQRTIQAKKEVEQRRAGGYSRKYASKAKNLADDMVRNTARDLLYYAVTQDAMLIFENLSRGFGRQGKRTFMAERQYTRMEDWLTAKLAYEGLPSKTYLSKTLAQYTSKTCSNCGFTITSADYDRVLEKLKKTATGWMTTINGKELKVEGQITYYNRYKRQNVVKDLSVELDRLSEESVNNDISSWTKGRSGEALSLLKKRFSHRPVQEKFVCLNCGFETHADEQAALNIARSWLFLRSQEYKKYQTNKTTGNTDKRAFVETWQSFYRKKLKEVWKPAV

SEQ ID NO: 29763 - protein, 978 aa, synthetic construct
  REGION 1..978: note = engineered CasX variant
QEIKRINKIRRRLVKDSNTKKAGKTGPMKTLLVRVMTPDLRERLENLRKKPENIPQPISNTSRANLNKLLTDYTEMKKAILHVYWEEFQVDPVGLMSRVAQPASKKIDQNKLKPEMDEKGNLTTAGFACSQCGQPLFVYKLEQVSEKGKAYTNYFGRCNVAEHEKLILLAQLKPEKDSDEAVTYSLGKFGQRALDFYSIHVTKESTHPVKPLAQIAGNRYASGPVGKALSDACMGTIASFLSKYQDIIIEHQKVVKGNQKRLESLRELAGKENLEYPSVTLPPQPHTKEGVDAYNEVIARVRMWVNLNLWQKLKLSRDDAKPLLRLKGFPSFPLVERQANEVDWWDMVCNVKKLINEKKEDGKVFWQNLAGYKRQEALRPYLSSEEDRKKGKKFARYQLGDLLLHLEKKHGEDWGKVYDEAWERIDKKVEGLSKHIKLEEERRSEDAQSKAALTDWLRAKASFVIEGKKEADKDEFCRCELKLQKWYGDLRGKPFAIEAENSILDISGFSKQYNCAFIWQKDGVKKLNLYLIINYFKGGKLRFKKIKPEAFEANRFYTVINKKSGEIVPMEVNFNFDDPNLIILPLAFGKRQGREFIWNDLLSLETGSLKLANGRVIEKTLYNRRTRQDEPALFVALTFERREVLDSSNIKPMNLIGVDRGENIPAVIALTDPEGCPLSRFKDSLGNPTHILRIGESYKEKQRTIQAKKEVEQRRAGGYSRKYASKAKNLADDMVRNTARDLLYYAVTQDAMLIFENLSRGFGRQGKRTFMAERQYTRMEDWLTAKLAYEGLPSKTYLSKTLAQYTSKTCSNCGFTITSADYDRVLEKLKKTATGWMTTINGKELKVEGQITYYNRYKRQNVVKDLSVELDRLSEESVNNDISSWTKGRSGEALSLLKKRFSHRPVQEKFVCLNCGFETHADEQAALNIARSWLFLRSQEYKKYQTNKTTGNTDKRAFVETWQSFYRKKLKEVWKPAV

SEQ ID NO: 29764 - protein, 978 aa, synthetic construct
  REGION 1..978: note = engineered CasX variant
QEIKRINKIRRRLVKDSNTKKAGKTGPMKTLLVRVMTPDLRERLENLRKKPENIPQPISNTSRANLNKLLTDYTEMKKAILHVYWEEFQVDPVGLMSRVAQPASKKIDQNKLKPEMDEKGNLTTAGFACSQCGQPLFVYKLEQVSEKGKAYTNYFGRCNVAEHEKLILLAQLKPEKDSDEAVTYSLGKFGQRALDFYSIHVTKESTHPVKPLAQIAGNRYASGPVGKALSDACMGTIASFLSKYQDIIIEHQKVVKGNQKRLESLRELAGKENLEYPSVTLPPQPHTKEGVDAYNEVIARVRMWVNLNLWQKLKLSRDDAKPLLRLKGFPSFPLVERQANEVDWWDMVCNVKKLINEKKEDGKVFWQNLAGYKRQEALRPYLSSEEDRKKGKKFARYQLGDLLLHLEKKHGEDWGKVYDEAWERIDKKVEGLSKHIKLEEERRSEDAQSKAALTDWLRAKASFVIEGSKEADKDEFCRCELKLQKWYGDLRGKPFAIEAENSILDISGFSKQYNCAFIWQKDGVKKLNLYLIINYFKGGKLRFKKIKPEAFEANRFYTVINKKSGEIVPMEVNFNFDDPNLIILPLAFGKRQGREFIWNDLLSLETGSLKLANGRVIEKTLYNRRTRQDEPALFVALTFERREVLDSSNIKPMNLIGVDRGENIPAVIALTDPEGCPLSRFKDSLGNPTHILRIGESYKEKQRTIQAKKEVEQRRAGGYSRKYASKAKNLADDMVRNTARDLLYYAVTQDAMLIFENLSRGFGRQGKRTFMAERQYTRMEDWLTAKLAYEGLPSKTYLSKTLAQYTSKTCSNCGFTITSADYDRVLEKLKKTATGWMTTINGKELKVEGQITYYNRYKRQNVVKDLSVELDRLSEESVNNDISSWTKGRSGEALSLLKKRFSHRPVQEKFVCLNCGFETHADEQAALNIARSWLFLRSQEYKKYQTNKTTGNTDKRAFVETWQSFYRKKLKEVWKPAV

SEQ ID NO: 29765 - protein, 979 aa, synthetic construct
  REGION 1..979: note = engineered CasX variant
QEIKRINKIRRRLVKDSNTKKAGKTGPMKTLLVRVMTPDLRERLENLRKKPENIPQPISNTSRANLNKLLTDYTEMKKAILHVYWEEFQVDPVGLMSRVAQPASKKIDQNKLKPEMDEKGNLTTAGFACSQCGQPLFVYKLEQVSEKGKAYTNYFGRCNVAEHEKLILLAQLKPEKDSDEAVTYSLGKFGQRALDFYSIHVTKESTHPVKPLAQIAGNRYASGPVGKALSDACMGTIASFLSKYQDIIIEHQKVVKGNQKRLESLRELAGKENLEYPSVTLPPQPHTKEGVDAYNEVIARVRMWVNLNLWQKLKLSRDDAKPLLRLKGFPSFPLVERQANEVDWWDMVCNVKKLINEKKEDGKVFWQNLAGYKRQEALRPYLSSEEDRKKGKKFARYQLGDLLLHLEKKHGEDWGKVYDEAWERIDKKVEGLSKHIKLEEERRSEDAQSKAALTDWLRAKASFVIEGLKEADDKDEFCRCELKLQKWYGDLRGKPFAIEAENSILDISGFSKQYNCAFIWQKDGVKKLNLYLIINYFKGGKLRFKKIKPEAFEANRFYTVINKKSGEIVPMEVNFNFDDPNLIILPLAFGKRQGREFIWNDLLSLETGSLKLANGRVIEKTLYNRRTRQDEPALFVALTFERREVLDSSNIKPMNLIGVDRGENIPAVIALTDPEGCPLSRFKDSLGNPTHILRIGESYKEKQRTIQAKKEVEQRRAGGYSRKYASKAKNLADDMVRNTARDLLYYAVTQDAMLIFENLSRGFGRQGKRTFMAERQYTRMEDWLTAKLAYEGLPSKTYLSKTLAQYTSKTCSNCGFTITSADYDRVLEKLKKTATGWMTTINGKELKVEGQITYYNRYKRQNVVKDLSVELDRLSEESVNNDISSWTKGRSGEALSLLKKRFSHRPVQEKFVCLNCGFETHADEQAALNIARSWLFLRSQEYKKYQTNKTTGNTDKRAFVETWQSFYRKKLKEVWKPAV

SEQ ID NO: 29766 - protein, 979 aa, synthetic construct
  REGION 1..979: note = engineered CasX variant
QEIKRINKIRRRLVKDSNTKKAGKTGPMKTLLVRVMTPDLRERLENLRKKPENIPQPISNTSRANLNKLLTDYTEMKKAILHVYWEEFQVDPVGLMSRVAQPASKKIDQNKLKPEMDEKGNLTTAGFACSQCGQPLFVYKLEQVSEKGKAYTNYFGRCNVAEHEKLILLAQLKPEKDSDEAVTYSLGKFGQRALDFYSIHVTKESTHPVKPLAQIAGNRYASGPVGKALSDACMGTIASFLSKYQDIIIEHQKVVKGNQKRLESLRELAGKENLEYPSVTLPPQPHTKEGVDAYNEVIARVRMWVNLNLWQKLKLSRDDAKPLLRLKGFPSFPLVERQANEVDWWDMVCNVKKLINEKKEDGKVFWQNLAGYKRQEALRPYLSSEEDRKKGKKFARYQLGDLLLHLEKKHGEDWGKVYDEAWERIDKKVEGLSKHIKLEEERRSEDAQSKAALTDWLRAKASFVIEGLKEADKDEFCRCELKLQKWYGDLRGKPFAIEAENSILDISGFSKQYNCAFIWQKDGVKKLNLYLIINYFKGGKLRFKKIKPEAFEANRFYTVINKKSGEIVPMEVNFNFDDPNLIILPLAFGKRQGREFIWNDLLSLETGSLKLANGRVIEKTLYNRRTRQDEPALFVALTFERREVLDSSNIKPMNLIGVDRGENIPAVIALTDPEGCPLSRFKDSLGNPTHILRIGESYKEKQRTIQAKKEVEQRRAGGYSRKYASKAKNLADDMVRNTARDLLYYAVTQDAMLIFENLSRGFGRQGKRTFMAERQYTRMEDWLTAKLAYEGLPSKTYLSKTLAQYTSKTCSNCGFTITSADYDRVLEKLKKTATGWMTTINGKELKVEGQITYYNRYKRQNVVKDLSVELDRLSEESVNNDISSWTKGRSGNEALSLLKKRFSHRPVQEKFVCLNCGFETHADEQAALNIARSWLFLRSQEYKKYQTNKTTGNTDKRAFVETWQSFYRKKLKEVWKPAV

SEQ ID NO: 29767 - protein, 978 aa, synthetic construct
  REGION 1..978: note = engineered CasX variant
QEIKRINKIRRRLVKDSNTKKAGKTGPMKTLLVRVMTPDLRERLENLRKKPENIPQPISNTSRANLNKLLTDYTEMKKAILHVYWEEFQVDPVGLMSRVAQPASKKIDQNKLKPEMDEKGNLTTAGFACSQCGQPLFVYKLEQVSEKGKAYTNYFGRCNVAEHEKLILLAQLKPEKDSDEAVTYSLGKFGQRALDFYSIHVTKESTHPVKPLAQIAGNRYASGPVGKALSDACMGTIASFLSKYQDIIIEHQKVVKGNQKRLESLRELAGKENLEYPSVTLPPQPHTKEGVDAYNEVIARVRMWVNLNLWQKLKLSRDDAKPLLRLKGFPSFPLVERQANEVDWWDMVCNVKKLINEKKEDGKVFWQNLAGYKRQEALRPYLSSEEDRQKGKKFARYQLGDLLLHLEKKHGEDWGKVYDEAWERIDKKVEGLSKHIKLEEERRSEDAQSKAALTDWLRAKASFVIEGLKEADKDEFCRCELKLQKWYGDLRGKPFAIEAENSILDISGFSKQYNCAFIWQKDGVKKLNLYLIINYFKGGKLRFKKIKPEAFEANRFYTVINKKSGEIVPMEVNFNFDDPNLIILPLAFGKRQGREFIWNDLLSLETGSLKLANGRVIEKTLYNRRTRQDEPALFVALTFERREVLDSSNIKPMNLIGVDRGENIPAVIALTDPEGCPLSRFKDSLGNPTHILRIGESYKEKQRTIQAKKEVEQRRAGGYSRKYASKAKNLADDMVRNTARDLLYYAVTQDAMLIFENLSRGFGRQGKRTFMAERQYTRMEDWLTAKLAYEGLPSKTYLSKTLAQYTSKTCSNCGFTITSADYDRVLEKLKKTATGWMTTINGKELKVEGQITYYNRYKRQNVVKDLSVELDRLSEESVNNDISSWTKGRSGEALSLLKKRFSHRPVQEKFVCLNCGFETHADEQAALNIARSWLFLRSQEYKKYQTNKTTGNTDKRAFVETWQSFYRKKLKEVWKPAV

SEQ ID NO: 29768 - protein, 978 aa, synthetic construct
  REGION 1..978: note = engineered CasX variant
QEIKRINKIRRRLVKDSNTKKAGKTGPMKTLLVRVMTPDLRERLENLRKKPENIPQPISNTSRANLNKLLTDYTEMKKAILHVYWEEFQVDPVGLMSRVAQPASKKIDQNKLKPEMDEKGNLTTAGFACSQCGQPLFVYKLEQVSEKGKAYTNYFGRCNVAEHEKLILLAQLKPEKDSDEAVTYSLGKFGQRALDFYSIHVTKESTHPVKPLAQIAGNRYASGPVGKALSDACMGTIASFLSKYQDIIIEHQKVVKGNQKRLESLRELAGKENLEYPSVTLPPQPHTKEGVDAYNEVIARVRMWVNLNLWQKLKLSRDDAKPLLRLKGFPSFPLVERQANEVDWWDMVCNVKKLINEKKEDGKVFWQNLAGYKRQEALRPYLSSEEDRKKGKKFARYQLGDLLLHLEKKHGEDWGKVYDEAWERIDKKVEGLSKHIKLEEERRSEDAQSKAALTDWLRAKASFVIEGLKEADKDEFCRCELKLQKWYGDLRGKPFAIEAENSILDISGFSKQYNCAFIWQKDGVKKLNLYLIINYFKGGKLRFKKIKPEAFEANRFYTVINKKSGEIVPMEVNFNFDDPNLIILPLAFGKRQGREFIWNDLLSLETGSLKLANGRVIEKTLYNRRTRQDEPALFVALTFERREVLDSSNIKPMNLIGVDRGENIPAVIALTDPEGCPLSRFKDSLGNPTHILRIGESYKEKQRTIQAKKEVEQRRAGGYSRKYASKAKNLADDMVRNTARDLLYYAVTQDAMLIFENLSRGFGRQGKRTFMAERQYTRMEDWLTAKLAYEGLPSQTYLSKTLAQYTSKTCSNCGFTITSADYDRVLEKLKKTATGWMTTINGKELKVEGQITYYNRYKRQNVVKDLSVELDRLSEESVNNDISSWTKGRSGEALSLLKKRFSHRPVQEKFVCLNCGFETHADEQAALNIARSWLFLRSQEYKKYQTNKTTGNTDKRAFVETWQSFYRKKLKEVWKPAV

SEQ ID NO: 29769 - protein, 978 aa, synthetic construct
  REGION 1..978: note = engineered CasX variant
QEIKRINKIRRRLVKDSNTKKAGKTGPMKTLLVRVMTPDLRERLENLRKKPENIPQPISNTSRANLNKLLTDYTEMKKAILHVYWEEFQVDPVGLMSRVAQPASKKIDQNKLKPEMDEKGNLTTAGFACSQCGQPLFVYKLEQVSEKGKAYTNYFGRCNVAEHEKLILLAQLKPEKDSDEAVTYSLGKFGQRALDFYSIHVTKESTHPVKPLAQIAGNRYASGPVGKALSDACMGTIASFLSKYQDIIIEHQKVVKGNQKRLESLRELAGKENLEYPSVTLPPQPHTKEGVDAYNEVIARVRMWVNLNLWQKLKLSRDDAKPLLRLKGFPSFPLVERQANEVDWWDMVCNVKKLINEKKEDGKVFWQNLAGYKRQEALRPYLSSEEDRKKGKKFARYQLGDLLLHLEKKHGEDWGKVYDEAWERIDKKVEGLSKHIKLEEERRSEDAQSKAALTDWLRAKASFVIEGLKEADKDEFCRCELKLQKWYGDLRGKPFAIEAENSILDISGFSKQYNCAFIWQKDGVKKLNLYLIINYFKGGKLRFKKIKPEAFEANRFYTVINKKSGEIVPMEVNFNFDDPNLIILPLAFGKRQGREFIWNDLLSLETGSLKLANGRVIEKTLYNRRTRQDEPALFVALTFERREVLDSSNIKPMNLIGVDRGENIPAVIALTDPEGCPLSRFKDSLGNPTHILRIGESYKEKQRTIQAKKEVEQRRAGGYSRKYASKAKNLADDMVRNTARDLLYYAVTQDAMLIFENLSRGFGRQGKRTFMAERQYTRMEDWLTAKLAYNGLPSKTYLSKTLAQYTSKTCSNCGFTITSADYDRVLEKLKKTATGWMTTINGKELKVEGQITYYNRYKRQNVVKDLSVELDRLSEESVNNDISSWTKGRSGEALSLLKKRFSHRPVQEKFVCLNCGFETHADEQAALNIARSWLFLRSQEYKKYQTNKTTGNTDKRAFVETWQSFYRKKLKEVWKPAV

SEQ ID NO: 29770 - protein, 978 aa, synthetic construct
  REGION 1..978: note = engineered CasX variant
QEIKRINKIRRRLVKDSNTKKAGKTGPMKTLLVRVMTPDLRERLENLRKKPENIPQPISNTSRANLNKLLTDYTEMKKAILHVYWEEFQVDPVGLMSRVAQPASKKIDQNKLKPEMDEKGNLTTAGFACSQCGQPLFVYKLEQVSEKGKAYTNYFGRCNVAEHEKLIQLAQLKPEKDSDEAVTYSLGKFGQRALDFYSIHVTKESTHPVKPLAQIAGNRYASGPVGKALSDACMGTIASFLSKYQDIIIEHQKVVKGNQKRLESLRELAGKENLEYPSVTLPPQPHTKEGVDAYNEVIARVRMWVNLNLWQKLKLSRDDAKPLLRLKGFPSFPLVERQANEVDWWDMVCNVKKLINEKKEDGKVFWQNLAGYKRQEALRPYLSSEEDRKKGKKFARYQLGDLLLHLEKKHGEDWGKVYDEAWERIDKKVEGLSKHIKLEEERRSEDAQSKAALTDWLRAKASFVIEGLKEADKDEFCRCELKLQKWYGDLRGKPFAIEAENSILDISGFSKQYNCAFIWQKDGVKKLNLYLIINYFKGGKLRFKKIKPEAFEANRFYTVINKKSGEIVPMEVNFNFDDPNLIILPLAFGKRQGREFIWNDLLSLETGSLKLANGRVIEKTLYNRRTRQDEPALFVALTFERREVLDSSNIKPMNLIGVDRGENIPAVIALTDPEGCPLSRFKDSLGNPTHILRIGESYKEKQRTIQAKKEVEQRRAGGYSRKYASKAKNLADDMVRNTARDLLYYAVTQDAMLIFENLSRGFGRQGKRTFMAERQYTRMEDWLTAKLAYEGLPSKTYLSKTLAQYTSKTCSNCGFTITSADYDRVLEKLKKTATGWMTTINGKELKVEGQITYYNRYKRQNVVKDLSVELDRLSEESVNNDISSWTKGRSGEALSLLKKRFSHRPVQEKFVCLNCGFETHADEQAALNIARSWLFLRSQEYKKYQTNKTTGNTDKRAFVETWQSFYRKKLKEVWKPAV

SEQ ID NO: 29771 - protein, 978 aa, synthetic construct
  REGION 1..978: note = engineered CasX variant
QEIKRINKIRRRLVKDSNTKKAGKTGPMKTLLVRVMTPDLRERLENLRKKPENIPQPISNTSRANLNKLLTDYTEMKKAILHVYWEEFQVDPVGLMSRVAQPASKKIDQNKLKPEMDEKGNLTTAGFACSQCGQPLFVYKLEQVSEKGKAYTNYFGRCNVAEHEKLILLAQLKPEKDSDEAVTYSLGKFGQRALDFYSIHVTKESTHPVKPLAQIAGNRYASGPVGKALSDACMGTIASFLSKYQDIIIEHQKVVKGNQKRLESLRELAGKENLEYPSVTLPPQPHTKEGVDAYNEVIARVRMWVNLNLWQKLKLSRDDAKPLLRLKGFPSFPLVERQANEVDWWDMVCNVKKLINEKKEDGKVFWQNLAIYKRQEALRPYLSSEEDRKKGKKFARYQLGDLLLHLEKKHGEDWGKVYDEAWERIDKKVEGLSKHIKLEEERRSEDAQSKAALTDWLRAKASFVIEGLKEADKDEFCRCELKLQKWYGDLRGKPFAIEAENSILDISGFSKQYNCAFIWQKDGVKKLNLYLIINYFKGGKLRFKKIKPEAFEANRFYTVINKKSGEIVPMEVNFNFDDPNLIILPLAFGKRQGREFIWNDLLSLETGSLKLANGRVIEKTLYNRRTRQDEPALFVALTFERREVLDSSNIKPMNLIGVDRGENIPAVIALTDPEGCPLSRFKDSLGNPTHILRIGESYKEKQRTIQAKKEVEQRRAGGYSRKYASKAKNLADDMVRNTARDLLYYAVTQDAMLIFENLSRGFGRQGKRTFMAERQYTRMEDWLTAKLAYEGLPSKTYLSKTLAQYTSKTCSNCGFTITSADYDRVLEKLKKTATGWMTTINGKELKVEGQITYYNRYKRQNVVKDLSVELDRLSEESVNNDISSWTKGRSGEALSLLKKRFSHRPVQEKFVCLNCGFETHADEQAALNIARSWLFLRSQEYKKYQTNKTTGNTDKRAFVETWQSFYRKKLKEVWKPAV

SEQ ID NO: 29772 - protein, 978 aa, synthetic construct
  REGION 1..978: note = engineered CasX variant
QEIKRINKIRRRLVKDSNTKKAGKTGPMKTLLVRVMTPDLRERLENLRKKPENIPQPISNTSRANLNKLLTDYTEMKKAILHVYWEEFQVDPVGLMSRVAQPASKKIDQNKLKPEMDEKGNLTTAGFACSQCGQPLFVYKLEQVSEKGKAYTNYFGRCNVAEHEKLILLAQLKPEKDSDEAVTYSLGKFGQRALDFYSIHVTKESTHPVKPLAQIAGNRYASGPVGKALSDACMGTIASFLSKYQDIIIEHQKVVKGNQKRLESLRELAGKENLEYPSVTLPPQPHTKEGVDAYNEVIARVRMWVNLNLWQKLKLSRDDAKPLLRLKGFPSFPLVERQANEVDWWDMVCNVKKLINEKKEDGKVFWQNLAGYKRQEALRPYLSSEEDREKGKKFARYQLGDLLLHLEKKHGEDWGKVYDEAWERIDKKVEGLSKHIKLEEERRSEDAQSKAALTDWLRAKASFVIEGLKEADKDEFCRCELKLQKWYGDLRGKPFAIEAENSILDISGFSKQYNCAFIWQKDGVKKLNLYLIINYFKGGKLRFKKIKPEAFEANRFYTVINKKSGEIVPMEVNFNFDDPNLIILPLAFGKRQGREFIWNDLLSLETGSLKLANGRVIEKTLYNRRTRQDEPALFVALTFERREVLDSSNIKPMNLIGVDRGENIPAVIALTDPEGCPLSRFKDSLGNPTHILRIGESYKEKQRTIQAKKEVEQRRAGGYSRKYASKAKNLADDMVRNTARDLLYYAVTQDAMLIFENLSRGFGRQGKRTFMAERQYTRMEDWLTAKLAYEGLPSKTYLSKTLAQYTSKTCSNCGFTITSADYDRVLEKLKKTATGWMTTINGKELKVEGQITYYNRYKRQNVVKDLSVELDRLSEESVNNDISSWTKGRSGEALSLLKKRFSHRPVQEKFVCLNCGFETHADEQAALNIARSWLFLRSQEYKKYQTNKTTGNTDKRAFVETWQSFYRKKLKEVWKPAV

SEQ ID NO: 29773 - protein, 978 aa, synthetic construct
  REGION 1..978: note = engineered CasX variant
QEIKRINKIRRRLVKDSNTKKAGKTGPMKTLLVRVMTPDLRERLENLRKKPENIPQPISNTSRANLNKLLTDYTEMKKAILHVYWEEFQVDPVGLMSRVAQPASKKIDQNKLKPEMDEKGNLTTAGFACSQCGQPLFVYKLEQVSEKGKAYTNYFGRCNVAEHEKLILLAQLKPEKDSDEAVTYSLGKFGQRALDFYSIHVTKESTHPVKPLAQIAGNRYASGPVGKALSDACMGTIASFLSKYQDIIIEHQKVVKGNQKRLESLRELAGKENLEYPSVTLPPQPHTKEGVDAYNEVIARVRMWVNLNLWQKLKLSRDDAKPLLRLKGFPSFPLVERQANEVDWWDMVCNVKKLINEKKEDGKVFWQNLAGYKRQEALRPYLSSEEDRKKGKKFARYQLGDLLLHLEKKHGEDWGKVYDEAWERIDKKVEGLSKHIKLEEERRSEDAQSKAALTDWLRAKASFVIEGLKEADKDEFCRCELKLQKWYGDLRGKPFAIEAENSILDISGFSKQYNCAFIWQKDGVKKLNLYLIINYFKGGKLRFKKIKPEAFEANRFYTVINKKSGEIVIMEVNFNFDDPNLIILPLAFGKRQGREFIWNDLLSLETGSLKLANGRVIEKTLYNRRTRQDEPALFVALTFERREVLDSSNIKPMNLIGVDRGENIPAVIALTDPEGCPLSRFKDSLGNPTHILRIGESYKEKQRTIQAKKEVEQRRAGGYSRKYASKAKNLADDMVRNTARDLLYYAVTQDAMLIFENLSRGFGRQGKRTFMAERQYTRMEDWLTAKLAYEGLPSKTYLSKTLAQYTSKTCSNCGFTITSADYDRVLEKLKKTATGWMTTINGKELKVEGQITYYNRYKRQNVVKDLSVELDRLSEESVNNDISSWTKGRSGEALSLLKKRFSHRPVQEKFVCLNCGFETHADEQAALNIARSWLFLRSQEYKKYQTNKTTGNTDKRAFVETWQSFYRKKLKEVWKPAV

SEQ ID NO: 29774 - protein, 978 aa, synthetic construct
  REGION 1..978: note = engineered CasX variant
QEIKRLNKIRRRLVKDSNTKKAGKTGPMKTLLVRVMTPDLRERLENLRKKPENIPQPISNTSRANLNKLLTDYTEMKKAILHVYWEEFQKDPVGLMSRVAQPASKKIDQNKLKPEMDEKGNLTTAGFACSQCGQPLFVYKLEQVSEKGKAYTNYFGRCNVAEHEKLILLAQLKPEKDSDEAVTYSLGKFGQRALDFYSIHVTKESTHPVKPLAQIAGNRYASGPVGKALSGACMGTIASFLSKYQDIIIEHQKVVKGNQKRLESLRELAGKENLEYPSVTLPPQPHTKEGVDAYNEVIARVRMWVNLNLWQKLKLSRDDAKPLLRLKGFPSFPLVERQANEVDWWDMVCNVKKLINEKKEDGKVFWQNLAGYKRQEALRPYLSSEEDRKKGKKFARYQLGDLLLHLEKKHGEDWGKVYDEAWERIDKKVEGLSKHIKLEEERRSEDAQSKAALTDWLRAKASFVIEGLKEADKDEFCRCELKLQKWYGDLRGKPFAIEAENSILDISGFSKQYNCAFIWQKDGVKKLNLYLIINYFKGGKLRFKKIKPEAFEANRFYTVINKKSGEIVPMEVNFNFDDPNLIILPLAFGKRQGREFIWNDLLSLETGSLKLANGRVIEKTLYNRRTRQDEPALFVALTFERREVLDSSNIKPMNLIGVDRGENIPAVIALTDPEGCPLSRFKDSLGNPTHILRIGESYKEKQRTIQAKKEVEQRRAGGYSRKYASKAKNLADDMVRNTARDLLYYAVTQDAMLIFENLSRGFGRQGKRTFMAERQYTRMEDWLTAKLAYEGLPSKTYLSKTLAQYTSKTCSNCGFTITSADYDRVLEKLKKTATGWMTTINGKELKVEGQITYYNRYKRQNVVKDLSVELDRLSEESVNNDISSWTKGRSGEALSLLKKRFSHRPVQEKFVCLNCGFETHADEQAALNIARSWLFLRSQEYKKYQTNKTTGNTDKRAFVETWQSFYRKKLKEVWKPAV

SEQ ID NO: 29775 - protein, 978 aa, synthetic construct
  REGION 1..978: note = engineered CasX variant
QEIKRLNKIRRRLVKDSNTKKAGKTGPMKTLLVRVMTPDLRERLENLRKKPENIPQPISNTSRANLNKLLTDYTEMKKAILHVYWEEFQKDPVGLMSRVAQPASKKIDQNKLKPEMDEKGNLTTAGFACSQCGQPLFVYKLEQVSEKGKAYTNYFGRCNVAEHEKLILLAQLKPEKDSDEAVTYSLGKFGQRALDFYSIHVTKESTHPVKPLAQIAGNRYASGPVGKALSDACMGTIASFLSKYQDIIIEHQKVVKGNQKRLESLRELAGKENLEYPSVTLPPQPHTKEGVDAYNEVIARVRMWVNLNLWQKLKLSRDDAKPLLRLKNFPSFPLVERQANEVDWWDMVCNVKKLINEKKEDGKVFWQNLAGYKRQEALRPYLSSEEDRKKGKKFARYQLGDLLLHLEKKHGEDWGKVYDEAWERIDKKVEGLSKHIKLEEERRSEDAQSKAALTDWLRAKASFVIEGLKEADKDEFCRCELKLQKWYGDLRGKPFAIEAENSILDISGFSKQYNCAFIWQKDGVKKLNLYLIINYFKGGKLRFKKIKPEAFEANRFYTVINKKSGEIVPMEVNFNFDDPNLIILPLAFGKRQGREFIWNDLLSLETGSLKLANGRVIEKTLYNRRTRQDEPALFVALTFERREVLDSSNIKPMNLIGVDRGENIPAVIALTDPEGCPLSRFKDSLGNPTHILRIGESYKEKQRTIQAKKEVEQRRAGGYSRKYASKAKNLADDMVRNTARDLLYYAVTQDAMLIFENLSRGFGRQGKRTFMAERQYTRMEDWLTAKLAYEGLPSKTYLSKTLAQYTSKTCSNCGFTITSADYDRVLEKLKKTATGWMTTINGKELKVEGQITYYNRYKRQNVVKDLSVELDRLSEESVNNDISSWTKGRSGEALSLLKKRFSHRPVQEKFVCLNCGFETHADEQAALNIARSWLFLRSQEYKKYQTNKTTGNTDKRAFVETWQSFYRKKLKEVWKPAV

SEQ ID NO: 29776 - protein, 978 aa, synthetic construct
  REGION 1..978: note = engineered CasX variant
QEIKRLNKIRRRLVKDSNTKKAGKTGPMKTLLVRVMTPDLRERLENLRKKPENIPQPISNTSRANLNKLLTDYTEMKKAILHVYWEEFQKDPVGLMSRVAQPASKKIDQNKLKPEMDEKGNLTTAGFACSQCGQPLFVYKLEQVSEKGKAYTNYFGRCNVAEHEKLILLAQLKPEKDSDEAVTYSLGKFGQRALDFYSIHVTKESTHPVKPLAQIAGNRYASGPVGKALSDACMGTIASFLSKYQDIIIEHQKVVKGNQKRLESLRELAGKENLEYPSVTLPPQPHTKEGVDAYNEVIARVRMWVNLNLWQKLKLSRDDAKPLLRLKGFPSFPLVERQANEVDWWDMVCNVKKLINEKKEDGKVFWQNLAGYKRQEALRPYLSSEEDRKKGKKFARYQLGDLLNHLEKKHGEDWGKVYDEAWERIDKKVEGLSKHIKLEEERRSEDAQSKAALTDWLRAKASFVIEGLKEADKDEFCRCELKLQKWYGDLRGKPFAIEAENSILDISGFSKQYNCAFIWQKDGVKKLNLYLIINYFKGGKLRFKKIKPEAFEANRFYTVINKKSGEIVPMEVNFNFDDPNLIILPLAFGKRQGREFIWNDLLSLETGSLKLANGRVIEKTLYNRRTRQDEPALFVALTFERREVLDSSNIKPMNLIGVDRGENIPAVIALTDPEGCPLSRFKDSLGNPTHILRIGESYKEKQRTIQAKKEVEQRRAGGYSRKYASKAKNLADDMVRNTARDLLYYAVTQDAMLIFENLSRGFGRQGKRTFMAERQYTRMEDWLTAKLAYEGLPSKTYLSKTLAQYTSKTCSNCGFTITSADYDRVLEKLKKTATGWMTTINGKELKVEGQITYYNRYKRQNVVKDLSVELDRLSEESVNNDISSWTKGRSGEALSLLKKRFSHRPVQEKFVCLNCGFETHADEQAALNIARSWLFLRSQEYKKYQTNKTTGNTDKRAFVETWQSFYRKKLKEVWKPAV

SEQ ID NO: 29777 - protein, 978 aa, synthetic construct
  REGION 1..978: note = engineered CasX variant
QEIKRLNKIRRRLVKDSNTKKAGKTGPMKTLLVRVMTPDLRERLENLRKKPENIPQPISNTSRANLNKLLTDYTEMKKAILHVYWEEFQKDPVGLMSRVAQPASKKIDQNKLKPEMDEKGNLTTAGFACSQCGQPLFVYKLEQVSEKGKAYTNYFGRCNVAEHEKLILLAQLKPEKDSDEAVTYSLGKFGQRALDFYSIHVTKESTHPVKPLAQIAGNRYASGPVGKALSDACMGTIASFLSKYQDIIIEHQKVVKGNQKRLESLRELAGKENLEYPSVTLPPQPHTKEGVDAYNEVIARVRMWVNLNLWQKLKLSRDDAKPLLRLKGFPSFPLVERQANEVDWWDMVCNVKKLINEKKEDGKVFWQNLAGYKRQEALRPYLSSEEDRKKGKKFARYQLGDLLWHLEKKHGEDWGKVYDEAWERIDKKVEGLSKHIKLEEERRSEDAQSKAALTDWLRAKASFVIEGLKEADKDEFCRCELKLQKWYGDLRGKPFAIEAENSILDISGFSKQYNCAFIWQKDGVKKLNLYLIINYFKGGKLRFKKIKPEAFEANRFYTVINKKSGEIVPMEVNFNFDDPNLIILPLAFGKRQGREFIWNDLLSLETGSLKLANGRVIEKTLYNRRTRQDEPALFVALTFERREVLDSSNIKPMNLIGVDRGENIPAVIALTDPEGCPLSRFKDSLGNPTHILRIGESYKEKQRTIQAKKEVEQRRAGGYSRKYASKAKNLADDMVRNTARDLLYYAVTQDAMLIFENLSRGFGRQGKRTFMAERQYTRMEDWLTAKLAYEGLPSKTYLSKTLAQYTSKTCSNCGFTITSADYDRVLEKLKKTATGWMTTINGKELKVEGQITYYNRYKRQNVVKDLSVELDRLSEESVNNDISSWTKGRSGEALSLLKKRFSHRPVQEKFVCLNCGFETHADEQAALNIARSWLFLRSQEYKKYQTNKTTGNTDKRAFVETWQSFYRKKLKEVWKPAV

SEQ ID NO: 29778 - protein, 978 aa, synthetic construct
  REGION 1..978: note = engineered CasX variant
QEIKRLNKIRRRLVKDSNTKKAGKTGPMKTLLVRVMTPDLRERLENLRKKPENIPQPISNTSRANLNKLLTDYTEMKKAILHVYWEEFQKDPVGLMSRVAQPASKKIDQNKLKPEMDEKGNLTTAGFACSQCGQPLFVYKLEQVSEKGKAYTNYFGRCNVAEHEKLILLAQLKPEKDSDEAVTYSLGKFGQRALDFYSIHVTKESTHPVKPLAQIAGNRYASGPVGKALSDACMGTIASFLSKYQDIIIEHQKVVKGNQKRLESLRELAGKENLEYPSVTLPPQPHTKEGVDAYNEVIARVRMWVNLNLWQKLKLSRDDAKPLLRLKGFPSFPLVERQANEVDWWDMVCNVKKLINEKKEDGKVFWQNLAGYKRQEALRPYLSSEEDRKKGKKFARYQLGDLLLHLYKKHGEDWGKVYDEAWERIDKKVEGLSKHIKLEEERRSEDAQSKAALTDWLRAKASFVIEGLKEADKDEFCRCELKLQKWYGDLRGKPFAIEAENSILDISGFSKQYNCAFIWQKDGVKKLNLYLIINYFKGGKLRFKKIKPEAFEANRFYTVINKKSGEIVPMEVNFNFDDPNLIILPLAFGKRQGREFIWNDLLSLETGSLKLANGRVIEKTLYNRRTRQDEPALFVALTFERREVLDSSNIKPMNLIGVDRGENIPAVIALTDPEGCPLSRFKDSLGNPTHILRIGESYKEKQRTIQAKKEVEQRRAGGYSRKYASKAKNLADDMVRNTARDLLYYAVTQDAMLIFENLSRGFGRQGKRTFMAERQYTRMEDWLTAKLAYEGLPSKTYLSKTLAQYTSKTCSNCGFTITSADYDRVLEKLKKTATGWMTTINGKELKVEGQITYYNRYKRQNVVKDLSVELDRLSEESVNNDISSWTKGRSGEALSLLKKRFSHRPVQEKFVCLNCGFETHADEQAALNIARSWLFLRSQEYKKYQTNKTTGNTDKRAFVETWQSFYRKKLKEVWKPAV

SEQ ID NO: 29779 - protein, 978 aa, synthetic construct
  REGION 1..978: note = engineered CasX variant
QEIKRLNKIRRRLVKDSNTKKAGKTGPMKTLLVRVMTPDLRERLENLRKKPENIPQPISNTSRANLNKLLTDYTEMKKAILHVYWEEFQKDPVGLMSRVAQPASKKIDQNKLKPEMDEKGNLTTAGFACSQCGQPLFVYKLEQVSEKGKAYTNYFGRCNVAEHEKLILLAQLKPEKDSDEAVTYSLGKFGQRALDFYSIHVTKESTHPVKPLAQIAGNRYASGPVGKALSDACMGTIASFLSKYQDIIIEHQKVVKGNQKRLESLRELAGKENLEYPSVTLPPQPHTKEGVDAYNEVIARVRMWVNLNLWQKLKLSRDDAKPLLRLKGFPSFPLVERQANEVDWWDMVCNVKKLINEKKEDGKVFWQNLAGYKRQEALRPYLSSEEDRKKGKKFARYQLGDLLLHLEKKHPEDWGKVYDEAWERIDKKVEGLSKHIKLEEERRSEDAQSKAALTDWLRAKASFVIEGLKEADKDEFCRCELKLQKWYGDLRGKPFAIEAENSILDISGFSKQYNCAFIWQKDGVKKLNLYLIINYFKGGKLRFKKIKPEAFEANRFYTVINKKSGEIVPMEVNFNFDDPNLIILPLAFGKRQGREFIWNDLLSLETGSLKLANGRVIEKTLYNRRTRQDEPALFVALTFERREVLDSSNIKPMNLIGVDRGENIPAVIALTDPEGCPLSRFKDSLGNPTHILRIGESYKEKQRTIQAKKEVEQRRAGGYSRKYASKAKNLADDMVRNTARDLLYYAVTQDAMLIFENLSRGFGRQGKRTFMAERQYTRMEDWLTAKLAYEGLPSKTYLSKTLAQYTSKTCSNCGFTITSADYDRVLEKLKKTATGWMTTINGKELKVEGQITYYNRYKRQNVVKDLSVELDRLSEESVNNDISSWTKGRSGEALSLLKKRFSHRPVQEKFVCLNCGFETHADEQAALNIARSWLFLRSQEYKKYQTNKTTGNTDKRAFVETWQSFYRKKLKEVWKPAV

SEQ ID NO: 29780 - protein, 979 aa, synthetic construct
  REGION 1..979: note = engineered CasX variant
QEIKRLNKIRRRLVKDSNTKKAGKTGPMKTLLVRVMTPDLRERLENLRKKPENIPQPISNTSRANLNKLLTDYTEMKKAILHVYWEEFQKDPVGLMSRVAQPASKKIDQNKLKPEMDEKGNLTTAGFACSQCGQPLFVYKLEQVSEKGKAYTNYFGRCNVAEHEKLILLAQLKPEKDSDEAVTYSLGKFGQRALDFYSIHVTKESTHPVKPLAQIAGNRYASGPVGKALSDACMGTIASFLSKYQDIIIEHQKVVKGNQKRLESLRELAGKENLEYPSVTLPPQPHTKEGVDAYNEVIARVRMWVNLNLWQKLKLSRDDAKPLLRLKGFPSFPLVERQANEVDWWDMVCNVKKLINEKKEDGKVFWQNLAGYKRQEALRPYLSSEEDRKKGKKFARYQLGDLLLHLEKKHGERDWGKVYDEAWERIDKKVEGLSKHIKLEEERRSEDAQSKAALTDWLRAKASFVIEGLKEADKDEFCRCELKLQKWYGDLRGKPFAIEAENSILDISGFSKQYNCAFIWQKDGVKKLNLYLIINYFKGGKLRFKKIKPEAFEANRFYTVINKKSGEIVPMEVNFNFDDPNLIILPLAFGKRQGREFIWNDLLSLETGSLKLANGRVIEKTLYNRRTRQDEPALFVALTFERREVLDSSNIKPMNLIGVDRGENIPAVIALTDPEGCPLSRFKDSLGNPTHILRIGESYKEKQRTIQAKKEVEQRRAGGYSRKYASKAKNLADDMVRNTARDLLYYAVTQDAMLIFENLSRGFGRQGKRTFMAERQYTRMEDWLTAKLAYEGLPSKTYLSKTLAQYTSKTCSNCGFTITSADYDRVLEKLKKTATGWMTTINGKELKVEGQITYYNRYKRQNVVKDLSVELDRLSEESVNNDISSWTKGRSGEALSLLKKRFSHRPVQEKFVCLNCGFETHADEQAALNIARSWLFLRSQEYKKYQTNKTTGNTDKRAFVETWQSFYRKKLKEVWKPAV

SEQ ID NO: 29781 - protein, 979 aa, synthetic construct
  REGION 1..979: note = engineered CasX variant
QEIKRLNKIRRRLVKDSNTKKAGKTGPMKTLLVRVMTPDLRERLENLRKKPENIPQPISNTSRANLNKLLTDYTEMKKAILHVYWEEFQKDPVGLMSRVAQPASKKIDQNKLKPEMDEKGNLTTAGFACSQCGQPLFVYKLEQVSEKGKAYTNYFGRCNVAEHEKLILLAQLKPEKDSDEAVTYSLGKFGQRALDFYSIHVTKESTHPVKPLAQIAGNRYASGPVGKALSDACMGTIASFLSKYQDIIIEHQKVVKGNQKRLESLRELAGKENLEYPSVTLPPQPHTKEGVDAYNEVIARVRMWVNLNLWQKLKLSRDDAKPLLRLKGFPSFPLVERQANEVDWWDMVCNVKKLINEKKEDGKVFWQNLAGYKRQEALRPYLSSEEDRKKGKKFARYQLGDLLLHLEKKHGEYDWGKVYDEAWERIDKKVEGLSKHIKLEEERRSEDAQSKAALTDWLRAKASFVIEGLKEADKDEFCRCELKLQKWYGDLRGKPFAIEAENSILDISGFSKQYNCAFIWQKDGVKKLNLYLIINYFKGGKLRFKKIKPEAFEANRFYTVINKKSGEIVPMEVNFNFDDPNLIILPLAFGKRQGREFIWNDLLSLETGSLKLANGRVIEKTLYNRRTRQDEPALFVALTFERREVLDSSNIKPMNLIGVDRGENIPAVIALTDPEGCPLSRFKDSLGNPTHILRIGESYKEKQRTIQAKKEVEQRRAGGYSRKYASKAKNLADDMVRNTARDLLYYAVTQDAMLIFENLSRGFGRQGKRTFMAERQYTRMEDWLTAKLAYEGLPSKTYLSKTLAQYTSKTCSNCGFTITSADYDRVLEKLKKTATGWMTTINGKELKVEGQITYYNRYKRQNVVKDLSVELDRLSEESVNNDISSWTKGRSGEALSLLKKRFSHRPVQEKFVCLNCGFETHADEQAALNIARSWLFLRSQEYKKYQTNKTTGNTDKRAFVETWQSFYRKKLKEVWKPAV

SEQ ID NO: 29782 - protein, 978 aa, synthetic construct
  REGION 1..978: note = engineered CasX variant
QEIKRLNKIRRRLVKDSNTKKAGKTGPMKTLLVRVMTPDLRERLENLRKKPENIPQPISNTSRANLNKLLTDYTEMKKAILHVYWEEFQKDPVGLMSRVAQPASKKIDQNKLKPEMDEKGNLTTAGFACSQCGQPLFVYKLEQVSEKGKAYTNYFGRCNVAEHEKLILLAQLKPEKDSDEAVTYSLGKFGQRALDFYSIHVTKESTHPVKPLAQIAGNRYASGPVGKALSDACMGTIASFLSKYQDIIIEHQKVVKGNQKRLESLRELAGKENLEYPSVTLPPQPHTKEGVDAYNEVIARVRMWVNLNLWQKLKLSRDDAKPLLRLKGFPSFPLVERQANEVDWWDMVCNVKKLINEKKEDGKVFWQNLAGYKRQEALRPYLSSEEDRKKGKKFARYQLGDLLLHLEKKHGEDWGDVYDEAWERIDKKVEGLSKHIKLEEERRSEDAQSKAALTDWLRAKASFVIEGLKEADKDEFCRCELKLQKWYGDLRGKPFAIEAENSILDISGFSKQYNCAFIWQKDGVKKLNLYLIINYFKGGKLRFKKIKPEAFEANRFYTVINKKSGEIVPMEVNFNFDDPNLIILPLAFGKRQGREFIWNDLLSLETGSLKLANGRVIEKTLYNRRTRQDEPALFVALTFERREVLDSSNIKPMNLIGVDRGENIPAVIALTDPEGCPLSRFKDSLGNPTHILRIGESYKEKQRTIQAKKEVEQRRAGGYSRKYASKAKNLADDMVRNTARDLLYYAVTQDAMLIFENLSRGFGRQGKRTFMAERQYTRMEDWLTAKLAYEGLPSKTYLSKTLAQYTSKTCSNCGFTITSADYDRVLEKLKKTATGWMTTINGKELKVEGQITYYNRYKRQNVVKDLSVELDRLSEESVNNDISSWTKGRSGEALSLLKKRFSHRPVQEKFVCLNCGFETHADEQAALNIARSWLFLRSQEYKKYQTNKTTGNTDKRAFVETWQSFYRKKLKEVWKPAV

SEQ ID NO: 29783 - protein, 978 aa, synthetic construct
  REGION 1..978: note = engineered CasX variant
QEIKRLNKIRRRLVKDSNTKKAGKTGPMKTLLVRVMTPDLRERLENLRKKPENIPQPISNTSRANLNKLLTDYTEMKKAILHVYWEEFQKDPVGLMSRVAQPASKKIDQNKLKPEMDEKGNLTTAGFACSQCGQPLFVYKLEQVSEKGKAYTNYFGRCNVAEHEKLILLAQLKPEKDSDEAVTYSLGKFGQRALDFYSIHVTKESTHPVKPLAQIAGNRYASGPVGKALSDACMGTIASFLSKYQDIIIEHQKVVKGNQKRLESLRELAGKENLEYPSVTLPPQPHTKEGVDAYNEVIARVRMWVNLNLWQKLKLSRDDAKPLLRLKGFPSFPLVERQANEVDWWDMVCNVKKLINEKKEDGKVFWQNLAGYKRQEALRPYLSSEEDRKKGKKFARYQLGDLLLHLEKKHGEDWGKVYGEAWERIDKKVEGLSKHIKLEEERRSEDAQSKAALTDWLRAKASFVIEGLKEADKDEFCRCELKLQKWYGDLRGKPFAIEAENSILDISGFSKQYNCAFIWQKDGVKKLNLYLIINYFKGGKLRFKKIKPEAFEANRFYTVINKKSGEIVPMEVNFNFDDPNLIILPLAFGKRQGREFIWNDLLSLETGSLKLANGRVIEKTLYNRRTRQDEPALFVALTFERREVLDSSNIKPMNLIGVDRGENIPAVIALTDPEGCPLSRFKDSLGNPTHILRIGESYKEKQRTIQAKKEVEQRRAGGYSRKYASKAKNLADDMVRNTARDLLYYAVTQDAMLIFENLSRGFGRQGKRTFMAERQYTRMEDWLTAKLAYEGLPSKTYLSKTLAQYTSKTCSNCGFTITSADYDRVLEKLKKTATGWMTTINGKELKVEGQITYYNRYKRQNVVKDLSVELDRLSEESVNNDISSWTKGRSGEALSLLKKRFSHRPVQEKFVCLNCGFETHADEQAALNIARSWLFLRSQEYKKYQTNKTTGNTDKRAFVETWQSFYRKKLKEVWKPAV

SEQ ID NO: 29784 - protein, 978 aa, synthetic construct
  REGION 1..978: note = engineered CasX variant
QEIKRLNKIRRRLVKDSNTKKAGKTGPMKTLLVRVMTPDLRERLENLRKKPENIPQPISNTSRANLNKLLTDYTEMKKAILHVYWEEFQKDPVGLMSRVAQPASKKIDQNKLKPEMDEKGNLTTAGFACSQCGQPLFVYKLEQVSEKGKAYTNYFGRCNVAEHEKLILLAQLKPEKDSDEAVTYSLGKFGQRALDFYSIHVTKESTHPVKPLAQIAGNRYASGPVGKALSDACMGTIASFLSKYQDIIIEHQKVVKGNQKRLESLRELAGKENLEYPSVTLPPQPHTKEGVDAYNEVIARVRMWVNLNLWQKLKLSRDDAKPLLRLKGFPSFPLVERQANEVDWWDMVCNVKKLINEKKEDGKVFWQNLAGYKRQEALRPYLSSEEDRKKGKKFARYQLGDLLLHLEKKHGEDWGKVYDEAWERIDKKVEGLSKHIKLEEERRSEDAQSKAALTDWLRAKASFVIEGKKEADKDEFCRCELKLQKWYGDLRGKPFAIEAENSILDISGFSKQYNCAFIWQKDGVKKLNLYLIINYFKGGKLRFKKIKPEAFEANRFYTVINKKSGEIVPMEVNFNFDDPNLIILPLAFGKRQGREFIWNDLLSLETGSLKLANGRVIEKTLYNRRTRQDEPALFVALTFERREVLDSSNIKPMNLIGVDRGENIPAVIALTDPEGCPLSRFKDSLGNPTHILRIGESYKEKQRTIQAKKEVEQRRAGGYSRKYASKAKNLADDMVRNTARDLLYYAVTQDAMLIFENLSRGFGRQGKRTFMAERQYTRMEDWLTAKLAYEGLPSKTYLSKTLAQYTSKTCSNCGFTITSADYDRVLEKLKKTATGWMTTINGKELKVEGQITYYNRYKRQNVVKDLSVELDRLSEESVNNDISSWTKGRSGEALSLLKKRFSHRPVQEKFVCLNCGFETHADEQAALNIARSWLFLRSQEYKKYQTNKTTGNTDKRAFVETWQSFYRKKLKEVWKPAV

SEQ ID NO: 29785 - protein, 978 aa, synthetic construct
  REGION 1..978: note = engineered CasX variant
QEIKRLNKIRRRLVKDSNTKKAGKTGPMKTLLVRVMTPDLRERLENLRKKPENIPQPISNTSRANLNKLLTDYTEMKKAILHVYWEEFQKDPVGLMSRVAQPASKKIDQNKLKPEMDEKGNLTTAGFACSQCGQPLFVYKLEQVSEKGKAYTNYFGRCNVAEHEKLILLAQLKPEKDSDEAVTYSLGKFGQRALDFYSIHVTKESTHPVKPLAQIAGNRYASGPVGKALSDACMGTIASFLSKYQDIIIEHQKVVKGNQKRLESLRELAGKENLEYPSVTLPPQPHTKEGVDAYNEVIARVRMWVNLNLWQKLKLSRDDAKPLLRLKGFPSFPLVERQANEVDWWDMVCNVKKLINEKKEDGKVFWQNLAGYKRQEALRPYLSSEEDRKKGKKFARYQLGDLLLHLEKKHGEDWGKVYDEAWERIDKKVEGLSKHIKLEEERRSEDAQSKAALTDWLRAKASFVIEGSKEADKDEFCRCELKLQKWYGDLRGKPFAIEAENSILDISGFSKQYNCAFIWQKDGVKKLNLYLIINYFKGGKLRFKKIKPEAFEANRFYTVINKKSGEIVPMEVNFNFDDPNLIILPLAFGKRQGREFIWNDLLSLETGSLKLANGRVIEKTLYNRRTRQDEPALFVALTFERREVLDSSNIKPMNLIGVDRGENIPAVIALTDPEGCPLSRFKDSLGNPTHILRIGESYKEKQRTIQAKKEVEQRRAGGYSRKYASKAKNLADDMVRNTARDLLYYAVTQDAMLIFENLSRGFGRQGKRTFMAERQYTRMEDWLTAKLAYEGLPSKTYLSKTLAQYTSKTCSNCGFTITSADYDRVLEKLKKTATGWMTTINGKELKVEGQITYYNRYKRQNVVKDLSVELDRLSEESVNNDISSWTKGRSGEALSLLKKRFSHRPVQEKFVCLNCGFETHADEQAALNIARSWLFLRSQEYKKYQTNKTTGNTDKRAFVETWQSFYRKKLKEVWKPAV

SEQ ID NO: 29786 - protein, 979 aa, synthetic construct
  REGION 1..979: note = engineered CasX variant
QEIKRLNKIRRRLVKDSNTKKAGKTGPMKTLLVRVMTPDLRERLENLRKKPENIPQPISNTSRANLNKLLTDYTEMKKAILHVYWEEFQKDPVGLMSRVAQPASKKIDQNKLKPEMDEKGNLTTAGFACSQCGQPLFVYKLEQVSEKGKAYTNYFGRCNVAEHEKLILLAQLKPEKDSDEAVTYSLGKFGQRALDFYSIHVTKESTHPVKPLAQIAGNRYASGPVGKALSDACMGTIASFLSKYQDIIIEHQKVVKGNQKRLESLRELAGKENLEYPSVTLPPQPHTKEGVDAYNEVIARVRMWVNLNLWQKLKLSRDDAKPLLRLKGFPSFPLVERQANEVDWWDMVCNVKKLINEKKEDGKVFWQNLAGYKRQEALRPYLSSEEDRKKGKKFARYQLGDLLLHLEKKHGEDWGKVYDEAWERIDKKVEGLSKHIKLEEERRSEDAQSKAALTDWLRAKASFVIEGLKEADDKDEFCRCELKLQKWYGDLRGKPFAIEAENSILDISGFSKQYNCAFIWQKDGVKKLNLYLIINYFKGGKLRFKKIKPEAFEANRFYTVINKKSGEIVPMEVNFNFDDPNLIILPLAFGKRQGREFIWNDLLSLETGSLKLANGRVIEKTLYNRRTRQDEPALFVALTFERREVLDSSNIKPMNLIGVDRGENIPAVIALTDPEGCPLSRFKDSLGNPTHILRIGESYKEKQRTIQAKKEVEQRRAGGYSRKYASKAKNLADDMVRNTARDLLYYAVTQDAMLIFENLSRGFGRQGKRTFMAERQYTRMEDWLTAKLAYEGLPSKTYLSKTLAQYTSKTCSNCGFTITSADYDRVLEKLKKTATGWMTTINGKELKVEGQITYYNRYKRQNVVKDLSVELDRLSEESVNNDISSWTKGRSGEALSLLKKRFSHRPVQEKFVCLNCGFETHADEQAALNIARSWLFLRSQEYKKYQTNKTTGNTDKRAFVETWQSFYRKKLKEVWKPAV

SEQ ID NO: 29787 - protein, 979 aa, synthetic construct
  REGION 1..979: note = engineered CasX variant
QEIKRLNKIRRRLVKDSNTKKAGKTGPMKTLLVRVMTPDLRERLENLRKKPENIPQPISNTSRANLNKLLTDYTEMKKAILHVYWEEFQKDPVGLMSRVAQPASKKIDQNKLKPEMDEKGNLTTAGFACSQCGQPLFVYKLEQVSEKGKAYTNYFGRCNVAEHEKLILLAQLKPEKDSDEAVTYSLGKFGQRALDFYSIHVTKESTHPVKPLAQIAGNRYASGPVGKALSDACMGTIASFLSKYQDIIIEHQKVVKGNQKRLESLRELAGKENLEYPSVTLPPQPHTKEGVDAYNEVIARVRMWVNLNLWQKLKLSRDDAKPLLRLKGFPSFPLVERQANEVDWWDMVCNVKKLINEKKEDGKVFWQNLAGYKRQEALRPYLSSEEDRKKGKKFARYQLGDLLLHLEKKHGEDWGKVYDEAWERIDKKVEGLSKHIKLEEERRSEDAQSKAALTDWLRAKASFVIEGLKEADKDEFCRCELKLQKWYGDLRGKPFAIEAENSILDISGFSKQYNCAFIWQKDGVKKLNLYLIINYFKGGKLRFKKIKPEAFEANRFYTVINKKSGEIVPMEVNFNFDDPNLIILPLAFGKRQGREFIWNDLLSLETGSLKLANGRVIEKTLYNRRTRQDEPALFVALTFERREVLDSSNIKPMNLIGVDRGENIPAVIALTDPEGCPLSRFKDSLGNPTHILRIGESYKEKQRTIQAKKEVEQRRAGGYSRKYASKAKNLADDMVRNTARDLLYYAVTQDAMLIFENLSRGFGRQGKRTFMAERQYTRMEDWLTAKLAYEGLPSKTYLSKTLAQYTSKTCSNCGFTITSADYDRVLEKLKKTATGWMTTINGKELKVEGQITYYNRYKRQNVVKDLSVELDRLSEESVNNDISSWTKGRSGNEALSLLKKRFSHRPVQEKFVCLNCGFETHADEQAALNIARSWLFLRSQEYKKYQTNKTTGNTDKRAFVETWQSFYRKKLKEVWKPAV

SEQ ID NO: 29788 - protein, 978 aa, synthetic construct
  REGION 1..978: note = engineered CasX variant
QEIKRLNKIRRRLVKDSNTKKAGKTGPMKTLLVRVMTPDLRERLENLRKKPENIPQPISNTSRANLNKLLTDYTEMKKAILHVYWEEFQKDPVGLMSRVAQPASKKIDQNKLKPEMDEKGNLTTAGFACSQCGQPLFVYKLEQVSEKGKAYTNYFGRCNVAEHEKLILLAQLKPEKDSDEAVTYSLGKFGQRALDFYSIHVTKESTHPVKPLAQIAGNRYASGPVGKALSDACMGTIASFLSKYQDIIIEHQKVVKGNQKRLESLRELAGKENLEYPSVTLPPQPHTKEGVDAYNEVIARVRMWVNLNLWQKLKLSRDDAKPLLRLKGFPSFPLVERQANEVDWWDMVCNVKKLINEKKEDGKVFWQNLAGYKRQEALRPYLSSEEDRQKGKKFARYQLGDLLLHLEKKHGEDWGKVYDEAWERIDKKVEGLSKHIKLEEERRSEDAQSKAALTDWLRAKASFVIEGLKEADKDEFCRCELKLQKWYGDLRGKPFAIEAENSILDISGFSKQYNCAFIWQKDGVKKLNLYLIINYFKGGKLRFKKIKPEAFEANRFYTVINKKSGEIVPMEVNFNFDDPNLIILPLAFGKRQGREFIWNDLLSLETGSLKLANGRVIEKTLYNRRTRQDEPALFVALTFERREVLDSSNIKPMNLIGVDRGENIPAVIALTDPEGCPLSRFKDSLGNPTHILRIGESYKEKQRTIQAKKEVEQRRAGGYSRKYASKAKNLADDMVRNTARDLLYYAVTQDAMLIFENLSRGFGRQGKRTFMAERQYTRMEDWLTAKLAYEGLPSKTYLSKTLAQYTSKTCSNCGFTITSADYDRVLEKLKKTATGWMTTINGKELKVEGQITYYNRYKRQNVVKDLSVELDRLSEESVNNDISSWTKGRSGEALSLLKKRFSHRPVQEKFVCLNCGFETHADEQAALNIARSWLFLRSQEYKKYQTNKTTGNTDKRAFVETWQSFYRKKLKEVWKPAV

SEQ ID NO: 29789 - protein, 978 aa, synthetic construct
  REGION 1..978: note = engineered CasX variant
QEIKRLNKIRRRLVKDSNTKKAGKTGPMKTLLVRVMTPDLRERLENLRKKPENIPQPISNTSRANLNKLLTDYTEMKKAILHVYWEEFQKDPVGLMSRVAQPASKKIDQNKLKPEMDEKGNLTTAGFACSQCGQPLFVYKLEQVSEKGKAYTNYFGRCNVAEHEKLILLAQLKPEKDSDEAVTYSLGKFGQRALDFYSIHVTKESTHPVKPLAQIAGNRYASGPVGKALSDACMGTIASFLSKYQDIIIEHQKVVKGNQKRLESLRELAGKENLEYPSVTLPPQPHTKEGVDAYNEVIARVRMWVNLNLWQKLKLSRDDAKPLLRLKGFPSFPLVERQANEVDWWDMVCNVKKLINEKKEDGKVFWQNLAGYKRQEALRPYLSSEEDRKKGKKFARYQLGDLLLHLEKKHGEDWGKVYDEAWERIDKKVEGLSKHIKLEEERRSEDAQSKAALTDWLRAKASFVIEGLKEADKDEFCRCELKLQKWYGDLRGKPFAIEAENSILDISGFSKQYNCAFIWQKDGVKKLNLYLIINYFKGGKLRFKKIKPEAFEANRFYTVINKKSGEIVPMEVNFNFDDPNLIILPLAFGKRQGREFIWNDLLSLETGSLKLANGRVIEKTLYNRRTRQDEPALFVALTFERREVLDSSNIKPMNLIGVDRGENIPAVIALTDPEGCPLSRFKDSLGNPTHILRIGESYKEKQRTIQAKKEVEQRRAGGYSRKYASKAKNLADDMVRNTARDLLYYAVTQDAMLIFENLSRGFGRQGKRTFMAERQYTRMEDWLTAKLAYEGLPSQTYLSKTLAQYTSKTCSNCGFTITSADYDRVLEKLKKTATGWMTTINGKELKVEGQITYYNRYKRQNVVKDLSVELDRLSEESVNNDISSWTKGRSGEALSLLKKRFSHRPVQEKFVCLNCGFETHADEQAALNIARSWLFLRSQEYKKYQTNKTTGNTDKRAFVETWQSFYRKKLKEVWKPAV

SEQ ID NO: 29790 - protein, 978 aa, synthetic construct
  REGION 1..978: note = engineered CasX variant
QEIKRLNKIRRRLVKDSNTKKAGKTGPMKTLLVRVMTPDLRERLENLRKKPENIPQPISNTSRANLNKLLTDYTEMKKAILHVYWEEFQKDPVGLMSRVAQPASKKIDQNKLKPEMDEKGNLTTAGFACSQCGQPLFVYKLEQVSEKGKAYTNYFGRCNVAEHEKLILLAQLKPEKDSDEAVTYSLGKFGQRALDFYSIHVTKESTHPVKPLAQIAGNRYASGPVGKALSDACMGTIASFLSKYQDIIIEHQKVVKGNQKRLESLRELAGKENLEYPSVTLPPQPHTKEGVDAYNEVIARVRMWVNLNLWQKLKLSRDDAKPLLRLKGFPSFPLVERQANEVDWWDMVCNVKKLINEKKEDGKVFWQNLAGYKRQEALRPYLSSEEDRKKGKKFARYQLGDLLLHLEKKHGEDWGKVYDEAWERIDKKVEGLSKHIKLEEERRSEDAQSKAALTDWLRAKASFVIEGLKEADKDEFCRCELKLQKWYGDLRGKPFAIEAENSILDISGFSKQYNCAFIWQKDGVKKLNLYLIINYFKGGKLRFKKIKPEAFEANRFYTVINKKSGEIVPMEVNFNFDDPNLIILPLAFGKRQGREFIWNDLLSLETGSLKLANGRVIEKTLYNRRTRQDEPALFVALTFERREVLDSSNIKPMNLIGVDRGENIPAVIALTDPEGCPLSRFKDSLGNPTHILRIGESYKEKQRTIQAKKEVEQRRAGGYSRKYASKAKNLADDMVRNTARDLLYYAVTQDAMLIFENLSRGFGRQGKRTFMAERQYTRMEDWLTAKLAYNGLPSKTYLSKTLAQYTSKTCSNCGFTITSADYDRVLEKLKKTATGWMTTINGKELKVEGQITYYNRYKRQNVVKDLSVELDRLSEESVNNDISSWTKGRSGEALSLLKKRFSHRPVQEKFVCLNCGFETHADEQAALNIARSWLFLRSQEYKKYQTNKTTGNTDKRAFVETWQSFYRKKLKEVWKPAV

SEQ ID NO: 29791 - protein, 978 aa, synthetic construct
  REGION 1..978: note = engineered CasX variant
QEIKRLNKIRRRLVKDSNTKKAGKTGPMKTLLVRVMTPDLRERLENLRKKPENIPQPISNTSRANLNKLLTDYTEMKKAILHVYWEEFQKDPVGLMSRVAQPASKKIDQNKLKPEMDEKGNLTTAGFACSQCGQPLFVYKLEQVSEKGKAYTNYFGRCNVAEHEKLIQLAQLKPEKDSDEAVTYSLGKFGQRALDFYSIHVTKESTHPVKPLAQIAGNRYASGPVGKALSDACMGTIASFLSKYQDIIIEHQKVVKGNQKRLESLRELAGKENLEYPSVTLPPQPHTKEGVDAYNEVIARVRMWVNLNLWQKLKLSRDDAKPLLRLKGFPSFPLVERQANEVDWWDMVCNVKKLINEKKEDGKVFWQNLAGYKRQEALRPYLSSEEDRKKGKKFARYQLGDLLLHLEKKHGEDWGKVYDEAWERIDKKVEGLSKHIKLEEERRSEDAQSKAALTDWLRAKASFVIEGLKEADKDEFCRCELKLQKWYGDLRGKPFAIEAENSILDISGFSKQYNCAFIWQKDGVKKLNLYLIINYFKGGKLRFKKIKPEAFEANRFYTVINKKSGEIVPMEVNFNFDDPNLIILPLAFGKRQGREFIWNDLLSLETGSLKLANGRVIEKTLYNRRTRQDEPALFVALTFERREVLDSSNIKPMNLIGVDRGENIPAVIALTDPEGCPLSRFKDSLGNPTHILRIGESYKEKQRTIQAKKEVEQRRAGGYSRKYASKAKNLADDMVRNTARDLLYYAVTQDAMLIFENLSRGFGRQGKRTFMAERQYTRMEDWLTAKLAYEGLPSKTYLSKTLAQYTSKTCSNCGFTITSADYDRVLEKLKKTATGWMTTINGKELKVEGQITYYNRYKRQNVVKDLSVELDRLSEESVNNDISSWTKGRSGEALSLLKKRFSHRPVQEKFVCLNCGFETHADEQAALNIARSWLFLRSQEYKKYQTNKTTGNTDKRAFVETWQSFYRKKLKEVWKPAV

SEQ ID NO: 29792 - protein, 978 aa, synthetic construct
  REGION 1..978: note = engineered CasX variant
QEIKRLNKIRRRLVKDSNTKKAGKTGPMKTLLVRVMTPDLRERLENLRKKPENIPQPISNTSRANLNKLLTDYTEMKKAILHVYWEEFQKDPVGLMSRVAQPASKKIDQNKLKPEMDEKGNLTTAGFACSQCGQPLFVYKLEQVSEKGKAYTNYFGRCNVAEHEKLILLAQLKPEKDSDEAVTYSLGKFGQRALDFYSIHVTKESTHPVKPLAQIAGNRYASGPVGKALSDACMGTIASFLSKYQDIIIEHQKVVKGNQKRLESLRELAGKENLEYPSVTLPPQPHTKEGVDAYNEVIARVRMWVNLNLWQKLKLSRDDAKPLLRLKGFPSFPLVERQANEVDWWDMVCNVKKLINEKKEDGKVFWQNLAIYKRQEALRPYLSSEEDRKKGKKFARYQLGDLLLHLEKKHGEDWGKVYDEAWERIDKKVEGLSKHIKLEEERRSEDAQSKAALTDWLRAKASFVIEGLKEADKDEFCRCELKLQKWYGDLRGKPFAIEAENSILDISGFSKQYNCAFIWQKDGVKKLNLYLIINYFKGGKLRFKKIKPEAFEANRFYTVINKKSGEIVPMEVNFNFDDPNLIILPLAFGKRQGREFIWNDLLSLETGSLKLANGRVIEKTLYNRRTRQDEPALFVALTFERREVLDSSNIKPMNLIGVDRGENIPAVIALTDPEGCPLSRFKDSLGNPTHILRIGESYKEKQRTIQAKKEVEQRRAGGYSRKYASKAKNLADDMVRNTARDLLYYAVTQDAMLIFENLSRGFGRQGKRTFMAERQYTRMEDWLTAKLAYEGLPSKTYLSKTLAQYTSKTCSNCGFTITSADYDRVLEKLKKTATGWMTTINGKELKVEGQITYYNRYKRQNVVKDLSVELDRLSEESVNNDISSWTKGRSGEALSLLKKRFSHRPVQEKFVCLNCGFETHADEQAALNIARSWLFLRSQEYKKYQTNKTTGNTDKRAFVETWQSFYRKKLKEVWKPAV

SEQ ID NO: 29793 - protein, 978 aa, synthetic construct
  REGION 1..978: note = engineered CasX variant
QEIKRLNKIRRRLVKDSNTKKAGKTGPMKTLLVRVMTPDLRERLENLRKKPENIPQPISNTSRANLNKLLTDYTEMKKAILHVYWEEFQKDPVGLMSRVAQPASKKIDQNKLKPEMDEKGNLTTAGFACSQCGQPLFVYKLEQVSEKGKAYTNYFGRCNVAEHEKLILLAQLKPEKDSDEAVTYSLGKFGQRALDFYSIHVTKESTHPVKPLAQIAGNRYASGPVGKALSDACMGTIASFLSKYQDIIIEHQKVVKGNQKRLESLRELAGKENLEYPSVTLPPQPHTKEGVDAYNEVIARVRMWVNLNLWQKLKLSRDDAKPLLRLKGFPSFPLVERQANEVDWWDMVCNVKKLINEKKEDGKVFWQNLAGYKRQEALRPYLSSEEDREKGKKFARYQLGDLLLHLEKKHGEDWGKVYDEAWERIDKKVEGLSKHIKLEEERRSEDAQSKAALTDWLRAKASFVIEGLKEADKDEFCRCELKLQKWYGDLRGKPFAIEAENSILDISGFSKQYNCAFIWQKDGVKKLNLYLIINYFKGGKLRFKKIKPEAFEANRFYTVINKKSGEIVPMEVNFNFDDPNLIILPLAFGKRQGREFIWNDLLSLETGSLKLANGRVIEKTLYNRRTRQDEPALFVALTFERREVLDSSNIKPMNLIGVDRGENIPAVIALTDPEGCPLSRFKDSLGNPTHILRIGESYKEKQRTIQAKKEVEQRRAGGYSRKYASKAKNLADDMVRNTARDLLYYAVTQDAMLIFENLSRGFGRQGKRTFMAERQYTRMEDWLTAKLAYEGLPSKTYLSKTLAQYTSKTCSNCGFTITSADYDRVLEKLKKTATGWMTTINGKELKVEGQITYYNRYKRQNVVKDLSVELDRLSEESVNNDISSWTKGRSGEALSLLKKRFSHRPVQEKFVCLNCGFETHADEQAALNIARSWLFLRSQEYKKYQTNKTTGNTDKRAFVETWQSFYRKKLKEVWKPAV

SEQ ID NO: 29794 - protein, 978 aa, synthetic construct
  REGION 1..978: note = engineered CasX variant
QEIKRLNKIRRRLVKDSNTKKAGKTGPMKTLLVRVMTPDLRERLENLRKKPENIPQPISNTSRANLNKLLTDYTEMKKAILHVYWEEFQKDPVGLMSRVAQPASKKIDQNKLKPEMDEKGNLTTAGFACSQCGQPLFVYKLEQVSEKGKAYTNYFGRCNVAEHEKLILLAQLKPEKDSDEAVTYSLGKFGQRALDFYSIHVTKESTHPVKPLAQIAGNRYASGPVGKALSDACMGTIASFLSKYQDIIIEHQKVVKGNQKRLESLRELAGKENLEYPSVTLPPQPHTKEGVDAYNEVIARVRMWVNLNLWQKLKLSRDDAKPLLRLKGFPSFPLVERQANEVDWWDMVCNVKKLINEKKEDGKVFWQNLAGYKRQEALRPYLSSEEDRKKGKKFARYQLGDLLLHLEKKHGEDWGKVYDEAWERIDKKVEGLSKHIKLEEERRSEDAQSKAALTDWLRAKASFVIEGLKEADKDEFCRCELKLQKWYGDLRGKPFAIEAENSILDISGFSKQYNCAFIWQKDGVKKLNLYLIINYFKGGKLRFKKIKPEAFEANRFYTVINKKSGEIVIMEVNFNFDDPNLIILPLAFGKRQGREFIWNDLLSLETGSLKLANGRVIEKTLYNRRTRQDEPALFVALTFERREVLDSSNIKPMNLIGVDRGENIPAVIALTDPEGCPLSRFKDSLGNPTHILRIGESYKEKQRTIQAKKEVEQRRAGGYSRKYASKAKNLADDMVRNTARDLLYYAVTQDAMLIFENLSRGFGRQGKRTFMAERQYTRMEDWLTAKLAYEGLPSKTYLSKTLAQYTSKTCSNCGFTITSADYDRVLEKLKKTATGWMTTINGKELKVEGQITYYNRYKRQNVVKDLSVELDRLSEESVNNDISSWTKGRSGEALSLLKKRFSHRPVQEKFVCLNCGFETHADEQAALNIARSWLFLRSQEYKKYQTNKTTGNTDKRAFVETWQSFYRKKLKEVWKPAV

SEQ ID NO: 29795 - protein, 978 aa, synthetic construct
  REGION 1..978: note = engineered CasX variant
QEIKRINKIRRRLVKDSNTKKAGKTGPMKTLLVRVMTPDLRERLENLRKKPENIPQPISNTSRANLNKLLTDYTEMKKAILHVYWEEFQKDPVGLMSRVAQPASKKIDQNKLKPEMDEKGNLTTAGFACSQCGQPLFVYKLEQVSEKGKAYTNYVGRCNVAEHEKLILLAQLKPEKDSDEAVTYSLGKFGQRALDFYSIHVTKESTHPVKPLAQIAGNRYASGPVGKALSGACMGTIASFLSKYQDIIIEHQKVVKGNQKRLESLRELAGKENLEYPSVTLPPQPHTKEGVDAYNEVIARVRMWVNLNLWQKLKLSRDDAKPLLRLKGFPSFPLVERQANEVDWWDMVCNVKKLINEKKEDGKVFWQNLAGYKRQEALRPYLSSEEDRKKGKKFARYQLGDLLLHLEKKHGEDWGKVYDEAWERIDKKVEGLSKHIKLEEERRSEDAQSKAALTDWLRAKASFVIEGLKEADKDEFCRCELKLQKWYGDLRGKPFAIEAENSILDISGFSKQYNCAFIWQKDGVKKLNLYLIINYFKGGKLRFKKIKPEAFEANRFYTVINKKSGEIVPMEVNFNFDDPNLIILPLAFGKRQGREFIWNDLLSLETGSLKLANGRVIEKTLYNRRTRQDEPALFVALTFERREVLDSSNIKPMNLIGVDRGENIPAVIALTDPEGCPLSRFKDSLGNPTHILRIGESYKEKQRTIQAKKEVEQRRAGGYSRKYASKAKNLADDMVRNTARDLLYYAVTQDAMLIFENLSRGFGRQGKRTFMAERQYTRMEDWLTAKLAYEGLPSKTYLSKTLAQYTSKTCSNCGFTITSADYDRVLEKLKKTATGWMTTINGKELKVEGQITYYNRYKRQNVVKDLSVELDRLSEESVNNDISSWTKGRSGEALSLLKKRFSHRPVQEKFVCLNCGFETHADEQAALNIARSWLFLRSQEYKKYQTNKTTGNTDKRAFVETWQSFYRKKLKEVWKPAV

SEQ ID NO: 29796 - protein, 978 aa, synthetic construct
  REGION 1..978: note = engineered CasX variant
QEIKRINKIRRRLVKDSNTKKAGKTGPMKTLLVRVMTPDLRERLENLRKKPENIPQPISNTSRANLNKLLTDYTEMKKAILHVYWEEFQKDPVGLMSRVAQPASKKIDQNKLKPEMDEKGNLTTAGFACSQCGQPLFVYKLEQVSEKGKAYTNYVGRCNVAEHEKLILLAQLKPEKDSDEAVTYSLGKFGQRALDFYSIHVTKESTHPVKPLAQIAGNRYASGPVGKALSDACMGTIASFLSKYQDIIIEHQKVVKGNQKRLESLRELAGKENLEYPSVTLPPQPHTKEGVDAYNEVIARVRMWVNLNLWQKLKLSRDDAKPLLRLKNFPSFPLVERQANEVDWWDMVCNVKKLINEKKEDGKVFWQNLAGYKRQEALRPYLSSEEDRKKGKKFARYQLGDLLLHLEKKHGEDWGKVYDEAWERIDKKVEGLSKHIKLEEERRSEDAQSKAALTDWLRAKASFVIEGLKEADKDEFCRCELKLQKWYGDLRGKPFAIEAENSILDISGFSKQYNCAFIWQKDGVKKLNLYLIINYFKGGKLRFKKIKPEAFEANRFYTVINKKSGEIVPMEVNFNFDDPNLIILPLAFGKRQGREFIWNDLLSLETGSLKLANGRVIEKTLYNRRTRQDEPALFVALTFERREVLDSSNIKPMNLIGVDRGENIPAVIALTDPEGCPLSRFKDSLGNPTHILRIGESYKEKQRTIQAKKEVEQRRAGGYSRKYASKAKNLADDMVRNTARDLLYYAVTQDAMLIFENLSRGFGRQGKRTFMAERQYTRMEDWLTAKLAYEGLPSKTYLSKTLAQYTSKTCSNCGFTITSADYDRVLEKLKKTATGWMTTINGKELKVEGQITYYNRYKRQNVVKDLSVELDRLSEESVNNDISSWTKGRSGEALSLLKKRFSHRPVQEKFVCLNCGFETHADEQAALNIARSWLFLRSQEYKKYQTNKTTGNTDKRAFVETWQSFYRKKLKEVWKPAV

SEQ ID NO: 29797 - protein, 978 aa, synthetic construct
  REGION 1..978: note = engineered CasX variant
QEIKRINKIRRRLVKDSNTKKAGKTGPMKTLLVRVMTPDLRERLENLRKKPENIPQPISNTSRANLNKLLTDYTEMKKAILHVYWEEFQKDPVGLMSRVAQPASKKIDQNKLKPEMDEKGNLTTAGFACSQCGQPLFVYKLEQVSEKGKAYTNYVGRCNVAEHEKLILLAQLKPEKDSDEAVTYSLGKFGQRALDFYSIHVTKESTHPVKPLAQIAGNRYASGPVGKALSDACMGTIASFLSKYQDIIIEHQKVVKGNQKRLESLRELAGKENLEYPSVTLPPQPHTKEGVDAYNEVIARVRMWVNLNLWQKLKLSRDDAKPLLRLKGFPSFPLVERQANEVDWWDMVCNVKKLINEKKEDGKVFWQNLAGYKRQEALRPYLSSEEDRKKGKKFARYQLGDLLNHLEKKHGEDWGKVYDEAWERIDKKVEGLSKHIKLEEERRSEDAQSKAALTDWLRAKASFVIEGLKEADKDEFCRCELKLQKWYGDLRGKPFAIEAENSILDISGFSKQYNCAFIWQKDGVKKLNLYLIINYFKGGKLRFKKIKPEAFEANRFYTVINKKSGEIVPMEVNFNFDDPNLIILPLAFGKRQGREFIWNDLLSLETGSLKLANGRVIEKTLYNRRTRQDEPALFVALTFERREVLDSSNIKPMNLIGVDRGENIPAVIALTDPEGCPLSRFKDSLGNPTHILRIGESYKEKQRTIQAKKEVEQRRAGGYSRKYASKAKNLADDMVRNTARDLLYYAVTQDAMLIFENLSRGFGRQGKRTFMAERQYTRMEDWLTAKLAYEGLPSKTYLSKTLAQYTSKTCSNCGFTITSADYDRVLEKLKKTATGWMTTINGKELKVEGQITYYNRYKRQNVVKDLSVELDRLSEESVNNDISSWTKGRSGEALSLLKKRFSHRPVQEKFVCLNCGFETHADEQAALNIARSWLFLRSQEYKKYQTNKTTGNTDKRAFVETWQSFYRKKLKEVWKPAV

SEQ ID NO: 29798 - protein, 978 aa, synthetic construct
  REGION 1..978: note = engineered CasX variant
QEIKRINKIRRRLVKDSNTKKAGKTGPMKTLLVRVMTPDLRERLENLRKKPENIPQPISNTSRANLNKLLTDYTEMKKAILHVYWEEFQKDPVGLMSRVAQPASKKIDQNKLKPEMDEKGNLTTAGFACSQCGQPLFVYKLEQVSEKGKAYTNYVGRCNVAEHEKLILLAQLKPEKDSDEAVTYSLGKFGQRALDFYSIHVTKESTHPVKPLAQIAGNRYASGPVGKALSDACMGTIASFLSKYQDIIIEHQKVVKGNQKRLESLRELAGKENLEYPSVTLPPQPHTKEGVDAYNEVIARVRMWVNLNLWQKLKLSRDDAKPLLRLKGFPSFPLVERQANEVDWWDMVCNVKKLINEKKEDGKVFWQNLAGYKRQEALRPYLSSEEDRKKGKKFARYQLGDLLWHLEKKHGEDWGKVYDEAWERIDKKVEGLSKHIKLEEERRSEDAQSKAALTDWLRAKASFVIEGLKEADKDEFCRCELKLQKWYGDLRGKPFAIEAENSILDISGFSKQYNCAFIWQKDGVKKLNLYLIINYFKGGKLRFKKIKPEAFEANRFYTVINKKSGEIVPMEVNFNFDDPNLIILPLAFGKRQGREFIWNDLLSLETGSLKLANGRVIEKTLYNRRTRQDEPALFVALTFERREVLDSSNIKPMNLIGVDRGENIPAVIALTDPEGCPLSRFKDSLGNPTHILRIGESYKEKQRTIQAKKEVEQRRAGGYSRKYASKAKNLADDMVRNTARDLLYYAVTQDAMLIFENLSRGFGRQGKRTFMAERQYTRMEDWLTAKLAYEGLPSKTYLSKTLAQYTSKTCSNCGFTITSADYDRVLEKLKKTATGWMTTINGKELKVEGQITYYNRYKRQNVVKDLSVELDRLSEESVNNDISSWTKGRSGEALSLLKKRFSHRPVQEKFVCLNCGFETHADEQAALNIARSWLFLRSQEYKKYQTNKTTGNTDKRAFVETWQSFYRKKLKEVWKPAV

SEQ ID NO: 29799 - protein, 978 aa, synthetic construct
  REGION 1..978: note = engineered CasX variant
QEIKRINKIRRRLVKDSNTKKAGKTGPMKTLLVRVMTPDLRERLENLRKKPENIPQPISNTSRANLNKLLTDYTEMKKAILHVYWEEFQKDPVGLMSRVAQPASKKIDQNKLKPEMDEKGNLTTAGFACSQCGQPLFVYKLEQVSEKGKAYTNYVGRCNVAEHEKLILLAQLKPEKDSDEAVTYSLGKFGQRALDFYSIHVTKESTHPVKPLAQIAGNRYASGPVGKALSDACMGTIASFLSKYQDIIIEHQKVVKGNQKRLESLRELAGKENLEYPSVTLPPQPHTKEGVDAYNEVIARVRMWVNLNLWQKLKLSRDDAKPLLRLKGFPSFPLVERQANEVDWWDMVCNVKKLINEKKEDGKVFWQNLAGYKRQEALRPYLSSEEDRKKGKKFARYQLGDLLLHLYKKHGEDWGKVYDEAWERIDKKVEGLSKHIKLEEERRSEDAQSKAALTDWLRAKASFVIEGLKEADKDEFCRCELKLQKWYGDLRGKPFAIEAENSILDISGFSKQYNCAFIWQKDGVKKLNLYLIINYFKGGKLRFKKIKPEAFEANRFYTVINKKSGEIVPMEVNFNFDDPNLIILPLAFGKRQGREFIWNDLLSLETGSLKLANGRVIEKTLYNRRTRQDEPALFVALTFERREVLDSSNIKPMNLIGVDRGENIPAVIALTDPEGCPLSRFKDSLGNPTHILRIGESYKEKQRTIQAKKEVEQRRAGGYSRKYASKAKNLADDMVRNTARDLLYYAVTQDAMLIFENLSRGFGRQGKRTFMAERQYTRMEDWLTAKLAYEGLPSKTYLSKTLAQYTSKTCSNCGFTITSADYDRVLEKLKKTATGWMTTINGKELKVEGQITYYNRYKRQNVVKDLSVELDRLSEESVNNDISSWTKGRSGEALSLLKKRFSHRPVQEKFVCLNCGFETHADEQAALNIARSWLFLRSQEYKKYQTNKTTGNTDKRAFVETWQSFYRKKLKEVWKPAV

SEQ ID NO: 29800 - protein, 978 aa, synthetic construct
  REGION 1..978: note = engineered CasX variant
QEIKRINKIRRRLVKDSNTKKAGKTGPMKTLLVRVMTPDLRERLENLRKKPENIPQPISNTSRANLNKLLTDYTEMKKAILHVYWEEFQKDPVGLMSRVAQPASKKIDQNKLKPEMDEKGNLTTAGFACSQCGQPLFVYKLEQVSEKGKAYTNYVGRCNVAEHEKLILLAQLKPEKDSDEAVTYSLGKFGQRALDFYSIHVTKESTHPVKPLAQIAGNRYASGPVGKALSDACMGTIASFLSKYQDIIIEHQKVVKGNQKRLESLRELAGKENLEYPSVTLPPQPHTKEGVDAYNEVIARVRMWVNLNLWQKLKLSRDDAKPLLRLKGFPSFPLVERQANEVDWWDMVCNVKKLINEKKEDGKVFWQNLAGYKRQEALRPYLSSEEDRKKGKKFARYQLGDLLLHLEKKHPEDWGKVYDEAWERIDKKVEGLSKHIKLEEERRSEDAQSKAALTDWLRAKASFVIEGLKEADKDEFCRCELKLQKWYGDLRGKPFAIEAENSILDISGFSKQYNCAFIWQKDGVKKLNLYLIINYFKGGKLRFKKIKPEAFEANRFYTVINKKSGEIVPMEVNFNFDDPNLIILPLAFGKRQGREFIWNDLLSLETGSLKLANGRVIEKTLYNRRTRQDEPALFVALTFERREVLDSSNIKPMNLIGVDRGENIPAVIALTDPEGCPLSRFKDSLGNPTHILRIGESYKEKQRTIQAKKEVEQRRAGGYSRKYASKAKNLADDMVRNTARDLLYYAVTQDAMLIFENLSRGFGRQGKRTFMAERQYTRMEDWLTAKLAYEGLPSKTYLSKTLAQYTSKTCSNCGFTITSADYDRVLEKLKKTATGWMTTINGKELKVEGQITYYNRYKRQNVVKDLSVELDRLSEESVNNDISSWTKGRSGEALSLLKKRFSHRPVQEKFVCLNCGFETHADEQAALNIARSWLFLRSQEYKKYQTNKTTGNTDKRAFVETWQSFYRKKLKEVWKPAV

SEQ ID NO: 29801 - protein, 979 aa, synthetic construct
  REGION 1..979: note = engineered CasX variant
QEIKRINKIRRRLVKDSNTKKAGKTGPMKTLLVRVMTPDLRERLENLRKKPENIPQPISNTSRANLNKLLTDYTEMKKAILHVYWEEFQKDPVGLMSRVAQPASKKIDQNKLKPEMDEKGNLTTAGFACSQCGQPLFVYKLEQVSEKGKAYTNYVGRCNVAEHEKLILLAQLKPEKDSDEAVTYSLGKFGQRALDFYSIHVTKESTHPVKPLAQIAGNRYASGPVGKALSDACMGTIASFLSKYQDIIIEHQKVVKGNQKRLESLRELAGKENLEYPSVTLPPQPHTKEGVDAYNEVIARVRMWVNLNLWQKLKLSRDDAKPLLRLKGFPSFPLVERQANEVDWWDMVCNVKKLINEKKEDGKVFWQNLAGYKRQEALRPYLSSEEDRKKGKKFARYQLGDLLLHLEKKHGERDWGKVYDEAWERIDKKVEGLSKHIKLEEERRSEDAQSKAALTDWLRAKASFVIEGLKEADKDEFCRCELKLQKWYGDLRGKPFAIEAENSILDISGFSKQYNCAFIWQKDGVKKLNLYLIINYFKGGKLRFKKIKPEAFEANRFYTVINKKSGEIVPMEVNFNFDDPNLIILPLAFGKRQGREFIWNDLLSLETGSLKLANGRVIEKTLYNRRTRQDEPALFVALTFERREVLDSSNIKPMNLIGVDRGENIPAVIALTDPEGCPLSRFKDSLGNPTHILRIGESYKEKQRTIQAKKEVEQRRAGGYSRKYASKAKNLADDMVRNTARDLLYYAVTQDAMLIFENLSRGFGRQGKRTFMAERQYTRMEDWLTAKLAYEGLPSKTYLSKTLAQYTSKTCSNCGFTITSADYDRVLEKLKKTATGWMTTINGKELKVEGQITYYNRYKRQNVVKDLSVELDRLSEESVNNDISSWTKGRSGEALSLLKKRFSHRPVQEKFVCLNCGFETHADEQAALNIARSWLFLRSQEYKKYQTNKTTGNTDKRAFVETWQSFYRKKLKEVWKPAV

SEQ ID NO: 29802 - protein, 979 aa, synthetic construct
  REGION 1..979: note = engineered CasX variant
QEIKRINKIRRRLVKDSNTKKAGKTGPMKTLLVRVMTPDLRERLENLRKKPENIPQPISNTSRANLNKLLTDYTEMKKAILHVYWEEFQKDPVGLMSRVAQPASKKIDQNKLKPEMDEKGNLTTAGFACSQCGQPLFVYKLEQVSEKGKAYTNYVGRCNVAEHEKLILLAQLKPEKDSDEAVTYSLGKFGQRALDFYSIHVTKESTHPVKPLAQIAGNRYASGPVGKALSDACMGTIASFLSKYQDIIIEHQKVVKGNQKRLESLRELAGKENLEYPSVTLPPQPHTKEGVDAYNEVIARVRMWVNLNLWQKLKLSRDDAKPLLRLKGFPSFPLVERQANEVDWWDMVCNVKKLINEKKEDGKVFWQNLAGYKRQEALRPYLSSEEDRKKGKKFARYQLGDLLLHLEKKHGEYDWGKVYDEAWERIDKKVEGLSKHIKLEEERRSEDAQSKAALTDWLRAKASFVIEGLKEADKDEFCRCELKLQKWYGDLRGKPFAIEAENSILDISGFSKQYNCAFIWQKDGVKKLNLYLIINYFKGGKLRFKKIKPEAFEANRFYTVINKKSGEIVPMEVNFNFDDPNLIILPLAFGKRQGREFIWNDLLSLETGSLKLANGRVIEKTLYNRRTRQDEPALFVALTFERREVLDSSNIKPMNLIGVDRGENIPAVIALTDPEGCPLSRFKDSLGNPTHILRIGESYKEKQRTIQAKKEVEQRRAGGYSRKYASKAKNLADDMVRNTARDLLYYAVTQDAMLIFENLSRGFGRQGKRTFMAERQYTRMEDWLTAKLAYEGLPSKTYLSKTLAQYTSKTCSNCGFTITSADYDRVLEKLKKTATGWMTTINGKELKVEGQITYYNRYKRQNVVKDLSVELDRLSEESVNNDISSWTKGRSGEALSLLKKRFSHRPVQEKFVCLNCGFETHADEQAALNIARSWLFLRSQEYKKYQTNKTTGNTDKRAFVETWQSFYRKKLKEVWKPAV

SEQ ID NO: 29803 - protein, 978 aa, synthetic construct
  REGION 1..978: note = engineered CasX variant
QEIKRINKIRRRLVKDSNTKKAGKTGPMKTLLVRVMTPDLRERLENLRKKPENIPQPISNTSRANLNKLLTDYTEMKKAILHVYWEEFQKDPVGLMSRVAQPASKKIDQNKLKPEMDEKGNLTTAGFACSQCGQPLFVYKLEQVSEKGKAYTNYVGRCNVAEHEKLILLAQLKPEKDSDEAVTYSLGKFGQRALDFYSIHVTKESTHPVKPLAQIAGNRYASGPVGKALSDACMGTIASFLSKYQDIIIEHQKVVKGNQKRLESLRELAGKENLEYPSVTLPPQPHTKEGVDAYNEVIARVRMWVNLNLWQKLKLSRDDAKPLLRLKGFPSFPLVERQANEVDWWDMVCNVKKLINEKKEDGKVFWQNLAGYKRQEALRPYLSSEEDRKKGKKFARYQLGDLLLHLEKKHGEDWGDVYDEAWERIDKKVEGLSKHIKLEEERRSEDAQSKAALTDWLRAKASFVIEGLKEADKDEFCRCELKLQKWYGDLRGKPFAIEAENSILDISGFSKQYNCAFIWQKDGVKKLNLYLIINYFKGGKLRFKKIKPEAFEANRFYTVINKKSGEIVPMEVNFNFDDPNLIILPLAFGKRQGREFIWNDLLSLETGSLKLANGRVIEKTLYNRRTRQDEPALFVALTFERREVLDSSNIKPMNLIGVDRGENIPAVIALTDPEGCPLSRFKDSLGNPTHILRIGESYKEKQRTIQAKKEVEQRRAGGYSRKYASKAKNLADDMVRNTARDLLYYAVTQDAMLIFENLSRGFGRQGKRTFMAERQYTRMEDWLTAKLAYEGLPSKTYLSKTLAQYTSKTCSNCGFTITSADYDRVLEKLKKTATGWMTTINGKELKVEGQITYYNRYKRQNVVKDLSVELDRLSEESVNNDISSWTKGRSGEALSLLKKRFSHRPVQEKFVCLNCGFETHADEQAALNIARSWLFLRSQEYKKYQTNKTTGNTDKRAFVETWQSFYRKKLKEVWKPAV

SEQ ID NO: 29804 - protein, 978 aa, synthetic construct
  REGION 1..978: note = engineered CasX variant
QEIKRINKIRRRLVKDSNTKKAGKTGPMKTLLVRVMTPDLRERLENLRKKPENIPQPISNTSRANLNKLLTDYTEMKKAILHVYWEEFQKDPVGLMSRVAQPASKKIDQNKLKPEMDEKGNLTTAGFACSQCGQPLFVYKLEQVSEKGKAYTNYVGRCNVAEHEKLILLAQLKPEKDSDEAVTYSLGKFGQRALDFYSIHVTKESTHPVKPLAQIAGNRYASGPVGKALSDACMGTIASFLSKYQDIIIEHQKVVKGNQKRLESLRELAGKENLEYPSVTLPPQPHTKEGVDAYNEVIARVRMWVNLNLWQKLKLSRDDAKPLLRLKGFPSFPLVERQANEVDWWDMVCNVKKLINEKKEDGKVFWQNLAGYKRQEALRPYLSSEEDRKKGKKFARYQLGDLLLHLEKKHGEDWGKVYGEAWERIDKKVEGLSKHIKLEEERRSEDAQSKAALTDWLRAKASFVIEGLKEADKDEFCRCELKLQKWYGDLRGKPFAIEAENSILDISGFSKQYNCAFIWQKDGVKKLNLYLIINYFKGGKLRFKKIKPEAFEANRFYTVINKKSGEIVPMEVNFNFDDPNLIILPLAFGKRQGREFIWNDLLSLETGSLKLANGRVIEKTLYNRRTRQDEPALFVALTFERREVLDSSNIKPMNLIGVDRGENIPAVIALTDPEGCPLSRFKDSLGNPTHILRIGESYKEKQRTIQAKKEVEQRRAGGYSRKYASKAKNLADDMVRNTARDLLYYAVTQDAMLIFENLSRGFGRQGKRTFMAERQYTRMEDWLTAKLAYEGLPSKTYLSKTLAQYTSKTCSNCGFTITSADYDRVLEKLKKTATGWMTTINGKELKVEGQITYYNRYKRQNVVKDLSVELDRLSEESVNNDISSWTKGRSGEALSLLKKRFSHRPVQEKFVCLNCGFETHADEQAALNIARSWLFLRSQEYKKYQTNKTTGNTDKRAFVETWQSFYRKKLKEVWKPAV

SEQ ID NO: 29805 - protein, 978 aa, synthetic construct
  REGION 1..978: note = engineered CasX variant
QEIKRINKIRRRLVKDSNTKKAGKTGPMKTLLVRVMTPDLRERLENLRKKPENIPQPISNTSRANLNKLLTDYTEMKKAILHVYWEEFQKDPVGLMSRVAQPASKKIDQNKLKPEMDEKGNLTTAGFACSQCGQPLFVYKLEQVSEKGKAYTNYVGRCNVAEHEKLILLAQLKPEKDSDEAVTYSLGKFGQRALDFYSIHVTKESTHPVKPLAQIAGNRYASGPVGKALSDACMGTIASFLSKYQDIIIEHQKVVKGNQKRLESLRELAGKENLEYPSVTLPPQPHTKEGVDAYNEVIARVRMWVNLNLWQKLKLSRDDAKPLLRLKGFPSFPLVERQANEVDWWDMVCNVKKLINEKKEDGKVFWQNLAGYKRQEALRPYLSSEEDRKKGKKFARYQLGDLLLHLEKKHGEDWGKVYDEAWERIDKKVEGLSKHIKLEEERRSEDAQSKAALTDWLRAKASFVIEGKKEADKDEFCRCELKLQKWYGDLRGKPFAIEAENSILDISGFSKQYNCAFIWQKDGVKKLNLYLIINYFKGGKLRFKKIKPEAFEANRFYTVINKKSGEIVPMEVNFNFDDPNLIILPLAFGKRQGREFIWNDLLSLETGSLKLANGRVIEKTLYNRRTRQDEPALFVALTFERREVLDSSNIKPMNLIGVDRGENIPAVIALTDPEGCPLSRFKDSLGNPTHILRIGESYKEKQRTIQAKKEVEQRRAGGYSRKYASKAKNLADDMVRNTARDLLYYAVTQDAMLIFENLSRGFGRQGKRTFMAERQYTRMEDWLTAKLAYEGLPSKTYLSKTLAQYTSKTCSNCGFTITSADYDRVLEKLKKTATGWMTTINGKELKVEGQITYYNRYKRQNVVKDLSVELDRLSEESVNNDISSWTKGRSGEALSLLKKRFSHRPVQEKFVCLNCGFETHADEQAALNIARSWLFLRSQEYKKYQTNKTTGNTDKRAFVETWQSFYRKKLKEVWKPAV

SEQ ID NO: 29806 - protein, 978 aa, synthetic construct
  REGION 1..978: note = engineered CasX variant
QEIKRINKIRRRLVKDSNTKKAGKTGPMKTLLVRVMTPDLRERLENLRKKPENIPQPISNTSRANLNKLLTDYTEMKKAILHVYWEEFQKDPVGLMSRVAQPASKKIDQNKLKPEMDEKGNLTTAGFACSQCGQPLFVYKLEQVSEKGKAYTNYVGRCNVAEHEKLILLAQLKPEKDSDEAVTYSLGKFGQRALDFYSIHVTKESTHPVKPLAQIAGNRYASGPVGKALSDACMGTIASFLSKYQDIIIEHQKVVKGNQKRLESLRELAGKENLEYPSVTLPPQPHTKEGVDAYNEVIARVRMWVNLNLWQKLKLSRDDAKPLLRLKGFPSFPLVERQANEVDWWDMVCNVKKLINEKKEDGKVFWQNLAGYKRQEALRPYLSSEEDRKKGKKFARYQLGDLLLHLEKKHGEDWGKVYDEAWERIDKKVEGLSKHIKLEEERRSEDAQSKAALTDWLRAKASFVIEGSKEADKDEFCRCELKLQKWYGDLRGKPFAIEAENSILDISGFSKQYNCAFIWQKDGVKKLNLYLIINYFKGGKLRFKKIKPEAFEANRFYTVINKKSGEIVPMEVNFNFDDPNLIILPLAFGKRQGREFIWNDLLSLETGSLKLANGRVIEKTLYNRRTRQDEPALFVALTFERREVLDSSNIKPMNLIGVDRGENIPAVIALTDPEGCPLSRFKDSLGNPTHILRIGESYKEKQRTIQAKKEVEQRRAGGYSRKYASKAKNLADDMVRNTARDLLYYAVTQDAMLIFENLSRGFGRQGKRTFMAERQYTRMEDWLTAKLAYEGLPSKTYLSKTLAQYTSKTCSNCGFTITSADYDRVLEKLKKTATGWMTTINGKELKVEGQITYYNRYKRQNVVKDLSVELDRLSEESVNNDISSWTKGRSGEALSLLKKRFSHRPVQEKFVCLNCGFETHADEQAALNIARSWLFLRSQEYKKYQTNKTTGNTDKRAFVETWQSFYRKKLKEVWKPAV

SEQ ID NO: 29807 - protein, 979 aa, synthetic construct
  REGION 1..979: note = engineered CasX variant
QEIKRINKIRRRLVKDSNTKKAGKTGPMKTLLVRVMTPDLRERLENLRKKPENIPQPISNTSRANLNKLLTDYTEMKKAILHVYWEEFQKDPVGLMSRVAQPASKKIDQNKLKPEMDEKGNLTTAGFACSQCGQPLFVYKLEQVSEKGKAYTNYVGRCNVAEHEKLILLAQLKPEKDSDEAVTYSLGKFGQRALDFYSIHVTKESTHPVKPLAQIAGNRYASGPVGKALSDACMGTIASFLSKYQDIIIEHQKVVKGNQKRLESLRELAGKENLEYPSVTLPPQPHTKEGVDAYNEVIARVRMWVNLNLWQKLKLSRDDAKPLLRLKGFPSFPLVERQANEVDWWDMVCNVKKLINEKKEDGKVFWQNLAGYKRQEALRPYLSSEEDRKKGKKFARYQLGDLLLHLEKKHGEDWGKVYDEAWERIDKKVEGLSKHIKLEEERRSEDAQSKAALTDWLRAKASFVIEGLKEADDKDEFCRCELKLQKWYGDLRGKPFAIEAENSILDISGFSKQYNCAFIWQKDGVKKLNLYLIINYFKGGKLRFKKIKPEAFEANRFYTVINKKSGEIVPMEVNFNFDDPNLIILPLAFGKRQGREFIWNDLLSLETGSLKLANGRVIEKTLYNRRTRQDEPALFVALTFERREVLDSSNIKPMNLIGVDRGENIPAVIALTDPEGCPLSRFKDSLGNPTHILRIGESYKEKQRTIQAKKEVEQRRAGGYSRKYASKAKNLADDMVRNTARDLLYYAVTQDAMLIFENLSRGFGRQGKRTFMAERQYTRMEDWLTAKLAYEGLPSKTYLSKTLAQYTSKTCSNCGFTITSADYDRVLEKLKKTATGWMTTINGKELKVEGQITYYNRYKRQNVVKDLSVELDRLSEESVNNDISSWTKGRSGEALSLLKKRFSHRPVQEKFVCLNCGFETHADEQAALNIARSWLFLRSQEYKKYQTNKTTGNTDKRAFVETWQSFYRKKLKEVWKPAV

SEQ ID NO: 29808 - protein, 979 aa, synthetic construct
  REGION 1..979: note = engineered CasX variant
QEIKRINKIRRRLVKDSNTKKAGKTGPMKTLLVRVMTPDLRERLENLRKKPENIPQPISNTSRANLNKLLTDYTEMKKAILHVYWEEFQKDPVGLMSRVAQPASKKIDQNKLKPEMDEKGNLTTAGFACSQCGQPLFVYKLEQVSEKGKAYTNYVGRCNVAEHEKLILLAQLKPEKDSDEAVTYSLGKFGQRALDFYSIHVTKESTHPVKPLAQIAGNRYASGPVGKALSDACMGTIASFLSKYQDIIIEHQKVVKGNQKRLESLRELAGKENLEYPSVTLPPQPHTKEGVDAYNEVIARVRMWVNLNLWQKLKLSRDDAKPLLRLKGFPSFPLVERQANEVDWWDMVCNVKKLINEKKEDGKVFWQNLAGYKRQEALRPYLSSEEDRKKGKKFARYQLGDLLLHLEKKHGEDWGKVYDEAWERIDKKVEGLSKHIKLEEERRSEDAQSKAALTDWLRAKASFVIEGLKEADKDEFCRCELKLQKWYGDLRGKPFAIEAENSILDISGFSKQYNCAFIWQKDGVKKLNLYLIINYFKGGKLRFKKIKPEAFEANRFYTVINKKSGEIVPMEVNFNFDDPNLIILPLAFGKRQGREFIWNDLLSLETGSLKLANGRVIEKTLYNRRTRQDEPALFVALTFERREVLDSSNIKPMNLIGVDRGENIPAVIALTDPEGCPLSRFKDSLGNPTHILRIGESYKEKQRTIQAKKEVEQRRAGGYSRKYASKAKNLADDMVRNTARDLLYYAVTQDAMLIFENLSRGFGRQGKRTFMAERQYTRMEDWLTAKLAYEGLPSKTYLSKTLAQYTSKTCSNCGFTITSADYDRVLEKLKKTATGWMTTINGKELKVEGQITYYNRYKRQNVVKDLSVELDRLSEESVNNDISSWTKGRSGNEALSLLKKRFSHRPVQEKFVCLNCGFETHADEQAALNIARSWLFLRSQEYKKYQTNKTTGNTDKRAFVETWQSFYRKKLKEVWKPAV

SEQ ID NO: 29809 - protein, 978 aa, synthetic construct
  REGION 1..978: note = engineered CasX variant
QEIKRINKIRRRLVKDSNTKKAGKTGPMKTLLVRVMTPDLRERLENLRKKPENIPQPISNTSRANLNKLLTDYTEMKKAILHVYWEEFQKDPVGLMSRVAQPASKKIDQNKLKPEMDEKGNLTTAGFACSQCGQPLFVYKLEQVSEKGKAYTNYVGRCNVAEHEKLILLAQLKPEKDSDEAVTYSLGKFGQRALDFYSIHVTKESTHPVKPLAQIAGNRYASGPVGKALSDACMGTIASFLSKYQDIIIEHQKVVKGNQKRLESLRELAGKENLEYPSVTLPPQPHTKEGVDAYNEVIARVRMWVNLNLWQKLKLSRDDAKPLLRLKGFPSFPLVERQANEVDWWDMVCNVKKLINEKKEDGKVFWQNLAGYKRQEALRPYLSSEEDRQKGKKFARYQLGDLLLHLEKKHGEDWGKVYDEAWERIDKKVEGLSKHIKLEEERRSEDAQSKAALTDWLRAKASFVIEGLKEADKDEFCRCELKLQKWYGDLRGKPFAIEAENSILDISGFSKQYNCAFIWQKDGVKKLNLYLIINYFKGGKLRFKKIKPEAFEANRFYTVINKKSGEIVPMEVNFNFDDPNLIILPLAFGKRQGREFIWNDLLSLETGSLKLANGRVIEKTLYNRRTRQDEPALFVALTFERREVLDSSNIKPMNLIGVDRGENIPAVIALTDPEGCPLSRFKDSLGNPTHILRIGESYKEKQRTIQAKKEVEQRRAGGYSRKYASKAKNLADDMVRNTARDLLYYAVTQDAMLIFENLSRGFGRQGKRTFMAERQYTRMEDWLTAKLAYEGLPSKTYLSKTLAQYTSKTCSNCGFTITSADYDRVLEKLKKTATGWMTTINGKELKVEGQITYYNRYKRQNVVKDLSVELDRLSEESVNNDISSWTKGRSGEALSLLKKRFSHRPVQEKFVCLNCGFETHADEQAALNIARSWLFLRSQEYKKYQTNKTTGNTDKRAFVETWQSFYRKKLKEVWKPAV

SEQ ID NO: 29810 - protein, 978 aa, synthetic construct
  REGION 1..978: note = engineered CasX variant
QEIKRINKIRRRLVKDSNTKKAGKTGPMKTLLVRVMTPDLRERLENLRKKPENIPQPISNTSRANLNKLLTDYTEMKKAILHVYWEEFQKDPVGLMSRVAQPASKKIDQNKLKPEMDEKGNLTTAGFACSQCGQPLFVYKLEQVSEKGKAYTNYVGRCNVAEHEKLILLAQLKPEKDSDEAVTYSLGKFGQRALDFYSIHVTKESTHPVKPLAQIAGNRYASGPVGKALSDACMGTIASFLSKYQDIIIEHQKVVKGNQKRLESLRELAGKENLEYPSVTLPPQPHTKEGVDAYNEVIARVRMWVNLNLWQKLKLSRDDAKPLLRLKGFPSFPLVERQANEVDWWDMVCNVKKLINEKKEDGKVFWQNLAGYKRQEALRPYLSSEEDRKKGKKFARYQLGDLLLHLEKKHGEDWGKVYDEAWERIDKKVEGLSKHIKLEEERRSEDAQSKAALTDWLRAKASFVIEGLKEADKDEFCRCELKLQKWYGDLRGKPFAIEAENSILDISGFSKQYNCAFIWQKDGVKKLNLYLIINYFKGGKLRFKKIKPEAFEANRFYTVINKKSGEIVPMEVNFNFDDPNLIILPLAFGKRQGREFIWNDLLSLETGSLKLANGRVIEKTLYNRRTRQDEPALFVALTFERREVLDSSNIKPMNLIGVDRGENIPAVIALTDPEGCPLSRFKDSLGNPTHILRIGESYKEKQRTIQAKKEVEQRRAGGYSRKYASKAKNLADDMVRNTARDLLYYAVTQDAMLIFENLSRGFGRQGKRTFMAERQYTRMEDWLTAKLAYEGLPSQTYLSKTLAQYTSKTCSNCGFTITSADYDRVLEKLKKTATGWMTTINGKELKVEGQITYYNRYKRQNVVKDLSVELDRLSEESVNNDISSWTKGRSGEALSLLKKRFSHRPVQEKFVCLNCGFETHADEQAALNIARSWLFLRSQEYKKYQTNKTTGNTDKRAFVETWQSFYRKKLKEVWKPAV

SEQ ID NO: 29811 - protein, 978 aa, synthetic construct
  REGION 1..978: note = engineered CasX variant
QEIKRINKIRRRLVKDSNTKKAGKTGPMKTLLVRVMTPDLRERLENLRKKPENIPQPISNTSRANLNKLLTDYTEMKKAILHVYWEEFQKDPVGLMSRVAQPASKKIDQNKLKPEMDEKGNLTTAGFACSQCGQPLFVYKLEQVSEKGKAYTNYVGRCNVAEHEKLILLAQLKPEKDSDEAVTYSLGKFGQRALDFYSIHVTKESTHPVKPLAQIAGNRYASGPVGKALSDACMGTIASFLSKYQDIIIEHQKVVKGNQKRLESLRELAGKENLEYPSVTLPPQPHTKEGVDAYNEVIARVRMWVNLNLWQKLKLSRDDAKPLLRLKGFPSFPLVERQANEVDWWDMVCNVKKLINEKKEDGKVFWQNLAGYKRQEALRPYLSSEEDRKKGKKFARYQLGDLLLHLEKKHGEDWGKVYDEAWERIDKKVEGLSKHIKLEEERRSEDAQSKAALTDWLRAKASFVIEGLKEADKDEFCRCELKLQKWYGDLRGKPFAIEAENSILDISGFSKQYNCAFIWQKDGVKKLNLYLIINYFKGGKLRFKKIKPEAFEANRFYTVINKKSGEIVPMEVNFNFDDPNLIILPLAFGKRQGREFIWNDLLSLETGSLKLANGRVIEKTLYNRRTRQDEPALFVALTFERREVLDSSNIKPMNLIGVDRGENIPAVIALTDPEGCPLSRFKDSLGNPTHILRIGESYKEKQRTIQAKKEVEQRRAGGYSRKYASKAKNLADDMVRNTARDLLYYAVTQDAMLIFENLSRGFGRQGKRTFMAERQYTRMEDWLTAKLAYNGLPSKTYLSKTLAQYTSKTCSNCGFTITSADYDRVLEKLKKTATGWMTTINGKELKVEGQITYYNRYKRQNVVKDLSVELDRLSEESVNNDISSWTKGRSGEALSLLKKRFSHRPVQEKFVCLNCGFETHADEQAALNIARSWLFLRSQEYKKYQTNKTTGNTDKRAFVETWQSFYRKKLKEVWKPAV

SEQ ID NO: 29812 - protein, 978 aa, synthetic construct
  REGION 1..978: note = engineered CasX variant
QEIKRINKIRRRLVKDSNTKKAGKTGPMKTLLVRVMTPDLRERLENLRKKPENIPQPISNTSRANLNKLLTDYTEMKKAILHVYWEEFQKDPVGLMSRVAQPASKKIDQNKLKPEMDEKGNLTTAGFACSQCGQPLFVYKLEQVSEKGKAYTNYVGRCNVAEHEKLIQLAQLKPEKDSDEAVTYSLGKFGQRALDFYSIHVTKESTHPVKPLAQIAGNRYASGPVGKALSDACMGTIASFLSKYQDIIIEHQKVVKGNQKRLESLRELAGKENLEYPSVTLPPQPHTKEGVDAYNEVIARVRMWVNLNLWQKLKLSRDDAKPLLRLKGFPSFPLVERQANEVDWWDMVCNVKKLINEKKEDGKVFWQNLAGYKRQEALRPYLSSEEDRKKGKKFARYQLGDLLLHLEKKHGEDWGKVYDEAWERIDKKVEGLSKHIKLEEERRSEDAQSKAALTDWLRAKASFVIEGLKEADKDEFCRCELKLQKWYGDLRGKPFAIEAENSILDISGFSKQYNCAFIWQKDGVKKLNLYLIINYFKGGKLRFKKIKPEAFEANRFYTVINKKSGEIVPMEVNFNFDDPNLIILPLAFGKRQGREFIWNDLLSLETGSLKLANGRVIEKTLYNRRTRQDEPALFVALTFERREVLDSSNIKPMNLIGVDRGENIPAVIALTDPEGCPLSRFKDSLGNPTHILRIGESYKEKQRTIQAKKEVEQRRAGGYSRKYASKAKNLADDMVRNTARDLLYYAVTQDAMLIFENLSRGFGRQGKRTFMAERQYTRMEDWLTAKLAYEGLPSKTYLSKTLAQYTSKTCSNCGFTITSADYDRVLEKLKKTATGWMTTINGKELKVEGQITYYNRYKRQNVVKDLSVELDRLSEESVNNDISSWTKGRSGEALSLLKKRFSHRPVQEKFVCLNCGFETHADEQAALNIARSWLFLRSQEYKKYQTNKTTGNTDKRAFVETWQSFYRKKLKEVWKPAV

SEQ ID NO: 29813 - protein, 978 aa, synthetic construct
  REGION 1..978: note = engineered CasX variant
QEIKRINKIRRRLVKDSNTKKAGKTGPMKTLLVRVMTPDLRERLENLRKKPENIPQPISNTSRANLNKLLTDYTEMKKAILHVYWEEFQKDPVGLMSRVAQPASKKIDQNKLKPEMDEKGNLTTAGFACSQCGQPLFVYKLEQVSEKGKAYTNYVGRCNVAEHEKLILLAQLKPEKDSDEAVTYSLGKFGQRALDFYSIHVTKESTHPVKPLAQIAGNRYASGPVGKALSDACMGTIASFLSKYQDIIIEHQKVVKGNQKRLESLRELAGKENLEYPSVTLPPQPHTKEGVDAYNEVIARVRMWVNLNLWQKLKLSRDDAKPLLRLKGFPSFPLVERQANEVDWWDMVCNVKKLINEKKEDGKVFWQNLAIYKRQEALRPYLSSEEDRKKGKKFARYQLGDLLLHLEKKHGEDWGKVYDEAWERIDKKVEGLSKHIKLEEERRSEDAQSKAALTDWLRAKASFVIEGLKEADKDEFCRCELKLQKWYGDLRGKPFAIEAENSILDISGFSKQYNCAFIWQKDGVKKLNLYLIINYFKGGKLRFKKIKPEAFEANRFYTVINKKSGEIVPMEVNFNFDDPNLIILPLAFGKRQGREFIWNDLLSLETGSLKLANGRVIEKTLYNRRTRQDEPALFVALTFERREVLDSSNIKPMNLIGVDRGENIPAVIALTDPEGCPLSRFKDSLGNPTHILRIGESYKEKQRTIQAKKEVEQRRAGGYSRKYASKAKNLADDMVRNTARDLLYYAVTQDAMLIFENLSRGFGRQGKRTFMAERQYTRMEDWLTAKLAYEGLPSKTYLSKTLAQYTSKTCSNCGFTITSADYDRVLEKLKKTATGWMTTINGKELKVEGQITYYNRYKRQNVVKDLSVELDRLSEESVNNDISSWTKGRSGEALSLLKKRFSHRPVQEKFVCLNCGFETHADEQAALNIARSWLFLRSQEYKKYQTNKTTGNTDKRAFVETWQSFYRKKLKEVWKPAV

SEQ ID NO: 29814 - protein, 978 aa, synthetic construct
  REGION 1..978: note = engineered CasX variant
QEIKRINKIRRRLVKDSNTKKAGKTGPMKTLLVRVMTPDLRERLENLRKKPENIPQPISNTSRANLNKLLTDYTEMKKAILHVYWEEFQKDPVGLMSRVAQPASKKIDQNKLKPEMDEKGNLTTAGFACSQCGQPLFVYKLEQVSEKGKAYTNYVGRCNVAEHEKLILLAQLKPEKDSDEAVTYSLGKFGQRALDFYSIHVTKESTHPVKPLAQIAGNRYASGPVGKALSDACMGTIASFLSKYQDIIIEHQKVVKGNQKRLESLRELAGKENLEYPSVTLPPQPHTKEGVDAYNEVIARVRMWVNLNLWQKLKLSRDDAKPLLRLKGFPSFPLVERQANEVDWWDMVCNVKKLINEKKEDGKVFWQNLAGYKRQEALRPYLSSEEDREKGKKFARYQLGDLLLHLEKKHGEDWGKVYDEAWERIDKKVEGLSKHIKLEEERRSEDAQSKAALTDWLRAKASFVIEGLKEADKDEFCRCELKLQKWYGDLRGKPFAIEAENSILDISGFSKQYNCAFIWQKDGVKKLNLYLIINYFKGGKLRFKKIKPEAFEANRFYTVINKKSGEIVPMEVNFNFDDPNLIILPLAFGKRQGREFIWNDLLSLETGSLKLANGRVIEKTLYNRRTRQDEPALFVALTFERREVLDSSNIKPMNLIGVDRGENIPAVIALTDPEGCPLSRFKDSLGNPTHILRIGESYKEKQRTIQAKKEVEQRRAGGYSRKYASKAKNLADDMVRNTARDLLYYAVTQDAMLIFENLSRGFGRQGKRTFMAERQYTRMEDWLTAKLAYEGLPSKTYLSKTLAQYTSKTCSNCGFTITSADYDRVLEKLKKTATGWMTTINGKELKVEGQITYYNRYKRQNVVKDLSVELDRLSEESVNNDISSWTKGRSGEALSLLKKRFSHRPVQEKFVCLNCGFETHADEQAALNIARSWLFLRSQEYKKYQTNKTTGNTDKRAFVETWQSFYRKKLKEVWKPAV

SEQ ID NO: 29815 - protein, 978 aa, synthetic construct
  REGION 1..978: note = engineered CasX variant
QEIKRINKIRRRLVKDSNTKKAGKTGPMKTLLVRVMTPDLRERLENLRKKPENIPQPISNTSRANLNKLLTDYTEMKKAILHVYWEEFQKDPVGLMSRVAQPASKKIDQNKLKPEMDEKGNLTTAGFACSQCGQPLFVYKLEQVSEKGKAYTNYVGRCNVAEHEKLILLAQLKPEKDSDEAVTYSLGKFGQRALDFYSIHVTKESTHPVKPLAQIAGNRYASGPVGKALSDACMGTIASFLSKYQDIIIEHQKVVKGNQKRLESLRELAGKENLEYPSVTLPPQPHTKEGVDAYNEVIARVRMWVNLNLWQKLKLSRDDAKPLLRLKGFPSFPLVERQANEVDWWDMVCNVKKLINEKKEDGKVFWQNLAGYKRQEALRPYLSSEEDRKKGKKFARYQLGDLLLHLEKKHGEDWGKVYDEAWERIDKKVEGLSKHIKLEEERRSEDAQSKAALTDWLRAKASFVIEGLKEADKDEFCRCELKLQKWYGDLRGKPFAIEAENSILDISGFSKQYNCAFIWQKDGVKKLNLYLIINYFKGGKLRFKKIKPEAFEANRFYTVINKKSGEIVIMEVNFNFDDPNLIILPLAFGKRQGREFIWNDLLSLETGSLKLANGRVIEKTLYNRRTRQDEPALFVALTFERREVLDSSNIKPMNLIGVDRGENIPAVIALTDPEGCPLSRFKDSLGNPTHILRIGESYKEKQRTIQAKKEVEQRRAGGYSRKYASKAKNLADDMVRNTARDLLYYAVTQDAMLIFENLSRGFGRQGKRTFMAERQYTRMEDWLTAKLAYEGLPSKTYLSKTLAQYTSKTCSNCGFTITSADYDRVLEKLKKTATGWMTTINGKELKVEGQITYYNRYKRQNVVKDLSVELDRLSEESVNNDISSWTKGRSGEALSLLKKRFSHRPVQEKFVCLNCGFETHADEQAALNIARSWLFLRSQEYKKYQTNKTTGNTDKRAFVETWQSFYRKKLKEVWKPAV

SEQ ID NO: 29816 - protein, 978 aa, synthetic construct
  REGION 1..978: note = engineered CasX variant
QEIKRINKIRRRLVKDSNTKKAGKTGPMKTLLVRVMTPDLRERLENLRKKPENIPQPISNTSRANLNKLLTDYTEMKKAILHVYWEEFQKDPVGLMSRVAQPASKKIDQNKLKPEMDEKGNLTTAGFACSQCGQPLFVYKLEQVSEKGKAYTNYFGRCNVAEHEKLILLAQLKPEKDSDEAVTYSLGKFGQRALDFYSIHVTKESTHPVKPLAQIAGNRYASGPVGKALSGACMGTIASFLSKYQDIIIEHQKVVKGNQKRLESLRELAGKENLEYPSVTLPPQPHTKEGVDAYNEVIARVRMWVNLNLWQKLKLSRDDAKPLLRLKGFPSFPLVERQANEVDWWDMVCNVKKLINEKKEDGKVFWQNLAGYKRQEALRPYLSSEEDRKKGKKFARYQLGDLLLHLEKKHGEDWGKVYDEAWERIDKKVEGLSKHIKLEEERRSEDAQSKAALTDWLRAKASFVIEGLKEADKDEFCRCELKLQKWYGDLRGKPFAIEAENSILDISGFSKQYNCAFIWQKDGVKKLNLYLIINYFKGGKLRFKKIKPEAFEANRFYTVINKKSGEIVPMEVNFNFDDPNLIILPLAFGKRQGREFIWNDLLSLETGSLKLANGRVIEKTLYNRRTRQDEPALFVALTFERREVLDSSNIKPMNLIGVDRGENIPAVIALTDPEGCPLSRFKDSLGNPTHILRIGESYKEKQRTIQAKKEVEQRRAGGYSRKYASKAKNLADDMVRNTARDLLYYAVTQDAMLIFENLSRGFGRQGKRTFMAERQYTRMEDWLTAKLAYEGLASKTYLSKTLAQYTSKTCSNCGFTITSADYDRVLEKLKKTATGWMTTINGKELKVEGQITYYNRYKRQNVVKDLSVELDRLSEESVNNDISSWTKGRSGEALSLLKKRFSHRPVQEKFVCLNCGFETHADEQAALNIARSWLFLRSQEYKKYQTNKTTGNTDKRAFVETWQSFYRKKLKEVWKPAV

SEQ ID NO: 29817 - protein, 978 aa, synthetic construct
  REGION 1..978: note = engineered CasX variant
QEIKRINKIRRRLVKDSNTKKAGKTGPMKTLLVRVMTPDLRERLENLRKKPENIPQPISNTSRANLNKLLTDYTEMKKAILHVYWEEFQKDPVGLMSRVAQPASKKIDQNKLKPEMDEKGNLTTAGFACSQCGQPLFVYKLEQVSEKGKAYTNYFGRCNVAEHEKLILLAQLKPEKDSDEAVTYSLGKFGQRALDFYSIHVTKESTHPVKPLAQIAGNRYASGPVGKALSDACMGTIASFLSKYQDIIIEHQKVVKGNQKRLESLRELAGKENLEYPSVTLPPQPHTKEGVDAYNEVIARVRMWVNLNLWQKLKLSRDDAKPLLRLKNFPSFPLVERQANEVDWWDMVCNVKKLINEKKEDGKVFWQNLAGYKRQEALRPYLSSEEDRKKGKKFARYQLGDLLLHLEKKHGEDWGKVYDEAWERIDKKVEGLSKHIKLEEERRSEDAQSKAALTDWLRAKASFVIEGLKEADKDEFCRCELKLQKWYGDLRGKPFAIEAENSILDISGFSKQYNCAFIWQKDGVKKLNLYLIINYFKGGKLRFKKIKPEAFEANRFYTVINKKSGEIVPMEVNFNFDDPNLIILPLAFGKRQGREFIWNDLLSLETGSLKLANGRVIEKTLYNRRTRQDEPALFVALTFERREVLDSSNIKPMNLIGVDRGENIPAVIALTDPEGCPLSRFKDSLGNPTHILRIGESYKEKQRTIQAKKEVEQRRAGGYSRKYASKAKNLADDMVRNTARDLLYYAVTQDAMLIFENLSRGFGRQGKRTFMAERQYTRMEDWLTAKLAYEGLASKTYLSKTLAQYTSKTCSNCGFTITSADYDRVLEKLKKTATGWMTTINGKELKVEGQITYYNRYKRQNVVKDLSVELDRLSEESVNNDISSWTKGRSGEALSLLKKRFSHRPVQEKFVCLNCGFETHADEQAALNIARSWLFLRSQEYKKYQTNKTTGNTDKRAFVETWQSFYRKKLKEVWKPAV

SEQ ID NO: 29818 - protein, 978 aa, synthetic construct
  REGION 1..978: note = engineered CasX variant
QEIKRINKIRRRLVKDSNTKKAGKTGPMKTLLVRVMTPDLRERLENLRKKPENIPQPISNTSRANLNKLLTDYTEMKKAILHVYWEEFQKDPVGLMSRVAQPASKKIDQNKLKPEMDEKGNLTTAGFACSQCGQPLFVYKLEQVSEKGKAYTNYFGRCNVAEHEKLILLAQLKPEKDSDEAVTYSLGKFGQRALDFYSIHVTKESTHPVKPLAQIAGNRYASGPVGKALSDACMGTIASFLSKYQDIIIEHQKVVKGNQKRLESLRELAGKENLEYPSVTLPPQPHTKEGVDAYNEVIARVRMWVNLNLWQKLKLSRDDAKPLLRLKGFPSFPLVERQANEVDWWDMVCNVKKLINEKKEDGKVFWQNLAGYKRQEALRPYLSSEEDRKKGKKFARYQLGDLLNHLEKKHGEDWGKVYDEAWERIDKKVEGLSKHIKLEEERRSEDAQSKAALTDWLRAKASFVIEGLKEADKDEFCRCELKLQKWYGDLRGKPFAIEAENSILDISGFSKQYNCAFIWQKDGVKKLNLYLIINYFKGGKLRFKKIKPEAFEANRFYTVINKKSGEIVPMEVNFNFDDPNLIILPLAFGKRQGREFIWNDLLSLETGSLKLANGRVIEKTLYNRRTRQDEPALFVALTFERREVLDSSNIKPMNLIGVDRGENIPAVIALTDPEGCPLSRFKDSLGNPTHILRIGESYKEKQRTIQAKKEVEQRRAGGYSRKYASKAKNLADDMVRNTARDLLYYAVTQDAMLIFENLSRGFGRQGKRTFMAERQYTRMEDWLTAKLAYEGLASKTYLSKTLAQYTSKTCSNCGFTITSADYDRVLEKLKKTATGWMTTINGKELKVEGQITYYNRYKRQNVVKDLSVELDRLSEESVNNDISSWTKGRSGEALSLLKKRFSHRPVQEKFVCLNCGFETHADEQAALNIARSWLFLRSQEYKKYQTNKTTGNTDKRAFVETWQSFYRKKLKEVWKPAV

SEQ ID NO: 29819 - protein, 978 aa, synthetic construct
  REGION 1..978: note = engineered CasX variant
QEIKRINKIRRRLVKDSNTKKAGKTGPMKTLLVRVMTPDLRERLENLRKKPENIPQPISNTSRANLNKLLTDYTEMKKAILHVYWEEFQKDPVGLMSRVAQPASKKIDQNKLKPEMDEKGNLTTAGFACSQCGQPLFVYKLEQVSEKGKAYTNYFGRCNVAEHEKLILLAQLKPEKDSDEAVTYSLGKFGQRALDFYSIHVTKESTHPVKPLAQIAGNRYASGPVGKALSDACMGTIASFLSKYQDIIIEHQKVVKGNQKRLESLRELAGKENLEYPSVTLPPQPHTKEGVDAYNEVIARVRMWVNLNLWQKLKLSRDDAKPLLRLKGFPSFPLVERQANEVDWWDMVCNVKKLINEKKEDGKVFWQNLAGYKRQEALRPYLSSEEDRKKGKKFARYQLGDLLWHLEKKHGEDWGKVYDEAWERIDKKVEGLSKHIKLEEERRSEDAQSKAALTDWLRAKASFVIEGLKEADKDEFCRCELKLQKWYGDLRGKPFAIEAENSILDISGFSKQYNCAFIWQKDGVKKLNLYLIINYFKGGKLRFKKIKPEAFEANRFYTVINKKSGEIVPMEVNFNFDDPNLIILPLAFGKRQGREFIWNDLLSLETGSLKLANGRVIEKTLYNRRTRQDEPALFVALTFERREVLDSSNIKPMNLIGVDRGENIPAVIALTDPEGCPLSRFKDSLGNPTHILRIGESYKEKQRTIQAKKEVEQRRAGGYSRKYASKAKNLADDMVRNTARDLLYYAVTQDAMLIFENLSRGFGRQGKRTFMAERQYTRMEDWLTAKLAYEGLASKTYLSKTLAQYTSKTCSNCGFTITSADYDRVLEKLKKTATGWMTTINGKELKVEGQITYYNRYKRQNVVKDLSVELDRLSEESVNNDISSWTKGRSGEALSLLKKRFSHRPVQEKFVCLNCGFETHADEQAALNIARSWLFLRSQEYKKYQTNKTTGNTDKRAFVETWQSFYRKKLKEVWKPAV

SEQ ID NO: 29820 - protein, 978 aa, synthetic construct
  REGION 1..978: note = engineered CasX variant
QEIKRINKIRRRLVKDSNTKKAGKTGPMKTLLVRVMTPDLRERLENLRKKPENIPQPISNTSRANLNKLLTDYTEMKKAILHVYWEEFQKDPVGLMSRVAQPASKKIDQNKLKPEMDEKGNLTTAGFACSQCGQPLFVYKLEQVSEKGKAYTNYFGRCNVAEHEKLILLAQLKPEKDSDEAVTYSLGKFGQRALDFYSIHVTKESTHPVKPLAQIAGNRYASGPVGKALSDACMGTIASFLSKYQDIIIEHQKVVKGNQKRLESLRELAGKENLEYPSVTLPPQPHTKEGVDAYNEVIARVRMWVNLNLWQKLKLSRDDAKPLLRLKGFPSFPLVERQANEVDWWDMVCNVKKLINEKKEDGKVFWQNLAGYKRQEALRPYLSSEEDRKKGKKFARYQLGDLLLHLYKKHGEDWGKVYDEAWERIDKKVEGLSKHIKLEEERRSEDAQSKAALTDWLRAKASFVIEGLKEADKDEFCRCELKLQKWYGDLRGKPFAIEAENSILDISGFSKQYNCAFIWQKDGVKKLNLYLIINYFKGGKLRFKKIKPEAFEANRFYTVINKKSGEIVPMEVNFNFDDPNLIILPLAFGKRQGREFIWNDLLSLETGSLKLANGRVIEKTLYNRRTRQDEPALFVALTFERREVLDSSNIKPMNLIGVDRGENIPAVIALTDPEGCPLSRFKDSLGNPTHILRIGESYKEKQRTIQAKKEVEQRRAGGYSRKYASKAKNLADDMVRNTARDLLYYAVTQDAMLIFENLSRGFGRQGKRTFMAERQYTRMEDWLTAKLAYEGLASKTYLSKTLAQYTSKTCSNCGFTITSADYDRVLEKLKKTATGWMTTINGKELKVEGQITYYNRYKRQNVVKDLSVELDRLSEESVNNDISSWTKGRSGEALSLLKKRFSHRPVQEKFVCLNCGFETHADEQAALNIARSWLFLRSQEYKKYQTNKTTGNTDKRAFVETWQSFYRKKLKEVWKPAV

SEQ ID NO: 29821 - protein, 978 aa, synthetic construct
  REGION 1..978: note = engineered CasX variant
QEIKRINKIRRRLVKDSNTKKAGKTGPMKTLLVRVMTPDLRERLENLRKKPENIPQPISNTSRANLNKLLTDYTEMKKAILHVYWEEFQKDPVGLMSRVAQPASKKIDQNKLKPEMDEKGNLTTAGFACSQCGQPLFVYKLEQVSEKGKAYTNYFGRCNVAEHEKLILLAQLKPEKDSDEAVTYSLGKFGQRALDFYSIHVTKESTHPVKPLAQIAGNRYASGPVGKALSDACMGTIASFLSKYQDIIIEHQKVVKGNQKRLESLRELAGKENLEYPSVTLPPQPHTKEGVDAYNEVIARVRMWVNLNLWQKLKLSRDDAKPLLRLKGFPSFPLVERQANEVDWWDMVCNVKKLINEKKEDGKVFWQNLAGYKRQEALRPYLSSEEDRKKGKKFARYQLGDLLLHLEKKHPEDWGKVYDEAWERIDKKVEGLSKHIKLEEERRSEDAQSKAALTDWLRAKASFVIEGLKEADKDEFCRCELKLQKWYGDLRGKPFAIEAENSILDISGFSKQYNCAFIWQKDGVKKLNLYLIINYFKGGKLRFKKIKPEAFEANRFYTVINKKSGEIVPMEVNFNFDDPNLIILPLAFGKRQGREFIWNDLLSLETGSLKLANGRVIEKTLYNRRTRQDEPALFVALTFERREVLDSSNIKPMNLIGVDRGENIPAVIALTDPEGCPLSRFKDSLGNPTHILRIGESYKEKQRTIQAKKEVEQRRAGGYSRKYASKAKNLADDMVRNTARDLLYYAVTQDAMLIFENLSRGFGRQGKRTFMAERQYTRMEDWLTAKLAYEGLASKTYLSKTLAQYTSKTCSNCGFTITSADYDRVLEKLKKTATGWMTTINGKELKVEGQITYYNRYKRQNVVKDLSVELDRLSEESVNNDISSWTKGRSGEALSLLKKRFSHRPVQEKFVCLNCGFETHADEQAALNIARSWLFLRSQEYKKYQTNKTTGNTDKRAFVETWQSFYRKKLKEVWKPAV

SEQ ID NO: 29822 - protein, 979 aa, synthetic construct
  REGION 1..979: note = engineered CasX variant
QEIKRINKIRRRLVKDSNTKKAGKTGPMKTLLVRVMTPDLRERLENLRKKPENIPQPISNTSRANLNKLLTDYTEMKKAILHVYWEEFQKDPVGLMSRVAQPASKKIDQNKLKPEMDEKGNLTTAGFACSQCGQPLFVYKLEQVSEKGKAYTNYFGRCNVAEHEKLILLAQLKPEKDSDEAVTYSLGKFGQRALDFYSIHVTKESTHPVKPLAQIAGNRYASGPVGKALSDACMGTIASFLSKYQDIIIEHQKVVKGNQKRLESLRELAGKENLEYPSVTLPPQPHTKEGVDAYNEVIARVRMWVNLNLWQKLKLSRDDAKPLLRLKGFPSFPLVERQANEVDWWDMVCNVKKLINEKKEDGKVFWQNLAGYKRQEALRPYLSSEEDRKKGKKFARYQLGDLLLHLEKKHGERDWGKVYDEAWERIDKKVEGLSKHIKLEEERRSEDAQSKAALTDWLRAKASFVIEGLKEADKDEFCRCELKLQKWYGDLRGKPFAIEAENSILDISGFSKQYNCAFIWQKDGVKKLNLYLIINYFKGGKLRFKKIKPEAFEANRFYTVINKKSGEIVPMEVNFNFDDPNLIILPLAFGKRQGREFIWNDLLSLETGSLKLANGRVIEKTLYNRRTRQDEPALFVALTFERREVLDSSNIKPMNLIGVDRGENIPAVIALTDPEGCPLSRFKDSLGNPTHILRIGESYKEKQRTIQAKKEVEQRRAGGYSRKYASKAKNLADDMVRNTARDLLYYAVTQDAMLIFENLSRGFGRQGKRTFMAERQYTRMEDWLTAKLAYEGLASKTYLSKTLAQYTSKTCSNCGFTITSADYDRVLEKLKKTATGWMTTINGKELKVEGQITYYNRYKRQNVVKDLSVELDRLSEESVNNDISSWTKGRSGEALSLLKKRFSHRPVQEKFVCLNCGFETHADEQAALNIARSWLFLRSQEYKKYQTNKTTGNTDKRAFVETWQSFYRKKLKEVWKPAV

SEQ ID NO: 29823 - protein, 979 aa, synthetic construct
  REGION 1..979: note = engineered CasX variant
QEIKRINKIRRRLVKDSNTKKAGKTGPMKTLLVRVMTPDLRERLENLRKKPENIPQPISNTSRANLNKLLTDYTEMKKAILHVYWEEFQKDPVGLMSRVAQPASKKIDQNKLKPEMDEKGNLTTAGFACSQCGQPLFVYKLEQVSEKGKAYTNYFGRCNVAEHEKLILLAQLKPEKDSDEAVTYSLGKFGQRALDFYSIHVTKESTHPVKPLAQIAGNRYASGPVGKALSDACMGTIASFLSKYQDIIIEHQKVVKGNQKRLESLRELAGKENLEYPSVTLPPQPHTKEGVDAYNEVIARVRMWVNLNLWQKLKLSRDDAKPLLRLKGFPSFPLVERQANEVDWWDMVCNVKKLINEKKEDGKVFWQNLAGYKRQEALRPYLSSEEDRKKGKKFARYQLGDLLLHLEKKHGEYDWGKVYDEAWERIDKKVEGLSKHIKLEEERRSEDAQSKAALTDWLRAKASFVIEGLKEADKDEFCRCELKLQKWYGDLRGKPFAIEAENSILDISGFSKQYNCAFIWQKDGVKKLNLYLIINYFKGGKLRFKKIKPEAFEANRFYTVINKKSGEIVPMEVNFNFDDPNLIILPLAFGKRQGREFIWNDLLSLETGSLKLANGRVIEKTLYNRRTRQDEPALFVALTFERREVLDSSNIKPMNLIGVDRGENIPAVIALTDPEGCPLSRFKDSLGNPTHILRIGESYKEKQRTIQAKKEVEQRRAGGYSRKYASKAKNLADDMVRNTARDLLYYAVTQDAMLIFENLSRGFGRQGKRTFMAERQYTRMEDWLTAKLAYEGLASKTYLSKTLAQYTSKTCSNCGFTITSADYDRVLEKLKKTATGWMTTINGKELKVEGQITYYNRYKRQNVVKDLSVELDRLSEESVNNDISSWTKGRSGEALSLLKKRFSHRPVQEKFVCLNCGFETHADEQAALNIARSWLFLRSQEYKKYQTNKTTGNTDKRAFVETWQSFYRKKLKEVWKPAV

SEQ ID NO: 29824 - protein, 978 aa, synthetic construct
  REGION 1..978: note = engineered CasX variant
QEIKRINKIRRRLVKDSNTKKAGKTGPMKTLLVRVMTPDLRERLENLRKKPENIPQPISNTSRANLNKLLTDYTEMKKAILHVYWEEFQKDPVGLMSRVAQPASKKIDQNKLKPEMDEKGNLTTAGFACSQCGQPLFVYKLEQVSEKGKAYTNYFGRCNVAEHEKLILLAQLKPEKDSDEAVTYSLGKFGQRALDFYSIHVTKESTHPVKPLAQIAGNRYASGPVGKALSDACMGTIASFLSKYQDIIIEHQKVVKGNQKRLESLRELAGKENLEYPSVTLPPQPHTKEGVDAYNEVIARVRMWVNLNLWQKLKLSRDDAKPLLRLKGFPSFPLVERQANEVDWWDMVCNVKKLINEKKEDGKVFWQNLAGYKRQEALRPYLSSEEDRKKGKKFARYQLGDLLLHLEKKHGEDWGDVYDEAWERIDKKVEGLSKHIKLEEERRSEDAQSKAALTDWLRAKASFVIEGLKEADKDEFCRCELKLQKWYGDLRGKPFAIEAENSILDISGFSKQYNCAFIWQKDGVKKLNLYLIINYFKGGKLRFKKIKPEAFEANRFYTVINKKSGEIVPMEVNFNFDDPNLIILPLAFGKRQGREFIWNDLLSLETGSLKLANGRVIEKTLYNRRTRQDEPALFVALTFERREVLDSSNIKPMNLIGVDRGENIPAVIALTDPEGCPLSRFKDSLGNPTHILRIGESYKEKQRTIQAKKEVEQRRAGGYSRKYASKAKNLADDMVRNTARDLLYYAVTQDAMLIFENLSRGFGRQGKRTFMAERQYTRMEDWLTAKLAYEGLASKTYLSKTLAQYTSKTCSNCGFTITSADYDRVLEKLKKTATGWMTTINGKELKVEGQITYYNRYKRQNVVKDLSVELDRLSEESVNNDISSWTKGRSGEALSLLKKRFSHRPVQEKFVCLNCGFETHADEQAALNIARSWLFLRSQEYKKYQTNKTTGNTDKRAFVETWQSFYRKKLKEVWKPAV

SEQ ID NO: 29825 - protein, 978 aa, synthetic construct
  REGION 1..978: note = engineered CasX variant
QEIKRINKIRRRLVKDSNTKKAGKTGPMKTLLVRVMTPDLRERLENLRKKPENIPQPISNTSRANLNKLLTDYTEMKKAILHVYWEEFQKDPVGLMSRVAQPASKKIDQNKLKPEMDEKGNLTTAGFACSQCGQPLFVYKLEQVSEKGKAYTNYFGRCNVAEHEKLILLAQLKPEKDSDEAVTYSLGKFGQRALDFYSIHVTKESTHPVKPLAQIAGNRYASGPVGKALSDACMGTIASFLSKYQDIIIEHQKVVKGNQKRLESLRELAGKENLEYPSVTLPPQPHTKEGVDAYNEVIARVRMWVNLNLWQKLKLSRDDAKPLLRLKGFPSFPLVERQANEVDWWDMVCNVKKLINEKKEDGKVFWQNLAGYKRQEALRPYLSSEEDRKKGKKFARYQLGDLLLHLEKKHGEDWGKVYGEAWERIDKKVEGLSKHIKLEEERRSEDAQSKAALTDWLRAKASFVIEGLKEADKDEFCRCELKLQKWYGDLRGKPFAIEAENSILDISGFSKQYNCAFIWQKDGVKKLNLYLIINYFKGGKLRFKKIKPEAFEANRFYTVINKKSGEIVPMEVNFNFDDPNLIILPLAFGKRQGREFIWNDLLSLETGSLKLANGRVIEKTLYNRRTRQDEPALFVALTFERREVLDSSNIKPMNLIGVDRGENIPAVIALTDPEGCPLSRFKDSLGNPTHILRIGESYKEKQRTIQAKKEVEQRRAGGYSRKYASKAKNLADDMVRNTARDLLYYAVTQDAMLIFENLSRGFGRQGKRTFMAERQYTRMEDWLTAKLAYEGLASKTYLSKTLAQYTSKTCSNCGFTITSADYDRVLEKLKKTATGWMTTINGKELKVEGQITYYNRYKRQNVVKDLSVELDRLSEESVNNDISSWTKGRSGEALSLLKKRFSHRPVQEKFVCLNCGFETHADEQAALNIARSWLFLRSQEYKKYQTNKTTGNTDKRAFVETWQSFYRKKLKEVWKPAV

SEQ ID NO: 29826 - protein, 978 aa, synthetic construct
  REGION 1..978: note = engineered CasX variant
QEIKRINKIRRRLVKDSNTKKAGKTGPMKTLLVRVMTPDLRERLENLRKKPENIPQPISNTSRANLNKLLTDYTEMKKAILHVYWEEFQKDPVGLMSRVAQPASKKIDQNKLKPEMDEKGNLTTAGFACSQCGQPLFVYKLEQVSEKGKAYTNYFGRCNVAEHEKLILLAQLKPEKDSDEAVTYSLGKFGQRALDFYSIHVTKESTHPVKPLAQIAGNRYASGPVGKALSDACMGTIASFLSKYQDIIIEHQKVVKGNQKRLESLRELAGKENLEYPSVTLPPQPHTKEGVDAYNEVIARVRMWVNLNLWQKLKLSRDDAKPLLRLKGFPSFPLVERQANEVDWWDMVCNVKKLINEKKEDGKVFWQNLAGYKRQEALRPYLSSEEDRKKGKKFARYQLGDLLLHLEKKHGEDWGKVYDEAWERIDKKVEGLSKHIKLEEERRSEDAQSKAALTDWLRAKASFVIEGKKEADKDEFCRCELKLQKWYGDLRGKPFAIEAENSILDISGFSKQYNCAFIWQKDGVKKLNLYLIINYFKGGKLRFKKIKPEAFEANRFYTVINKKSGEIVPMEVNFNFDDPNLIILPLAFGKRQGREFIWNDLLSLETGSLKLANGRVIEKTLYNRRTRQDEPALFVALTFERREVLDSSNIKPMNLIGVDRGENIPAVIALTDPEGCPLSRFKDSLGNPTHILRIGESYKEKQRTIQAKKEVEQRRAGGYSRKYASKAKNLADDMVRNTARDLLYYAVTQDAMLIFENLSRGFGRQGKRTFMAERQYTRMEDWLTAKLAYEGLASKTYLSKTLAQYTSKTCSNCGFTITSADYDRVLEKLKKTATGWMTTINGKELKVEGQITYYNRYKRQNVVKDLSVELDRLSEESVNNDISSWTKGRSGEALSLLKKRFSHRPVQEKFVCLNCGFETHADEQAALNIARSWLFLRSQEYKKYQTNKTTGNTDKRAFVETWQSFYRKKLKEVWKPAV

SEQ ID NO: 29827 - protein, 978 aa, synthetic construct
  REGION 1..978: note = engineered CasX variant
QEIKRINKIRRRLVKDSNTKKAGKTGPMKTLLVRVMTPDLRERLENLRKKPENIPQPISNTSRANLNKLLTDYTEMKKAILHVYWEEFQKDPVGLMSRVAQPASKKIDQNKLKPEMDEKGNLTTAGFACSQCGQPLFVYKLEQVSEKGKAYTNYFGRCNVAEHEKLILLAQLKPEKDSDEAVTYSLGKFGQRALDFYSIHVTKESTHPVKPLAQIAGNRYASGPVGKALSDACMGTIASFLSKYQDIIIEHQKVVKGNQKRLESLRELAGKENLEYPSVTLPPQPHTKEGVDAYNEVIARVRMWVNLNLWQKLKLSRDDAKPLLRLKGFPSFPLVERQANEVDWWDMVCNVKKLINEKKEDGKVFWQNLAGYKRQEALRPYLSSEEDRKKGKKFARYQLGDLLLHLEKKHGEDWGKVYDEAWERIDKKVEGLSKHIKLEEERRSEDAQSKAALTDWLRAKASFVIEGSKEADKDEFCRCELKLQKWYGDLRGKPFAIEAENSILDISGFSKQYNCAFIWQKDGVKKLNLYLIINYFKGGKLRFKKIKPEAFEANRFYTVINKKSGEIVPMEVNFNFDDPNLIILPLAFGKRQGREFIWNDLLSLETGSLKLANGRVIEKTLYNRRTRQDEPALFVALTFERREVLDSSNIKPMNLIGVDRGENIPAVIALTDPEGCPLSRFKDSLGNPTHILRIGESYKEKQRTIQAKKEVEQRRAGGYSRKYASKAKNLADDMVRNTARDLLYYAVTQDAMLIFENLSRGFGRQGKRTFMAERQYTRMEDWLTAKLAYEGLASKTYLSKTLAQYTSKTCSNCGFTITSADYDRVLEKLKKTATGWMTTINGKELKVEGQITYYNRYKRQNVVKDLSVELDRLSEESVNNDISSWTKGRSGEALSLLKKRFSHRPVQEKFVCLNCGFETHADEQAALNIARSWLFLRSQEYKKYQTNKTTGNTDKRAFVETWQSFYRKKLKEVWKPAV

SEQ ID NO: 29828 - protein, 979 aa, synthetic construct
  REGION 1..979: note = engineered CasX variant
QEIKRINKIRRRLVKDSNTKKAGKTGPMKTLLVRVMTPDLRERLENLRKKPENIPQPISNTSRANLNKLLTDYTEMKKAILHVYWEEFQKDPVGLMSRVAQPASKKIDQNKLKPEMDEKGNLTTAGFACSQCGQPLFVYKLEQVSEKGKAYTNYFGRCNVAEHEKLILLAQLKPEKDSDEAVTYSLGKFGQRALDFYSIHVTKESTHPVKPLAQIAGNRYASGPVGKALSDACMGTIASFLSKYQDIIIEHQKVVKGNQKRLESLRELAGKENLEYPSVTLPPQPHTKEGVDAYNEVIARVRMWVNLNLWQKLKLSRDDAKPLLRLKGFPSFPLVERQANEVDWWDMVCNVKKLINEKKEDGKVFWQNLAGYKRQEALRPYLSSEEDRKKGKKFARYQLGDLLLHLEKKHGEDWGKVYDEAWERIDKKVEGLSKHIKLEEERRSEDAQSKAALTDWLRAKASFVIEGLKEADDKDEFCRCELKLQKWYGDLRGKPFAIEAENSILDISGFSKQYNCAFIWQKDGVKKLNLYLIINYFKGGKLRFKKIKPEAFEANRFYTVINKKSGEIVPMEVNFNFDDPNLIILPLAFGKRQGREFIWNDLLSLETGSLKLANGRVIEKTLYNRRTRQDEPALFVALTFERREVLDSSNIKPMNLIGVDRGENIPAVIALTDPEGCPLSRFKDSLGNPTHILRIGESYKEKQRTIQAKKEVEQRRAGGYSRKYASKAKNLADDMVRNTARDLLYYAVTQDAMLIFENLSRGFGRQGKRTFMAERQYTRMEDWLTAKLAYEGLASKTYLSKTLAQYTSKTCSNCGFTITSADYDRVLEKLKKTATGWMTTINGKELKVEGQITYYNRYKRQNVVKDLSVELDRLSEESVNNDISSWTKGRSGEALSLLKKRFSHRPVQEKFVCLNCGFETHADEQAALNIARSWLFLRSQEYKKYQTNKTTGNTDKRAFVETWQSFYRKKLKEVWKPAV

SEQ ID NO: 29829 - protein, 979 aa, synthetic construct
  REGION 1..979: note = engineered CasX variant
QEIKRINKIRRRLVKDSNTKKAGKTGPMKTLLVRVMTPDLRERLENLRKKPENIPQPISNTSRANLNKLLTDYTEMKKAILHVYWEEFQKDPVGLMSRVAQPASKKIDQNKLKPEMDEKGNLTTAGFACSQCGQPLFVYKLEQVSEKGKAYTNYFGRCNVAEHEKLILLAQLKPEKDSDEAVTYSLGKFGQRALDFYSIHVTKESTHPVKPLAQIAGNRYASGPVGKALSDACMGTIASFLSKYQDIIIEHQKVVKGNQKRLESLRELAGKENLEYPSVTLPPQPHTKEGVDAYNEVIARVRMWVNLNLWQKLKLSRDDAKPLLRLKGFPSFPLVERQANEVDWWDMVCNVKKLINEKKEDGKVFWQNLAGYKRQEALRPYLSSEEDRKKGKKFARYQLGDLLLHLEKKHGEDWGKVYDEAWERIDKKVEGLSKHIKLEEERRSEDAQSKAALTDWLRAKASFVIEGLKEADKDEFCRCELKLQKWYGDLRGKPFAIEAENSILDISGFSKQYNCAFIWQKDGVKKLNLYLIINYFKGGKLRFKKIKPEAFEANRFYTVINKKSGEIVPMEVNFNFDDPNLIILPLAFGKRQGREFIWNDLLSLETGSLKLANGRVIEKTLYNRRTRQDEPALFVALTFERREVLDSSNIKPMNLIGVDRGENIPAVIALTDPEGCPLSRFKDSLGNPTHILRIGESYKEKQRTIQAKKEVEQRRAGGYSRKYASKAKNLADDMVRNTARDLLYYAVTQDAMLIFENLSRGFGRQGKRTFMAERQYTRMEDWLTAKLAYEGLASKTYLSKTLAQYTSKTCSNCGFTITSADYDRVLEKLKKTATGWMTTINGKELKVEGQITYYNRYKRQNVVKDLSVELDRLSEESVNNDISSWTKGRSGNEALSLLKKRFSHRPVQEKFVCLNCGFETHADEQAALNIARSWLFLRSQEYKKYQTNKTTGNTDKRAFVETWQSFYRKKLKEVWKPAV

SEQ ID NO: 29830 - protein, 978 aa, synthetic construct
  REGION 1..978: note = engineered CasX variant
QEIKRINKIRRRLVKDSNTKKAGKTGPMKTLLVRVMTPDLRERLENLRKKPENIPQPISNTSRANLNKLLTDYTEMKKAILHVYWEEFQKDPVGLMSRVAQPASKKIDQNKLKPEMDEKGNLTTAGFACSQCGQPLFVYKLEQVSEKGKAYTNYFGRCNVAEHEKLILLAQLKPEKDSDEAVTYSLGKFGQRALDFYSIHVTKESTHPVKPLAQIAGNRYASGPVGKALSDACMGTIASFLSKYQDIIIEHQKVVKGNQKRLESLRELAGKENLEYPSVTLPPQPHTKEGVDAYNEVIARVRMWVNLNLWQKLKLSRDDAKPLLRLKGFPSFPLVERQANEVDWWDMVCNVKKLINEKKEDGKVFWQNLAGYKRQEALRPYLSSEEDRQKGKKFARYQLGDLLLHLEKKHGEDWGKVYDEAWERIDKKVEGLSKHIKLEEERRSEDAQSKAALTDWLRAKASFVIEGLKEADKDEFCRCELKLQKWYGDLRGKPFAIEAENSILDISGFSKQYNCAFIWQKDGVKKLNLYLIINYFKGGKLRFKKIKPEAFEANRFYTVINKKSGEIVPMEVNFNFDDPNLIILPLAFGKRQGREFIWNDLLSLETGSLKLANGRVIEKTLYNRRTRQDEPALFVALTFERREVLDSSNIKPMNLIGVDRGENIPAVIALTDPEGCPLSRFKDSLGNPTHILRIGESYKEKQRTIQAKKEVEQRRAGGYSRKYASKAKNLADDMVRNTARDLLYYAVTQDAMLIFENLSRGFGRQGKRTFMAERQYTRMEDWLTAKLAYEGLASKTYLSKTLAQYTSKTCSNCGFTITSADYDRVLEKLKKTATGWMTTINGKELKVEGQITYYNRYKRQNVVKDLSVELDRLSEESVNNDISSWTKGRSGEALSLLKKRFSHRPVQEKFVCLNCGFETHADEQAALNIARSWLFLRSQEYKKYQTNKTTGNTDKRAFVETWQSFYRKKLKEVWKPAV

SEQ ID NO: 29831 - protein, 978 aa, synthetic construct
  REGION 1..978: note = engineered CasX variant
QEIKRINKIRRRLVKDSNTKKAGKTGPMKTLLVRVMTPDLRERLENLRKKPENIPQPISNTSRANLNKLLTDYTEMKKAILHVYWEEFQKDPVGLMSRVAQPASKKIDQNKLKPEMDEKGNLTTAGFACSQCGQPLFVYKLEQVSEKGKAYTNYFGRCNVAEHEKLILLAQLKPEKDSDEAVTYSLGKFGQRALDFYSIHVTKESTHPVKPLAQIAGNRYASGPVGKALSDACMGTIASFLSKYQDIIIEHQKVVKGNQKRLESLRELAGKENLEYPSVTLPPQPHTKEGVDAYNEVIARVRMWVNLNLWQKLKLSRDDAKPLLRLKGFPSFPLVERQANEVDWWDMVCNVKKLINEKKEDGKVFWQNLAGYKRQEALRPYLSSEEDRKKGKKFARYQLGDLLLHLEKKHGEDWGKVYDEAWERIDKKVEGLSKHIKLEEERRSEDAQSKAALTDWLRAKASFVIEGLKEADKDEFCRCELKLQKWYGDLRGKPFAIEAENSILDISGFSKQYNCAFIWQKDGVKKLNLYLIINYFKGGKLRFKKIKPEAFEANRFYTVINKKSGEIVPMEVNFNFDDPNLIILPLAFGKRQGREFIWNDLLSLETGSLKLANGRVIEKTLYNRRTRQDEPALFVALTFERREVLDSSNIKPMNLIGVDRGENIPAVIALTDPEGCPLSRFKDSLGNPTHILRIGESYKEKQRTIQAKKEVEQRRAGGYSRKYASKAKNLADDMVRNTARDLLYYAVTQDAMLIFENLSRGFGRQGKRTFMAERQYTRMEDWLTAKLAYEGLASQTYLSKTLAQYTSKTCSNCGFTITSADYDRVLEKLKKTATGWMTTINGKELKVEGQITYYNRYKRQNVVKDLSVELDRLSEESVNNDISSWTKGRSGEALSLLKKRFSHRPVQEKFVCLNCGFETHADEQAALNIARSWLFLRSQEYKKYQTNKTTGNTDKRAFVETWQSFYRKKLKEVWKPAV

SEQ ID NO: 29832 - protein, 978 aa, synthetic construct
  REGION 1..978: note = engineered CasX variant
QEIKRINKIRRRLVKDSNTKKAGKTGPMKTLLVRVMTPDLRERLENLRKKPENIPQPISNTSRANLNKLLTDYTEMKKAILHVYWEEFQKDPVGLMSRVAQPASKKIDQNKLKPEMDEKGNLTTAGFACSQCGQPLFVYKLEQVSEKGKAYTNYFGRCNVAEHEKLILLAQLKPEKDSDEAVTYSLGKFGQRALDFYSIHVTKESTHPVKPLAQIAGNRYASGPVGKALSDACMGTIASFLSKYQDIIIEHQKVVKGNQKRLESLRELAGKENLEYPSVTLPPQPHTKEGVDAYNEVIARVRMWVNLNLWQKLKLSRDDAKPLLRLKGFPSFPLVERQANEVDWWDMVCNVKKLINEKKEDGKVFWQNLAGYKRQEALRPYLSSEEDRKKGKKFARYQLGDLLLHLEKKHGEDWGKVYDEAWERIDKKVEGLSKHIKLEEERRSEDAQSKAALTDWLRAKASFVIEGLKEADKDEFCRCELKLQKWYGDLRGKPFAIEAENSILDISGFSKQYNCAFIWQKDGVKKLNLYLIINYFKGGKLRFKKIKPEAFEANRFYTVINKKSGEIVPMEVNFNFDDPNLIILPLAFGKRQGREFIWNDLLSLETGSLKLANGRVIEKTLYNRRTRQDEPALFVALTFERREVLDSSNIKPMNLIGVDRGENIPAVIALTDPEGCPLSRFKDSLGNPTHILRIGESYKEKQRTIQAKKEVEQRRAGGYSRKYASKAKNLADDMVRNTARDLLYYAVTQDAMLIFENLSRGFGRQGKRTFMAERQYTRMEDWLTAKLAYNGLASKTYLSKTLAQYTSKTCSNCGFTITSADYDRVLEKLKKTATGWMTTINGKELKVEGQITYYNRYKRQNVVKDLSVELDRLSEESVNNDISSWTKGRSGEALSLLKKRFSHRPVQEKFVCLNCGFETHADEQAALNIARSWLFLRSQEYKKYQTNKTTGNTDKRAFVETWQSFYRKKLKEVWKPAV

SEQ ID NO: 29833 - protein, 978 aa, synthetic construct
  REGION 1..978: note = engineered CasX variant
QEIKRINKIRRRLVKDSNTKKAGKTGPMKTLLVRVMTPDLRERLENLRKKPENIPQPISNTSRANLNKLLTDYTEMKKAILHVYWEEFQKDPVGLMSRVAQPASKKIDQNKLKPEMDEKGNLTTAGFACSQCGQPLFVYKLEQVSEKGKAYTNYFGRCNVAEHEKLIQLAQLKPEKDSDEAVTYSLGKFGQRALDFYSIHVTKESTHPVKPLAQIAGNRYASGPVGKALSDACMGTIASFLSKYQDIIIEHQKVVKGNQKRLESLRELAGKENLEYPSVTLPPQPHTKEGVDAYNEVIARVRMWVNLNLWQKLKLSRDDAKPLLRLKGFPSFPLVERQANEVDWWDMVCNVKKLINEKKEDGKVFWQNLAGYKRQEALRPYLSSEEDRKKGKKFARYQLGDLLLHLEKKHGEDWGKVYDEAWERIDKKVEGLSKHIKLEEERRSEDAQSKAALTDWLRAKASFVIEGLKEADKDEFCRCELKLQKWYGDLRGKPFAIEAENSILDISGFSKQYNCAFIWQKDGVKKLNLYLIINYFKGGKLRFKKIKPEAFEANRFYTVINKKSGEIVPMEVNFNFDDPNLIILPLAFGKRQGREFIWNDLLSLETGSLKLANGRVIEKTLYNRRTRQDEPALFVALTFERREVLDSSNIKPMNLIGVDRGENIPAVIALTDPEGCPLSRFKDSLGNPTHILRIGESYKEKQRTIQAKKEVEQRRAGGYSRKYASKAKNLADDMVRNTARDLLYYAVTQDAMLIFENLSRGFGRQGKRTFMAERQYTRMEDWLTAKLAYEGLASKTYLSKTLAQYTSKTCSNCGFTITSADYDRVLEKLKKTATGWMTTINGKELKVEGQITYYNRYKRQNVVKDLSVELDRLSEESVNNDISSWTKGRSGEALSLLKKRFSHRPVQEKFVCLNCGFETHADEQAALNIARSWLFLRSQEYKKYQTNKTTGNTDKRAFVETWQSFYRKKLKEVWKPAV

SEQ ID NO: 29834 - protein, 978 aa, synthetic construct
  REGION 1..978: note = engineered CasX variant
QEIKRINKIRRRLVKDSNTKKAGKTGPMKTLLVRVMTPDLRERLENLRKKPENIPQPISNTSRANLNKLLTDYTEMKKAILHVYWEEFQKDPVGLMSRVAQPASKKIDQNKLKPEMDEKGNLTTAGFACSQCGQPLFVYKLEQVSEKGKAYTNYFGRCNVAEHEKLILLAQLKPEKDSDEAVTYSLGKFGQRALDFYSIHVTKESTHPVKPLAQIAGNRYASGPVGKALSDACMGTIASFLSKYQDIIIEHQKVVKGNQKRLESLRELAGKENLEYPSVTLPPQPHTKEGVDAYNEVIARVRMWVNLNLWQKLKLSRDDAKPLLRLKGFPSFPLVERQANEVDWWDMVCNVKKLINEKKEDGKVFWQNLAIYKRQEALRPYLSSEEDRKKGKKFARYQLGDLLLHLEKKHGEDWGKVYDEAWERIDKKVEGLSKHIKLEEERRSEDAQSKAALTDWLRAKASFVIEGLKEADKDEFCRCELKLQKWYGDLRGKPFAIEAENSILDISGFSKQYNCAFIWQKDGVKKLNLYLIINYFKGGKLRFKKIKPEAFEANRFYTVINKKSGEIVPMEVNFNFDDPNLIILPLAFGKRQGREFIWNDLLSLETGSLKLANGRVIEKTLYNRRTRQDEPALFVALTFERREVLDSSNIKPMNLIGVDRGENIPAVIALTDPEGCPLSRFKDSLGNPTHILRIGESYKEKQRTIQAKKEVEQRRAGGYSRKYASKAKNLADDMVRNTARDLLYYAVTQDAMLIFENLSRGFGRQGKRTFMAERQYTRMEDWLTAKLAYEGLASKTYLSKTLAQYTSKTCSNCGFTITSADYDRVLEKLKKTATGWMTTINGKELKVEGQITYYNRYKRQNVVKDLSVELDRLSEESVNNDISSWTKGRSGEALSLLKKRFSHRPVQEKFVCLNCGFETHADEQAALNIARSWLFLRSQEYKKYQTNKTTGNTDKRAFVETWQSFYRKKLKEVWKPAV

SEQ ID NO: 29835 - protein, 978 aa, synthetic construct
  REGION 1..978: note = engineered CasX variant
QEIKRINKIRRRLVKDSNTKKAGKTGPMKTLLVRVMTPDLRERLENLRKKPENIPQPISNTSRANLNKLLTDYTEMKKAILHVYWEEFQKDPVGLMSRVAQPASKKIDQNKLKPEMDEKGNLTTAGFACSQCGQPLFVYKLEQVSEKGKAYTNYFGRCNVAEHEKLILLAQLKPEKDSDEAVTYSLGKFGQRALDFYSIHVTKESTHPVKPLAQIAGNRYASGPVGKALSDACMGTIASFLSKYQDIIIEHQKVVKGNQKRLESLRELAGKENLEYPSVTLPPQPHTKEGVDAYNEVIARVRMWVNLNLWQKLKLSRDDAKPLLRLKGFPSFPLVERQANEVDWWDMVCNVKKLINEKKEDGKVFWQNLAGYKRQEALRPYLSSEEDREKGKKFARYQLGDLLLHLEKKHGEDWGKVYDEAWERIDKKVEGLSKHIKLEEERRSEDAQSKAALTDWLRAKASFVIEGLKEADKDEFCRCELKLQKWYGDLRGKPFAIEAENSILDISGFSKQYNCAFIWQKDGVKKLNLYLIINYFKGGKLRFKKIKPEAFEANRFYTVINKKSGEIVPMEVNFNFDDPNLIILPLAFGKRQGREFIWNDLLSLETGSLKLANGRVIEKTLYNRRTRQDEPALFVALTFERREVLDSSNIKPMNLIGVDRGENIPAVIALTDPEGCPLSRFKDSLGNPTHILRIGESYKEKQRTIQAKKEVEQRRAGGYSRKYASKAKNLADDMVRNTARDLLYYAVTQDAMLIFENLSRGFGRQGKRTFMAERQYTRMEDWLTAKLAYEGLASKTYLSKTLAQYTSKTCSNCGFTITSADYDRVLEKLKKTATGWMTTINGKELKVEGQITYYNRYKRQNVVKDLSVELDRLSEESVNNDISSWTKGRSGEALSLLKKRFSHRPVQEKFVCLNCGFETHADEQAALNIARSWLFLRSQEYKKYQTNKTTGNTDKRAFVETWQSFYRKKLKEVWKPAV

SEQ ID NO: 29836 - protein, 978 aa, synthetic construct
  REGION 1..978: note = engineered CasX variant
QEIKRINKIRRRLVKDSNTKKAGKTGPMKTLLVRVMTPDLRERLENLRKKPENIPQPISNTSRANLNKLLTDYTEMKKAILHVYWEEFQKDPVGLMSRVAQPASKKIDQNKLKPEMDEKGNLTTAGFACSQCGQPLFVYKLEQVSEKGKAYTNYFGRCNVAEHEKLILLAQLKPEKDSDEAVTYSLGKFGQRALDFYSIHVTKESTHPVKPLAQIAGNRYASGPVGKALSDACMGTIASFLSKYQDIIIEHQKVVKGNQKRLESLRELAGKENLEYPSVTLPPQPHTKEGVDAYNEVIARVRMWVNLNLWQKLKLSRDDAKPLLRLKGFPSFPLVERQANEVDWWDMVCNVKKLINEKKEDGKVFWQNLAGYKRQEALRPYLSSEEDRKKGKKFARYQLGDLLLHLEKKHGEDWGKVYDEAWERIDKKVEGLSKHIKLEEERRSEDAQSKAALTDWLRAKASFVIEGLKEADKDEFCRCELKLQKWYGDLRGKPFAIEAENSILDISGFSKQYNCAFIWQKDGVKKLNLYLIINYFKGGKLRFKKIKPEAFEANRFYTVINKKSGEIVIMEVNFNFDDPNLIILPLAFGKRQGREFIWNDLLSLETGSLKLANGRVIEKTLYNRRTRQDEPALFVALTFERREVLDSSNIKPMNLIGVDRGENIPAVIALTDPEGCPLSRFKDSLGNPTHILRIGESYKEKQRTIQAKKEVEQRRAGGYSRKYASKAKNLADDMVRNTARDLLYYAVTQDAMLIFENLSRGFGRQGKRTFMAERQYTRMEDWLTAKLAYEGLASKTYLSKTLAQYTSKTCSNCGFTITSADYDRVLEKLKKTATGWMTTINGKELKVEGQITYYNRYKRQNVVKDLSVELDRLSEESVNNDISSWTKGRSGEALSLLKKRFSHRPVQEKFVCLNCGFETHADEQAALNIARSWLFLRSQEYKKYQTNKTTGNTDKRAFVETWQSFYRKKLKEVWKPAV

SEQ ID NO: 29837 - protein, 978 aa, synthetic construct
  REGION 1..978: note = engineered CasX variant
QEIKRINKIRRRLVKDSNTKKAGKTGPMKTLLVRVMTPDLRERLENLRKKPENIPQPISNTSRANLNKLLTDYTEMKKAILHVYWEEFQKDPVGLMSRVAQPASKKIDQNKLKPEMDEKGNLTTAGFACSQCGQPLFVYKLEQVSEKGKAYTNYFGRCNVAEHEKLILLAQLKPEKDSDEAVTYSLGKFGQRALDFYSIHVTKESTHPVKPLAQIAGNRYASGPVGKALSGACMGTIASFLSKYQDIIIEHQKVVKGNQKRLESLRELAGKENLEYPSVTLPPQPHTKEGVDAYNEVIARVRMWVNLNLWQKLKLSRDDAKPLLRLKGFPSFPLVERQANEVDWWDMVCNVKKLINEKKEDGKVFWQNLAGYKRQEALRPYLSSEEDRKKGKKFARYQLGDLLLHLEKKHGEDWGKVYDEAWERIDKKVEGLSKHIKLEEERRSEDAQSKAALTDWLRAKASFVIEGLKEADKDEFCRCELKLQKWYGDLRGKPFAIEAENSILDISGFSKQYNCAFIWQKDGVKKLNLYLIINYFKGGKLRFKKIKPEAFEANRFYTVINKKSGEIVPMEVNFNFDDPNLIILPLAFGKRQGREFIWNDLLSLETGSLKLANGRVIEKTLYNRRTRQDEPALFVALTFERREVLDSSNIKPMNLIGVDRGENIPAVIALTDPEGCPLSRFKDSLGNPTHILRIGESYKEKQRTIQAKKEVEQRRAGGYSRKYASKAKNLADDMVRNTARDLLYYAVTQDAMLIFENLSRGFGRQGKRTFMAERQYTRMEDWLTAKLAYEGLPSKVYLSKTLAQYTSKTCSNCGFTITSADYDRVLEKLKKTATGWMTTINGKELKVEGQITYYNRYKRQNVVKDLSVELDRLSEESVNNDISSWTKGRSGEALSLLKKRFSHRPVQEKFVCLNCGFETHADEQAALNIARSWLFLRSQEYKKYQTNKTTGNTDKRAFVETWQSFYRKKLKEVWKPAV

SEQ ID NO: 29838 - protein, 978 aa, synthetic construct
  REGION 1..978: note = engineered CasX variant
QEIKRINKIRRRLVKDSNTKKAGKTGPMKTLLVRVMTPDLRERLENLRKKPENIPQPISNTSRANLNKLLTDYTEMKKAILHVYWEEFQKDPVGLMSRVAQPASKKIDQNKLKPEMDEKGNLTTAGFACSQCGQPLFVYKLEQVSEKGKAYTNYFGRCNVAEHEKLILLAQLKPEKDSDEAVTYSLGKFGQRALDFYSIHVTKESTHPVKPLAQIAGNRYASGPVGKALSDACMGTIASFLSKYQDIIIEHQKVVKGNQKRLESLRELAGKENLEYPSVTLPPQPHTKEGVDAYNEVIARVRMWVNLNLWQKLKLSRDDAKPLLRLKNFPSFPLVERQANEVDWWDMVCNVKKLINEKKEDGKVFWQNLAGYKRQEALRPYLSSEEDRKKGKKFARYQLGDLLLHLEKKHGEDWGKVYDEAWERIDKKVEGLSKHIKLEEERRSEDAQSKAALTDWLRAKASFVIEGLKEADKDEFCRCELKLQKWYGDLRGKPFAIEAENSILDISGFSKQYNCAFIWQKDGVKKLNLYLIINYFKGGKLRFKKIKPEAFEANRFYTVINKKSGEIVPMEVNFNFDDPNLIILPLAFGKRQGREFIWNDLLSLETGSLKLANGRVIEKTLYNRRTRQDEPALFVALTFERREVLDSSNIKPMNLIGVDRGENIPAVIALTDPEGCPLSRFKDSLGNPTHILRIGESYKEKQRTIQAKKEVEQRRAGGYSRKYASKAKNLADDMVRNTARDLLYYAVTQDAMLIFENLSRGFGRQGKRTFMAERQYTRMEDWLTAKLAYEGLPSKVYLSKTLAQYTSKTCSNCGFTITSADYDRVLEKLKKTATGWMTTINGKELKVEGQITYYNRYKRQNVVKDLSVELDRLSEESVNNDISSWTKGRSGEALSLLKKRFSHRPVQEKFVCLNCGFETHADEQAALNIARSWLFLRSQEYKKYQTNKTTGNTDKRAFVETWQSFYRKKLKEVWKPAV

SEQ ID NO: 29839 - protein, 978 aa, synthetic construct
  REGION 1..978: note = engineered CasX variant
QEIKRINKIRRRLVKDSNTKKAGKTGPMKTLLVRVMTPDLRERLENLRKKPENIPQPISNTSRANLNKLLTDYTEMKKAILHVYWEEFQKDPVGLMSRVAQPASKKIDQNKLKPEMDEKGNLTTAGFACSQCGQPLFVYKLEQVSEKGKAYTNYFGRCNVAEHEKLILLAQLKPEKDSDEAVTYSLGKFGQRALDFYSIHVTKESTHPVKPLAQIAGNRYASGPVGKALSDACMGTIASFLSKYQDIIIEHQKVVKGNQKRLESLRELAGKENLEYPSVTLPPQPHTKEGVDAYNEVIARVRMWVNLNLWQKLKLSRDDAKPLLRLKGFPSFPLVERQANEVDWWDMVCNVKKLINEKKEDGKVFWQNLAGYKRQEALRPYLSSEEDRKKGKKFARYQLGDLLNHLEKKHGEDWGKVYDEAWERIDKKVEGLSKHIKLEEERRSEDAQSKAALTDWLRAKASFVIEGLKEADKDEFCRCELKLQKWYGDLRGKPFAIEAENSILDISGFSKQYNCAFIWQKDGVKKLNLYLIINYFKGGKLRFKKIKPEAFEANRFYTVINKKSGEIVPMEVNFNFDDPNLIILPLAFGKRQGREFIWNDLLSLETGSLKLANGRVIEKTLYNRRTRQDEPALFVALTFERREVLDSSNIKPMNLIGVDRGENIPAVIALTDPEGCPLSRFKDSLGNPTHILRIGESYKEKQRTIQAKKEVEQRRAGGYSRKYASKAKNLADDMVRNTARDLLYYAVTQDAMLIFENLSRGFGRQGKRTFMAERQYTRMEDWLTAKLAYEGLPSKVYLSKTLAQYTSKTCSNCGFTITSADYDRVLEKLKKTATGWMTTINGKELKVEGQITYYNRYKRQNVVKDLSVELDRLSEESVNNDISSWTKGRSGEALSLLKKRFSHRPVQEKFVCLNCGFETHADEQAALNIARSWLFLRSQEYKKYQTNKTTGNTDKRAFVETWQSFYRKKLKEVWKPAV

SEQ ID NO: 29840 - protein, 978 aa, synthetic construct
  REGION 1..978: note = engineered CasX variant
QEIKRINKIRRRLVKDSNTKKAGKTGPMKTLLVRVMTPDLRERLENLRKKPENIPQPISNTSRANLNKLLTDYTEMKKAILHVYWEEFQKDPVGLMSRVAQPASKKIDQNKLKPEMDEKGNLTTAGFACSQCGQPLFVYKLEQVSEKGKAYTNYFGRCNVAEHEKLILLAQLKPEKDSDEAVTYSLGKFGQRALDFYSIHVTKESTHPVKPLAQIAGNRYASGPVGKALSDACMGTIASFLSKYQDIIIEHQKVVKGNQKRLESLRELAGKENLEYPSVTLPPQPHTKEGVDAYNEVIARVRMWVNLNLWQKLKLSRDDAKPLLRLKGFPSFPLVERQANEVDWWDMVCNVKKLINEKKEDGKVFWQNLAGYKRQEALRPYLSSEEDRKKGKKFARYQLGDLLWHLEKKHGEDWGKVYDEAWERIDKKVEGLSKHIKLEEERRSEDAQSKAALTDWLRAKASFVIEGLKEADKDEFCRCELKLQKWYGDLRGKPFAIEAENSILDISGFSKQYNCAFIWQKDGVKKLNLYLIINYFKGGKLRFKKIKPEAFEANRFYTVINKKSGEIVPMEVNFNFDDPNLIILPLAFGKRQGREFIWNDLLSLETGSLKLANGRVIEKTLYNRRTRQDEPALFVALTFERREVLDSSNIKPMNLIGVDRGENIPAVIALTDPEGCPLSRFKDSLGNPTHILRIGESYKEKQRTIQAKKEVEQRRAGGYSRKYASKAKNLADDMVRNTARDLLYYAVTQDAMLIFENLSRGFGRQGKRTFMAERQYTRMEDWLTAKLAYEGLPSKVYLSKTLAQYTSKTCSNCGFTITSADYDRVLEKLKKTATGWMTTINGKELKVEGQITYYNRYKRQNVVKDLSVELDRLSEESVNNDISSWTKGRSGEALSLLKKRFSHRPVQEKFVCLNCGFETHADEQAALNIARSWLFLRSQEYKKYQTNKTTGNTDKRAFVETWQSFYRKKLKEVWKPAV

SEQ ID NO: 29841 - protein, 978 aa, synthetic construct
  REGION 1..978: note = engineered CasX variant
QEIKRINKIRRRLVKDSNTKKAGKTGPMKTLLVRVMTPDLRERLENLRKKPENIPQPISNTSRANLNKLLTDYTEMKKAILHVYWEEFQKDPVGLMSRVAQPASKKIDQNKLKPEMDEKGNLTTAGFACSQCGQPLFVYKLEQVSEKGKAYTNYFGRCNVAEHEKLILLAQLKPEKDSDEAVTYSLGKFGQRALDFYSIHVTKESTHPVKPLAQIAGNRYASGPVGKALSDACMGTIASFLSKYQDIIIEHQKVVKGNQKRLESLRELAGKENLEYPSVTLPPQPHTKEGVDAYNEVIARVRMWVNLNLWQKLKLSRDDAKPLLRLKGFPSFPLVERQANEVDWWDMVCNVKKLINEKKEDGKVFWQNLAGYKRQEALRPYLSSEEDRKKGKKFARYQLGDLLLHLYKKHGEDWGKVYDEAWERIDKKVEGLSKHIKLEEERRSEDAQSKAALTDWLRAKASFVIEGLKEADKDEFCRCELKLQKWYGDLRGKPFAIEAENSILDISGFSKQYNCAFIWQKDGVKKLNLYLIINYFKGGKLRFKKIKPEAFEANRFYTVINKKSGEIVPMEVNFNFDDPNLIILPLAFGKRQGREFIWNDLLSLETGSLKLANGRVIEKTLYNRRTRQDEPALFVALTFERREVLDSSNIKPMNLIGVDRGENIPAVIALTDPEGCPLSRFKDSLGNPTHILRIGESYKEKQRTIQAKKEVEQRRAGGYSRKYASKAKNLADDMVRNTARDLLYYAVTQDAMLIFENLSRGFGRQGKRTFMAERQYTRMEDWLTAKLAYEGLPSKVYLSKTLAQYTSKTCSNCGFTITSADYDRVLEKLKKTATGWMTTINGKELKVEGQITYYNRYKRQNVVKDLSVELDRLSEESVNNDISSWTKGRSGEALSLLKKRFSHRPVQEKFVCLNCGFETHADEQAALNIARSWLFLRSQEYKKYQTNKTTGNTDKRAFVETWQSFYRKKLKEVWKPAV

SEQ ID NO: 29842 - protein, 978 aa, synthetic construct
  REGION 1..978: note = engineered CasX variant
QEIKRINKIRRRLVKDSNTKKAGKTGPMKTLLVRVMTPDLRERLENLRKKPENIPQPISNTSRANLNKLLTDYTEMKKAILHVYWEEFQKDPVGLMSRVAQPASKKIDQNKLKPEMDEKGNLTTAGFACSQCGQPLFVYKLEQVSEKGKAYTNYFGRCNVAEHEKLILLAQLKPEKDSDEAVTYSLGKFGQRALDFYSIHVTKESTHPVKPLAQIAGNRYASGPVGKALSDACMGTIASFLSKYQDIIIEHQKVVKGNQKRLESLRELAGKENLEYPSVTLPPQPHTKEGVDAYNEVIARVRMWVNLNLWQKLKLSRDDAKPLLRLKGFPSFPLVERQANEVDWWDMVCNVKKLINEKKEDGKVFWQNLAGYKRQEALRPYLSSEEDRKKGKKFARYQLGDLLLHLEKKHPEDWGKVYDEAWERIDKKVEGLSKHIKLEEERRSEDAQSKAALTDWLRAKASFVIEGLKEADKDEFCRCELKLQKWYGDLRGKPFAIEAENSILDISGFSKQYNCAFIWQKDGVKKLNLYLIINYFKGGKLRFKKIKPEAFEANRFYTVINKKSGEIVPMEVNFNFDDPNLIILPLAFGKRQGREFIWNDLLSLETGSLKLANGRVIEKTLYNRRTRQDEPALFVALTFERREVLDSSNIKPMNLIGVDRGENIPAVIALTDPEGCPLSRFKDSLGNPTHILRIGESYKEKQRTIQAKKEVEQRRAGGYSRKYASKAKNLADDMVRNTARDLLYYAVTQDAMLIFENLSRGFGRQGKRTFMAERQYTRMEDWLTAKLAYEGLPSKVYLSKTLAQYTSKTCSNCGFTITSADYDRVLEKLKKTATGWMTTINGKELKVEGQITYYNRYKRQNVVKDLSVELDRLSEESVNNDISSWTKGRSGEALSLLKKRFSHRPVQEKFVCLNCGFETHADEQAALNIARSWLFLRSQEYKKYQTNKTTGNTDKRAFVETWQSFYRKKLKEVWKPAV

SEQ ID NO: 29843 - protein, 979 aa, synthetic construct
  REGION 1..979: note = engineered CasX variant
QEIKRINKIRRRLVKDSNTKKAGKTGPMKTLLVRVMTPDLRERLENLRKKPENIPQPISNTSRANLNKLLTDYTEMKKAILHVYWEEFQKDPVGLMSRVAQPASKKIDQNKLKPEMDEKGNLTTAGFACSQCGQPLFVYKLEQVSEKGKAYTNYFGRCNVAEHEKLILLAQLKPEKDSDEAVTYSLGKFGQRALDFYSIHVTKESTHPVKPLAQIAGNRYASGPVGKALSDACMGTIASFLSKYQDIIIEHQKVVKGNQKRLESLRELAGKENLEYPSVTLPPQPHTKEGVDAYNEVIARVRMWVNLNLWQKLKLSRDDAKPLLRLKGFPSFPLVERQANEVDWWDMVCNVKKLINEKKEDGKVFWQNLAGYKRQEALRPYLSSEEDRKKGKKFARYQLGDLLLHLEKKHGERDWGKVYDEAWERIDKKVEGLSKHIKLEEERRSEDAQSKAALTDWLRAKASFVIEGLKEADKDEFCRCELKLQKWYGDLRGKPFAIEAENSILDISGFSKQYNCAFIWQKDGVKKLNLYLIINYFKGGKLRFKKIKPEAFEANRFYTVINKKSGEIVPMEVNFNFDDPNLIILPLAFGKRQGREFIWNDLLSLETGSLKLANGRVIEKTLYNRRTRQDEPALFVALTFERREVLDSSNIKPMNLIGVDRGENIPAVIALTDPEGCPLSRFKDSLGNPTHILRIGESYKEKQRTIQAKKEVEQRRAGGYSRKYASKAKNLADDMVRNTARDLLYYAVTQDAMLIFENLSRGFGRQGKRTFMAERQYTRMEDWLTAKLAYEGLPSKVYLSKTLAQYTSKTCSNCGFTITSADYDRVLEKLKKTATGWMTTINGKELKVEGQITYYNRYKRQNVVKDLSVELDRLSEESVNNDISSWTKGRSGEALSLLKKRFSHRPVQEKFVCLNCGFETHADEQAALNIARSWLFLRSQEYKKYQTNKTTGNTDKRAFVETWQSFYRKKLKEVWKPAV

SEQ ID NO: 29844 - protein, 979 aa, synthetic construct
  REGION 1..979: note = engineered CasX variant
QEIKRINKIRRRLVKDSNTKKAGKTGPMKTLLVRVMTPDLRERLENLRKKPENIPQPISNTSRANLNKLLTDYTEMKKAILHVYWEEFQKDPVGLMSRVAQPASKKIDQNKLKPEMDEKGNLTTAGFACSQCGQPLFVYKLEQVSEKGKAYTNYFGRCNVAEHEKLILLAQLKPEKDSDEAVTYSLGKFGQRALDFYSIHVTKESTHPVKPLAQIAGNRYASGPVGKALSDACMGTIASFLSKYQDIIIEHQKVVKGNQKRLESLRELAGKENLEYPSVTLPPQPHTKEGVDAYNEVIARVRMWVNLNLWQKLKLSRDDAKPLLRLKGFPSFPLVERQANEVDWWDMVCNVKKLINEKKEDGKVFWQNLAGYKRQEALRPYLSSEEDRKKGKKFARYQLGDLLLHLEKKHGEYDWGKVYDEAWERIDKKVEGLSKHIKLEEERRSEDAQSKAALTDWLRAKASFVIEGLKEADKDEFCRCELKLQKWYGDLRGKPFAIEAENSILDISGFSKQYNCAFIWQKDGVKKLNLYLIINYFKGGKLRFKKIKPEAFEANRFYTVINKKSGEIVPMEVNFNFDDPNLIILPLAFGKRQGREFIWNDLLSLETGSLKLANGRVIEKTLYNRRTRQDEPALFVALTFERREVLDSSNIKPMNLIGVDRGENIPAVIALTDPEGCPLSRFKDSLGNPTHILRIGESYKEKQRTIQAKKEVEQRRAGGYSRKYASKAKNLADDMVRNTARDLLYYAVTQDAMLIFENLSRGFGRQGKRTFMAERQYTRMEDWLTAKLAYEGLPSKVYLSKTLAQYTSKTCSNCGFTITSADYDRVLEKLKKTATGWMTTINGKELKVEGQITYYNRYKRQNVVKDLSVELDRLSEESVNNDISSWTKGRSGEALSLLKKRFSHRPVQEKFVCLNCGFETHADEQAALNIARSWLFLRSQEYKKYQTNKTTGNTDKRAFVETWQSFYRKKLKEVWKPAV

SEQ ID NO: 29845 - protein, 978 aa, synthetic construct
  REGION 1..978: note = engineered CasX variant
QEIKRINKIRRRLVKDSNTKKAGKTGPMKTLLVRVMTPDLRERLENLRKKPENIPQPISNTSRANLNKLLTDYTEMKKAILHVYWEEFQKDPVGLMSRVAQPASKKIDQNKLKPEMDEKGNLTTAGFACSQCGQPLFVYKLEQVSEKGKAYTNYFGRCNVAEHEKLILLAQLKPEKDSDEAVTYSLGKFGQRALDFYSIHVTKESTHPVKPLAQIAGNRYASGPVGKALSDACMGTIASFLSKYQDIIIEHQKVVKGNQKRLESLRELAGKENLEYPSVTLPPQPHTKEGVDAYNEVIARVRMWVNLNLWQKLKLSRDDAKPLLRLKGFPSFPLVERQANEVDWWDMVCNVKKLINEKKEDGKVFWQNLAGYKRQEALRPYLSSEEDRKKGKKFARYQLGDLLLHLEKKHGEDWGDVYDEAWERIDKKVEGLSKHIKLEEERRSEDAQSKAALTDWLRAKASFVIEGLKEADKDEFCRCELKLQKWYGDLRGKPFAIEAENSILDISGFSKQYNCAFIWQKDGVKKLNLYLIINYFKGGKLRFKKIKPEAFEANRFYTVINKKSGEIVPMEVNFNFDDPNLIILPLAFGKRQGREFIWNDLLSLETGSLKLANGRVIEKTLYNRRTRQDEPALFVALTFERREVLDSSNIKPMNLIGVDRGENIPAVIALTDPEGCPLSRFKDSLGNPTHILRIGESYKEKQRTIQAKKEVEQRRAGGYSRKYASKAKNLADDMVRNTARDLLYYAVTQDAMLIFENLSRGFGRQGKRTFMAERQYTRMEDWLTAKLAYEGLPSKVYLSKTLAQYTSKTCSNCGFTITSADYDRVLEKLKKTATGWMTTINGKELKVEGQITYYNRYKRQNVVKDLSVELDRLSEESVNNDISSWTKGRSGEALSLLKKRFSHRPVQEKFVCLNCGFETHADEQAALNIARSWLFLRSQEYKKYQTNKTTGNTDKRAFVETWQSFYRKKLKEVWKPAV

SEQ ID NO: 29846 - protein, 978 aa, synthetic construct
  REGION 1..978: note = engineered CasX variant
QEIKRINKIRRRLVKDSNTKKAGKTGPMKTLLVRVMTPDLRERLENLRKKPENIPQPISNTSRANLNKLLTDYTEMKKAILHVYWEEFQKDPVGLMSRVAQPASKKIDQNKLKPEMDEKGNLTTAGFACSQCGQPLFVYKLEQVSEKGKAYTNYFGRCNVAEHEKLILLAQLKPEKDSDEAVTYSLGKFGQRALDFYSIHVTKESTHPVKPLAQIAGNRYASGPVGKALSDACMGTIASFLSKYQDIIIEHQKVVKGNQKRLESLRELAGKENLEYPSVTLPPQPHTKEGVDAYNEVIARVRMWVNLNLWQKLKLSRDDAKPLLRLKGFPSFPLVERQANEVDWWDMVCNVKKLINEKKEDGKVFWQNLAGYKRQEALRPYLSSEEDRKKGKKFARYQLGDLLLHLEKKHGEDWGKVYGEAWERIDKKVEGLSKHIKLEEERRSEDAQSKAALTDWLRAKASFVIEGLKEADKDEFCRCELKLQKWYGDLRGKPFAIEAENSILDISGFSKQYNCAFIWQKDGVKKLNLYLIINYFKGGKLRFKKIKPEAFEANRFYTVINKKSGEIVPMEVNFNFDDPNLIILPLAFGKRQGREFIWNDLLSLETGSLKLANGRVIEKTLYNRRTRQDEPALFVALTFERREVLDSSNIKPMNLIGVDRGENIPAVIALTDPEGCPLSRFKDSLGNPTHILRIGESYKEKQRTIQAKKEVEQRRAGGYSRKYASKAKNLADDMVRNTARDLLYYAVTQDAMLIFENLSRGFGRQGKRTFMAERQYTRMEDWLTAKLAYEGLPSKVYLSKTLAQYTSKTCSNCGFTITSADYDRVLEKLKKTATGWMTTINGKELKVEGQITYYNRYKRQNVVKDLSVELDRLSEESVNNDISSWTKGRSGEALSLLKKRFSHRPVQEKFVCLNCGFETHADEQAALNIARSWLFLRSQEYKKYQTNKTTGNTDKRAFVETWQSFYRKKLKEVWKPAV

SEQ ID NO: 29847 - protein, 978 aa, synthetic construct
  REGION 1..978: note = engineered CasX variant
QEIKRINKIRRRLVKDSNTKKAGKTGPMKTLLVRVMTPDLRERLENLRKKPENIPQPISNTSRANLNKLLTDYTEMKKAILHVYWEEFQKDPVGLMSRVAQPASKKIDQNKLKPEMDEKGNLTTAGFACSQCGQPLFVYKLEQVSEKGKAYTNYFGRCNVAEHEKLILLAQLKPEKDSDEAVTYSLGKFGQRALDFYSIHVTKESTHPVKPLAQIAGNRYASGPVGKALSDACMGTIASFLSKYQDIIIEHQKVVKGNQKRLESLRELAGKENLEYPSVTLPPQPHTKEGVDAYNEVIARVRMWVNLNLWQKLKLSRDDAKPLLRLKGFPSFPLVERQANEVDWWDMVCNVKKLINEKKEDGKVFWQNLAGYKRQEALRPYLSSEEDRKKGKKFARYQLGDLLLHLEKKHGEDWGKVYDEAWERIDKKVEGLSKHIKLEEERRSEDAQSKAALTDWLRAKASFVIEGKKEADKDEFCRCELKLQKWYGDLRGKPFAIEAENSILDISGFSKQYNCAFIWQKDGVKKLNLYLIINYFKGGKLRFKKIKPEAFEANRFYTVINKKSGEIVPMEVNFNFDDPNLIILPLAFGKRQGREFIWNDLLSLETGSLKLANGRVIEKTLYNRRTRQDEPALFVALTFERREVLDSSNIKPMNLIGVDRGENIPAVIALTDPEGCPLSRFKDSLGNPTHILRIGESYKEKQRTIQAKKEVEQRRAGGYSRKYASKAKNLADDMVRNTARDLLYYAVTQDAMLIFENLSRGFGRQGKRTFMAERQYTRMEDWLTAKLAYEGLPSKVYLSKTLAQYTSKTCSNCGFTITSADYDRVLEKLKKTATGWMTTINGKELKVEGQITYYNRYKRQNVVKDLSVELDRLSEESVNNDISSWTKGRSGEALSLLKKRFSHRPVQEKFVCLNCGFETHADEQAALNIARSWLFLRSQEYKKYQTNKTTGNTDKRAFVETWQSFYRKKLKEVWKPAV

SEQ ID NO: 29848 - protein, 978 aa, synthetic construct
  REGION 1..978: note = engineered CasX variant
QEIKRINKIRRRLVKDSNTKKAGKTGPMKTLLVRVMTPDLRERLENLRKKPENIPQPISNTSRANLNKLLTDYTEMKKAILHVYWEEFQKDPVGLMSRVAQPASKKIDQNKLKPEMDEKGNLTTAGFACSQCGQPLFVYKLEQVSEKGKAYTNYFGRCNVAEHEKLILLAQLKPEKDSDEAVTYSLGKFGQRALDFYSIHVTKESTHPVKPLAQIAGNRYASGPVGKALSDACMGTIASFLSKYQDIIIEHQKVVKGNQKRLESLRELAGKENLEYPSVTLPPQPHTKEGVDAYNEVIARVRMWVNLNLWQKLKLSRDDAKPLLRLKGFPSFPLVERQANEVDWWDMVCNVKKLINEKKEDGKVFWQNLAGYKRQEALRPYLSSEEDRKKGKKFARYQLGDLLLHLEKKHGEDWGKVYDEAWERIDKKVEGLSKHIKLEEERRSEDAQSKAALTDWLRAKASFVIEGSKEADKDEFCRCELKLQKWYGDLRGKPFAIEAENSILDISGFSKQYNCAFIWQKDGVKKLNLYLIINYFKGGKLRFKKIKPEAFEANRFYTVINKKSGEIVPMEVNFNFDDPNLIILPLAFGKRQGREFIWNDLLSLETGSLKLANGRVIEKTLYNRRTRQDEPALFVALTFERREVLDSSNIKPMNLIGVDRGENIPAVIALTDPEGCPLSRFKDSLGNPTHILRIGESYKEKQRTIQAKKEVEQRRAGGYSRKYASKAKNLADDMVRNTARDLLYYAVTQDAMLIFENLSRGFGRQGKRTFMAERQYTRMEDWLTAKLAYEGLPSKVYLSKTLAQYTSKTCSNCGFTITSADYDRVLEKLKKTATGWMTTINGKELKVEGQITYYNRYKRQNVVKDLSVELDRLSEESVNNDISSWTKGRSGEALSLLKKRFSHRPVQEKFVCLNCGFETHADEQAALNIARSWLFLRSQEYKKYQTNKTTGNTDKRAFVETWQSFYRKKLKEVWKPAV

SEQ ID NO: 29849 - protein, 979 aa, synthetic construct
  REGION 1..979: note = engineered CasX variant
QEIKRINKIRRRLVKDSNTKKAGKTGPMKTLLVRVMTPDLRERLENLRKKPENIPQPISNTSRANLNKLLTDYTEMKKAILHVYWEEFQKDPVGLMSRVAQPASKKIDQNKLKPEMDEKGNLTTAGFACSQCGQPLFVYKLEQVSEKGKAYTNYFGRCNVAEHEKLILLAQLKPEKDSDEAVTYSLGKFGQRALDFYSIHVTKESTHPVKPLAQIAGNRYASGPVGKALSDACMGTIASFLSKYQDIIIEHQKVVKGNQKRLESLRELAGKENLEYPSVTLPPQPHTKEGVDAYNEVIARVRMWVNLNLWQKLKLSRDDAKPLLRLKGFPSFPLVERQANEVDWWDMVCNVKKLINEKKEDGKVFWQNLAGYKRQEALRPYLSSEEDRKKGKKFARYQLGDLLLHLEKKHGEDWGKVYDEAWERIDKKVEGLSKHIKLEEERRSEDAQSKAALTDWLRAKASFVIEGLKEADDKDEFCRCELKLQKWYGDLRGKPFAIEAENSILDISGFSKQYNCAFIWQKDGVKKLNLYLIINYFKGGKLRFKKIKPEAFEANRFYTVINKKSGEIVPMEVNFNFDDPNLIILPLAFGKRQGREFIWNDLLSLETGSLKLANGRVIEKTLYNRRTRQDEPALFVALTFERREVLDSSNIKPMNLIGVDRGENIPAVIALTDPEGCPLSRFKDSLGNPTHILRIGESYKEKQRTIQAKKEVEQRRAGGYSRKYASKAKNLADDMVRNTARDLLYYAVTQDAMLIFENLSRGFGRQGKRTFMAERQYTRMEDWLTAKLAYEGLPSKVYLSKTLAQYTSKTCSNCGFTITSADYDRVLEKLKKTATGWMTTINGKELKVEGQITYYNRYKRQNVVKDLSVELDRLSEESVNNDISSWTKGRSGEALSLLKKRFSHRPVQEKFVCLNCGFETHADEQAALNIARSWLFLRSQEYKKYQTNKTTGNTDKRAFVETWQSFYRKKLKEVWKPAV

SEQ ID NO: 29850 - protein, 979 aa, synthetic construct
  REGION 1..979: note = engineered CasX variant
QEIKRINKIRRRLVKDSNTKKAGKTGPMKTLLVRVMTPDLRERLENLRKKPENIPQPISNTSRANLNKLLTDYTEMKKAILHVYWEEFQKDPVGLMSRVAQPASKKIDQNKLKPEMDEKGNLTTAGFACSQCGQPLFVYKLEQVSEKGKAYTNYFGRCNVAEHEKLILLAQLKPEKDSDEAVTYSLGKFGQRALDFYSIHVTKESTHPVKPLAQIAGNRYASGPVGKALSDACMGTIASFLSKYQDIIIEHQKVVKGNQKRLESLRELAGKENLEYPSVTLPPQPHTKEGVDAYNEVIARVRMWVNLNLWQKLKLSRDDAKPLLRLKGFPSFPLVERQANEVDWWDMVCNVKKLINEKKEDGKVFWQNLAGYKRQEALRPYLSSEEDRKKGKKFARYQLGDLLLHLEKKHGEDWGKVYDEAWERIDKKVEGLSKHIKLEEERRSEDAQSKAALTDWLRAKASFVIEGLKEADKDEFCRCELKLQKWYGDLRGKPFAIEAENSILDISGFSKQYNCAFIWQKDGVKKLNLYLIINYFKGGKLRFKKIKPEAFEANRFYTVINKKSGEIVPMEVNFNFDDPNLIILPLAFGKRQGREFIWNDLLSLETGSLKLANGRVIEKTLYNRRTRQDEPALFVALTFERREVLDSSNIKPMNLIGVDRGENIPAVIALTDPEGCPLSRFKDSLGNPTHILRIGESYKEKQRTIQAKKEVEQRRAGGYSRKYASKAKNLADDMVRNTARDLLYYAVTQDAMLIFENLSRGFGRQGKRTFMAERQYTRMEDWLTAKLAYEGLPSKVYLSKTLAQYTSKTCSNCGFTITSADYDRVLEKLKKTATGWMTTINGKELKVEGQITYYNRYKRQNVVKDLSVELDRLSEESVNNDISSWTKGRSGNEALSLLKKRFSHRPVQEKFVCLNCGFETHADEQAALNIARSWLFLRSQEYKKYQTNKTTGNTDKRAFVETWQSFYRKKLKEVWKPAV

SEQ ID NO: 29851 - protein, 978 aa, synthetic construct
  REGION 1..978: note = engineered CasX variant
QEIKRINKIRRRLVKDSNTKKAGKTGPMKTLLVRVMTPDLRERLENLRKKPENIPQPISNTSRANLNKLLTDYTEMKKAILHVYWEEFQKDPVGLMSRVAQPASKKIDQNKLKPEMDEKGNLTTAGFACSQCGQPLFVYKLEQVSEKGKAYTNYFGRCNVAEHEKLILLAQLKPEKDSDEAVTYSLGKFGQRALDFYSIHVTKESTHPVKPLAQIAGNRYASGPVGKALSDACMGTIASFLSKYQDIIIEHQKVVKGNQKRLESLRELAGKENLEYPSVTLPPQPHTKEGVDAYNEVIARVRMWVNLNLWQKLKLSRDDAKPLLRLKGFPSFPLVERQANEVDWWDMVCNVKKLINEKKEDGKVFWQNLAGYKRQEALRPYLSSEEDRQKGKKFARYQLGDLLLHLEKKHGEDWGKVYDEAWERIDKKVEGLSKHIKLEEERRSEDAQSKAALTDWLRAKASFVIEGLKEADKDEFCRCELKLQKWYGDLRGKPFAIEAENSILDISGFSKQYNCAFIWQKDGVKKLNLYLIINYFKGGKLRFKKIKPEAFEANRFYTVINKKSGEIVPMEVNFNFDDPNLIILPLAFGKRQGREFIWNDLLSLETGSLKLANGRVIEKTLYNRRTRQDEPALFVALTFERREVLDSSNIKPMNLIGVDRGENIPAVIALTDPEGCPLSRFKDSLGNPTHILRIGESYKEKQRTIQAKKEVEQRRAGGYSRKYASKAKNLADDMVRNTARDLLYYAVTQDAMLIFENLSRGFGRQGKRTFMAERQYTRMEDWLTAKLAYEGLPSKVYLSKTLAQYTSKTCSNCGFTITSADYDRVLEKLKKTATGWMTTINGKELKVEGQITYYNRYKRQNVVKDLSVELDRLSEESVNNDISSWTKGRSGEALSLLKKRFSHRPVQEKFVCLNCGFETHADEQAALNIARSWLFLRSQEYKKYQTNKTTGNTDKRAFVETWQSFYRKKLKEVWKPAV

SEQ ID NO: 29852 - protein, 978 aa, synthetic construct
  REGION 1..978: note = engineered CasX variant
QEIKRINKIRRRLVKDSNTKKAGKTGPMKTLLVRVMTPDLRERLENLRKKPENIPQPISNTSRANLNKLLTDYTEMKKAILHVYWEEFQKDPVGLMSRVAQPASKKIDQNKLKPEMDEKGNLTTAGFACSQCGQPLFVYKLEQVSEKGKAYTNYFGRCNVAEHEKLILLAQLKPEKDSDEAVTYSLGKFGQRALDFYSIHVTKESTHPVKPLAQIAGNRYASGPVGKALSDACMGTIASFLSKYQDIIIEHQKVVKGNQKRLESLRELAGKENLEYPSVTLPPQPHTKEGVDAYNEVIARVRMWVNLNLWQKLKLSRDDAKPLLRLKGFPSFPLVERQANEVDWWDMVCNVKKLINEKKEDGKVFWQNLAGYKRQEALRPYLSSEEDRKKGKKFARYQLGDLLLHLEKKHGEDWGKVYDEAWERIDKKVEGLSKHIKLEEERRSEDAQSKAALTDWLRAKASFVIEGLKEADKDEFCRCELKLQKWYGDLRGKPFAIEAENSILDISGFSKQYNCAFIWQKDGVKKLNLYLIINYFKGGKLRFKKIKPEAFEANRFYTVINKKSGEIVPMEVNFNFDDPNLIILPLAFGKRQGREFIWNDLLSLETGSLKLANGRVIEKTLYNRRTRQDEPALFVALTFERREVLDSSNIKPMNLIGVDRGENIPAVIALTDPEGCPLSRFKDSLGNPTHILRIGESYKEKQRTIQAKKEVEQRRAGGYSRKYASKAKNLADDMVRNTARDLLYYAVTQDAMLIFENLSRGFGRQGKRTFMAERQYTRMEDWLTAKLAYEGLPSQVYLSKTLAQYTSKTCSNCGFTITSADYDRVLEKLKKTATGWMTTINGKELKVEGQITYYNRYKRQNVVKDLSVELDRLSEESVNNDISSWTKGRSGEALSLLKKRFSHRPVQEKFVCLNCGFETHADEQAALNIARSWLFLRSQEYKKYQTNKTTGNTDKRAFVETWQSFYRKKLKEVWKPAV

SEQ ID NO: 29853 - protein, 978 aa, synthetic construct
  REGION 1..978: note = engineered CasX variant
QEIKRINKIRRRLVKDSNTKKAGKTGPMKTLLVRVMTPDLRERLENLRKKPENIPQPISNTSRANLNKLLTDYTEMKKAILHVYWEEFQKDPVGLMSRVAQPASKKIDQNKLKPEMDEKGNLTTAGFACSQCGQPLFVYKLEQVSEKGKAYTNYFGRCNVAEHEKLILLAQLKPEKDSDEAVTYSLGKFGQRALDFYSIHVTKESTHPVKPLAQIAGNRYASGPVGKALSDACMGTIASFLSKYQDIIIEHQKVVKGNQKRLESLRELAGKENLEYPSVTLPPQPHTKEGVDAYNEVIARVRMWVNLNLWQKLKLSRDDAKPLLRLKGFPSFPLVERQANEVDWWDMVCNVKKLINEKKEDGKVFWQNLAGYKRQEALRPYLSSEEDRKKGKKFARYQLGDLLLHLEKKHGEDWGKVYDEAWERIDKKVEGLSKHIKLEEERRSEDAQSKAALTDWLRAKASFVIEGLKEADKDEFCRCELKLQKWYGDLRGKPFAIEAENSILDISGFSKQYNCAFIWQKDGVKKLNLYLIINYFKGGKLRFKKIKPEAFEANRFYTVINKKSGEIVPMEVNFNFDDPNLIILPLAFGKRQGREFIWNDLLSLETGSLKLANGRVIEKTLYNRRTRQDEPALFVALTFERREVLDSSNIKPMNLIGVDRGENIPAVIALTDPEGCPLSRFKDSLGNPTHILRIGESYKEKQRTIQAKKEVEQRRAGGYSRKYASKAKNLADDMVRNTARDLLYYAVTQDAMLIFENLSRGFGRQGKRTFMAERQYTRMEDWLTAKLAYNGLPSKVYLSKTLAQYTSKTCSNCGFTITSADYDRVLEKLKKTATGWMTTINGKELKVEGQITYYNRYKRQNVVKDLSVELDRLSEESVNNDISSWTKGRSGEALSLLKKRFSHRPVQEKFVCLNCGFETHADEQAALNIARSWLFLRSQEYKKYQTNKTTGNTDKRAFVETWQSFYRKKLKEVWKPAV

SEQ ID NO: 29854 - protein, 978 aa, synthetic construct
  REGION 1..978: note = engineered CasX variant
QEIKRINKIRRRLVKDSNTKKAGKTGPMKTLLVRVMTPDLRERLENLRKKPENIPQPISNTSRANLNKLLTDYTEMKKAILHVYWEEFQKDPVGLMSRVAQPASKKIDQNKLKPEMDEKGNLTTAGFACSQCGQPLFVYKLEQVSEKGKAYTNYFGRCNVAEHEKLIQLAQLKPEKDSDEAVTYSLGKFGQRALDFYSIHVTKESTHPVKPLAQIAGNRYASGPVGKALSDACMGTIASFLSKYQDIIIEHQKVVKGNQKRLESLRELAGKENLEYPSVTLPPQPHTKEGVDAYNEVIARVRMWVNLNLWQKLKLSRDDAKPLLRLKGFPSFPLVERQANEVDWWDMVCNVKKLINEKKEDGKVFWQNLAGYKRQEALRPYLSSEEDRKKGKKFARYQLGDLLLHLEKKHGEDWGKVYDEAWERIDKKVEGLSKHIKLEEERRSEDAQSKAALTDWLRAKASFVIEGLKEADKDEFCRCELKLQKWYGDLRGKPFAIEAENSILDISGFSKQYNCAFIWQKDGVKKLNLYLIINYFKGGKLRFKKIKPEAFEANRFYTVINKKSGEIVPMEVNFNFDDPNLIILPLAFGKRQGREFIWNDLLSLETGSLKLANGRVIEKTLYNRRTRQDEPALFVALTFERREVLDSSNIKPMNLIGVDRGENIPAVIALTDPEGCPLSRFKDSLGNPTHILRIGESYKEKQRTIQAKKEVEQRRAGGYSRKYASKAKNLADDMVRNTARDLLYYAVTQDAMLIFENLSRGFGRQGKRTFMAERQYTRMEDWLTAKLAYEGLPSKVYLSKTLAQYTSKTCSNCGFTITSADYDRVLEKLKKTATGWMTTINGKELKVEGQITYYNRYKRQNVVKDLSVELDRLSEESVNNDISSWTKGRSGEALSLLKKRFSHRPVQEKFVCLNCGFETHADEQAALNIARSWLFLRSQEYKKYQTNKTTGNTDKRAFVETWQSFYRKKLKEVWKPAV

SEQ ID NO: 29855 - protein, 978 aa, synthetic construct
  REGION 1..978: note = engineered CasX variant
QEIKRINKIRRRLVKDSNTKKAGKTGPMKTLLVRVMTPDLRERLENLRKKPENIPQPISNTSRANLNKLLTDYTEMKKAILHVYWEEFQKDPVGLMSRVAQPASKKIDQNKLKPEMDEKGNLTTAGFACSQCGQPLFVYKLEQVSEKGKAYTNYFGRCNVAEHEKLILLAQLKPEKDSDEAVTYSLGKFGQRALDFYSIHVTKESTHPVKPLAQIAGNRYASGPVGKALSDACMGTIASFLSKYQDIIIEHQKVVKGNQKRLESLRELAGKENLEYPSVTLPPQPHTKEGVDAYNEVIARVRMWVNLNLWQKLKLSRDDAKPLLRLKGFPSFPLVERQANEVDWWDMVCNVKKLINEKKEDGKVFWQNLAIYKRQEALRPYLSSEEDRKKGKKFARYQLGDLLLHLEKKHGEDWGKVYDEAWERIDKKVEGLSKHIKLEEERRSEDAQSKAALTDWLRAKASFVIEGLKEADKDEFCRCELKLQKWYGDLRGKPFAIEAENSILDISGFSKQYNCAFIWQKDGVKKLNLYLIINYFKGGKLRFKKIKPEAFEANRFYTVINKKSGEIVPMEVNFNFDDPNLIILPLAFGKRQGREFIWNDLLSLETGSLKLANGRVIEKTLYNRRTRQDEPALFVALTFERREVLDSSNIKPMNLIGVDRGENIPAVIALTDPEGCPLSRFKDSLGNPTHILRIGESYKEKQRTIQAKKEVEQRRAGGYSRKYASKAKNLADDMVRNTARDLLYYAVTQDAMLIFENLSRGFGRQGKRTFMAERQYTRMEDWLTAKLAYEGLPSKVYLSKTLAQYTSKTCSNCGFTITSADYDRVLEKLKKTATGWMTTINGKELKVEGQITYYNRYKRQNVVKDLSVELDRLSEESVNNDISSWTKGRSGEALSLLKKRFSHRPVQEKFVCLNCGFETHADEQAALNIARSWLFLRSQEYKKYQTNKTTGNTDKRAFVETWQSFYRKKLKEVWKPAV

SEQ ID NO: 29856 - protein, 978 aa, synthetic construct
  REGION 1..978: note = engineered CasX variant
QEIKRINKIRRRLVKDSNTKKAGKTGPMKTLLVRVMTPDLRERLENLRKKPENIPQPISNTSRANLNKLLTDYTEMKKAILHVYWEEFQKDPVGLMSRVAQPASKKIDQNKLKPEMDEKGNLTTAGFACSQCGQPLFVYKLEQVSEKGKAYTNYFGRCNVAEHEKLILLAQLKPEKDSDEAVTYSLGKFGQRALDFYSIHVTKESTHPVKPLAQIAGNRYASGPVGKALSDACMGTIASFLSKYQDIIIEHQKVVKGNQKRLESLRELAGKENLEYPSVTLPPQPHTKEGVDAYNEVIARVRMWVNLNLWQKLKLSRDDAKPLLRLKGFPSFPLVERQANEVDWWDMVCNVKKLINEKKEDGKVFWQNLAGYKRQEALRPYLSSEEDREKGKKFARYQLGDLLLHLEKKHGEDWGKVYDEAWERIDKKVEGLSKHIKLEEERRSEDAQSKAALTDWLRAKASFVIEGLKEADKDEFCRCELKLQKWYGDLRGKPFAIEAENSILDISGFSKQYNCAFIWQKDGVKKLNLYLIINYFKGGKLRFKKIKPEAFEANRFYTVINKKSGEIVPMEVNFNFDDPNLIILPLAFGKRQGREFIWNDLLSLETGSLKLANGRVIEKTLYNRRTRQDEPALFVALTFERREVLDSSNIKPMNLIGVDRGENIPAVIALTDPEGCPLSRFKDSLGNPTHILRIGESYKEKQRTIQAKKEVEQRRAGGYSRKYASKAKNLADDMVRNTARDLLYYAVTQDAMLIFENLSRGFGRQGKRTFMAERQYTRMEDWLTAKLAYEGLPSKVYLSKTLAQYTSKTCSNCGFTITSADYDRVLEKLKKTATGWMTTINGKELKVEGQITYYNRYKRQNVVKDLSVELDRLSEESVNNDISSWTKGRSGEALSLLKKRFSHRPVQEKFVCLNCGFETHADEQAALNIARSWLFLRSQEYKKYQTNKTTGNTDKRAFVETWQSFYRKKLKEVWKPAV

SEQ ID NO: 29857 - protein, 978 aa, synthetic construct
  REGION 1..978: note = engineered CasX variant
QEIKRINKIRRRLVKDSNTKKAGKTGPMKTLLVRVMTPDLRERLENLRKKPENIPQPISNTSRANLNKLLTDYTEMKKAILHVYWEEFQKDPVGLMSRVAQPASKKIDQNKLKPEMDEKGNLTTAGFACSQCGQPLFVYKLEQVSEKGKAYTNYFGRCNVAEHEKLILLAQLKPEKDSDEAVTYSLGKFGQRALDFYSIHVTKESTHPVKPLAQIAGNRYASGPVGKALSDACMGTIASFLSKYQDIIIEHQKVVKGNQKRLESLRELAGKENLEYPSVTLPPQPHTKEGVDAYNEVIARVRMWVNLNLWQKLKLSRDDAKPLLRLKGFPSFPLVERQANEVDWWDMVCNVKKLINEKKEDGKVFWQNLAGYKRQEALRPYLSSEEDRKKGKKFARYQLGDLLLHLEKKHGEDWGKVYDEAWERIDKKVEGLSKHIKLEEERRSEDAQSKAALTDWLRAKASFVIEGLKEADKDEFCRCELKLQKWYGDLRGKPFAIEAENSILDISGFSKQYNCAFIWQKDGVKKLNLYLIINYFKGGKLRFKKIKPEAFEANRFYTVINKKSGEIVIMEVNFNFDDPNLIILPLAFGKRQGREFIWNDLLSLETGSLKLANGRVIEKTLYNRRTRQDEPALFVALTFERREVLDSSNIKPMNLIGVDRGENIPAVIALTDPEGCPLSRFKDSLGNPTHILRIGESYKEKQRTIQAKKEVEQRRAGGYSRKYASKAKNLADDMVRNTARDLLYYAVTQDAMLIFENLSRGFGRQGKRTFMAERQYTRMEDWLTAKLAYEGLPSKVYLSKTLAQYTSKTCSNCGFTITSADYDRVLEKLKKTATGWMTTINGKELKVEGQITYYNRYKRQNVVKDLSVELDRLSEESVNNDISSWTKGRSGEALSLLKKRFSHRPVQEKFVCLNCGFETHADEQAALNIARSWLFLRSQEYKKYQTNKTTGNTDKRAFVETWQSFYRKKLKEVWKPAV

SEQ ID NO: 29858 - protein, 979 aa, synthetic construct
  REGION 1..979: note = engineered CasX variant
QEIKRINKIRRRLVKDSNTKKAGKTGPMKTLLVRVMTPDLRERLENLRKKPENIPQPISNTSRANLNKLLTDYTEMKKAILHVYWEEFQKDPVGLMSRVAQPASKKIDQNKLKPEMDEKGNLTTAGFACSQCGQPLFVYKLEQVSEKGKAYTNYFGRCNVAEHEKLILLAQLKPEKDSDEAVTYSLGKFGQRALDFYSIHVTKESTHPVKPLAQIAGNRYASGPVGKALSGACMGTIASFLSKYQDIIIEHQKVVKGNQKRLESLRELAGKENLEYPSVTLPPQPHTKEGVDAYNEVIARVRMWVNLNLWQKLKLSRDDAKPLLRLKGFPSFPLVERQANEVDWWDMVCNVKKLINEKKEDGKVFWQNLAGYKRQEALRPYLSSEEDRKKGKKFARYQLGDLLLHLEKKHGEDWGKVYDEAWERIDKKVEGLSKHIKLEEERRSEDAQSKAALTDWLRAKASFVIEGLKEADKDEFCRCELKLQKWYGDLRGKPFAIEAENSILDISGFSKQYNCAFIWQKDGVKKLNLYLIINYFKGGKLRFKKIKPEAFEANRFYTVINKKSGEIVPMEVNFNFDDPNLIILPLAFGKRQGREFIWNDLLSLETGSLKLANGRVIEKTLYNRRTRQDEPALFVALTFERREVLDSSNIKPMNLIGVDRGENIPAVIALTDPEGCPLSRFKDSLGNPTHILRIGESYKEKQRTIQAKKEVEQRRAGGYSRKYASKAKNLADDMVRNTARDLLYYAVTQDAMLIFENLSRGFGRQGKRTFMAERQYTRMEDWLTAKLAYEGPLPSKTYLSKTLAQYTSKTCSNCGFTITSADYDRVLEKLKKTATGWMTTINGKELKVEGQITYYNRYKRQNVVKDLSVELDRLSEESVNNDISSWTKGRSGEALSLLKKRFSHRPVQEKFVCLNCGFETHADEQAALNIARSWLFLRSQEYKKYQTNKTTGNTDKRAFVETWQSFYRKKLKEVWKPAV

SEQ ID NO: 29859 - protein, 979 aa, synthetic construct
  REGION 1..979: note = engineered CasX variant
QEIKRINKIRRRLVKDSNTKKAGKTGPMKTLLVRVMTPDLRERLENLRKKPENIPQPISNTSRANLNKLLTDYTEMKKAILHVYWEEFQKDPVGLMSRVAQPASKKIDQNKLKPEMDEKGNLTTAGFACSQCGQPLFVYKLEQVSEKGKAYTNYFGRCNVAEHEKLILLAQLKPEKDSDEAVTYSLGKFGQRALDFYSIHVTKESTHPVKPLAQIAGNRYASGPVGKALSDACMGTIASFLSKYQDIIIEHQKVVKGNQKRLESLRELAGKENLEYPSVTLPPQPHTKEGVDAYNEVIARVRMWVNLNLWQKLKLSRDDAKPLLRLKNFPSFPLVERQANEVDWWDMVCNVKKLINEKKEDGKVFWQNLAGYKRQEALRPYLSSEEDRKKGKKFARYQLGDLLLHLEKKHGEDWGKVYDEAWERIDKKVEGLSKHIKLEEERRSEDAQSKAALTDWLRAKASFVIEGLKEADKDEFCRCELKLQKWYGDLRGKPFAIEAENSILDISGFSKQYNCAFIWQKDGVKKLNLYLIINYFKGGKLRFKKIKPEAFEANRFYTVINKKSGEIVPMEVNFNFDDPNLIILPLAFGKRQGREFIWNDLLSLETGSLKLANGRVIEKTLYNRRTRQDEPALFVALTFERREVLDSSNIKPMNLIGVDRGENIPAVIALTDPEGCPLSRFKDSLGNPTHILRIGESYKEKQRTIQAKKEVEQRRAGGYSRKYASKAKNLADDMVRNTARDLLYYAVTQDAMLIFENLSRGFGRQGKRTFMAERQYTRMEDWLTAKLAYEGPLPSKTYLSKTLAQYTSKTCSNCGFTITSADYDRVLEKLKKTATGWMTTINGKELKVEGQITYYNRYKRQNVVKDLSVELDRLSEESVNNDISSWTKGRSGEALSLLKKRFSHRPVQEKFVCLNCGFETHADEQAALNIARSWLFLRSQEYKKYQTNKTTGNTDKRAFVETWQSFYRKKLKEVWKPAV

SEQ ID NO: 29860 - protein, 979 aa, synthetic construct
  REGION 1..979: note = engineered CasX variant
QEIKRINKIRRRLVKDSNTKKAGKTGPMKTLLVRVMTPDLRERLENLRKKPENIPQPISNTSRANLNKLLTDYTEMKKAILHVYWEEFQKDPVGLMSRVAQPASKKIDQNKLKPEMDEKGNLTTAGFACSQCGQPLFVYKLEQVSEKGKAYTNYFGRCNVAEHEKLILLAQLKPEKDSDEAVTYSLGKFGQRALDFYSIHVTKESTHPVKPLAQIAGNRYASGPVGKALSDACMGTIASFLSKYQDIIIEHQKVVKGNQKRLESLRELAGKENLEYPSVTLPPQPHTKEGVDAYNEVIARVRMWVNLNLWQKLKLSRDDAKPLLRLKGFPSFPLVERQANEVDWWDMVCNVKKLINEKKEDGKVFWQNLAGYKRQEALRPYLSSEEDRKKGKKFARYQLGDLLNHLEKKHGEDWGKVYDEAWERIDKKVEGLSKHIKLEEERRSEDAQSKAALTDWLRAKASFVIEGLKEADKDEFCRCELKLQKWYGDLRGKPFAIEAENSILDISGFSKQYNCAFIWQKDGVKKLNLYLIINYFKGGKLRFKKIKPEAFEANRFYTVINKKSGEIVPMEVNFNFDDPNLIILPLAFGKRQGREFIWNDLLSLETGSLKLANGRVIEKTLYNRRTRQDEPALFVALTFERREVLDSSNIKPMNLIGVDRGENIPAVIALTDPEGCPLSRFKDSLGNPTHILRIGESYKEKQRTIQAKKEVEQRRAGGYSRKYASKAKNLADDMVRNTARDLLYYAVTQDAMLIFENLSRGFGRQGKRTFMAERQYTRMEDWLTAKLAYEGPLPSKTYLSKTLAQYTSKTCSNCGFTITSADYDRVLEKLKKTATGWMTTINGKELKVEGQITYYNRYKRQNVVKDLSVELDRLSEESVNNDISSWTKGRSGEALSLLKKRFSHRPVQEKFVCLNCGFETHADEQAALNIARSWLFLRSQEYKKYQTNKTTGNTDKRAFVETWQSFYRKKLKEVWKPAV

SEQ ID NO: 29861 - protein, 979 aa, synthetic construct
  REGION 1..979: note = engineered CasX variant
QEIKRINKIRRRLVKDSNTKKAGKTGPMKTLLVRVMTPDLRERLENLRKKPENIPQPISNTSRANLNKLLTDYTEMKKAILHVYWEEFQKDPVGLMSRVAQPASKKIDQNKLKPEMDEKGNLTTAGFACSQCGQPLFVYKLEQVSEKGKAYTNYFGRCNVAEHEKLILLAQLKPEKDSDEAVTYSLGKFGQRALDFYSIHVTKESTHPVKPLAQIAGNRYASGPVGKALSDACMGTIASFLSKYQDIIIEHQKVVKGNQKRLESLRELAGKENLEYPSVTLPPQPHTKEGVDAYNEVIARVRMWVNLNLWQKLKLSRDDAKPLLRLKGFPSFPLVERQANEVDWWDMVCNVKKLINEKKEDGKVFWQNLAGYKRQEALRPYLSSEEDRKKGKKFARYQLGDLLWHLEKKHGEDWGKVYDEAWERIDKKVEGLSKHIKLEEERRSEDAQSKAALTDWLRAKASFVIEGLKEADKDEFCRCELKLQKWYGDLRGKPFAIEAENSILDISGFSKQYNCAFIWQKDGVKKLNLYLIINYFKGGKLRFKKIKPEAFEANRFYTVINKKSGEIVPMEVNFNFDDPNLIILPLAFGKRQGREFIWNDLLSLETGSLKLANGRVIEKTLYNRRTRQDEPALFVALTFERREVLDSSNIKPMNLIGVDRGENIPAVIALTDPEGCPLSRFKDSLGNPTHILRIGESYKEKQRTIQAKKEVEQRRAGGYSRKYASKAKNLADDMVRNTARDLLYYAVTQDAMLIFENLSRGFGRQGKRTFMAERQYTRMEDWLTAKLAYEGPLPSKTYLSKTLAQYTSKTCSNCGFTITSADYDRVLEKLKKTATGWMTTINGKELKVEGQITYYNRYKRQNVVKDLSVELDRLSEESVNNDISSWTKGRSGEALSLLKKRFSHRPVQEKFVCLNCGFETHADEQAALNIARSWLFLRSQEYKKYQTNKTTGNTDKRAFVETWQSFYRKKLKEVWKPAV

SEQ ID NO: 29862 - protein, 979 aa, synthetic construct
  REGION 1..979: note = engineered CasX variant
QEIKRINKIRRRLVKDSNTKKAGKTGPMKTLLVRVMTPDLRERLENLRKKPENIPQPISNTSRANLNKLLTDYTEMKKAILHVYWEEFQKDPVGLMSRVAQPASKKIDQNKLKPEMDEKGNLTTAGFACSQCGQPLFVYKLEQVSEKGKAYTNYFGRCNVAEHEKLILLAQLKPEKDSDEAVTYSLGKFGQRALDFYSIHVTKESTHPVKPLAQIAGNRYASGPVGKALSDACMGTIASFLSKYQDIIIEHQKVVKGNQKRLESLRELAGKENLEYPSVTLPPQPHTKEGVDAYNEVIARVRMWVNLNLWQKLKLSRDDAKPLLRLKGFPSFPLVERQANEVDWWDMVCNVKKLINEKKEDGKVFWQNLAGYKRQEALRPYLSSEEDRKKGKKFARYQLGDLLLHLYKKHGEDWGKVYDEAWERIDKKVEGLSKHIKLEEERRSEDAQSKAALTDWLRAKASFVIEGLKEADKDEFCRCELKLQKWYGDLRGKPFAIEAENSILDISGFSKQYNCAFIWQKDGVKKLNLYLIINYFKGGKLRFKKIKPEAFEANRFYTVINKKSGEIVPMEVNFNFDDPNLIILPLAFGKRQGREFIWNDLLSLETGSLKLANGRVIEKTLYNRRTRQDEPALFVALTFERREVLDSSNIKPMNLIGVDRGENIPAVIALTDPEGCPLSRFKDSLGNPTHILRIGESYKEKQRTIQAKKEVEQRRAGGYSRKYASKAKNLADDMVRNTARDLLYYAVTQDAMLIFENLSRGFGRQGKRTFMAERQYTRMEDWLTAKLAYEGPLPSKTYLSKTLAQYTSKTCSNCGFTITSADYDRVLEKLKKTATGWMTTINGKELKVEGQITYYNRYKRQNVVKDLSVELDRLSEESVNNDISSWTKGRSGEALSLLKKRFSHRPVQEKFVCLNCGFETHADEQAALNIARSWLFLRSQEYKKYQTNKTTGNTDKRAFVETWQSFYRKKLKEVWKPAV

SEQ ID NO: 29863 - protein, 979 aa, synthetic construct
  REGION 1..979: note = engineered CasX variant
QEIKRINKIRRRLVKDSNTKKAGKTGPMKTLLVRVMTPDLRERLENLRKKPENIPQPISNTSRANLNKLLTDYTEMKKAILHVYWEEFQKDPVGLMSRVAQPASKKIDQNKLKPEMDEKGNLTTAGFACSQCGQPLFVYKLEQVSEKGKAYTNYFGRCNVAEHEKLILLAQLKPEKDSDEAVTYSLGKFGQRALDFYSIHVTKESTHPVKPLAQIAGNRYASGPVGKALSDACMGTIASFLSKYQDIIIEHQKVVKGNQKRLESLRELAGKENLEYPSVTLPPQPHTKEGVDAYNEVIARVRMWVNLNLWQKLKLSRDDAKPLLRLKGFPSFPLVERQANEVDWWDMVCNVKKLINEKKEDGKVFWQNLAGYKRQEALRPYLSSEEDRKKGKKFARYQLGDLLLHLEKKHPEDWGKVYDEAWERIDKKVEGLSKHIKLEEERRSEDAQSKAALTDWLRAKASFVIEGLKEADKDEFCRCELKLQKWYGDLRGKPFAIEAENSILDISGFSKQYNCAFIWQKDGVKKLNLYLIINYFKGGKLRFKKIKPEAFEANRFYTVINKKSGEIVPMEVNFNFDDPNLIILPLAFGKRQGREFIWNDLLSLETGSLKLANGRVIEKTLYNRRTRQDEPALFVALTFERREVLDSSNIKPMNLIGVDRGENIPAVIALTDPEGCPLSRFKDSLGNPTHILRIGESYKEKQRTIQAKKEVEQRRAGGYSRKYASKAKNLADDMVRNTARDLLYYAVTQDAMLIFENLSRGFGRQGKRTFMAERQYTRMEDWLTAKLAYEGPLPSKTYLSKTLAQYTSKTCSNCGFTITSADYDRVLEKLKKTATGWMTTINGKELKVEGQITYYNRYKRQNVVKDLSVELDRLSEESVNNDISSWTKGRSGEALSLLKKRFSHRPVQEKFVCLNCGFETHADEQAALNIARSWLFLRSQEYKKYQTNKTTGNTDKRAFVETWQSFYRKKLKEVWKPAV

SEQ ID NO: 29864 - protein, 980 aa, synthetic construct
  REGION 1..980: note = engineered CasX variant
QEIKRINKIRRRLVKDSNTKKAGKTGPMKTLLVRVMTPDLRERLENLRKKPENIPQPISNTSRANLNKLLTDYTEMKKAILHVYWEEFQKDPVGLMSRVAQPASKKIDQNKLKPEMDEKGNLTTAGFACSQCGQPLFVYKLEQVSEKGKAYTNYFGRCNVAEHEKLILLAQLKPEKDSDEAVTYSLGKFGQRALDFYSIHVTKESTHPVKPLAQIAGNRYASGPVGKALSDACMGTIASFLSKYQDIIIEHQKVVKGNQKRLESLRELAGKENLEYPSVTLPPQPHTKEGVDAYNEVIARVRMWVNLNLWQKLKLSRDDAKPLLRLKGFPSFPLVERQANEVDWWDMVCNVKKLINEKKEDGKVFWQNLAGYKRQEALRPYLSSEEDRKKGKKFARYQLGDLLLHLEKKHGERDWGKVYDEAWERIDKKVEGLSKHIKLEEERRSEDAQSKAALTDWLRAKASFVIEGLKEADKDEFCRCELKLQKWYGDLRGKPFAIEAENSILDISGFSKQYNCAFIWQKDGVKKLNLYLIINYFKGGKLRFKKIKPEAFEANRFYTVINKKSGEIVPMEVNFNFDDPNLIILPLAFGKRQGREFIWNDLLSLETGSLKLANGRVIEKTLYNRRTRQDEPALFVALTFERREVLDSSNIKPMNLIGVDRGENIPAVIALTDPEGCPLSRFKDSLGNPTHILRIGESYKEKQRTIQAKKEVEQRRAGGYSRKYASKAKNLADDMVRNTARDLLYYAVTQDAMLIFENLSRGFGRQGKRTFMAERQYTRMEDWLTAKLAYEGPLPSKTYLSKTLAQYTSKTCSNCGFTITSADYDRVLEKLKKTATGWMTTINGKELKVEGQITYYNRYKRQNVVKDLSVELDRLSEESVNNDISSWTKGRSGEALSLLKKRFSHRPVQEKFVCLNCGFETHADEQAALNIARSWLFLRSQEYKKYQTNKTTGNTDKRAFVETWQSFYRKKLKEVWKPAV

SEQ ID NO: 29865 - protein, 980 aa, synthetic construct
  REGION 1..980: note = engineered CasX variant
QEIKRINKIRRRLVKDSNTKKAGKTGPMKTLLVRVMTPDLRERLENLRKKPENIPQPISNTSRANLNKLLTDYTEMKKAILHVYWEEFQKDPVGLMSRVAQPASKKIDQNKLKPEMDEKGNLTTAGFACSQCGQPLFVYKLEQVSEKGKAYTNYFGRCNVAEHEKLILLAQLKPEKDSDEAVTYSLGKFGQRALDFYSIHVTKESTHPVKPLAQIAGNRYASGPVGKALSDACMGTIASFLSKYQDIIIEHQKVVKGNQKRLESLRELAGKENLEYPSVTLPPQPHTKEGVDAYNEVIARVRMWVNLNLWQKLKLSRDDAKPLLRLKGFPSFPLVERQANEVDWWDMVCNVKKLINEKKEDGKVFWQNLAGYKRQEALRPYLSSEEDRKKGKKFARYQLGDLLLHLEKKHGEYDWGKVYDEAWERIDKKVEGLSKHIKLEEERRSEDAQSKAALTDWLRAKASFVIEGLKEADKDEFCRCELKLQKWYGDLRGKPFAIEAENSILDISGFSKQYNCAFIWQKDGVKKLNLYLIINYFKGGKLRFKKIKPEAFEANRFYTVINKKSGEIVPMEVNFNFDDPNLIILPLAFGKRQGREFIWNDLLSLETGSLKLANGRVIEKTLYNRRTRQDEPALFVALTFERREVLDSSNIKPMNLIGVDRGENIPAVIALTDPEGCPLSRFKDSLGNPTHILRIGESYKEKQRTIQAKKEVEQRRAGGYSRKYASKAKNLADDMVRNTARDLLYYAVTQDAMLIFENLSRGFGRQGKRTFMAERQYTRMEDWLTAKLAYEGPLPSKTYLSKTLAQYTSKTCSNCGFTITSADYDRVLEKLKKTATGWMTTINGKELKVEGQITYYNRYKRQNVVKDLSVELDRLSEESVNNDISSWTKGRSGEALSLLKKRFSHRPVQEKFVCLNCGFETHADEQAALNIARSWLFLRSQEYKKYQTNKTTGNTDKRAFVETWQSFYRKKLKEVWKPAV

SEQ ID NO: 29866 - protein, 979 aa, synthetic construct
  REGION 1..979: note = engineered CasX variant
QEIKRINKIRRRLVKDSNTKKAGKTGPMKTLLVRVMTPDLRERLENLRKKPENIPQPISNTSRANLNKLLTDYTEMKKAILHVYWEEFQKDPVGLMSRVAQPASKKIDQNKLKPEMDEKGNLTTAGFACSQCGQPLFVYKLEQVSEKGKAYTNYFGRCNVAEHEKLILLAQLKPEKDSDEAVTYSLGKFGQRALDFYSIHVTKESTHPVKPLAQIAGNRYASGPVGKALSDACMGTIASFLSKYQDIIIEHQKVVKGNQKRLESLRELAGKENLEYPSVTLPPQPHTKEGVDAYNEVIARVRMWVNLNLWQKLKLSRDDAKPLLRLKGFPSFPLVERQANEVDWWDMVCNVKKLINEKKEDGKVFWQNLAGYKRQEALRPYLSSEEDRKKGKKFARYQLGDLLLHLEKKHGEDWGDVYDEAWERIDKKVEGLSKHIKLEEERRSEDAQSKAALTDWLRAKASFVIEGLKEADKDEFCRCELKLQKWYGDLRGKPFAIEAENSILDISGFSKQYNCAFIWQKDGVKKLNLYLIINYFKGGKLRFKKIKPEAFEANRFYTVINKKSGEIVPMEVNFNFDDPNLIILPLAFGKRQGREFIWNDLLSLETGSLKLANGRVIEKTLYNRRTRQDEPALFVALTFERREVLDSSNIKPMNLIGVDRGENIPAVIALTDPEGCPLSRFKDSLGNPTHILRIGESYKEKQRTIQAKKEVEQRRAGGYSRKYASKAKNLADDMVRNTARDLLYYAVTQDAMLIFENLSRGFGRQGKRTFMAERQYTRMEDWLTAKLAYEGPLPSKTYLSKTLAQYTSKTCSNCGFTITSADYDRVLEKLKKTATGWMTTINGKELKVEGQITYYNRYKRQNVVKDLSVELDRLSEESVNNDISSWTKGRSGEALSLLKKRFSHRPVQEKFVCLNCGFETHADEQAALNIARSWLFLRSQEYKKYQTNKTTGNTDKRAFVETWQSFYRKKLKEVWKPAV

SEQ ID NO: 29867 - protein, 979 aa, synthetic construct
  REGION 1..979: note = engineered CasX variant
QEIKRINKIRRRLVKDSNTKKAGKTGPMKTLLVRVMTPDLRERLENLRKKPENIPQPISNTSRANLNKLLTDYTEMKKAILHVYWEEFQKDPVGLMSRVAQPASKKIDQNKLKPEMDEKGNLTTAGFACSQCGQPLFVYKLEQVSEKGKAYTNYFGRCNVAEHEKLILLAQLKPEKDSDEAVTYSLGKFGQRALDFYSIHVTKESTHPVKPLAQIAGNRYASGPVGKALSDACMGTIASFLSKYQDIIIEHQKVVKGNQKRLESLRELAGKENLEYPSVTLPPQPHTKEGVDAYNEVIARVRMWVNLNLWQKLKLSRDDAKPLLRLKGFPSFPLVERQANEVDWWDMVCNVKKLINEKKEDGKVFWQNLAGYKRQEALRPYLSSEEDRKKGKKFARYQLGDLLLHLEKKHGEDWGKVYGEAWERIDKKVEGLSKHIKLEEERRSEDAQSKAALTDWLRAKASFVIEGLKEADKDEFCRCELKLQKWYGDLRGKPFAIEAENSILDISGFSKQYNCAFIWQKDGVKKLNLYLIINYFKGGKLRFKKIKPEAFEANRFYTVINKKSGEIVPMEVNFNFDDPNLIILPLAFGKRQGREFIWNDLLSLETGSLKLANGRVIEKTLYNRRTRQDEPALFVALTFERREVLDSSNIKPMNLIGVDRGENIPAVIALTDPEGCPLSRFKDSLGNPTHILRIGESYKEKQRTIQAKKEVEQRRAGGYSRKYASKAKNLADDMVRNTARDLLYYAVTQDAMLIFENLSRGFGRQGKRTFMAERQYTRMEDWLTAKLAYEGPLPSKTYLSKTLAQYTSKTCSNCGFTITSADYDRVLEKLKKTATGWMTTINGKELKVEGQITYYNRYKRQNVVKDLSVELDRLSEESVNNDISSWTKGRSGEALSLLKKRFSHRPVQEKFVCLNCGFETHADEQAALNIARSWLFLRSQEYKKYQTNKTTGNTDKRAFVETWQSFYRKKLKEVWKPAV

SEQ ID NO: 29868 - protein, 979 aa, synthetic construct
  REGION 1..979: note = engineered CasX variant
QEIKRINKIRRRLVKDSNTKKAGKTGPMKTLLVRVMTPDLRERLENLRKKPENIPQPISNTSRANLNKLLTDYTEMKKAILHVYWEEFQKDPVGLMSRVAQPASKKIDQNKLKPEMDEKGNLTTAGFACSQCGQPLFVYKLEQVSEKGKAYTNYFGRCNVAEHEKLILLAQLKPEKDSDEAVTYSLGKFGQRALDFYSIHVTKESTHPVKPLAQIAGNRYASGPVGKALSDACMGTIASFLSKYQDIIIEHQKVVKGNQKRLESLRELAGKENLEYPSVTLPPQPHTKEGVDAYNEVIARVRMWVNLNLWQKLKLSRDDAKPLLRLKGFPSFPLVERQANEVDWWDMVCNVKKLINEKKEDGKVFWQNLAGYKRQEALRPYLSSEEDRKKGKKFARYQLGDLLLHLEKKHGEDWGKVYDEAWERIDKKVEGLSKHIKLEEERRSEDAQSKAALTDWLRAKASFVIEGKKEADKDEFCRCELKLQKWYGDLRGKPFAIEAENSILDISGFSKQYNCAFIWQKDGVKKLNLYLIINYFKGGKLRFKKIKPEAFEANRFYTVINKKSGEIVPMEVNFNFDDPNLIILPLAFGKRQGREFIWNDLLSLETGSLKLANGRVIEKTLYNRRTRQDEPALFVALTFERREVLDSSNIKPMNLIGVDRGENIPAVIALTDPEGCPLSRFKDSLGNPTHILRIGESYKEKQRTIQAKKEVEQRRAGGYSRKYASKAKNLADDMVRNTARDLLYYAVTQDAMLIFENLSRGFGRQGKRTFMAERQYTRMEDWLTAKLAYEGPLPSKTYLSKTLAQYTSKTCSNCGFTITSADYDRVLEKLKKTATGWMTTINGKELKVEGQITYYNRYKRQNVVKDLSVELDRLSEESVNNDISSWTKGRSGEALSLLKKRFSHRPVQEKFVCLNCGFETHADEQAALNIARSWLFLRSQEYKKYQTNKTTGNTDKRAFVETWQSFYRKKLKEVWKPAV

SEQ ID NO: 29869 - protein, 979 aa, synthetic construct
  REGION 1..979: note = engineered CasX variant
QEIKRINKIRRRLVKDSNTKKAGKTGPMKTLLVRVMTPDLRERLENLRKKPENIPQPISNTSRANLNKLLTDYTEMKKAILHVYWEEFQKDPVGLMSRVAQPASKKIDQNKLKPEMDEKGNLTTAGFACSQCGQPLFVYKLEQVSEKGKAYTNYFGRCNVAEHEKLILLAQLKPEKDSDEAVTYSLGKFGQRALDFYSIHVTKESTHPVKPLAQIAGNRYASGPVGKALSDACMGTIASFLSKYQDIIIEHQKVVKGNQKRLESLRELAGKENLEYPSVTLPPQPHTKEGVDAYNEVIARVRMWVNLNLWQKLKLSRDDAKPLLRLKGFPSFPLVERQANEVDWWDMVCNVKKLINEKKEDGKVFWQNLAGYKRQEALRPYLSSEEDRKKGKKFARYQLGDLLLHLEKKHGEDWGKVYDEAWERIDKKVEGLSKHIKLEEERRSEDAQSKAALTDWLRAKASFVIEGSKEADKDEFCRCELKLQKWYGDLRGKPFAIEAENSILDISGFSKQYNCAFIWQKDGVKKLNLYLIINYFKGGKLRFKKIKPEAFEANRFYTVINKKSGEIVPMEVNFNFDDPNLIILPLAFGKRQGREFIWNDLLSLETGSLKLANGRVIEKTLYNRRTRQDEPALFVALTFERREVLDSSNIKPMNLIGVDRGENIPAVIALTDPEGCPLSRFKDSLGNPTHILRIGESYKEKQRTIQAKKEVEQRRAGGYSRKYASKAKNLADDMVRNTARDLLYYAVTQDAMLIFENLSRGFGRQGKRTFMAERQYTRMEDWLTAKLAYEGPLPSKTYLSKTLAQYTSKTCSNCGFTITSADYDRVLEKLKKTATGWMTTINGKELKVEGQITYYNRYKRQNVVKDLSVELDRLSEESVNNDISSWTKGRSGEALSLLKKRFSHRPVQEKFVCLNCGFETHADEQAALNIARSWLFLRSQEYKKYQTNKTTGNTDKRAFVETWQSFYRKKLKEVWKPAV

SEQ ID NO: 29870 - protein, 980 aa, synthetic construct
  REGION 1..980: note = engineered CasX variant
QEIKRINKIRRRLVKDSNTKKAGKTGPMKTLLVRVMTPDLRERLENLRKKPENIPQPISNTSRANLNKLLTDYTEMKKAILHVYWEEFQKDPVGLMSRVAQPASKKIDQNKLKPEMDEKGNLTTAGFACSQCGQPLFVYKLEQVSEKGKAYTNYFGRCNVAEHEKLILLAQLKPEKDSDEAVTYSLGKFGQRALDFYSIHVTKESTHPVKPLAQIAGNRYASGPVGKALSDACMGTIASFLSKYQDIIIEHQKVVKGNQKRLESLRELAGKENLEYPSVTLPPQPHTKEGVDAYNEVIARVRMWVNLNLWQKLKLSRDDAKPLLRLKGFPSFPLVERQANEVDWWDMVCNVKKLINEKKEDGKVFWQNLAGYKRQEALRPYLSSEEDRKKGKKFARYQLGDLLLHLEKKHGEDWGKVYDEAWERIDKKVEGLSKHIKLEEERRSEDAQSKAALTDWLRAKASFVIEGLKEADDKDEFCRCELKLQKWYGDLRGKPFAIEAENSILDISGFSKQYNCAFIWQKDGVKKLNLYLIINYFKGGKLRFKKIKPEAFEANRFYTVINKKSGEIVPMEVNFNFDDPNLIILPLAFGKRQGREFIWNDLLSLETGSLKLANGRVIEKTLYNRRTRQDEPALFVALTFERREVLDSSNIKPMNLIGVDRGENIPAVIALTDPEGCPLSRFKDSLGNPTHILRIGESYKEKQRTIQAKKEVEQRRAGGYSRKYASKAKNLADDMVRNTARDLLYYAVTQDAMLIFENLSRGFGRQGKRTFMAERQYTRMEDWLTAKLAYEGPLPSKTYLSKTLAQYTSKTCSNCGFTITSADYDRVLEKLKKTATGWMTTINGKELKVEGQITYYNRYKRQNVVKDLSVELDRLSEESVNNDISSWTKGRSGEALSLLKKRFSHRPVQEKFVCLNCGFETHADEQAALNIARSWLFLRSQEYKKYQTNKTTGNTDKRAFVETWQSFYRKKLKEVWKPAV

SEQ ID NO: 29871 - protein, 980 aa, synthetic construct
  REGION 1..980: note = engineered CasX variant
QEIKRINKIRRRLVKDSNTKKAGKTGPMKTLLVRVMTPDLRERLENLRKKPENIPQPISNTSRANLNKLLTDYTEMKKAILHVYWEEFQKDPVGLMSRVAQPASKKIDQNKLKPEMDEKGNLTTAGFACSQCGQPLFVYKLEQVSEKGKAYTNYFGRCNVAEHEKLILLAQLKPEKDSDEAVTYSLGKFGQRALDFYSIHVTKESTHPVKPLAQIAGNRYASGPVGKALSDACMGTIASFLSKYQDIIIEHQKVVKGNQKRLESLRELAGKENLEYPSVTLPPQPHTKEGVDAYNEVIARVRMWVNLNLWQKLKLSRDDAKPLLRLKGFPSFPLVERQANEVDWWDMVCNVKKLINEKKEDGKVFWQNLAGYKRQEALRPYLSSEEDRKKGKKFARYQLGDLLLHLEKKHGEDWGKVYDEAWERIDKKVEGLSKHIKLEEERRSEDAQSKAALTDWLRAKASFVIEGLKEADKDEFCRCELKLQKWYGDLRGKPFAIEAENSILDISGFSKQYNCAFIWQKDGVKKLNLYLIINYFKGGKLRFKKIKPEAFEANRFYTVINKKSGEIVPMEVNFNFDDPNLIILPLAFGKRQGREFIWNDLLSLETGSLKLANGRVIEKTLYNRRTRQDEPALFVALTFERREVLDSSNIKPMNLIGVDRGENIPAVIALTDPEGCPLSRFKDSLGNPTHILRIGESYKEKQRTIQAKKEVEQRRAGGYSRKYASKAKNLADDMVRNTARDLLYYAVTQDAMLIFENLSRGFGRQGKRTFMAERQYTRMEDWLTAKLAYEGPLPSKTYLSKTLAQYTSKTCSNCGFTITSADYDRVLEKLKKTATGWMTTINGKELKVEGQITYYNRYKRQNVVKDLSVELDRLSEESVNNDISSWTKGRSGNEALSLLKKRFSHRPVQEKFVCLNCGFETHADEQAALNIARSWLFLRSQEYKKYQTNKTTGNTDKRAFVETWQSFYRKKLKEVWKPAV

SEQ ID NO: 29872 - protein, 979 aa, synthetic construct
  REGION 1..979: note = engineered CasX variant
QEIKRINKIRRRLVKDSNTKKAGKTGPMKTLLVRVMTPDLRERLENLRKKPENIPQPISNTSRANLNKLLTDYTEMKKAILHVYWEEFQKDPVGLMSRVAQPASKKIDQNKLKPEMDEKGNLTTAGFACSQCGQPLFVYKLEQVSEKGKAYTNYFGRCNVAEHEKLILLAQLKPEKDSDEAVTYSLGKFGQRALDFYSIHVTKESTHPVKPLAQIAGNRYASGPVGKALSDACMGTIASFLSKYQDIIIEHQKVVKGNQKRLESLRELAGKENLEYPSVTLPPQPHTKEGVDAYNEVIARVRMWVNLNLWQKLKLSRDDAKPLLRLKGFPSFPLVERQANEVDWWDMVCNVKKLINEKKEDGKVFWQNLAGYKRQEALRPYLSSEEDRQKGKKFARYQLGDLLLHLEKKHGEDWGKVYDEAWERIDKKVEGLSKHIKLEEERRSEDAQSKAALTDWLRAKASFVIEGLKEADKDEFCRCELKLQKWYGDLRGKPFAIEAENSILDISGFSKQYNCAFIWQKDGVKKLNLYLIINYFKGGKLRFKKIKPEAFEANRFYTVINKKSGEIVPMEVNFNFDDPNLIILPLAFGKRQGREFIWNDLLSLETGSLKLANGRVIEKTLYNRRTRQDEPALFVALTFERREVLDSSNIKPMNLIGVDRGENIPAVIALTDPEGCPLSRFKDSLGNPTHILRIGESYKEKQRTIQAKKEVEQRRAGGYSRKYASKAKNLADDMVRNTARDLLYYAVTQDAMLIFENLSRGFGRQGKRTFMAERQYTRMEDWLTAKLAYEGPLPSKTYLSKTLAQYTSKTCSNCGFTITSADYDRVLEKLKKTATGWMTTINGKELKVEGQITYYNRYKRQNVVKDLSVELDRLSEESVNNDISSWTKGRSGEALSLLKKRFSHRPVQEKFVCLNCGFETHADEQAALNIARSWLFLRSQEYKKYQTNKTTGNTDKRAFVETWQSFYRKKLKEVWKPAV

SEQ ID NO: 29873 - protein, 979 aa, synthetic construct
  REGION 1..979: note = engineered CasX variant
QEIKRINKIRRRLVKDSNTKKAGKTGPMKTLLVRVMTPDLRERLENLRKKPENIPQPISNTSRANLNKLLTDYTEMKKAILHVYWEEFQKDPVGLMSRVAQPASKKIDQNKLKPEMDEKGNLTTAGFACSQCGQPLFVYKLEQVSEKGKAYTNYFGRCNVAEHEKLILLAQLKPEKDSDEAVTYSLGKFGQRALDFYSIHVTKESTHPVKPLAQIAGNRYASGPVGKALSDACMGTIASFLSKYQDIIIEHQKVVKGNQKRLESLRELAGKENLEYPSVTLPPQPHTKEGVDAYNEVIARVRMWVNLNLWQKLKLSRDDAKPLLRLKGFPSFPLVERQANEVDWWDMVCNVKKLINEKKEDGKVFWQNLAGYKRQEALRPYLSSEEDRKKGKKFARYQLGDLLLHLEKKHGEDWGKVYDEAWERIDKKVEGLSKHIKLEEERRSEDAQSKAALTDWLRAKASFVIEGLKEADKDEFCRCELKLQKWYGDLRGKPFAIEAENSILDISGFSKQYNCAFIWQKDGVKKLNLYLIINYFKGGKLRFKKIKPEAFEANRFYTVINKKSGEIVPMEVNFNFDDPNLIILPLAFGKRQGREFIWNDLLSLETGSLKLANGRVIEKTLYNRRTRQDEPALFVALTFERREVLDSSNIKPMNLIGVDRGENIPAVIALTDPEGCPLSRFKDSLGNPTHILRIGESYKEKQRTIQAKKEVEQRRAGGYSRKYASKAKNLADDMVRNTARDLLYYAVTQDAMLIFENLSRGFGRQGKRTFMAERQYTRMEDWLTAKLAYEGPLPSQTYLSKTLAQYTSKTCSNCGFTITSADYDRVLEKLKKTATGWMTTINGKELKVEGQITYYNRYKRQNVVKDLSVELDRLSEESVNNDISSWTKGRSGEALSLLKKRFSHRPVQEKFVCLNCGFETHADEQAALNIARSWLFLRSQEYKKYQTNKTTGNTDKRAFVETWQSFYRKKLKEVWKPAV

SEQ ID NO: 29874 - protein, 979 aa, synthetic construct
  REGION 1..979: note = engineered CasX variant
QEIKRINKIRRRLVKDSNTKKAGKTGPMKTLLVRVMTPDLRERLENLRKKPENIPQPISNTSRANLNKLLTDYTEMKKAILHVYWEEFQKDPVGLMSRVAQPASKKIDQNKLKPEMDEKGNLTTAGFACSQCGQPLFVYKLEQVSEKGKAYTNYFGRCNVAEHEKLILLAQLKPEKDSDEAVTYSLGKFGQRALDFYSIHVTKESTHPVKPLAQIAGNRYASGPVGKALSDACMGTIASFLSKYQDIIIEHQKVVKGNQKRLESLRELAGKENLEYPSVTLPPQPHTKEGVDAYNEVIARVRMWVNLNLWQKLKLSRDDAKPLLRLKGFPSFPLVERQANEVDWWDMVCNVKKLINEKKEDGKVFWQNLAGYKRQEALRPYLSSEEDRKKGKKFARYQLGDLLLHLEKKHGEDWGKVYDEAWERIDKKVEGLSKHIKLEEERRSEDAQSKAALTDWLRAKASFVIEGLKEADKDEFCRCELKLQKWYGDLRGKPFAIEAENSILDISGFSKQYNCAFIWQKDGVKKLNLYLIINYFKGGKLRFKKIKPEAFEANRFYTVINKKSGEIVPMEVNFNFDDPNLIILPLAFGKRQGREFIWNDLLSLETGSLKLANGRVIEKTLYNRRTRQDEPALFVALTFERREVLDSSNIKPMNLIGVDRGENIPAVIALTDPEGCPLSRFKDSLGNPTHILRIGESYKEKQRTIQAKKEVEQRRAGGYSRKYASKAKNLADDMVRNTARDLLYYAVTQDAMLIFENLSRGFGRQGKRTFMAERQYTRMEDWLTAKLAYNGPLPSKTYLSKTLAQYTSKTCSNCGFTITSADYDRVLEKLKKTATGWMTTINGKELKVEGQITYYNRYKRQNVVKDLSVELDRLSEESVNNDISSWTKGRSGEALSLLKKRFSHRPVQEKFVCLNCGFETHADEQAALNIARSWLFLRSQEYKKYQTNKTTGNTDKRAFVETWQSFYRKKLKEVWKPAV

SEQ ID NO: 29875 - protein, 979 aa, synthetic construct
  REGION 1..979: note = engineered CasX variant
QEIKRINKIRRRLVKDSNTKKAGKTGPMKTLLVRVMTPDLRERLENLRKKPENIPQPISNTSRANLNKLLTDYTEMKKAILHVYWEEFQKDPVGLMSRVAQPASKKIDQNKLKPEMDEKGNLTTAGFACSQCGQPLFVYKLEQVSEKGKAYTNYFGRCNVAEHEKLIQLAQLKPEKDSDEAVTYSLGKFGQRALDFYSIHVTKESTHPVKPLAQIAGNRYASGPVGKALSDACMGTIASFLSKYQDIIIEHQKVVKGNQKRLESLRELAGKENLEYPSVTLPPQPHTKEGVDAYNEVIARVRMWVNLNLWQKLKLSRDDAKPLLRLKGFPSFPLVERQANEVDWWDMVCNVKKLINEKKEDGKVFWQNLAGYKRQEALRPYLSSEEDRKKGKKFARYQLGDLLLHLEKKHGEDWGKVYDEAWERIDKKVEGLSKHIKLEEERRSEDAQSKAALTDWLRAKASFVIEGLKEADKDEFCRCELKLQKWYGDLRGKPFAIEAENSILDISGFSKQYNCAFIWQKDGVKKLNLYLIINYFKGGKLRFKKIKPEAFEANRFYTVINKKSGEIVPMEVNFNFDDPNLIILPLAFGKRQGREFIWNDLLSLETGSLKLANGRVIEKTLYNRRTRQDEPALFVALTFERREVLDSSNIKPMNLIGVDRGENIPAVIALTDPEGCPLSRFKDSLGNPTHILRIGESYKEKQRTIQAKKEVEQRRAGGYSRKYASKAKNLADDMVRNTARDLLYYAVTQDAMLIFENLSRGFGRQGKRTFMAERQYTRMEDWLTAKLAYEGPLPSKTYLSKTLAQYTSKTCSNCGFTITSADYDRVLEKLKKTATGWMTTINGKELKVEGQITYYNRYKRQNVVKDLSVELDRLSEESVNNDISSWTKGRSGEALSLLKKRFSHRPVQEKFVCLNCGFETHADEQAALNIARSWLFLRSQEYKKYQTNKTTGNTDKRAFVETWQSFYRKKLKEVWKPAV

SEQ ID NO: 29876 - protein, 979 aa, synthetic construct
  REGION 1..979: note = engineered CasX variant
QEIKRINKIRRRLVKDSNTKKAGKTGPMKTLLVRVMTPDLRERLENLRKKPENIPQPISNTSRANLNKLLTDYTEMKKAILHVYWEEFQKDPVGLMSRVAQPASKKIDQNKLKPEMDEKGNLTTAGFACSQCGQPLFVYKLEQVSEKGKAYTNYFGRCNVAEHEKLILLAQLKPEKDSDEAVTYSLGKFGQRALDFYSIHVTKESTHPVKPLAQIAGNRYASGPVGKALSDACMGTIASFLSKYQDIIIEHQKVVKGNQKRLESLRELAGKENLEYPSVTLPPQPHTKEGVDAYNEVIARVRMWVNLNLWQKLKLSRDDAKPLLRLKGFPSFPLVERQANEVDWWDMVCNVKKLINEKKEDGKVFWQNLAIYKRQEALRPYLSSEEDRKKGKKFARYQLGDLLLHLEKKHGEDWGKVYDEAWERIDKKVEGLSKHIKLEEERRSEDAQSKAALTDWLRAKASFVIEGLKEADKDEFCRCELKLQKWYGDLRGKPFAIEAENSILDISGFSKQYNCAFIWQKDGVKKLNLYLIINYFKGGKLRFKKIKPEAFEANRFYTVINKKSGEIVPMEVNFNFDDPNLIILPLAFGKRQGREFIWNDLLSLETGSLKLANGRVIEKTLYNRRTRQDEPALFVALTFERREVLDSSNIKPMNLIGVDRGENIPAVIALTDPEGCPLSRFKDSLGNPTHILRIGESYKEKQRTIQAKKEVEQRRAGGYSRKYASKAKNLADDMVRNTARDLLYYAVTQDAMLIFENLSRGFGRQGKRTFMAERQYTRMEDWLTAKLAYEGPLPSKTYLSKTLAQYTSKTCSNCGFTITSADYDRVLEKLKKTATGWMTTINGKELKVEGQITYYNRYKRQNVVKDLSVELDRLSEESVNNDISSWTKGRSGEALSLLKKRFSHRPVQEKFVCLNCGFETHADEQAALNIARSWLFLRSQEYKKYQTNKTTGNTDKRAFVETWQSFYRKKLKEVWKPAV

SEQ ID NO: 29877 - protein, 979 aa, synthetic construct
  REGION 1..979: note = engineered CasX variant
QEIKRINKIRRRLVKDSNTKKAGKTGPMKTLLVRVMTPDLRERLENLRKKPENIPQPISNTSRANLNKLLTDYTEMKKAILHVYWEEFQKDPVGLMSRVAQPASKKIDQNKLKPEMDEKGNLTTAGFACSQCGQPLFVYKLEQVSEKGKAYTNYFGRCNVAEHEKLILLAQLKPEKDSDEAVTYSLGKFGQRALDFYSIHVTKESTHPVKPLAQIAGNRYASGPVGKALSDACMGTIASFLSKYQDIIIEHQKVVKGNQKRLESLRELAGKENLEYPSVTLPPQPHTKEGVDAYNEVIARVRMWVNLNLWQKLKLSRDDAKPLLRLKGFPSFPLVERQANEVDWWDMVCNVKKLINEKKEDGKVFWQNLAGYKRQEALRPYLSSEEDREKGKKFARYQLGDLLLHLEKKHGEDWGKVYDEAWERIDKKVEGLSKHIKLEEERRSEDAQSKAALTDWLRAKASFVIEGLKEADKDEFCRCELKLQKWYGDLRGKPFAIEAENSILDISGFSKQYNCAFIWQKDGVKKLNLYLIINYFKGGKLRFKKIKPEAFEANRFYTVINKKSGEIVPMEVNFNFDDPNLIILPLAFGKRQGREFIWNDLLSLETGSLKLANGRVIEKTLYNRRTRQDEPALFVALTFERREVLDSSNIKPMNLIGVDRGENIPAVIALTDPEGCPLSRFKDSLGNPTHILRIGESYKEKQRTIQAKKEVEQRRAGGYSRKYASKAKNLADDMVRNTARDLLYYAVTQDAMLIFENLSRGFGRQGKRTFMAERQYTRMEDWLTAKLAYEGPLPSKTYLSKTLAQYTSKTCSNCGFTITSADYDRVLEKLKKTATGWMTTINGKELKVEGQITYYNRYKRQNVVKDLSVELDRLSEESVNNDISSWTKGRSGEALSLLKKRFSHRPVQEKFVCLNCGFETHADEQAALNIARSWLFLRSQEYKKYQTNKTTGNTDKRAFVETWQSFYRKKLKEVWKPAV

SEQ ID NO: 29878 - protein, 979 aa, synthetic construct
  REGION 1..979: note = engineered CasX variant
QEIKRINKIRRRLVKDSNTKKAGKTGPMKTLLVRVMTPDLRERLENLRKKPENIPQPISNTSRANLNKLLTDYTEMKKAILHVYWEEFQKDPVGLMSRVAQPASKKIDQNKLKPEMDEKGNLTTAGFACSQCGQPLFVYKLEQVSEKGKAYTNYFGRCNVAEHEKLILLAQLKPEKDSDEAVTYSLGKFGQRALDFYSIHVTKESTHPVKPLAQIAGNRYASGPVGKALSDACMGTIASFLSKYQDIIIEHQKVVKGNQKRLESLRELAGKENLEYPSVTLPPQPHTKEGVDAYNEVIARVRMWVNLNLWQKLKLSRDDAKPLLRLKGFPSFPLVERQANEVDWWDMVCNVKKLINEKKEDGKVFWQNLAGYKRQEALRPYLSSEEDRKKGKKFARYQLGDLLLHLEKKHGEDWGKVYDEAWERIDKKVEGLSKHIKLEEERRSEDAQSKAALTDWLRAKASFVIEGLKEADKDEFCRCELKLQKWYGDLRGKPFAIEAENSILDISGFSKQYNCAFIWQKDGVKKLNLYLIINYFKGGKLRFKKIKPEAFEANRFYTVINKKSGEIVIMEVNFNFDDPNLIILPLAFGKRQGREFIWNDLLSLETGSLKLANGRVIEKTLYNRRTRQDEPALFVALTFERREVLDSSNIKPMNLIGVDRGENIPAVIALTDPEGCPLSRFKDSLGNPTHILRIGESYKEKQRTIQAKKEVEQRRAGGYSRKYASKAKNLADDMVRNTARDLLYYAVTQDAMLIFENLSRGFGRQGKRTFMAERQYTRMEDWLTAKLAYEGPLPSKTYLSKTLAQYTSKTCSNCGFTITSADYDRVLEKLKKTATGWMTTINGKELKVEGQITYYNRYKRQNVVKDLSVELDRLSEESVNNDISSWTKGRSGEALSLLKKRFSHRPVQEKFVCLNCGFETHADEQAALNIARSWLFLRSQEYKKYQTNKTTGNTDKRAFVETWQSFYRKKLKEVWKPAV

SEQ ID NO: 29879 - protein, 979 aa, synthetic construct
  REGION 1..979: note = engineered CasX variant
QEIKRINKIRRRLVKDSNTKKAGKTGPMKTLLVRVMTPDLRERLENLRKKPENIPQPISNTSRANLNKLLTDYTEMKKAILHVYWEEFQKDPVGLMSRVAQPASKKIDQNKLKPEMDEKGNLTTAGFACSQCGQPLFVYKLEQVSEKGKAYTNYFGRCNVAEHEKLILLAQLKPEKDSDEAVTYSLGKFGQRALDFYSIHVTKESTHPVKPLAQIAGNRYASGPVGKALSGACMGTIASFLSKYQDIIIEHQKVVKGNQKRLESLRELAGKENLEYPSVTLPPQPHTKEGVDAYNEVIARVRMWVNLNLWQKLKLSRDDAKPLLRLKGFPSFPLVERQANEVDWWDMVCNVKKLINEKKEDGKVFWQNLAGYKRQEALRPYLSSEEDVRKKGKKFARYQLGDLLLHLEKKHGEDWGKVYDEAWERIDKKVEGLSKHIKLEEERRSEDAQSKAALTDWLRAKASFVIEGLKEADKDEFCRCELKLQKWYGDLRGKPFAIEAENSILDISGFSKQYNCAFIWQKDGVKKLNLYLIINYFKGGKLRFKKIKPEAFEANRFYTVINKKSGEIVPMEVNFNFDDPNLIILPLAFGKRQGREFIWNDLLSLETGSLKLANGRVIEKTLYNRRTRQDEPALFVALTFERREVLDSSNIKPMNLIGVDRGENIPAVIALTDPEGCPLSRFKDSLGNPTHILRIGESYKEKQRTIQAKKEVEQRRAGGYSRKYASKAKNLADDMVRNTARDLLYYAVTQDAMLIFENLSRGFGRQGKRTFMAERQYTRMEDWLTAKLAYEGLPSKTYLSKTLAQYTSKTCSNCGFTITSADYDRVLEKLKKTATGWMTTINGKELKVEGQITYYNRYKRQNVVKDLSVELDRLSEESVNNDISSWTKGRSGEALSLLKKRFSHRPVQEKFVCLNCGFETHADEQAALNIARSWLFLRSQEYKKYQTNKTTGNTDKRAFVETWQSFYRKKLKEVWKPAV

SEQ ID NO: 29880 - protein, 979 aa, synthetic construct
  REGION 1..979: note = engineered CasX variant
QEIKRINKIRRRLVKDSNTKKAGKTGPMKTLLVRVMTPDLRERLENLRKKPENIPQPISNTSRANLNKLLTDYTEMKKAILHVYWEEFQKDPVGLMSRVAQPASKKIDQNKLKPEMDEKGNLTTAGFACSQCGQPLFVYKLEQVSEKGKAYTNYFGRCNVAEHEKLILLAQLKPEKDSDEAVTYSLGKFGQRALDFYSIHVTKESTHPVKPLAQIAGNRYASGPVGKALSDACMGTIASFLSKYQDIIIEHQKVVKGNQKRLESLRELAGKENLEYPSVTLPPQPHTKEGVDAYNEVIARVRMWVNLNLWQKLKLSRDDAKPLLRLKNFPSFPLVERQANEVDWWDMVCNVKKLINEKKEDGKVFWQNLAGYKRQEALRPYLSSEEDVRKKGKKFARYQLGDLLLHLEKKHGEDWGKVYDEAWERIDKKVEGLSKHIKLEEERRSEDAQSKAALTDWLRAKASFVIEGLKEADKDEFCRCELKLQKWYGDLRGKPFAIEAENSILDISGFSKQYNCAFIWQKDGVKKLNLYLIINYFKGGKLRFKKIKPEAFEANRFYTVINKKSGEIVPMEVNFNFDDPNLIILPLAFGKRQGREFIWNDLLSLETGSLKLANGRVIEKTLYNRRTRQDEPALFVALTFERREVLDSSNIKPMNLIGVDRGENIPAVIALTDPEGCPLSRFKDSLGNPTHILRIGESYKEKQRTIQAKKEVEQRRAGGYSRKYASKAKNLADDMVRNTARDLLYYAVTQDAMLIFENLSRGFGRQGKRTFMAERQYTRMEDWLTAKLAYEGLPSKTYLSKTLAQYTSKTCSNCGFTITSADYDRVLEKLKKTATGWMTTINGKELKVEGQITYYNRYKRQNVVKDLSVELDRLSEESVNNDISSWTKGRSGEALSLLKKRFSHRPVQEKFVCLNCGFETHADEQAALNIARSWLFLRSQEYKKYQTNKTTGNTDKRAFVETWQSFYRKKLKEVWKPAV

SEQ ID NO: 29881 - protein, 979 aa, synthetic construct
  REGION 1..979: note = engineered CasX variant
QEIKRINKIRRRLVKDSNTKKAGKTGPMKTLLVRVMTPDLRERLENLRKKPENIPQPISNTSRANLNKLLTDYTEMKKAILHVYWEEFQKDPVGLMSRVAQPASKKIDQNKLKPEMDEKGNLTTAGFACSQCGQPLFVYKLEQVSEKGKAYTNYFGRCNVAEHEKLILLAQLKPEKDSDEAVTYSLGKFGQRALDFYSIHVTKESTHPVKPLAQIAGNRYASGPVGKALSDACMGTIASFLSKYQDIIIEHQKVVKGNQKRLESLRELAGKENLEYPSVTLPPQPHTKEGVDAYNEVIARVRMWVNLNLWQKLKLSRDDAKPLLRLKGFPSFPLVERQANEVDWWDMVCNVKKLINEKKEDGKVFWQNLAGYKRQEALRPYLSSEEDVRKKGKKFARYQLGDLLNHLEKKHGEDWGKVYDEAWERIDKKVEGLSKHIKLEEERRSEDAQSKAALTDWLRAKASFVIEGLKEADKDEFCRCELKLQKWYGDLRGKPFAIEAENSILDISGFSKQYNCAFIWQKDGVKKLNLYLIINYFKGGKLRFKKIKPEAFEANRFYTVINKKSGEIVPMEVNFNFDDPNLIILPLAFGKRQGREFIWNDLLSLETGSLKLANGRVIEKTLYNRRTRQDEPALFVALTFERREVLDSSNIKPMNLIGVDRGENIPAVIALTDPEGCPLSRFKDSLGNPTHILRIGESYKEKQRTIQAKKEVEQRRAGGYSRKYASKAKNLADDMVRNTARDLLYYAVTQDAMLIFENLSRGFGRQGKRTFMAERQYTRMEDWLTAKLAYEGLPSKTYLSKTLAQYTSKTCSNCGFTITSADYDRVLEKLKKTATGWMTTINGKELKVEGQITYYNRYKRQNVVKDLSVELDRLSEESVNNDISSWTKGRSGEALSLLKKRFSHRPVQEKFVCLNCGFETHADEQAALNIARSWLFLRSQEYKKYQTNKTTGNTDKRAFVETWQSFYRKKLKEVWKPAV

SEQ ID NO: 29882 - protein, 979 aa, synthetic construct
  REGION 1..979: note = engineered CasX variant
QEIKRINKIRRRLVKDSNTKKAGKTGPMKTLLVRVMTPDLRERLENLRKKPENIPQPISNTSRANLNKLLTDYTEMKKAILHVYWEEFQKDPVGLMSRVAQPASKKIDQNKLKPEMDEKGNLTTAGFACSQCGQPLFVYKLEQVSEKGKAYTNYFGRCNVAEHEKLILLAQLKPEKDSDEAVTYSLGKFGQRALDFYSIHVTKESTHPVKPLAQIAGNRYASGPVGKALSDACMGTIASFLSKYQDIIIEHQKVVKGNQKRLESLRELAGKENLEYPSVTLPPQPHTKEGVDAYNEVIARVRMWVNLNLWQKLKLSRDDAKPLLRLKGFPSFPLVERQANEVDWWDMVCNVKKLINEKKEDGKVFWQNLAGYKRQEALRPYLSSEEDVRKKGKKFARYQLGDLLWHLEKKHGEDWGKVYDEAWERIDKKVEGLSKHIKLEEERRSEDAQSKAALTDWLRAKASFVIEGLKEADKDEFCRCELKLQKWYGDLRGKPFAIEAENSILDISGFSKQYNCAFIWQKDGVKKLNLYLIINYFKGGKLRFKKIKPEAFEANRFYTVINKKSGEIVPMEVNFNFDDPNLIILPLAFGKRQGREFIWNDLLSLETGSLKLANGRVIEKTLYNRRTRQDEPALFVALTFERREVLDSSNIKPMNLIGVDRGENIPAVIALTDPEGCPLSRFKDSLGNPTHILRIGESYKEKQRTIQAKKEVEQRRAGGYSRKYASKAKNLADDMVRNTARDLLYYAVTQDAMLIFENLSRGFGRQGKRTFMAERQYTRMEDWLTAKLAYEGLPSKTYLSKTLAQYTSKTCSNCGFTITSADYDRVLEKLKKTATGWMTTINGKELKVEGQITYYNRYKRQNVVKDLSVELDRLSEESVNNDISSWTKGRSGEALSLLKKRFSHRPVQEKFVCLNCGFETHADEQAALNIARSWLFLRSQEYKKYQTNKTTGNTDKRAFVETWQSFYRKKLKEVWKPAV

SEQ ID NO: 29883 - protein, 979 aa, synthetic construct
  REGION 1..979: note = engineered CasX variant
QEIKRINKIRRRLVKDSNTKKAGKTGPMKTLLVRVMTPDLRERLENLRKKPENIPQPISNTSRANLNKLLTDYTEMKKAILHVYWEEFQKDPVGLMSRVAQPASKKIDQNKLKPEMDEKGNLTTAGFACSQCGQPLFVYKLEQVSEKGKAYTNYFGRCNVAEHEKLILLAQLKPEKDSDEAVTYSLGKFGQRALDFYSIHVTKESTHPVKPLAQIAGNRYASGPVGKALSDACMGTIASFLSKYQDIIIEHQKVVKGNQKRLESLRELAGKENLEYPSVTLPPQPHTKEGVDAYNEVIARVRMWVNLNLWQKLKLSRDDAKPLLRLKGFPSFPLVERQANEVDWWDMVCNVKKLINEKKEDGKVFWQNLAGYKRQEALRPYLSSEEDVRKKGKKFARYQLGDLLLHLYKKHGEDWGKVYDEAWERIDKKVEGLSKHIKLEEERRSEDAQSKAALTDWLRAKASFVIEGLKEADKDEFCRCELKLQKWYGDLRGKPFAIEAENSILDISGFSKQYNCAFIWQKDGVKKLNLYLIINYFKGGKLRFKKIKPEAFEANRFYTVINKKSGEIVPMEVNFNFDDPNLIILPLAFGKRQGREFIWNDLLSLETGSLKLANGRVIEKTLYNRRTRQDEPALFVALTFERREVLDSSNIKPMNLIGVDRGENIPAVIALTDPEGCPLSRFKDSLGNPTHILRIGESYKEKQRTIQAKKEVEQRRAGGYSRKYASKAKNLADDMVRNTARDLLYYAVTQDAMLIFENLSRGFGRQGKRTFMAERQYTRMEDWLTAKLAYEGLPSKTYLSKTLAQYTSKTCSNCGFTITSADYDRVLEKLKKTATGWMTTINGKELKVEGQITYYNRYKRQNVVKDLSVELDRLSEESVNNDISSWTKGRSGEALSLLKKRFSHRPVQEKFVCLNCGFETHADEQAALNIARSWLFLRSQEYKKYQTNKTTGNTDKRAFVETWQSFYRKKLKEVWKPAV

SEQ ID NO: 29884 - protein, 979 aa, synthetic construct
  REGION 1..979: note = engineered CasX variant
QEIKRINKIRRRLVKDSNTKKAGKTGPMKTLLVRVMTPDLRERLENLRKKPENIPQPISNTSRANLNKLLTDYTEMKKAILHVYWEEFQKDPVGLMSRVAQPASKKIDQNKLKPEMDEKGNLTTAGFACSQCGQPLFVYKLEQVSEKGKAYTNYFGRCNVAEHEKLILLAQLKPEKDSDEAVTYSLGKFGQRALDFYSIHVTKESTHPVKPLAQIAGNRYASGPVGKALSDACMGTIASFLSKYQDIIIEHQKVVKGNQKRLESLRELAGKENLEYPSVTLPPQPHTKEGVDAYNEVIARVRMWVNLNLWQKLKLSRDDAKPLLRLKGFPSFPLVERQANEVDWWDMVCNVKKLINEKKEDGKVFWQNLAGYKRQEALRPYLSSEEDVRKKGKKFARYQLGDLLLHLEKKHPEDWGKVYDEAWERIDKKVEGLSKHIKLEEERRSEDAQSKAALTDWLRAKASFVIEGLKEADKDEFCRCELKLQKWYGDLRGKPFAIEAENSILDISGFSKQYNCAFIWQKDGVKKLNLYLIINYFKGGKLRFKKIKPEAFEANRFYTVINKKSGEIVPMEVNFNFDDPNLIILPLAFGKRQGREFIWNDLLSLETGSLKLANGRVIEKTLYNRRTRQDEPALFVALTFERREVLDSSNIKPMNLIGVDRGENIPAVIALTDPEGCPLSRFKDSLGNPTHILRIGESYKEKQRTIQAKKEVEQRRAGGYSRKYASKAKNLADDMVRNTARDLLYYAVTQDAMLIFENLSRGFGRQGKRTFMAERQYTRMEDWLTAKLAYEGLPSKTYLSKTLAQYTSKTCSNCGFTITSADYDRVLEKLKKTATGWMTTINGKELKVEGQITYYNRYKRQNVVKDLSVELDRLSEESVNNDISSWTKGRSGEALSLLKKRFSHRPVQEKFVCLNCGFETHADEQAALNIARSWLFLRSQEYKKYQTNKTTGNTDKRAFVETWQSFYRKKLKEVWKPAV

SEQ ID NO: 29885 - protein, 980 aa, synthetic construct
  REGION 1..980: note = engineered CasX variant
QEIKRINKIRRRLVKDSNTKKAGKTGPMKTLLVRVMTPDLRERLENLRKKPENIPQPISNTSRANLNKLLTDYTEMKKAILHVYWEEFQKDPVGLMSRVAQPASKKIDQNKLKPEMDEKGNLTTAGFACSQCGQPLFVYKLEQVSEKGKAYTNYFGRCNVAEHEKLILLAQLKPEKDSDEAVTYSLGKFGQRALDFYSIHVTKESTHPVKPLAQIAGNRYASGPVGKALSDACMGTIASFLSKYQDIIIEHQKVVKGNQKRLESLRELAGKENLEYPSVTLPPQPHTKEGVDAYNEVIARVRMWVNLNLWQKLKLSRDDAKPLLRLKGFPSFPLVERQANEVDWWDMVCNVKKLINEKKEDGKVFWQNLAGYKRQEALRPYLSSEEDVRKKGKKFARYQLGDLLLHLEKKHGERDWGKVYDEAWERIDKKVEGLSKHIKLEEERRSEDAQSKAALTDWLRAKASFVIEGLKEADKDEFCRCELKLQKWYGDLRGKPFAIEAENSILDISGFSKQYNCAFIWQKDGVKKLNLYLIINYFKGGKLRFKKIKPEAFEANRFYTVINKKSGEIVPMEVNFNFDDPNLIILPLAFGKRQGREFIWNDLLSLETGSLKLANGRVIEKTLYNRRTRQDEPALFVALTFERREVLDSSNIKPMNLIGVDRGENIPAVIALTDPEGCPLSRFKDSLGNPTHILRIGESYKEKQRTIQAKKEVEQRRAGGYSRKYASKAKNLADDMVRNTARDLLYYAVTQDAMLIFENLSRGFGRQGKRTFMAERQYTRMEDWLTAKLAYEGLPSKTYLSKTLAQYTSKTCSNCGFTITSADYDRVLEKLKKTATGWMTTINGKELKVEGQITYYNRYKRQNVVKDLSVELDRLSEESVNNDISSWTKGRSGEALSLLKKRFSHRPVQEKFVCLNCGFETHADEQAALNIARSWLFLRSQEYKKYQTNKTTGNTDKRAFVETWQSFYRKKLKEVWKPAV

SEQ ID NO: 29886 - protein, 980 aa, synthetic construct
  REGION 1..980: note = engineered CasX variant
QEIKRINKIRRRLVKDSNTKKAGKTGPMKTLLVRVMTPDLRERLENLRKKPENIPQPISNTSRANLNKLLTDYTEMKKAILHVYWEEFQKDPVGLMSRVAQPASKKIDQNKLKPEMDEKGNLTTAGFACSQCGQPLFVYKLEQVSEKGKAYTNYFGRCNVAEHEKLILLAQLKPEKDSDEAVTYSLGKFGQRALDFYSIHVTKESTHPVKPLAQIAGNRYASGPVGKALSDACMGTIASFLSKYQDIIIEHQKVVKGNQKRLESLRELAGKENLEYPSVTLPPQPHTKEGVDAYNEVIARVRMWVNLNLWQKLKLSRDDAKPLLRLKGFPSFPLVERQANEVDWWDMVCNVKKLINEKKEDGKVFWQNLAGYKRQEALRPYLSSEEDVRKKGKKFARYQLGDLLLHLEKKHGEYDWGKVYDEAWERIDKKVEGLSKHIKLEEERRSEDAQSKAALTDWLRAKASFVIEGLKEADKDEFCRCELKLQKWYGDLRGKPFAIEAENSILDISGFSKQYNCAFIWQKDGVKKLNLYLIINYFKGGKLRFKKIKPEAFEANRFYTVINKKSGEIVPMEVNFNFDDPNLIILPLAFGKRQGREFIWNDLLSLETGSLKLANGRVIEKTLYNRRTRQDEPALFVALTFERREVLDSSNIKPMNLIGVDRGENIPAVIALTDPEGCPLSRFKDSLGNPTHILRIGESYKEKQRTIQAKKEVEQRRAGGYSRKYASKAKNLADDMVRNTARDLLYYAVTQDAMLIFENLSRGFGRQGKRTFMAERQYTRMEDWLTAKLAYEGLPSKTYLSKTLAQYTSKTCSNCGFTITSADYDRVLEKLKKTATGWMTTINGKELKVEGQITYYNRYKRQNVVKDLSVELDRLSEESVNNDISSWTKGRSGEALSLLKKRFSHRPVQEKFVCLNCGFETHADEQAALNIARSWLFLRSQEYKKYQTNKTTGNTDKRAFVETWQSFYRKKLKEVWKPAV

SEQ ID NO: 29887 - protein, 979 aa, synthetic construct
  REGION 1..979: note = engineered CasX variant
QEIKRINKIRRRLVKDSNTKKAGKTGPMKTLLVRVMTPDLRERLENLRKKPENIPQPISNTSRANLNKLLTDYTEMKKAILHVYWEEFQKDPVGLMSRVAQPASKKIDQNKLKPEMDEKGNLTTAGFACSQCGQPLFVYKLEQVSEKGKAYTNYFGRCNVAEHEKLILLAQLKPEKDSDEAVTYSLGKFGQRALDFYSIHVTKESTHPVKPLAQIAGNRYASGPVGKALSDACMGTIASFLSKYQDIIIEHQKVVKGNQKRLESLRELAGKENLEYPSVTLPPQPHTKEGVDAYNEVIARVRMWVNLNLWQKLKLSRDDAKPLLRLKGFPSFPLVERQANEVDWWDMVCNVKKLINEKKEDGKVFWQNLAGYKRQEALRPYLSSEEDVRKKGKKFARYQLGDLLLHLEKKHGEDWGDVYDEAWERIDKKVEGLSKHIKLEEERRSEDAQSKAALTDWLRAKASFVIEGLKEADKDEFCRCELKLQKWYGDLRGKPFAIEAENSILDISGFSKQYNCAFIWQKDGVKKLNLYLIINYFKGGKLRFKKIKPEAFEANRFYTVINKKSGEIVPMEVNFNFDDPNLIILPLAFGKRQGREFIWNDLLSLETGSLKLANGRVIEKTLYNRRTRQDEPALFVALTFERREVLDSSNIKPMNLIGVDRGENIPAVIALTDPEGCPLSRFKDSLGNPTHILRIGESYKEKQRTIQAKKEVEQRRAGGYSRKYASKAKNLADDMVRNTARDLLYYAVTQDAMLIFENLSRGFGRQGKRTFMAERQYTRMEDWLTAKLAYEGLPSKTYLSKTLAQYTSKTCSNCGFTITSADYDRVLEKLKKTATGWMTTINGKELKVEGQITYYNRYKRQNVVKDLSVELDRLSEESVNNDISSWTKGRSGEALSLLKKRFSHRPVQEKFVCLNCGFETHADEQAALNIARSWLFLRSQEYKKYQTNKTTGNTDKRAFVETWQSFYRKKLKEVWKPAV

SEQ ID NO: 29888 - protein, 979 aa, synthetic construct
  REGION 1..979: note = engineered CasX variant
QEIKRINKIRRRLVKDSNTKKAGKTGPMKTLLVRVMTPDLRERLENLRKKPENIPQPISNTSRANLNKLLTDYTEMKKAILHVYWEEFQKDPVGLMSRVAQPASKKIDQNKLKPEMDEKGNLTTAGFACSQCGQPLFVYKLEQVSEKGKAYTNYFGRCNVAEHEKLILLAQLKPEKDSDEAVTYSLGKFGQRALDFYSIHVTKESTHPVKPLAQIAGNRYASGPVGKALSDACMGTIASFLSKYQDIIIEHQKVVKGNQKRLESLRELAGKENLEYPSVTLPPQPHTKEGVDAYNEVIARVRMWVNLNLWQKLKLSRDDAKPLLRLKGFPSFPLVERQANEVDWWDMVCNVKKLINEKKEDGKVFWQNLAGYKRQEALRPYLSSEEDVRKKGKKFARYQLGDLLLHLEKKHGEDWGKVYGEAWERIDKKVEGLSKHIKLEEERRSEDAQSKAALTDWLRAKASFVIEGLKEADKDEFCRCELKLQKWYGDLRGKPFAIEAENSILDISGFSKQYNCAFIWQKDGVKKLNLYLIINYFKGGKLRFKKIKPEAFEANRFYTVINKKSGEIVPMEVNFNFDDPNLIILPLAFGKRQGREFIWNDLLSLETGSLKLANGRVIEKTLYNRRTRQDEPALFVALTFERREVLDSSNIKPMNLIGVDRGENIPAVIALTDPEGCPLSRFKDSLGNPTHILRIGESYKEKQRTIQAKKEVEQRRAGGYSRKYASKAKNLADDMVRNTARDLLYYAVTQDAMLIFENLSRGFGRQGKRTFMAERQYTRMEDWLTAKLAYEGLPSKTYLSKTLAQYTSKTCSNCGFTITSADYDRVLEKLKKTATGWMTTINGKELKVEGQITYYNRYKRQNVVKDLSVELDRLSEESVNNDISSWTKGRSGEALSLLKKRFSHRPVQEKFVCLNCGFETHADEQAALNIARSWLFLRSQEYKKYQTNKTTGNTDKRAFVETWQSFYRKKLKEVWKPAV

SEQ ID NO: 29889 - protein, 979 aa, synthetic construct
  REGION 1..979: note = engineered CasX variant
QEIKRINKIRRRLVKDSNTKKAGKTGPMKTLLVRVMTPDLRERLENLRKKPENIPQPISNTSRANLNKLLTDYTEMKKAILHVYWEEFQKDPVGLMSRVAQPASKKIDQNKLKPEMDEKGNLTTAGFACSQCGQPLFVYKLEQVSEKGKAYTNYFGRCNVAEHEKLILLAQLKPEKDSDEAVTYSLGKFGQRALDFYSIHVTKESTHPVKPLAQIAGNRYASGPVGKALSDACMGTIASFLSKYQDIIIEHQKVVKGNQKRLESLRELAGKENLEYPSVTLPPQPHTKEGVDAYNEVIARVRMWVNLNLWQKLKLSRDDAKPLLRLKGFPSFPLVERQANEVDWWDMVCNVKKLINEKKEDGKVFWQNLAGYKRQEALRPYLSSEEDVRKKGKKFARYQLGDLLLHLEKKHGEDWGKVYDEAWERIDKKVEGLSKHIKLEEERRSEDAQSKAALTDWLRAKASFVIEGKKEADKDEFCRCELKLQKWYGDLRGKPFAIEAENSILDISGFSKQYNCAFIWQKDGVKKLNLYLIINYFKGGKLRFKKIKPEAFEANRFYTVINKKSGEIVPMEVNFNFDDPNLIILPLAFGKRQGREFIWNDLLSLETGSLKLANGRVIEKTLYNRRTRQDEPALFVALTFERREVLDSSNIKPMNLIGVDRGENIPAVIALTDPEGCPLSRFKDSLGNPTHILRIGESYKEKQRTIQAKKEVEQRRAGGYSRKYASKAKNLADDMVRNTARDLLYYAVTQDAMLIFENLSRGFGRQGKRTFMAERQYTRMEDWLTAKLAYEGLPSKTYLSKTLAQYTSKTCSNCGFTITSADYDRVLEKLKKTATGWMTTINGKELKVEGQITYYNRYKRQNVVKDLSVELDRLSEESVNNDISSWTKGRSGEALSLLKKRFSHRPVQEKFVCLNCGFETHADEQAALNIARSWLFLRSQEYKKYQTNKTTGNTDKRAFVETWQSFYRKKLKEVWKPAV

SEQ ID NO: 29890 - protein, 979 aa, synthetic construct
  REGION 1..979: note = engineered CasX variant
QEIKRINKIRRRLVKDSNTKKAGKTGPMKTLLVRVMTPDLRERLENLRKKPENIPQPISNTSRANLNKLLTDYTEMKKAILHVYWEEFQKDPVGLMSRVAQPASKKIDQNKLKPEMDEKGNLTTAGFACSQCGQPLFVYKLEQVSEKGKAYTNYFGRCNVAEHEKLILLAQLKPEKDSDEAVTYSLGKFGQRALDFYSIHVTKESTHPVKPLAQIAGNRYASGPVGKALSDACMGTIASFLSKYQDIIIEHQKVVKGNQKRLESLRELAGKENLEYPSVTLPPQPHTKEGVDAYNEVIARVRMWVNLNLWQKLKLSRDDAKPLLRLKGFPSFPLVERQANEVDWWDMVCNVKKLINEKKEDGKVFWQNLAGYKRQEALRPYLSSEEDVRKKGKKFARYQLGDLLLHLEKKHGEDWGKVYDEAWERIDKKVEGLSKHIKLEEERRSEDAQSKAALTDWLRAKASFVIEGSKEADKDEFCRCELKLQKWYGDLRGKPFAIEAENSILDISGFSKQYNCAFIWQKDGVKKLNLYLIINYFKGGKLRFKKIKPEAFEANRFYTVINKKSGEIVPMEVNFNFDDPNLIILPLAFGKRQGREFIWNDLLSLETGSLKLANGRVIEKTLYNRRTRQDEPALFVALTFERREVLDSSNIKPMNLIGVDRGENIPAVIALTDPEGCPLSRFKDSLGNPTHILRIGESYKEKQRTIQAKKEVEQRRAGGYSRKYASKAKNLADDMVRNTARDLLYYAVTQDAMLIFENLSRGFGRQGKRTFMAERQYTRMEDWLTAKLAYEGLPSKTYLSKTLAQYTSKTCSNCGFTITSADYDRVLEKLKKTATGWMTTINGKELKVEGQITYYNRYKRQNVVKDLSVELDRLSEESVNNDISSWTKGRSGEALSLLKKRFSHRPVQEKFVCLNCGFETHADEQAALNIARSWLFLRSQEYKKYQTNKTTGNTDKRAFVETWQSFYRKKLKEVWKPAV

SEQ ID NO: 29891 - protein, 980 aa, synthetic construct
  REGION 1..980: note = engineered CasX variant
QEIKRINKIRRRLVKDSNTKKAGKTGPMKTLLVRVMTPDLRERLENLRKKPENIPQPISNTSRANLNKLLTDYTEMKKAILHVYWEEFQKDPVGLMSRVAQPASKKIDQNKLKPEMDEKGNLTTAGFACSQCGQPLFVYKLEQVSEKGKAYTNYFGRCNVAEHEKLILLAQLKPEKDSDEAVTYSLGKFGQRALDFYSIHVTKESTHPVKPLAQIAGNRYASGPVGKALSDACMGTIASFLSKYQDIIIEHQKVVKGNQKRLESLRELAGKENLEYPSVTLPPQPHTKEGVDAYNEVIARVRMWVNLNLWQKLKLSRDDAKPLLRLKGFPSFPLVERQANEVDWWDMVCNVKKLINEKKEDGKVFWQNLAGYKRQEALRPYLSSEEDVRKKGKKFARYQLGDLLLHLEKKHGEDWGKVYDEAWERIDKKVEGLSKHIKLEEERRSEDAQSKAALTDWLRAKASFVIEGLKEADDKDEFCRCELKLQKWYGDLRGKPFAIEAENSILDISGFSKQYNCAFIWQKDGVKKLNLYLIINYFKGGKLRFKKIKPEAFEANRFYTVINKKSGEIVPMEVNFNFDDPNLIILPLAFGKRQGREFIWNDLLSLETGSLKLANGRVIEKTLYNRRTRQDEPALFVALTFERREVLDSSNIKPMNLIGVDRGENIPAVIALTDPEGCPLSRFKDSLGNPTHILRIGESYKEKQRTIQAKKEVEQRRAGGYSRKYASKAKNLADDMVRNTARDLLYYAVTQDAMLIFENLSRGFGRQGKRTFMAERQYTRMEDWLTAKLAYEGLPSKTYLSKTLAQYTSKTCSNCGFTITSADYDRVLEKLKKTATGWMTTINGKELKVEGQITYYNRYKRQNVVKDLSVELDRLSEESVNNDISSWTKGRSGEALSLLKKRFSHRPVQEKFVCLNCGFETHADEQAALNIARSWLFLRSQEYKKYQTNKTTGNTDKRAFVETWQSFYRKKLKEVWKPAV

SEQ ID NO: 29892 - protein, 980 aa, synthetic construct
  REGION 1..980: note = engineered CasX variant
QEIKRINKIRRRLVKDSNTKKAGKTGPMKTLLVRVMTPDLRERLENLRKKPENIPQPISNTSRANLNKLLTDYTEMKKAILHVYWEEFQKDPVGLMSRVAQPASKKIDQNKLKPEMDEKGNLTTAGFACSQCGQPLFVYKLEQVSEKGKAYTNYFGRCNVAEHEKLILLAQLKPEKDSDEAVTYSLGKFGQRALDFYSIHVTKESTHPVKPLAQIAGNRYASGPVGKALSDACMGTIASFLSKYQDIIIEHQKVVKGNQKRLESLRELAGKENLEYPSVTLPPQPHTKEGVDAYNEVIARVRMWVNLNLWQKLKLSRDDAKPLLRLKGFPSFPLVERQANEVDWWDMVCNVKKLINEKKEDGKVFWQNLAGYKRQEALRPYLSSEEDVRKKGKKFARYQLGDLLLHLEKKHGEDWGKVYDEAWERIDKKVEGLSKHIKLEEERRSEDAQSKAALTDWLRAKASFVIEGLKEADKDEFCRCELKLQKWYGDLRGKPFAIEAENSILDISGFSKQYNCAFIWQKDGVKKLNLYLIINYFKGGKLRFKKIKPEAFEANRFYTVINKKSGEIVPMEVNFNFDDPNLIILPLAFGKRQGREFIWNDLLSLETGSLKLANGRVIEKTLYNRRTRQDEPALFVALTFERREVLDSSNIKPMNLIGVDRGENIPAVIALTDPEGCPLSRFKDSLGNPTHILRIGESYKEKQRTIQAKKEVEQRRAGGYSRKYASKAKNLADDMVRNTARDLLYYAVTQDAMLIFENLSRGFGRQGKRTFMAERQYTRMEDWLTAKLAYEGLPSKTYLSKTLAQYTSKTCSNCGFTITSADYDRVLEKLKKTATGWMTTINGKELKVEGQITYYNRYKRQNVVKDLSVELDRLSEESVNNDISSWTKGRSGNEALSLLKKRFSHRPVQEKFVCLNCGFETHADEQAALNIARSWLFLRSQEYKKYQTNKTTGNTDKRAFVETWQSFYRKKLKEVWKPAV

SEQ ID NO: 29893 - protein, 979 aa, synthetic construct
  REGION 1..979: note = engineered CasX variant
QEIKRINKIRRRLVKDSNTKKAGKTGPMKTLLVRVMTPDLRERLENLRKKPENIPQPISNTSRANLNKLLTDYTEMKKAILHVYWEEFQKDPVGLMSRVAQPASKKIDQNKLKPEMDEKGNLTTAGFACSQCGQPLFVYKLEQVSEKGKAYTNYFGRCNVAEHEKLILLAQLKPEKDSDEAVTYSLGKFGQRALDFYSIHVTKESTHPVKPLAQIAGNRYASGPVGKALSDACMGTIASFLSKYQDIIIEHQKVVKGNQKRLESLRELAGKENLEYPSVTLPPQPHTKEGVDAYNEVIARVRMWVNLNLWQKLKLSRDDAKPLLRLKGFPSFPLVERQANEVDWWDMVCNVKKLINEKKEDGKVFWQNLAGYKRQEALRPYLSSEEDVRQKGKKFARYQLGDLLLHLEKKHGEDWGKVYDEAWERIDKKVEGLSKHIKLEEERRSEDAQSKAALTDWLRAKASFVIEGLKEADKDEFCRCELKLQKWYGDLRGKPFAIEAENSILDISGFSKQYNCAFIWQKDGVKKLNLYLIINYFKGGKLRFKKIKPEAFEANRFYTVINKKSGEIVPMEVNFNFDDPNLIILPLAFGKRQGREFIWNDLLSLETGSLKLANGRVIEKTLYNRRTRQDEPALFVALTFERREVLDSSNIKPMNLIGVDRGENIPAVIALTDPEGCPLSRFKDSLGNPTHILRIGESYKEKQRTIQAKKEVEQRRAGGYSRKYASKAKNLADDMVRNTARDLLYYAVTQDAMLIFENLSRGFGRQGKRTFMAERQYTRMEDWLTAKLAYEGLPSKTYLSKTLAQYTSKTCSNCGFTITSADYDRVLEKLKKTATGWMTTINGKELKVEGQITYYNRYKRQNVVKDLSVELDRLSEESVNNDISSWTKGRSGEALSLLKKRFSHRPVQEKFVCLNCGFETHADEQAALNIARSWLFLRSQEYKKYQTNKTTGNTDKRAFVETWQSFYRKKLKEVWKPAV

SEQ ID NO: 29894 - protein, 979 aa, synthetic construct
  REGION 1..979: note = engineered CasX variant
QEIKRINKIRRRLVKDSNTKKAGKTGPMKTLLVRVMTPDLRERLENLRKKPENIPQPISNTSRANLNKLLTDYTEMKKAILHVYWEEFQKDPVGLMSRVAQPASKKIDQNKLKPEMDEKGNLTTAGFACSQCGQPLFVYKLEQVSEKGKAYTNYFGRCNVAEHEKLILLAQLKPEKDSDEAVTYSLGKFGQRALDFYSIHVTKESTHPVKPLAQIAGNRYASGPVGKALSDACMGTIASFLSKYQDIIIEHQKVVKGNQKRLESLRELAGKENLEYPSVTLPPQPHTKEGVDAYNEVIARVRMWVNLNLWQKLKLSRDDAKPLLRLKGFPSFPLVERQANEVDWWDMVCNVKKLINEKKEDGKVFWQNLAGYKRQEALRPYLSSEEDVRKKGKKFARYQLGDLLLHLEKKHGEDWGKVYDEAWERIDKKVEGLSKHIKLEEERRSEDAQSKAALTDWLRAKASFVIEGLKEADKDEFCRCELKLQKWYGDLRGKPFAIEAENSILDISGFSKQYNCAFIWQKDGVKKLNLYLIINYFKGGKLRFKKIKPEAFEANRFYTVINKKSGEIVPMEVNFNFDDPNLIILPLAFGKRQGREFIWNDLLSLETGSLKLANGRVIEKTLYNRRTRQDEPALFVALTFERREVLDSSNIKPMNLIGVDRGENIPAVIALTDPEGCPLSRFKDSLGNPTHILRIGESYKEKQRTIQAKKEVEQRRAGGYSRKYASKAKNLADDMVRNTARDLLYYAVTQDAMLIFENLSRGFGRQGKRTFMAERQYTRMEDWLTAKLAYEGLPSQTYLSKTLAQYTSKTCSNCGFTITSADYDRVLEKLKKTATGWMTTINGKELKVEGQITYYNRYKRQNVVKDLSVELDRLSEESVNNDISSWTKGRSGEALSLLKKRFSHRPVQEKFVCLNCGFETHADEQAALNIARSWLFLRSQEYKKYQTNKTTGNTDKRAFVETWQSFYRKKLKEVWKPAV

SEQ ID NO: 29895 - protein, 979 aa, synthetic construct
  REGION 1..979: note = engineered CasX variant
QEIKRINKIRRRLVKDSNTKKAGKTGPMKTLLVRVMTPDLRERLENLRKKPENIPQPISNTSRANLNKLLTDYTEMKKAILHVYWEEFQKDPVGLMSRVAQPASKKIDQNKLKPEMDEKGNLTTAGFACSQCGQPLFVYKLEQVSEKGKAYTNYFGRCNVAEHEKLILLAQLKPEKDSDEAVTYSLGKFGQRALDFYSIHVTKESTHPVKPLAQIAGNRYASGPVGKALSDACMGTIASFLSKYQDIIIEHQKVVKGNQKRLESLRELAGKENLEYPSVTLPPQPHTKEGVDAYNEVIARVRMWVNLNLWQKLKLSRDDAKPLLRLKGFPSFPLVERQANEVDWWDMVCNVKKLINEKKEDGKVFWQNLAGYKRQEALRPYLSSEEDVRKKGKKFARYQLGDLLLHLEKKHGEDWGKVYDEAWERIDKKVEGLSKHIKLEEERRSEDAQSKAALTDWLRAKASFVIEGLKEADKDEFCRCELKLQKWYGDLRGKPFAIEAENSILDISGFSKQYNCAFIWQKDGVKKLNLYLIINYFKGGKLRFKKIKPEAFEANRFYTVINKKSGEIVPMEVNFNFDDPNLIILPLAFGKRQGREFIWNDLLSLETGSLKLANGRVIEKTLYNRRTRQDEPALFVALTFERREVLDSSNIKPMNLIGVDRGENIPAVIALTDPEGCPLSRFKDSLGNPTHILRIGESYKEKQRTIQAKKEVEQRRAGGYSRKYASKAKNLADDMVRNTARDLLYYAVTQDAMLIFENLSRGFGRQGKRTFMAERQYTRMEDWLTAKLAYNGLPSKTYLSKTLAQYTSKTCSNCGFTITSADYDRVLEKLKKTATGWMTTINGKELKVEGQITYYNRYKRQNVVKDLSVELDRLSEESVNNDISSWTKGRSGEALSLLKKRFSHRPVQEKFVCLNCGFETHADEQAALNIARSWLFLRSQEYKKYQTNKTTGNTDKRAFVETWQSFYRKKLKEVWKPAV

SEQ ID NO: 29896 - protein, 979 aa, synthetic construct
  REGION 1..979: note = engineered CasX variant
QEIKRINKIRRRLVKDSNTKKAGKTGPMKTLLVRVMTPDLRERLENLRKKPENIPQPISNTSRANLNKLLTDYTEMKKAILHVYWEEFQKDPVGLMSRVAQPASKKIDQNKLKPEMDEKGNLTTAGFACSQCGQPLFVYKLEQVSEKGKAYTNYFGRCNVAEHEKLIQLAQLKPEKDSDEAVTYSLGKFGQRALDFYSIHVTKESTHPVKPLAQIAGNRYASGPVGKALSDACMGTIASFLSKYQDIIIEHQKVVKGNQKRLESLRELAGKENLEYPSVTLPPQPHTKEGVDAYNEVIARVRMWVNLNLWQKLKLSRDDAKPLLRLKGFPSFPLVERQANEVDWWDMVCNVKKLINEKKEDGKVFWQNLAGYKRQEALRPYLSSEEDVRKKGKKFARYQLGDLLLHLEKKHGEDWGKVYDEAWERIDKKVEGLSKHIKLEEERRSEDAQSKAALTDWLRAKASFVIEGLKEADKDEFCRCELKLQKWYGDLRGKPFAIEAENSILDISGFSKQYNCAFIWQKDGVKKLNLYLIINYFKGGKLRFKKIKPEAFEANRFYTVINKKSGEIVPMEVNFNFDDPNLIILPLAFGKRQGREFIWNDLLSLETGSLKLANGRVIEKTLYNRRTRQDEPALFVALTFERREVLDSSNIKPMNLIGVDRGENIPAVIALTDPEGCPLSRFKDSLGNPTHILRIGESYKEKQRTIQAKKEVEQRRAGGYSRKYASKAKNLADDMVRNTARDLLYYAVTQDAMLIFENLSRGFGRQGKRTFMAERQYTRMEDWLTAKLAYEGLPSKTYLSKTLAQYTSKTCSNCGFTITSADYDRVLEKLKKTATGWMTTINGKELKVEGQITYYNRYKRQNVVKDLSVELDRLSEESVNNDISSWTKGRSGEALSLLKKRFSHRPVQEKFVCLNCGFETHADEQAALNIARSWLFLRSQEYKKYQTNKTTGNTDKRAFVETWQSFYRKKLKEVWKPAV

SEQ ID NO: 29897 - protein, 979 aa, synthetic construct
  REGION 1..979: note = engineered CasX variant
QEIKRINKIRRRLVKDSNTKKAGKTGPMKTLLVRVMTPDLRERLENLRKKPENIPQPISNTSRANLNKLLTDYTEMKKAILHVYWEEFQKDPVGLMSRVAQPASKKIDQNKLKPEMDEKGNLTTAGFACSQCGQPLFVYKLEQVSEKGKAYTNYFGRCNVAEHEKLILLAQLKPEKDSDEAVTYSLGKFGQRALDFYSIHVTKESTHPVKPLAQIAGNRYASGPVGKALSDACMGTIASFLSKYQDIIIEHQKVVKGNQKRLESLRELAGKENLEYPSVTLPPQPHTKEGVDAYNEVIARVRMWVNLNLWQKLKLSRDDAKPLLRLKGFPSFPLVERQANEVDWWDMVCNVKKLINEKKEDGKVFWQNLAIYKRQEALRPYLSSEEDVRKKGKKFARYQLGDLLLHLEKKHGEDWGKVYDEAWERIDKKVEGLSKHIKLEEERRSEDAQSKAALTDWLRAKASFVIEGLKEADKDEFCRCELKLQKWYGDLRGKPFAIEAENSILDISGFSKQYNCAFIWQKDGVKKLNLYLIINYFKGGKLRFKKIKPEAFEANRFYTVINKKSGEIVPMEVNFNFDDPNLIILPLAFGKRQGREFIWNDLLSLETGSLKLANGRVIEKTLYNRRTRQDEPALFVALTFERREVLDSSNIKPMNLIGVDRGENIPAVIALTDPEGCPLSRFKDSLGNPTHILRIGESYKEKQRTIQAKKEVEQRRAGGYSRKYASKAKNLADDMVRNTARDLLYYAVTQDAMLIFENLSRGFGRQGKRTFMAERQYTRMEDWLTAKLAYEGLPSKTYLSKTLAQYTSKTCSNCGFTITSADYDRVLEKLKKTATGWMTTINGKELKVEGQITYYNRYKRQNVVKDLSVELDRLSEESVNNDISSWTKGRSGEALSLLKKRFSHRPVQEKFVCLNCGFETHADEQAALNIARSWLFLRSQEYKKYQTNKTTGNTDKRAFVETWQSFYRKKLKEVWKPAV

SEQ ID NO: 29898 - protein, 979 aa, synthetic construct
  REGION 1..979: note = engineered CasX variant
QEIKRINKIRRRLVKDSNTKKAGKTGPMKTLLVRVMTPDLRERLENLRKKPENIPQPISNTSRANLNKLLTDYTEMKKAILHVYWEEFQKDPVGLMSRVAQPASKKIDQNKLKPEMDEKGNLTTAGFACSQCGQPLFVYKLEQVSEKGKAYTNYFGRCNVAEHEKLILLAQLKPEKDSDEAVTYSLGKFGQRALDFYSIHVTKESTHPVKPLAQIAGNRYASGPVGKALSDACMGTIASFLSKYQDIIIEHQKVVKGNQKRLESLRELAGKENLEYPSVTLPPQPHTKEGVDAYNEVIARVRMWVNLNLWQKLKLSRDDAKPLLRLKGFPSFPLVERQANEVDWWDMVCNVKKLINEKKEDGKVFWQNLAGYKRQEALRPYLSSEEDVREKGKKFARYQLGDLLLHLEKKHGEDWGKVYDEAWERIDKKVEGLSKHIKLEEERRSEDAQSKAALTDWLRAKASFVIEGLKEADKDEFCRCELKLQKWYGDLRGKPFAIEAENSILDISGFSKQYNCAFIWQKDGVKKLNLYLIINYFKGGKLRFKKIKPEAFEANRFYTVINKKSGEIVPMEVNFNFDDPNLIILPLAFGKRQGREFIWNDLLSLETGSLKLANGRVIEKTLYNRRTRQDEPALFVALTFERREVLDSSNIKPMNLIGVDRGENIPAVIALTDPEGCPLSRFKDSLGNPTHILRIGESYKEKQRTIQAKKEVEQRRAGGYSRKYASKAKNLADDMVRNTARDLLYYAVTQDAMLIFENLSRGFGRQGKRTFMAERQYTRMEDWLTAKLAYEGLPSKTYLSKTLAQYTSKTCSNCGFTITSADYDRVLEKLKKTATGWMTTINGKELKVEGQITYYNRYKRQNVVKDLSVELDRLSEESVNNDISSWTKGRSGEALSLLKKRFSHRPVQEKFVCLNCGFETHADEQAALNIARSWLFLRSQEYKKYQTNKTTGNTDKRAFVETWQSFYRKKLKEVWKPAV

SEQ ID NO: 29899 - protein, 979 aa, synthetic construct
  REGION 1..979: note = engineered CasX variant
QEIKRINKIRRRLVKDSNTKKAGKTGPMKTLLVRVMTPDLRERLENLRKKPENIPQPISNTSRANLNKLLTDYTEMKKAILHVYWEEFQKDPVGLMSRVAQPASKKIDQNKLKPEMDEKGNLTTAGFACSQCGQPLFVYKLEQVSEKGKAYTNYFGRCNVAEHEKLILLAQLKPEKDSDEAVTYSLGKFGQRALDFYSIHVTKESTHPVKPLAQIAGNRYASGPVGKALSDACMGTIASFLSKYQDIIIEHQKVVKGNQKRLESLRELAGKENLEYPSVTLPPQPHTKEGVDAYNEVIARVRMWVNLNLWQKLKLSRDDAKPLLRLKGFPSFPLVERQANEVDWWDMVCNVKKLINEKKEDGKVFWQNLAGYKRQEALRPYLSSEEDVRKKGKKFARYQLGDLLLHLEKKHGEDWGKVYDEAWERIDKKVEGLSKHIKLEEERRSEDAQSKAALTDWLRAKASFVIEGLKEADKDEFCRCELKLQKWYGDLRGKPFAIEAENSILDISGFSKQYNCAFIWQKDGVKKLNLYLIINYFKGGKLRFKKIKPEAFEANRFYTVINKKSGEIVIMEVNFNFDDPNLIILPLAFGKRQGREFIWNDLLSLETGSLKLANGRVIEKTLYNRRTRQDEPALFVALTFERREVLDSSNIKPMNLIGVDRGENIPAVIALTDPEGCPLSRFKDSLGNPTHILRIGESYKEKQRTIQAKKEVEQRRAGGYSRKYASKAKNLADDMVRNTARDLLYYAVTQDAMLIFENLSRGFGRQGKRTFMAERQYTRMEDWLTAKLAYEGLPSKTYLSKTLAQYTSKTCSNCGFTITSADYDRVLEKLKKTATGWMTTINGKELKVEGQITYYNRYKRQNVVKDLSVELDRLSEESVNNDISSWTKGRSGEALSLLKKRFSHRPVQEKFVCLNCGFETHADEQAALNIARSWLFLRSQEYKKYQTNKTTGNTDKRAFVETWQSFYRKKLKEVWKPAV

SEQ ID NO: 29900 - protein, 978 aa, synthetic construct
  REGION 1..978: note = engineered CasX variant
QEIKRINKIRRRLVKDSNTKKAGKTGPMKTLLVRVMTPDLRERLENLRKKPENIPQPISNTSRANLNKLLTDYTEMKKAILHVYWEEFQKDPVGLMSRVAQPASKKIDQNKLKPEMDEKGNLTTAGFACSQCGQPLFVYKLEQVSEKGKAYTNYFGRCNVAEHEKLILLAQLKPEKDSDEAVTYSLGKFGQRALDFYSIHVTKESTHPVKPLAQIAGNRYASGPVGKALSGACMGTIASFLSKYQDIIIEHQKVVKGNQKRLESLRELAGKENLEYPSVTLPPQPHTKEGVDAYNEVIARVRMWVNLNLWQKLKLSRDDAKPLLRLKGFPSFPLVERQANEVDWWDMVCNVKKLINEKKEDGKVFWQNLAGYKRQEALRPYLSSEEDRKKGKKFARYQLGDLLLHLEKKHGEDWGKVYDEAWERIDKKVEGLSKHIKLEEERRSEDAQSKAALTDWLRAKASFVIEGLKEADKDEFCRCELKLQKWYGDLRGKPFAIEAENSILDISGFSKQYNCAFIWQKDGVKKLNLYLIINYFKGGKLRFKKIKPEAFEANRFYTVINKKSGEIVPMEVNFNFDDPNLIILPLAFGKRQGREFIWNDLLSLETGSLKLANGRVIEKTLYNRRTRQDEPALFVALTFERREVLDSSNIKPMNLIGVDRGENIPAVIALTDPEGCPLSRFKDSLGNPTHILRIGESYKEKQRTIQAKKEVEQRRAGGYSRKYASKAKNLADDMVRNTARDLLYYAVTQDAMLIFENLSRGFGRQGKRTFMAERQYTRMEDWLTAKLAYEGLPSKTYLSKTLAQYTSKTCSNCGFTITSADYDRMLEKLKKTATGWMTTINGKELKVEGQITYYNRYKRQNVVKDLSVELDRLSEESVNNDISSWTKGRSGEALSLLKKRFSHRPVQEKFVCLNCGFETHADEQAALNIARSWLFLRSQEYKKYQTNKTTGNTDKRAFVETWQSFYRKKLKEVWKPAV

SEQ ID NO: 29901 - protein, 978 aa, synthetic construct
  REGION 1..978: note = engineered CasX variant
QEIKRINKIRRRLVKDSNTKKAGKTGPMKTLLVRVMTPDLRERLENLRKKPENIPQPISNTSRANLNKLLTDYTEMKKAILHVYWEEFQKDPVGLMSRVAQPASKKIDQNKLKPEMDEKGNLTTAGFACSQCGQPLFVYKLEQVSEKGKAYTNYFGRCNVAEHEKLILLAQLKPEKDSDEAVTYSLGKFGQRALDFYSIHVTKESTHPVKPLAQIAGNRYASGPVGKALSDACMGTIASFLSKYQDIIIEHQKVVKGNQKRLESLRELAGKENLEYPSVTLPPQPHTKEGVDAYNEVIARVRMWVNLNLWQKLKLSRDDAKPLLRLKNFPSFPLVERQANEVDWWDMVCNVKKLINEKKEDGKVFWQNLAGYKRQEALRPYLSSEEDRKKGKKFARYQLGDLLLHLEKKHGEDWGKVYDEAWERIDKKVEGLSKHIKLEEERRSEDAQSKAALTDWLRAKASFVIEGLKEADKDEFCRCELKLQKWYGDLRGKPFAIEAENSILDISGFSKQYNCAFIWQKDGVKKLNLYLIINYFKGGKLRFKKIKPEAFEANRFYTVINKKSGEIVPMEVNFNFDDPNLIILPLAFGKRQGREFIWNDLLSLETGSLKLANGRVIEKTLYNRRTRQDEPALFVALTFERREVLDSSNIKPMNLIGVDRGENIPAVIALTDPEGCPLSRFKDSLGNPTHILRIGESYKEKQRTIQAKKEVEQRRAGGYSRKYASKAKNLADDMVRNTARDLLYYAVTQDAMLIFENLSRGFGRQGKRTFMAERQYTRMEDWLTAKLAYEGLPSKTYLSKTLAQYTSKTCSNCGFTITSADYDRMLEKLKKTATGWMTTINGKELKVEGQITYYNRYKRQNVVKDLSVELDRLSEESVNNDISSWTKGRSGEALSLLKKRFSHRPVQEKFVCLNCGFETHADEQAALNIARSWLFLRSQEYKKYQTNKTTGNTDKRAFVETWQSFYRKKLKEVWKPAV

SEQ ID NO: 29902 - protein, 978 aa, synthetic construct
  REGION 1..978: note = engineered CasX variant
QEIKRINKIRRRLVKDSNTKKAGKTGPMKTLLVRVMTPDLRERLENLRKKPENIPQPISNTSRANLNKLLTDYTEMKKAILHVYWEEFQKDPVGLMSRVAQPASKKIDQNKLKPEMDEKGNLTTAGFACSQCGQPLFVYKLEQVSEKGKAYTNYFGRCNVAEHEKLILLAQLKPEKDSDEAVTYSLGKFGQRALDFYSIHVTKESTHPVKPLAQIAGNRYASGPVGKALSDACMGTIASFLSKYQDIIIEHQKVVKGNQKRLESLRELAGKENLEYPSVTLPPQPHTKEGVDAYNEVIARVRMWVNLNLWQKLKLSRDDAKPLLRLKGFPSFPLVERQANEVDWWDMVCNVKKLINEKKEDGKVFWQNLAGYKRQEALRPYLSSEEDRKKGKKFARYQLGDLLNHLEKKHGEDWGKVYDEAWERIDKKVEGLSKHIKLEEERRSEDAQSKAALTDWLRAKASFVIEGLKEADKDEFCRCELKLQKWYGDLRGKPFAIEAENSILDISGFSKQYNCAFIWQKDGVKKLNLYLIINYFKGGKLRFKKIKPEAFEANRFYTVINKKSGEIVPMEVNFNFDDPNLIILPLAFGKRQGREFIWNDLLSLETGSLKLANGRVIEKTLYNRRTRQDEPALFVALTFERREVLDSSNIKPMNLIGVDRGENIPAVIALTDPEGCPLSRFKDSLGNPTHILRIGESYKEKQRTIQAKKEVEQRRAGGYSRKYASKAKNLADDMVRNTARDLLYYAVTQDAMLIFENLSRGFGRQGKRTFMAERQYTRMEDWLTAKLAYEGLPSKTYLSKTLAQYTSKTCSNCGFTITSADYDRMLEKLKKTATGWMTTINGKELKVEGQITYYNRYKRQNVVKDLSVELDRLSEESVNNDISSWTKGRSGEALSLLKKRFSHRPVQEKFVCLNCGFETHADEQAALNIARSWLFLRSQEYKKYQTNKTTGNTDKRAFVETWQSFYRKKLKEVWKPAV

SEQ ID NO: 29903 - protein, 978 aa, synthetic construct
  REGION 1..978: note = engineered CasX variant
QEIKRINKIRRRLVKDSNTKKAGKTGPMKTLLVRVMTPDLRERLENLRKKPENIPQPISNTSRANLNKLLTDYTEMKKAILHVYWEEFQKDPVGLMSRVAQPASKKIDQNKLKPEMDEKGNLTTAGFACSQCGQPLFVYKLEQVSEKGKAYTNYFGRCNVAEHEKLILLAQLKPEKDSDEAVTYSLGKFGQRALDFYSIHVTKESTHPVKPLAQIAGNRYASGPVGKALSDACMGTIASFLSKYQDIIIEHQKVVKGNQKRLESLRELAGKENLEYPSVTLPPQPHTKEGVDAYNEVIARVRMWVNLNLWQKLKLSRDDAKPLLRLKGFPSFPLVERQANEVDWWDMVCNVKKLINEKKEDGKVFWQNLAGYKRQEALRPYLSSEEDRKKGKKFARYQLGDLLWHLEKKHGEDWGKVYDEAWERIDKKVEGLSKHIKLEEERRSEDAQSKAALTDWLRAKASFVIEGLKEADKDEFCRCELKLQKWYGDLRGKPFAIEAENSILDISGFSKQYNCAFIWQKDGVKKLNLYLIINYFKGGKLRFKKIKPEAFEANRFYTVINKKSGEIVPMEVNFNFDDPNLIILPLAFGKRQGREFIWNDLLSLETGSLKLANGRVIEKTLYNRRTRQDEPALFVALTFERREVLDSSNIKPMNLIGVDRGENIPAVIALTDPEGCPLSRFKDSLGNPTHILRIGESYKEKQRTIQAKKEVEQRRAGGYSRKYASKAKNLADDMVRNTARDLLYYAVTQDAMLIFENLSRGFGRQGKRTFMAERQYTRMEDWLTAKLAYEGLPSKTYLSKTLAQYTSKTCSNCGFTITSADYDRMLEKLKKTATGWMTTINGKELKVEGQITYYNRYKRQNVVKDLSVELDRLSEESVNNDISSWTKGRSGEALSLLKKRFSHRPVQEKFVCLNCGFETHADEQAALNIARSWLFLRSQEYKKYQTNKTTGNTDKRAFVETWQSFYRKKLKEVWKPAV

SEQ ID NO: 29904 - protein, 978 aa, synthetic construct
  REGION 1..978: note = engineered CasX variant
QEIKRINKIRRRLVKDSNTKKAGKTGPMKTLLVRVMTPDLRERLENLRKKPENIPQPISNTSRANLNKLLTDYTEMKKAILHVYWEEFQKDPVGLMSRVAQPASKKIDQNKLKPEMDEKGNLTTAGFACSQCGQPLFVYKLEQVSEKGKAYTNYFGRCNVAEHEKLILLAQLKPEKDSDEAVTYSLGKFGQRALDFYSIHVTKESTHPVKPLAQIAGNRYASGPVGKALSDACMGTIASFLSKYQDIIIEHQKVVKGNQKRLESLRELAGKENLEYPSVTLPPQPHTKEGVDAYNEVIARVRMWVNLNLWQKLKLSRDDAKPLLRLKGFPSFPLVERQANEVDWWDMVCNVKKLINEKKEDGKVFWQNLAGYKRQEALRPYLSSEEDRKKGKKFARYQLGDLLLHLYKKHGEDWGKVYDEAWERIDKKVEGLSKHIKLEEERRSEDAQSKAALTDWLRAKASFVIEGLKEADKDEFCRCELKLQKWYGDLRGKPFAIEAENSILDISGFSKQYNCAFIWQKDGVKKLNLYLIINYFKGGKLRFKKIKPEAFEANRFYTVINKKSGEIVPMEVNFNFDDPNLIILPLAFGKRQGREFIWNDLLSLETGSLKLANGRVIEKTLYNRRTRQDEPALFVALTFERREVLDSSNIKPMNLIGVDRGENIPAVIALTDPEGCPLSRFKDSLGNPTHILRIGESYKEKQRTIQAKKEVEQRRAGGYSRKYASKAKNLADDMVRNTARDLLYYAVTQDAMLIFENLSRGFGRQGKRTFMAERQYTRMEDWLTAKLAYEGLPSKTYLSKTLAQYTSKTCSNCGFTITSADYDRMLEKLKKTATGWMTTINGKELKVEGQITYYNRYKRQNVVKDLSVELDRLSEESVNNDISSWTKGRSGEALSLLKKRFSHRPVQEKFVCLNCGFETHADEQAALNIARSWLFLRSQEYKKYQTNKTTGNTDKRAFVETWQSFYRKKLKEVWKPAV

SEQ ID NO: 29905 - protein, 978 aa, synthetic construct
  REGION 1..978: note = engineered CasX variant
QEIKRINKIRRRLVKDSNTKKAGKTGPMKTLLVRVMTPDLRERLENLRKKPENIPQPISNTSRANLNKLLTDYTEMKKAILHVYWEEFQKDPVGLMSRVAQPASKKIDQNKLKPEMDEKGNLTTAGFACSQCGQPLFVYKLEQVSEKGKAYTNYFGRCNVAEHEKLILLAQLKPEKDSDEAVTYSLGKFGQRALDFYSIHVTKESTHPVKPLAQIAGNRYASGPVGKALSDACMGTIASFLSKYQDIIIEHQKVVKGNQKRLESLRELAGKENLEYPSVTLPPQPHTKEGVDAYNEVIARVRMWVNLNLWQKLKLSRDDAKPLLRLKGFPSFPLVERQANEVDWWDMVCNVKKLINEKKEDGKVFWQNLAGYKRQEALRPYLSSEEDRKKGKKFARYQLGDLLLHLEKKHPEDWGKVYDEAWERIDKKVEGLSKHIKLEEERRSEDAQSKAALTDWLRAKASFVIEGLKEADKDEFCRCELKLQKWYGDLRGKPFAIEAENSILDISGFSKQYNCAFIWQKDGVKKLNLYLIINYFKGGKLRFKKIKPEAFEANRFYTVINKKSGEIVPMEVNFNFDDPNLIILPLAFGKRQGREFIWNDLLSLETGSLKLANGRVIEKTLYNRRTRQDEPALFVALTFERREVLDSSNIKPMNLIGVDRGENIPAVIALTDPEGCPLSRFKDSLGNPTHILRIGESYKEKQRTIQAKKEVEQRRAGGYSRKYASKAKNLADDMVRNTARDLLYYAVTQDAMLIFENLSRGFGRQGKRTFMAERQYTRMEDWLTAKLAYEGLPSKTYLSKTLAQYTSKTCSNCGFTITSADYDRMLEKLKKTATGWMTTINGKELKVEGQITYYNRYKRQNVVKDLSVELDRLSEESVNNDISSWTKGRSGEALSLLKKRFSHRPVQEKFVCLNCGFETHADEQAALNIARSWLFLRSQEYKKYQTNKTTGNTDKRAFVETWQSFYRKKLKEVWKPAV

SEQ ID NO: 29906 - protein, 979 aa, synthetic construct
  REGION 1..979: note = engineered CasX variant
QEIKRINKIRRRLVKDSNTKKAGKTGPMKTLLVRVMTPDLRERLENLRKKPENIPQPISNTSRANLNKLLTDYTEMKKAILHVYWEEFQKDPVGLMSRVAQPASKKIDQNKLKPEMDEKGNLTTAGFACSQCGQPLFVYKLEQVSEKGKAYTNYFGRCNVAEHEKLILLAQLKPEKDSDEAVTYSLGKFGQRALDFYSIHVTKESTHPVKPLAQIAGNRYASGPVGKALSDACMGTIASFLSKYQDIIIEHQKVVKGNQKRLESLRELAGKENLEYPSVTLPPQPHTKEGVDAYNEVIARVRMWVNLNLWQKLKLSRDDAKPLLRLKGFPSFPLVERQANEVDWWDMVCNVKKLINEKKEDGKVFWQNLAGYKRQEALRPYLSSEEDRKKGKKFARYQLGDLLLHLEKKHGERDWGKVYDEAWERIDKKVEGLSKHIKLEEERRSEDAQSKAALTDWLRAKASFVIEGLKEADKDEFCRCELKLQKWYGDLRGKPFAIEAENSILDISGFSKQYNCAFIWQKDGVKKLNLYLIINYFKGGKLRFKKIKPEAFEANRFYTVINKKSGEIVPMEVNFNFDDPNLIILPLAFGKRQGREFIWNDLLSLETGSLKLANGRVIEKTLYNRRTRQDEPALFVALTFERREVLDSSNIKPMNLIGVDRGENIPAVIALTDPEGCPLSRFKDSLGNPTHILRIGESYKEKQRTIQAKKEVEQRRAGGYSRKYASKAKNLADDMVRNTARDLLYYAVTQDAMLIFENLSRGFGRQGKRTFMAERQYTRMEDWLTAKLAYEGLPSKTYLSKTLAQYTSKTCSNCGFTITSADYDRMLEKLKKTATGWMTTINGKELKVEGQITYYNRYKRQNVVKDLSVELDRLSEESVNNDISSWTKGRSGEALSLLKKRFSHRPVQEKFVCLNCGFETHADEQAALNIARSWLFLRSQEYKKYQTNKTTGNTDKRAFVETWQSFYRKKLKEVWKPAV

SEQ ID NO: 29907 - protein, 979 aa, synthetic construct
  REGION 1..979: note = engineered CasX variant
QEIKRINKIRRRLVKDSNTKKAGKTGPMKTLLVRVMTPDLRERLENLRKKPENIPQPISNTSRANLNKLLTDYTEMKKAILHVYWEEFQKDPVGLMSRVAQPASKKIDQNKLKPEMDEKGNLTTAGFACSQCGQPLFVYKLEQVSEKGKAYTNYFGRCNVAEHEKLILLAQLKPEKDSDEAVTYSLGKFGQRALDFYSIHVTKESTHPVKPLAQIAGNRYASGPVGKALSDACMGTIASFLSKYQDIIIEHQKVVKGNQKRLESLRELAGKENLEYPSVTLPPQPHTKEGVDAYNEVIARVRMWVNLNLWQKLKLSRDDAKPLLRLKGFPSFPLVERQANEVDWWDMVCNVKKLINEKKEDGKVFWQNLAGYKRQEALRPYLSSEEDRKKGKKFARYQLGDLLLHLEKKHGEYDWGKVYDEAWERIDKKVEGLSKHIKLEEERRSEDAQSKAALTDWLRAKASFVIEGLKEADKDEFCRCELKLQKWYGDLRGKPFAIEAENSILDISGFSKQYNCAFIWQKDGVKKLNLYLIINYFKGGKLRFKKIKPEAFEANRFYTVINKKSGEIVPMEVNFNFDDPNLIILPLAFGKRQGREFIWNDLLSLETGSLKLANGRVIEKTLYNRRTRQDEPALFVALTFERREVLDSSNIKPMNLIGVDRGENIPAVIALTDPEGCPLSRFKDSLGNPTHILRIGESYKEKQRTIQAKKEVEQRRAGGYSRKYASKAKNLADDMVRNTARDLLYYAVTQDAMLIFENLSRGFGRQGKRTFMAERQYTRMEDWLTAKLAYEGLPSKTYLSKTLAQYTSKTCSNCGFTITSADYDRMLEKLKKTATGWMTTINGKELKVEGQITYYNRYKRQNVVKDLSVELDRLSEESVNNDISSWTKGRSGEALSLLKKRFSHRPVQEKFVCLNCGFETHADEQAALNIARSWLFLRSQEYKKYQTNKTTGNTDKRAFVETWQSFYRKKLKEVWKPAV

SEQ ID NO: 29908 - protein, 978 aa, synthetic construct
  REGION 1..978: note = engineered CasX variant
QEIKRINKIRRRLVKDSNTKKAGKTGPMKTLLVRVMTPDLRERLENLRKKPENIPQPISNTSRANLNKLLTDYTEMKKAILHVYWEEFQKDPVGLMSRVAQPASKKIDQNKLKPEMDEKGNLTTAGFACSQCGQPLFVYKLEQVSEKGKAYTNYFGRCNVAEHEKLILLAQLKPEKDSDEAVTYSLGKFGQRALDFYSIHVTKESTHPVKPLAQIAGNRYASGPVGKALSDACMGTIASFLSKYQDIIIEHQKVVKGNQKRLESLRELAGKENLEYPSVTLPPQPHTKEGVDAYNEVIARVRMWVNLNLWQKLKLSRDDAKPLLRLKGFPSFPLVERQANEVDWWDMVCNVKKLINEKKEDGKVFWQNLAGYKRQEALRPYLSSEEDRKKGKKFARYQLGDLLLHLEKKHGEDWGDVYDEAWERIDKKVEGLSKHIKLEEERRSEDAQSKAALTDWLRAKASFVIEGLKEADKDEFCRCELKLQKWYGDLRGKPFAIEAENSILDISGFSKQYNCAFIWQKDGVKKLNLYLIINYFKGGKLRFKKIKPEAFEANRFYTVINKKSGEIVPMEVNFNFDDPNLIILPLAFGKRQGREFIWNDLLSLETGSLKLANGRVIEKTLYNRRTRQDEPALFVALTFERREVLDSSNIKPMNLIGVDRGENIPAVIALTDPEGCPLSRFKDSLGNPTHILRIGESYKEKQRTIQAKKEVEQRRAGGYSRKYASKAKNLADDMVRNTARDLLYYAVTQDAMLIFENLSRGFGRQGKRTFMAERQYTRMEDWLTAKLAYEGLPSKTYLSKTLAQYTSKTCSNCGFTITSADYDRMLEKLKKTATGWMTTINGKELKVEGQITYYNRYKRQNVVKDLSVELDRLSEESVNNDISSWTKGRSGEALSLLKKRFSHRPVQEKFVCLNCGFETHADEQAALNIARSWLFLRSQEYKKYQTNKTTGNTDKRAFVETWQSFYRKKLKEVWKPAV

SEQ ID NO: 29909 - protein, 978 aa, synthetic construct
  REGION 1..978: note = engineered CasX variant
QEIKRINKIRRRLVKDSNTKKAGKTGPMKTLLVRVMTPDLRERLENLRKKPENIPQPISNTSRANLNKLLTDYTEMKKAILHVYWEEFQKDPVGLMSRVAQPASKKIDQNKLKPEMDEKGNLTTAGFACSQCGQPLFVYKLEQVSEKGKAYTNYFGRCNVAEHEKLILLAQLKPEKDSDEAVTYSLGKFGQRALDFYSIHVTKESTHPVKPLAQIAGNRYASGPVGKALSDACMGTIASFLSKYQDIIIEHQKVVKGNQKRLESLRELAGKENLEYPSVTLPPQPHTKEGVDAYNEVIARVRMWVNLNLWQKLKLSRDDAKPLLRLKGFPSFPLVERQANEVDWWDMVCNVKKLINEKKEDGKVFWQNLAGYKRQEALRPYLSSEEDRKKGKKFARYQLGDLLLHLEKKHGEDWGKVYGEAWERIDKKVEGLSKHIKLEEERRSEDAQSKAALTDWLRAKASFVIEGLKEADKDEFCRCELKLQKWYGDLRGKPFAIEAENSILDISGFSKQYNCAFIWQKDGVKKLNLYLIINYFKGGKLRFKKIKPEAFEANRFYTVINKKSGEIVPMEVNFNFDDPNLIILPLAFGKRQGREFIWNDLLSLETGSLKLANGRVIEKTLYNRRTRQDEPALFVALTFERREVLDSSNIKPMNLIGVDRGENIPAVIALTDPEGCPLSRFKDSLGNPTHILRIGESYKEKQRTIQAKKEVEQRRAGGYSRKYASKAKNLADDMVRNTARDLLYYAVTQDAMLIFENLSRGFGRQGKRTFMAERQYTRMEDWLTAKLAYEGLPSKTYLSKTLAQYTSKTCSNCGFTITSADYDRMLEKLKKTATGWMTTINGKELKVEGQITYYNRYKRQNVVKDLSVELDRLSEESVNNDISSWTKGRSGEALSLLKKRFSHRPVQEKFVCLNCGFETHADEQAALNIARSWLFLRSQEYKKYQTNKTTGNTDKRAFVETWQSFYRKKLKEVWKPAV

SEQ ID NO: 29910 - protein, 978 aa, synthetic construct
  REGION 1..978: note = engineered CasX variant
QEIKRINKIRRRLVKDSNTKKAGKTGPMKTLLVRVMTPDLRERLENLRKKPENIPQPISNTSRANLNKLLTDYTEMKKAILHVYWEEFQKDPVGLMSRVAQPASKKIDQNKLKPEMDEKGNLTTAGFACSQCGQPLFVYKLEQVSEKGKAYTNYFGRCNVAEHEKLILLAQLKPEKDSDEAVTYSLGKFGQRALDFYSIHVTKESTHPVKPLAQIAGNRYASGPVGKALSDACMGTIASFLSKYQDIIIEHQKVVKGNQKRLESLRELAGKENLEYPSVTLPPQPHTKEGVDAYNEVIARVRMWVNLNLWQKLKLSRDDAKPLLRLKGFPSFPLVERQANEVDWWDMVCNVKKLINEKKEDGKVFWQNLAGYKRQEALRPYLSSEEDRKKGKKFARYQLGDLLLHLEKKHGEDWGKVYDEAWERIDKKVEGLSKHIKLEEERRSEDAQSKAALTDWLRAKASFVIEGKKEADKDEFCRCELKLQKWYGDLRGKPFAIEAENSILDISGFSKQYNCAFIWQKDGVKKLNLYLIINYFKGGKLRFKKIKPEAFEANRFYTVINKKSGEIVPMEVNFNFDDPNLIILPLAFGKRQGREFIWNDLLSLETGSLKLANGRVIEKTLYNRRTRQDEPALFVALTFERREVLDSSNIKPMNLIGVDRGENIPAVIALTDPEGCPLSRFKDSLGNPTHILRIGESYKEKQRTIQAKKEVEQRRAGGYSRKYASKAKNLADDMVRNTARDLLYYAVTQDAMLIFENLSRGFGRQGKRTFMAERQYTRMEDWLTAKLAYEGLPSKTYLSKTLAQYTSKTCSNCGFTITSADYDRMLEKLKKTATGWMTTINGKELKVEGQITYYNRYKRQNVVKDLSVELDRLSEESVNNDISSWTKGRSGEALSLLKKRFSHRPVQEKFVCLNCGFETHADEQAALNIARSWLFLRSQEYKKYQTNKTTGNTDKRAFVETWQSFYRKKLKEVWKPAV

SEQ ID NO: 29911 - protein, 978 aa, synthetic construct
  REGION 1..978: note = engineered CasX variant
QEIKRINKIRRRLVKDSNTKKAGKTGPMKTLLVRVMTPDLRERLENLRKKPENIPQPISNTSRANLNKLLTDYTEMKKAILHVYWEEFQKDPVGLMSRVAQPASKKIDQNKLKPEMDEKGNLTTAGFACSQCGQPLFVYKLEQVSEKGKAYTNYFGRCNVAEHEKLILLAQLKPEKDSDEAVTYSLGKFGQRALDFYSIHVTKESTHPVKPLAQIAGNRYASGPVGKALSDACMGTIASFLSKYQDIIIEHQKVVKGNQKRLESLRELAGKENLEYPSVTLPPQPHTKEGVDAYNEVIARVRMWVNLNLWQKLKLSRDDAKPLLRLKGFPSFPLVERQANEVDWWDMVCNVKKLINEKKEDGKVFWQNLAGYKRQEALRPYLSSEEDRKKGKKFARYQLGDLLLHLEKKHGEDWGKVYDEAWERIDKKVEGLSKHIKLEEERRSEDAQSKAALTDWLRAKASFVIEGSKEADKDEFCRCELKLQKWYGDLRGKPFAIEAENSILDISGFSKQYNCAFIWQKDGVKKLNLYLIINYFKGGKLRFKKIKPEAFEANRFYTVINKKSGEIVPMEVNFNFDDPNLIILPLAFGKRQGREFIWNDLLSLETGSLKLANGRVIEKTLYNRRTRQDEPALFVALTFERREVLDSSNIKPMNLIGVDRGENIPAVIALTDPEGCPLSRFKDSLGNPTHILRIGESYKEKQRTIQAKKEVEQRRAGGYSRKYASKAKNLADDMVRNTARDLLYYAVTQDAMLIFENLSRGFGRQGKRTFMAERQYTRMEDWLTAKLAYEGLPSKTYLSKTLAQYTSKTCSNCGFTITSADYDRMLEKLKKTATGWMTTINGKELKVEGQITYYNRYKRQNVVKDLSVELDRLSEESVNNDISSWTKGRSGEALSLLKKRFSHRPVQEKFVCLNCGFETHADEQAALNIARSWLFLRSQEYKKYQTNKTTGNTDKRAFVETWQSFYRKKLKEVWKPAV

SEQ ID NO: 29912 - protein, 979 aa, synthetic construct
  REGION 1..979: note = engineered CasX variant
QEIKRINKIRRRLVKDSNTKKAGKTGPMKTLLVRVMTPDLRERLENLRKKPENIPQPISNTSRANLNKLLTDYTEMKKAILHVYWEEFQKDPVGLMSRVAQPASKKIDQNKLKPEMDEKGNLTTAGFACSQCGQPLFVYKLEQVSEKGKAYTNYFGRCNVAEHEKLILLAQLKPEKDSDEAVTYSLGKFGQRALDFYSIHVTKESTHPVKPLAQIAGNRYASGPVGKALSDACMGTIASFLSKYQDIIIEHQKVVKGNQKRLESLRELAGKENLEYPSVTLPPQPHTKEGVDAYNEVIARVRMWVNLNLWQKLKLSRDDAKPLLRLKGFPSFPLVERQANEVDWWDMVCNVKKLINEKKEDGKVFWQNLAGYKRQEALRPYLSSEEDRKKGKKFARYQLGDLLLHLEKKHGEDWGKVYDEAWERIDKKVEGLSKHIKLEEERRSEDAQSKAALTDWLRAKASFVIEGLKEADDKDEFCRCELKLQKWYGDLRGKPFAIEAENSILDISGFSKQYNCAFIWQKDGVKKLNLYLIINYFKGGKLRFKKIKPEAFEANRFYTVINKKSGEIVPMEVNFNFDDPNLIILPLAFGKRQGREFIWNDLLSLETGSLKLANGRVIEKTLYNRRTRQDEPALFVALTFERREVLDSSNIKPMNLIGVDRGENIPAVIALTDPEGCPLSRFKDSLGNPTHILRIGESYKEKQRTIQAKKEVEQRRAGGYSRKYASKAKNLADDMVRNTARDLLYYAVTQDAMLIFENLSRGFGRQGKRTFMAERQYTRMEDWLTAKLAYEGLPSKTYLSKTLAQYTSKTCSNCGFTITSADYDRMLEKLKKTATGWMTTINGKELKVEGQITYYNRYKRQNVVKDLSVELDRLSEESVNNDISSWTKGRSGEALSLLKKRFSHRPVQEKFVCLNCGFETHADEQAALNIARSWLFLRSQEYKKYQTNKTTGNTDKRAFVETWQSFYRKKLKEVWKPAV

SEQ ID NO: 29913 - protein, 979 aa, synthetic construct
  REGION 1..979: note = engineered CasX variant
QEIKRINKIRRRLVKDSNTKKAGKTGPMKTLLVRVMTPDLRERLENLRKKPENIPQPISNTSRANLNKLLTDYTEMKKAILHVYWEEFQKDPVGLMSRVAQPASKKIDQNKLKPEMDEKGNLTTAGFACSQCGQPLFVYKLEQVSEKGKAYTNYFGRCNVAEHEKLILLAQLKPEKDSDEAVTYSLGKFGQRALDFYSIHVTKESTHPVKPLAQIAGNRYASGPVGKALSDACMGTIASFLSKYQDIIIEHQKVVKGNQKRLESLRELAGKENLEYPSVTLPPQPHTKEGVDAYNEVIARVRMWVNLNLWQKLKLSRDDAKPLLRLKGFPSFPLVERQANEVDWWDMVCNVKKLINEKKEDGKVFWQNLAGYKRQEALRPYLSSEEDRKKGKKFARYQLGDLLLHLEKKHGEDWGKVYDEAWERIDKKVEGLSKHIKLEEERRSEDAQSKAALTDWLRAKASFVIEGLKEADKDEFCRCELKLQKWYGDLRGKPFAIEAENSILDISGFSKQYNCAFIWQKDGVKKLNLYLIINYFKGGKLRFKKIKPEAFEANRFYTVINKKSGEIVPMEVNFNFDDPNLIILPLAFGKRQGREFIWNDLLSLETGSLKLANGRVIEKTLYNRRTRQDEPALFVALTFERREVLDSSNIKPMNLIGVDRGENIPAVIALTDPEGCPLSRFKDSLGNPTHILRIGESYKEKQRTIQAKKEVEQRRAGGYSRKYASKAKNLADDMVRNTARDLLYYAVTQDAMLIFENLSRGFGRQGKRTFMAERQYTRMEDWLTAKLAYEGLPSKTYLSKTLAQYTSKTCSNCGFTITSADYDRMLEKLKKTATGWMTTINGKELKVEGQITYYNRYKRQNVVKDLSVELDRLSEESVNNDISSWTKGRSGNEALSLLKKRFSHRPVQEKFVCLNCGFETHADEQAALNIARSWLFLRSQEYKKYQTNKTTGNTDKRAFVETWQSFYRKKLKEVWKPAV

SEQ ID NO: 29914 - protein, 978 aa, synthetic construct
  REGION 1..978: note = engineered CasX variant
QEIKRINKIRRRLVKDSNTKKAGKTGPMKTLLVRVMTPDLRERLENLRKKPENIPQPISNTSRANLNKLLTDYTEMKKAILHVYWEEFQKDPVGLMSRVAQPASKKIDQNKLKPEMDEKGNLTTAGFACSQCGQPLFVYKLEQVSEKGKAYTNYFGRCNVAEHEKLILLAQLKPEKDSDEAVTYSLGKFGQRALDFYSIHVTKESTHPVKPLAQIAGNRYASGPVGKALSDACMGTIASFLSKYQDIIIEHQKVVKGNQKRLESLRELAGKENLEYPSVTLPPQPHTKEGVDAYNEVIARVRMWVNLNLWQKLKLSRDDAKPLLRLKGFPSFPLVERQANEVDWWDMVCNVKKLINEKKEDGKVFWQNLAGYKRQEALRPYLSSEEDRQKGKKFARYQLGDLLLHLEKKHGEDWGKVYDEAWERIDKKVEGLSKHIKLEEERRSEDAQSKAALTDWLRAKASFVIEGLKEADKDEFCRCELKLQKWYGDLRGKPFAIEAENSILDISGFSKQYNCAFIWQKDGVKKLNLYLIINYFKGGKLRFKKIKPEAFEANRFYTVINKKSGEIVPMEVNFNFDDPNLIILPLAFGKRQGREFIWNDLLSLETGSLKLANGRVIEKTLYNRRTRQDEPALFVALTFERREVLDSSNIKPMNLIGVDRGENIPAVIALTDPEGCPLSRFKDSLGNPTHILRIGESYKEKQRTIQAKKEVEQRRAGGYSRKYASKAKNLADDMVRNTARDLLYYAVTQDAMLIFENLSRGFGRQGKRTFMAERQYTRMEDWLTAKLAYEGLPSKTYLSKTLAQYTSKTCSNCGFTITSADYDRMLEKLKKTATGWMTTINGKELKVEGQITYYNRYKRQNVVKDLSVELDRLSEESVNNDISSWTKGRSGEALSLLKKRFSHRPVQEKFVCLNCGFETHADEQAALNIARSWLFLRSQEYKKYQTNKTTGNTDKRAFVETWQSFYRKKLKEVWKPAV

SEQ ID NO: 29915 - protein, 978 aa, synthetic construct
  REGION 1..978: note = engineered CasX variant
QEIKRINKIRRRLVKDSNTKKAGKTGPMKTLLVRVMTPDLRERLENLRKKPENIPQPISNTSRANLNKLLTDYTEMKKAILHVYWEEFQKDPVGLMSRVAQPASKKIDQNKLKPEMDEKGNLTTAGFACSQCGQPLFVYKLEQVSEKGKAYTNYFGRCNVAEHEKLILLAQLKPEKDSDEAVTYSLGKFGQRALDFYSIHVTKESTHPVKPLAQIAGNRYASGPVGKALSDACMGTIASFLSKYQDIIIEHQKVVKGNQKRLESLRELAGKENLEYPSVTLPPQPHTKEGVDAYNEVIARVRMWVNLNLWQKLKLSRDDAKPLLRLKGFPSFPLVERQANEVDWWDMVCNVKKLINEKKEDGKVFWQNLAGYKRQEALRPYLSSEEDRKKGKKFARYQLGDLLLHLEKKHGEDWGKVYDEAWERIDKKVEGLSKHIKLEEERRSEDAQSKAALTDWLRAKASFVIEGLKEADKDEFCRCELKLQKWYGDLRGKPFAIEAENSILDISGFSKQYNCAFIWQKDGVKKLNLYLIINYFKGGKLRFKKIKPEAFEANRFYTVINKKSGEIVPMEVNFNFDDPNLIILPLAFGKRQGREFIWNDLLSLETGSLKLANGRVIEKTLYNRRTRQDEPALFVALTFERREVLDSSNIKPMNLIGVDRGENIPAVIALTDPEGCPLSRFKDSLGNPTHILRIGESYKEKQRTIQAKKEVEQRRAGGYSRKYASKAKNLADDMVRNTARDLLYYAVTQDAMLIFENLSRGFGRQGKRTFMAERQYTRMEDWLTAKLAYEGLPSQTYLSKTLAQYTSKTCSNCGFTITSADYDRMLEKLKKTATGWMTTINGKELKVEGQITYYNRYKRQNVVKDLSVELDRLSEESVNNDISSWTKGRSGEALSLLKKRFSHRPVQEKFVCLNCGFETHADEQAALNIARSWLFLRSQEYKKYQTNKTTGNTDKRAFVETWQSFYRKKLKEVWKPAV

SEQ ID NO: 29916 - protein, 978 aa, synthetic construct
  REGION 1..978: note = engineered CasX variant
QEIKRINKIRRRLVKDSNTKKAGKTGPMKTLLVRVMTPDLRERLENLRKKPENIPQPISNTSRANLNKLLTDYTEMKKAILHVYWEEFQKDPVGLMSRVAQPASKKIDQNKLKPEMDEKGNLTTAGFACSQCGQPLFVYKLEQVSEKGKAYTNYFGRCNVAEHEKLILLAQLKPEKDSDEAVTYSLGKFGQRALDFYSIHVTKESTHPVKPLAQIAGNRYASGPVGKALSDACMGTIASFLSKYQDIIIEHQKVVKGNQKRLESLRELAGKENLEYPSVTLPPQPHTKEGVDAYNEVIARVRMWVNLNLWQKLKLSRDDAKPLLRLKGFPSFPLVERQANEVDWWDMVCNVKKLINEKKEDGKVFWQNLAGYKRQEALRPYLSSEEDRKKGKKFARYQLGDLLLHLEKKHGEDWGKVYDEAWERIDKKVEGLSKHIKLEEERRSEDAQSKAALTDWLRAKASFVIEGLKEADKDEFCRCELKLQKWYGDLRGKPFAIEAENSILDISGFSKQYNCAFIWQKDGVKKLNLYLIINYFKGGKLRFKKIKPEAFEANRFYTVINKKSGEIVPMEVNFNFDDPNLIILPLAFGKRQGREFIWNDLLSLETGSLKLANGRVIEKTLYNRRTRQDEPALFVALTFERREVLDSSNIKPMNLIGVDRGENIPAVIALTDPEGCPLSRFKDSLGNPTHILRIGESYKEKQRTIQAKKEVEQRRAGGYSRKYASKAKNLADDMVRNTARDLLYYAVTQDAMLIFENLSRGFGRQGKRTFMAERQYTRMEDWLTAKLAYNGLPSKTYLSKTLAQYTSKTCSNCGFTITSADYDRMLEKLKKTATGWMTTINGKELKVEGQITYYNRYKRQNVVKDLSVELDRLSEESVNNDISSWTKGRSGEALSLLKKRFSHRPVQEKFVCLNCGFETHADEQAALNIARSWLFLRSQEYKKYQTNKTTGNTDKRAFVETWQSFYRKKLKEVWKPAV

SEQ ID NO: 29917 - protein, 978 aa, synthetic construct
  REGION 1..978: note = engineered CasX variant
QEIKRINKIRRRLVKDSNTKKAGKTGPMKTLLVRVMTPDLRERLENLRKKPENIPQPISNTSRANLNKLLTDYTEMKKAILHVYWEEFQKDPVGLMSRVAQPASKKIDQNKLKPEMDEKGNLTTAGFACSQCGQPLFVYKLEQVSEKGKAYTNYFGRCNVAEHEKLIQLAQLKPEKDSDEAVTYSLGKFGQRALDFYSIHVTKESTHPVKPLAQIAGNRYASGPVGKALSDACMGTIASFLSKYQDIIIEHQKVVKGNQKRLESLRELAGKENLEYPSVTLPPQPHTKEGVDAYNEVIARVRMWVNLNLWQKLKLSRDDAKPLLRLKGFPSFPLVERQANEVDWWDMVCNVKKLINEKKEDGKVFWQNLAGYKRQEALRPYLSSEEDRKKGKKFARYQLGDLLLHLEKKHGEDWGKVYDEAWERIDKKVEGLSKHIKLEEERRSEDAQSKAALTDWLRAKASFVIEGLKEADKDEFCRCELKLQKWYGDLRGKPFAIEAENSILDISGFSKQYNCAFIWQKDGVKKLNLYLIINYFKGGKLRFKKIKPEAFEANRFYTVINKKSGEIVPMEVNFNFDDPNLIILPLAFGKRQGREFIWNDLLSLETGSLKLANGRVIEKTLYNRRTRQDEPALFVALTFERREVLDSSNIKPMNLIGVDRGENIPAVIALTDPEGCPLSRFKDSLGNPTHILRIGESYKEKQRTIQAKKEVEQRRAGGYSRKYASKAKNLADDMVRNTARDLLYYAVTQDAMLIFENLSRGFGRQGKRTFMAERQYTRMEDWLTAKLAYEGLPSKTYLSKTLAQYTSKTCSNCGFTITSADYDRMLEKLKKTATGWMTTINGKELKVEGQITYYNRYKRQNVVKDLSVELDRLSEESVNNDISSWTKGRSGEALSLLKKRFSHRPVQEKFVCLNCGFETHADEQAALNIARSWLFLRSQEYKKYQTNKTTGNTDKRAFVETWQSFYRKKLKEVWKPAV

SEQ ID NO: 29918 - protein, 978 aa, synthetic construct
  REGION 1..978: note = engineered CasX variant
QEIKRINKIRRRLVKDSNTKKAGKTGPMKTLLVRVMTPDLRERLENLRKKPENIPQPISNTSRANLNKLLTDYTEMKKAILHVYWEEFQKDPVGLMSRVAQPASKKIDQNKLKPEMDEKGNLTTAGFACSQCGQPLFVYKLEQVSEKGKAYTNYFGRCNVAEHEKLILLAQLKPEKDSDEAVTYSLGKFGQRALDFYSIHVTKESTHPVKPLAQIAGNRYASGPVGKALSDACMGTIASFLSKYQDIIIEHQKVVKGNQKRLESLRELAGKENLEYPSVTLPPQPHTKEGVDAYNEVIARVRMWVNLNLWQKLKLSRDDAKPLLRLKGFPSFPLVERQANEVDWWDMVCNVKKLINEKKEDGKVFWQNLAIYKRQEALRPYLSSEEDRKKGKKFARYQLGDLLLHLEKKHGEDWGKVYDEAWERIDKKVEGLSKHIKLEEERRSEDAQSKAALTDWLRAKASFVIEGLKEADKDEFCRCELKLQKWYGDLRGKPFAIEAENSILDISGFSKQYNCAFIWQKDGVKKLNLYLIINYFKGGKLRFKKIKPEAFEANRFYTVINKKSGEIVPMEVNFNFDDPNLIILPLAFGKRQGREFIWNDLLSLETGSLKLANGRVIEKTLYNRRTRQDEPALFVALTFERREVLDSSNIKPMNLIGVDRGENIPAVIALTDPEGCPLSRFKDSLGNPTHILRIGESYKEKQRTIQAKKEVEQRRAGGYSRKYASKAKNLADDMVRNTARDLLYYAVTQDAMLIFENLSRGFGRQGKRTFMAERQYTRMEDWLTAKLAYEGLPSKTYLSKTLAQYTSKTCSNCGFTITSADYDRMLEKLKKTATGWMTTINGKELKVEGQITYYNRYKRQNVVKDLSVELDRLSEESVNNDISSWTKGRSGEALSLLKKRFSHRPVQEKFVCLNCGFETHADEQAALNIARSWLFLRSQEYKKYQTNKTTGNTDKRAFVETWQSFYRKKLKEVWKPAV

SEQ ID NO: 29919 - protein, 978 aa, synthetic construct
  REGION 1..978: note = engineered CasX variant
QEIKRINKIRRRLVKDSNTKKAGKTGPMKTLLVRVMTPDLRERLENLRKKPENIPQPISNTSRANLNKLLTDYTEMKKAILHVYWEEFQKDPVGLMSRVAQPASKKIDQNKLKPEMDEKGNLTTAGFACSQCGQPLFVYKLEQVSEKGKAYTNYFGRCNVAEHEKLILLAQLKPEKDSDEAVTYSLGKFGQRALDFYSIHVTKESTHPVKPLAQIAGNRYASGPVGKALSDACMGTIASFLSKYQDIIIEHQKVVKGNQKRLESLRELAGKENLEYPSVTLPPQPHTKEGVDAYNEVIARVRMWVNLNLWQKLKLSRDDAKPLLRLKGFPSFPLVERQANEVDWWDMVCNVKKLINEKKEDGKVFWQNLAGYKRQEALRPYLSSEEDREKGKKFARYQLGDLLLHLEKKHGEDWGKVYDEAWERIDKKVEGLSKHIKLEEERRSEDAQSKAALTDWLRAKASFVIEGLKEADKDEFCRCELKLQKWYGDLRGKPFAIEAENSILDISGFSKQYNCAFIWQKDGVKKLNLYLIINYFKGGKLRFKKIKPEAFEANRFYTVINKKSGEIVPMEVNFNFDDPNLIILPLAFGKRQGREFIWNDLLSLETGSLKLANGRVIEKTLYNRRTRQDEPALFVALTFERREVLDSSNIKPMNLIGVDRGENIPAVIALTDPEGCPLSRFKDSLGNPTHILRIGESYKEKQRTIQAKKEVEQRRAGGYSRKYASKAKNLADDMVRNTARDLLYYAVTQDAMLIFENLSRGFGRQGKRTFMAERQYTRMEDWLTAKLAYEGLPSKTYLSKTLAQYTSKTCSNCGFTITSADYDRMLEKLKKTATGWMTTINGKELKVEGQITYYNRYKRQNVVKDLSVELDRLSEESVNNDISSWTKGRSGEALSLLKKRFSHRPVQEKFVCLNCGFETHADEQAALNIARSWLFLRSQEYKKYQTNKTTGNTDKRAFVETWQSFYRKKLKEVWKPAV

SEQ ID NO: 29920 - protein, 978 aa, synthetic construct
  REGION 1..978: note = engineered CasX variant
QEIKRINKIRRRLVKDSNTKKAGKTGPMKTLLVRVMTPDLRERLENLRKKPENIPQPISNTSRANLNKLLTDYTEMKKAILHVYWEEFQKDPVGLMSRVAQPASKKIDQNKLKPEMDEKGNLTTAGFACSQCGQPLFVYKLEQVSEKGKAYTNYFGRCNVAEHEKLILLAQLKPEKDSDEAVTYSLGKFGQRALDFYSIHVTKESTHPVKPLAQIAGNRYASGPVGKALSDACMGTIASFLSKYQDIIIEHQKVVKGNQKRLESLRELAGKENLEYPSVTLPPQPHTKEGVDAYNEVIARVRMWVNLNLWQKLKLSRDDAKPLLRLKGFPSFPLVERQANEVDWWDMVCNVKKLINEKKEDGKVFWQNLAGYKRQEALRPYLSSEEDRKKGKKFARYQLGDLLLHLEKKHGEDWGKVYDEAWERIDKKVEGLSKHIKLEEERRSEDAQSKAALTDWLRAKASFVIEGLKEADKDEFCRCELKLQKWYGDLRGKPFAIEAENSILDISGFSKQYNCAFIWQKDGVKKLNLYLIINYFKGGKLRFKKIKPEAFEANRFYTVINKKSGEIVIMEVNFNFDDPNLIILPLAFGKRQGREFIWNDLLSLETGSLKLANGRVIEKTLYNRRTRQDEPALFVALTFERREVLDSSNIKPMNLIGVDRGENIPAVIALTDPEGCPLSRFKDSLGNPTHILRIGESYKEKQRTIQAKKEVEQRRAGGYSRKYASKAKNLADDMVRNTARDLLYYAVTQDAMLIFENLSRGFGRQGKRTFMAERQYTRMEDWLTAKLAYEGLPSKTYLSKTLAQYTSKTCSNCGFTITSADYDRMLEKLKKTATGWMTTINGKELKVEGQITYYNRYKRQNVVKDLSVELDRLSEESVNNDISSWTKGRSGEALSLLKKRFSHRPVQEKFVCLNCGFETHADEQAALNIARSWLFLRSQEYKKYQTNKTTGNTDKRAFVETWQSFYRKKLKEVWKPAV

SEQ ID NO: 29921 - protein, 978 aa, synthetic construct
  REGION 1..978: note = engineered CasX variant
QEIKRINKIRRRLVKDSNTKKAGKTGPMKTLLVRVMTPDLRERLENLRKKPENIPQPISNTSRANLNKLLTDYTEMKKAILHVYWEEFQKDPVGLMSRVAQPASKKIDQNKLKPEMDEKGNLTTAGFACSQCGQPLFVYKLEQVSEKGKAYTNYFGRCNVAEHEKLILLAQLKPEKDSDEAVTYSLGKFGQRALDFYSIHVTKESTHPVKPLAQIAGNRYASGPVGKALSGACMGTIASFLSKYQDIIIEHQKVVKGNQKRLESLRELAGKENLEYPSVTLPPQPHTKEGVDAYNEVIARVRMWVNLNLWQKLKLSRDDAKPLLRLKGFPSFPLVERQANEVDWWDMVCNVKKLINEKKEDGKVFWQNLAGYKRQEALRPYLSSEEDRKKGKKFARYQLGDLLLHLEKKHGEDWGKVYDEAWERIDKKVEGLSKHIKLEEERRSEDAQSKAALTDWLRAKASFVIEGLKEADKDEFCRCELKLQKWYGDLRGKPFAIEAENSILDISGFSKQYNCAFIWQKDGVKKLNLYLIINYFKGGKLRFKKIKPEAFEANRFYTVINKKSGEIVPMEVNFNFDDPNLIILPLAFGKRQGREFIWNDLLSLETGSLKLANGRVIEKTLYNRRTRQDEPALFVALTFERREVLDSSNIKPMNLIGVDRGENIPAVIALTDPEGCPLSRFKDSLGNPTHILRIGESYKEKQRTIQAKKEVEQRRAGGYSRKYASKAKNLADDMVRNTARDLLYYAVTQDAMLIFENLSRGFGRQGKRTFMAERQYTRMEDWLTAKLAYEGLPSKTYLSKTLAQYTSKTCSNCGFTITSADYDRVLEKLKKTATGWMTTINGKELKVEGQITYYNRYKRQNVVKDLSVELDRLSEESVNNDISSWTKGRQGEALSLLKKRFSHRPVQEKFVCLNCGFETHADEQAALNIARSWLFLRSQEYKKYQTNKTTGNTDKRAFVETWQSFYRKKLKEVWKPAV

SEQ ID NO: 29922 - protein, 978 aa, synthetic construct
  REGION 1..978: note = engineered CasX variant
QEIKRINKIRRRLVKDSNTKKAGKTGPMKTLLVRVMTPDLRERLENLRKKPENIPQPISNTSRANLNKLLTDYTEMKKAILHVYWEEFQKDPVGLMSRVAQPASKKIDQNKLKPEMDEKGNLTTAGFACSQCGQPLFVYKLEQVSEKGKAYTNYFGRCNVAEHEKLILLAQLKPEKDSDEAVTYSLGKFGQRALDFYSIHVTKESTHPVKPLAQIAGNRYASGPVGKALSDACMGTIASFLSKYQDIIIEHQKVVKGNQKRLESLRELAGKENLEYPSVTLPPQPHTKEGVDAYNEVIARVRMWVNLNLWQKLKLSRDDAKPLLRLKNFPSFPLVERQANEVDWWDMVCNVKKLINEKKEDGKVFWQNLAGYKRQEALRPYLSSEEDRKKGKKFARYQLGDLLLHLEKKHGEDWGKVYDEAWERIDKKVEGLSKHIKLEEERRSEDAQSKAALTDWLRAKASFVIEGLKEADKDEFCRCELKLQKWYGDLRGKPFAIEAENSILDISGFSKQYNCAFIWQKDGVKKLNLYLIINYFKGGKLRFKKIKPEAFEANRFYTVINKKSGEIVPMEVNFNFDDPNLIILPLAFGKRQGREFIWNDLLSLETGSLKLANGRVIEKTLYNRRTRQDEPALFVALTFERREVLDSSNIKPMNLIGVDRGENIPAVIALTDPEGCPLSRFKDSLGNPTHILRIGESYKEKQRTIQAKKEVEQRRAGGYSRKYASKAKNLADDMVRNTARDLLYYAVTQDAMLIFENLSRGFGRQGKRTFMAERQYTRMEDWLTAKLAYEGLPSKTYLSKTLAQYTSKTCSNCGFTITSADYDRVLEKLKKTATGWMTTINGKELKVEGQITYYNRYKRQNVVKDLSVELDRLSEESVNNDISSWTKGRQGEALSLLKKRFSHRPVQEKFVCLNCGFETHADEQAALNIARSWLFLRSQEYKKYQTNKTTGNTDKRAFVETWQSFYRKKLKEVWKPAV

SEQ ID NO: 29923 - protein, 978 aa, synthetic construct
  REGION 1..978: note = engineered CasX variant
QEIKRINKIRRRLVKDSNTKKAGKTGPMKTLLVRVMTPDLRERLENLRKKPENIPQPISNTSRANLNKLLTDYTEMKKAILHVYWEEFQKDPVGLMSRVAQPASKKIDQNKLKPEMDEKGNLTTAGFACSQCGQPLFVYKLEQVSEKGKAYTNYFGRCNVAEHEKLILLAQLKPEKDSDEAVTYSLGKFGQRALDFYSIHVTKESTHPVKPLAQIAGNRYASGPVGKALSDACMGTIASFLSKYQDIIIEHQKVVKGNQKRLESLRELAGKENLEYPSVTLPPQPHTKEGVDAYNEVIARVRMWVNLNLWQKLKLSRDDAKPLLRLKGFPSFPLVERQANEVDWWDMVCNVKKLINEKKEDGKVFWQNLAGYKRQEALRPYLSSEEDRKKGKKFARYQLGDLLNHLEKKHGEDWGKVYDEAWERIDKKVEGLSKHIKLEEERRSEDAQSKAALTDWLRAKASFVIEGLKEADKDEFCRCELKLQKWYGDLRGKPFAIEAENSILDISGFSKQYNCAFIWQKDGVKKLNLYLIINYFKGGKLRFKKIKPEAFEANRFYTVINKKSGEIVPMEVNFNFDDPNLIILPLAFGKRQGREFIWNDLLSLETGSLKLANGRVIEKTLYNRRTRQDEPALFVALTFERREVLDSSNIKPMNLIGVDRGENIPAVIALTDPEGCPLSRFKDSLGNPTHILRIGESYKEKQRTIQAKKEVEQRRAGGYSRKYASKAKNLADDMVRNTARDLLYYAVTQDAMLIFENLSRGFGRQGKRTFMAERQYTRMEDWLTAKLAYEGLPSKTYLSKTLAQYTSKTCSNCGFTITSADYDRVLEKLKKTATGWMTTINGKELKVEGQITYYNRYKRQNVVKDLSVELDRLSEESVNNDISSWTKGRQGEALSLLKKRFSHRPVQEKFVCLNCGFETHADEQAALNIARSWLFLRSQEYKKYQTNKTTGNTDKRAFVETWQSFYRKKLKEVWKPAV

SEQ ID NO: 29924 - protein, 978 aa, synthetic construct
  REGION 1..978: note = engineered CasX variant
QEIKRINKIRRRLVKDSNTKKAGKTGPMKTLLVRVMTPDLRERLENLRKKPENIPQPISNTSRANLNKLLTDYTEMKKAILHVYWEEFQKDPVGLMSRVAQPASKKIDQNKLKPEMDEKGNLTTAGFACSQCGQPLFVYKLEQVSEKGKAYTNYFGRCNVAEHEKLILLAQLKPEKDSDEAVTYSLGKFGQRALDFYSIHVTKESTHPVKPLAQIAGNRYASGPVGKALSDACMGTIASFLSKYQDIIIEHQKVVKGNQKRLESLRELAGKENLEYPSVTLPPQPHTKEGVDAYNEVIARVRMWVNLNLWQKLKLSRDDAKPLLRLKGFPSFPLVERQANEVDWWDMVCNVKKLINEKKEDGKVFWQNLAGYKRQEALRPYLSSEEDRKKGKKFARYQLGDLLWHLEKKHGEDWGKVYDEAWERIDKKVEGLSKHIKLEEERRSEDAQSKAALTDWLRAKASFVIEGLKEADKDEFCRCELKLQKWYGDLRGKPFAIEAENSILDISGFSKQYNCAFIWQKDGVKKLNLYLIINYFKGGKLRFKKIKPEAFEANRFYTVINKKSGEIVPMEVNFNFDDPNLIILPLAFGKRQGREFIWNDLLSLETGSLKLANGRVIEKTLYNRRTRQDEPALFVALTFERREVLDSSNIKPMNLIGVDRGENIPAVIALTDPEGCPLSRFKDSLGNPTHILRIGESYKEKQRTIQAKKEVEQRRAGGYSRKYASKAKNLADDMVRNTARDLLYYAVTQDAMLIFENLSRGFGRQGKRTFMAERQYTRMEDWLTAKLAYEGLPSKTYLSKTLAQYTSKTCSNCGFTITSADYDRVLEKLKKTATGWMTTINGKELKVEGQITYYNRYKRQNVVKDLSVELDRLSEESVNNDISSWTKGRQGEALSLLKKRFSHRPVQEKFVCLNCGFETHADEQAALNIARSWLFLRSQEYKKYQTNKTTGNTDKRAFVETWQSFYRKKLKEVWKPAV

SEQ ID NO: 29925 - protein, 978 aa, synthetic construct
  REGION 1..978: note = engineered CasX variant
QEIKRINKIRRRLVKDSNTKKAGKTGPMKTLLVRVMTPDLRERLENLRKKPENIPQPISNTSRANLNKLLTDYTEMKKAILHVYWEEFQKDPVGLMSRVAQPASKKIDQNKLKPEMDEKGNLTTAGFACSQCGQPLFVYKLEQVSEKGKAYTNYFGRCNVAEHEKLILLAQLKPEKDSDEAVTYSLGKFGQRALDFYSIHVTKESTHPVKPLAQIAGNRYASGPVGKALSDACMGTIASFLSKYQDIIIEHQKVVKGNQKRLESLRELAGKENLEYPSVTLPPQPHTKEGVDAYNEVIARVRMWVNLNLWQKLKLSRDDAKPLLRLKGFPSFPLVERQANEVDWWDMVCNVKKLINEKKEDGKVFWQNLAGYKRQEALRPYLSSEEDRKKGKKFARYQLGDLLLHLYKKHGEDWGKVYDEAWERIDKKVEGLSKHIKLEEERRSEDAQSKAALTDWLRAKASFVIEGLKEADKDEFCRCELKLQKWYGDLRGKPFAIEAENSILDISGFSKQYNCAFIWQKDGVKKLNLYLIINYFKGGKLRFKKIKPEAFEANRFYTVINKKSGEIVPMEVNFNFDDPNLIILPLAFGKRQGREFIWNDLLSLETGSLKLANGRVIEKTLYNRRTRQDEPALFVALTFERREVLDSSNIKPMNLIGVDRGENIPAVIALTDPEGCPLSRFKDSLGNPTHILRIGESYKEKQRTIQAKKEVEQRRAGGYSRKYASKAKNLADDMVRNTARDLLYYAVTQDAMLIFENLSRGFGRQGKRTFMAERQYTRMEDWLTAKLAYEGLPSKTYLSKTLAQYTSKTCSNCGFTITSADYDRVLEKLKKTATGWMTTINGKELKVEGQITYYNRYKRQNVVKDLSVELDRLSEESVNNDISSWTKGRQGEALSLLKKRFSHRPVQEKFVCLNCGFETHADEQAALNIARSWLFLRSQEYKKYQTNKTTGNTDKRAFVETWQSFYRKKLKEVWKPAV

SEQ ID NO: 29926 - protein, 978 aa, synthetic construct
  REGION 1..978: note = engineered CasX variant
QEIKRINKIRRRLVKDSNTKKAGKTGPMKTLLVRVMTPDLRERLENLRKKPENIPQPISNTSRANLNKLLTDYTEMKKAILHVYWEEFQKDPVGLMSRVAQPASKKIDQNKLKPEMDEKGNLTTAGFACSQCGQPLFVYKLEQVSEKGKAYTNYFGRCNVAEHEKLILLAQLKPEKDSDEAVTYSLGKFGQRALDFYSIHVTKESTHPVKPLAQIAGNRYASGPVGKALSDACMGTIASFLSKYQDIIIEHQKVVKGNQKRLESLRELAGKENLEYPSVTLPPQPHTKEGVDAYNEVIARVRMWVNLNLWQKLKLSRDDAKPLLRLKGFPSFPLVERQANEVDWWDMVCNVKKLINEKKEDGKVFWQNLAGYKRQEALRPYLSSEEDRKKGKKFARYQLGDLLLHLEKKHPEDWGKVYDEAWERIDKKVEGLSKHIKLEEERRSEDAQSKAALTDWLRAKASFVIEGLKEADKDEFCRCELKLQKWYGDLRGKPFAIEAENSILDISGFSKQYNCAFIWQKDGVKKLNLYLIINYFKGGKLRFKKIKPEAFEANRFYTVINKKSGEIVPMEVNFNFDDPNLIILPLAFGKRQGREFIWNDLLSLETGSLKLANGRVIEKTLYNRRTRQDEPALFVALTFERREVLDSSNIKPMNLIGVDRGENIPAVIALTDPEGCPLSRFKDSLGNPTHILRIGESYKEKQRTIQAKKEVEQRRAGGYSRKYASKAKNLADDMVRNTARDLLYYAVTQDAMLIFENLSRGFGRQGKRTFMAERQYTRMEDWLTAKLAYEGLPSKTYLSKTLAQYTSKTCSNCGFTITSADYDRVLEKLKKTATGWMTTINGKELKVEGQITYYNRYKRQNVVKDLSVELDRLSEESVNNDISSWTKGRQGEALSLLKKRFSHRPVQEKFVCLNCGFETHADEQAALNIARSWLFLRSQEYKKYQTNKTTGNTDKRAFVETWQSFYRKKLKEVWKPAV

SEQ ID NO: 29927 - protein, 979 aa, synthetic construct
  REGION 1..979: note = engineered CasX variant
QEIKRINKIRRRLVKDSNTKKAGKTGPMKTLLVRVMTPDLRERLENLRKKPENIPQPISNTSRANLNKLLTDYTEMKKAILHVYWEEFQKDPVGLMSRVAQPASKKIDQNKLKPEMDEKGNLTTAGFACSQCGQPLFVYKLEQVSEKGKAYTNYFGRCNVAEHEKLILLAQLKPEKDSDEAVTYSLGKFGQRALDFYSIHVTKESTHPVKPLAQIAGNRYASGPVGKALSDACMGTIASFLSKYQDIIIEHQKVVKGNQKRLESLRELAGKENLEYPSVTLPPQPHTKEGVDAYNEVIARVRMWVNLNLWQKLKLSRDDAKPLLRLKGFPSFPLVERQANEVDWWDMVCNVKKLINEKKEDGKVFWQNLAGYKRQEALRPYLSSEEDRKKGKKFARYQLGDLLLHLEKKHGERDWGKVYDEAWERIDKKVEGLSKHIKLEEERRSEDAQSKAALTDWLRAKASFVIEGLKEADKDEFCRCELKLQKWYGDLRGKPFAIEAENSILDISGFSKQYNCAFIWQKDGVKKLNLYLIINYFKGGKLRFKKIKPEAFEANRFYTVINKKSGEIVPMEVNFNFDDPNLIILPLAFGKRQGREFIWNDLLSLETGSLKLANGRVIEKTLYNRRTRQDEPALFVALTFERREVLDSSNIKPMNLIGVDRGENIPAVIALTDPEGCPLSRFKDSLGNPTHILRIGESYKEKQRTIQAKKEVEQRRAGGYSRKYASKAKNLADDMVRNTARDLLYYAVTQDAMLIFENLSRGFGRQGKRTFMAERQYTRMEDWLTAKLAYEGLPSKTYLSKTLAQYTSKTCSNCGFTITSADYDRVLEKLKKTATGWMTTINGKELKVEGQITYYNRYKRQNVVKDLSVELDRLSEESVNNDISSWTKGRQGEALSLLKKRFSHRPVQEKFVCLNCGFETHADEQAALNIARSWLFLRSQEYKKYQTNKTTGNTDKRAFVETWQSFYRKKLKEVWKPAV

SEQ ID NO: 29928 - protein, 979 aa, synthetic construct
  REGION 1..979: note = engineered CasX variant
QEIKRINKIRRRLVKDSNTKKAGKTGPMKTLLVRVMTPDLRERLENLRKKPENIPQPISNTSRANLNKLLTDYTEMKKAILHVYWEEFQKDPVGLMSRVAQPASKKIDQNKLKPEMDEKGNLTTAGFACSQCGQPLFVYKLEQVSEKGKAYTNYFGRCNVAEHEKLILLAQLKPEKDSDEAVTYSLGKFGQRALDFYSIHVTKESTHPVKPLAQIAGNRYASGPVGKALSDACMGTIASFLSKYQDIIIEHQKVVKGNQKRLESLRELAGKENLEYPSVTLPPQPHTKEGVDAYNEVIARVRMWVNLNLWQKLKLSRDDAKPLLRLKGFPSFPLVERQANEVDWWDMVCNVKKLINEKKEDGKVFWQNLAGYKRQEALRPYLSSEEDRKKGKKFARYQLGDLLLHLEKKHGEYDWGKVYDEAWERIDKKVEGLSKHIKLEEERRSEDAQSKAALTDWLRAKASFVIEGLKEADKDEFCRCELKLQKWYGDLRGKPFAIEAENSILDISGFSKQYNCAFIWQKDGVKKLNLYLIINYFKGGKLRFKKIKPEAFEANRFYTVINKKSGEIVPMEVNFNFDDPNLIILPLAFGKRQGREFIWNDLLSLETGSLKLANGRVIEKTLYNRRTRQDEPALFVALTFERREVLDSSNIKPMNLIGVDRGENIPAVIALTDPEGCPLSRFKDSLGNPTHILRIGESYKEKQRTIQAKKEVEQRRAGGYSRKYASKAKNLADDMVRNTARDLLYYAVTQDAMLIFENLSRGFGRQGKRTFMAERQYTRMEDWLTAKLAYEGLPSKTYLSKTLAQYTSKTCSNCGFTITSADYDRVLEKLKKTATGWMTTINGKELKVEGQITYYNRYKRQNVVKDLSVELDRLSEESVNNDISSWTKGRQGEALSLLKKRFSHRPVQEKFVCLNCGFETHADEQAALNIARSWLFLRSQEYKKYQTNKTTGNTDKRAFVETWQSFYRKKLKEVWKPAV

SEQ ID NO: 29929 - protein, 978 aa, synthetic construct
  REGION 1..978: note = engineered CasX variant
QEIKRINKIRRRLVKDSNTKKAGKTGPMKTLLVRVMTPDLRERLENLRKKPENIPQPISNTSRANLNKLLTDYTEMKKAILHVYWEEFQKDPVGLMSRVAQPASKKIDQNKLKPEMDEKGNLTTAGFACSQCGQPLFVYKLEQVSEKGKAYTNYFGRCNVAEHEKLILLAQLKPEKDSDEAVTYSLGKFGQRALDFYSIHVTKESTHPVKPLAQIAGNRYASGPVGKALSDACMGTIASFLSKYQDIIIEHQKVVKGNQKRLESLRELAGKENLEYPSVTLPPQPHTKEGVDAYNEVIARVRMWVNLNLWQKLKLSRDDAKPLLRLKGFPSFPLVERQANEVDWWDMVCNVKKLINEKKEDGKVFWQNLAGYKRQEALRPYLSSEEDRKKGKKFARYQLGDLLLHLEKKHGEDWGDVYDEAWERIDKKVEGLSKHIKLEEERRSEDAQSKAALTDWLRAKASFVIEGLKEADKDEFCRCELKLQKWYGDLRGKPFAIEAENSILDISGFSKQYNCAFIWQKDGVKKLNLYLIINYFKGGKLRFKKIKPEAFEANRFYTVINKKSGEIVPMEVNFNFDDPNLIILPLAFGKRQGREFIWNDLLSLETGSLKLANGRVIEKTLYNRRTRQDEPALFVALTFERREVLDSSNIKPMNLIGVDRGENIPAVIALTDPEGCPLSRFKDSLGNPTHILRIGESYKEKQRTIQAKKEVEQRRAGGYSRKYASKAKNLADDMVRNTARDLLYYAVTQDAMLIFENLSRGFGRQGKRTFMAERQYTRMEDWLTAKLAYEGLPSKTYLSKTLAQYTSKTCSNCGFTITSADYDRVLEKLKKTATGWMTTINGKELKVEGQITYYNRYKRQNVVKDLSVELDRLSEESVNNDISSWTKGRQGEALSLLKKRFSHRPVQEKFVCLNCGFETHADEQAALNIARSWLFLRSQEYKKYQTNKTTGNTDKRAFVETWQSFYRKKLKEVWKPAV

SEQ ID NO: 29930 - protein, 978 aa, synthetic construct
  REGION 1..978: note = engineered CasX variant
QEIKRINKIRRRLVKDSNTKKAGKTGPMKTLLVRVMTPDLRERLENLRKKPENIPQPISNTSRANLNKLLTDYTEMKKAILHVYWEEFQKDPVGLMSRVAQPASKKIDQNKLKPEMDEKGNLTTAGFACSQCGQPLFVYKLEQVSEKGKAYTNYFGRCNVAEHEKLILLAQLKPEKDSDEAVTYSLGKFGQRALDFYSIHVTKESTHPVKPLAQIAGNRYASGPVGKALSDACMGTIASFLSKYQDIIIEHQKVVKGNQKRLESLRELAGKENLEYPSVTLPPQPHTKEGVDAYNEVIARVRMWVNLNLWQKLKLSRDDAKPLLRLKGFPSFPLVERQANEVDWWDMVCNVKKLINEKKEDGKVFWQNLAGYKRQEALRPYLSSEEDRKKGKKFARYQLGDLLLHLEKKHGEDWGKVYGEAWERIDKKVEGLSKHIKLEEERRSEDAQSKAALTDWLRAKASFVIEGLKEADKDEFCRCELKLQKWYGDLRGKPFAIEAENSILDISGFSKQYNCAFIWQKDGVKKLNLYLIINYFKGGKLRFKKIKPEAFEANRFYTVINKKSGEIVPMEVNFNFDDPNLIILPLAFGKRQGREFIWNDLLSLETGSLKLANGRVIEKTLYNRRTRQDEPALFVALTFERREVLDSSNIKPMNLIGVDRGENIPAVIALTDPEGCPLSRFKDSLGNPTHILRIGESYKEKQRTIQAKKEVEQRRAGGYSRKYASKAKNLADDMVRNTARDLLYYAVTQDAMLIFENLSRGFGRQGKRTFMAERQYTRMEDWLTAKLAYEGLPSKTYLSKTLAQYTSKTCSNCGFTITSADYDRVLEKLKKTATGWMTTINGKELKVEGQITYYNRYKRQNVVKDLSVELDRLSEESVNNDISSWTKGRQGEALSLLKKRFSHRPVQEKFVCLNCGFETHADEQAALNIARSWLFLRSQEYKKYQTNKTTGNTDKRAFVETWQSFYRKKLKEVWKPAV

SEQ ID NO: 29931 - protein, 978 aa, synthetic construct
  REGION 1..978: note = engineered CasX variant
QEIKRINKIRRRLVKDSNTKKAGKTGPMKTLLVRVMTPDLRERLENLRKKPENIPQPISNTSRANLNKLLTDYTEMKKAILHVYWEEFQKDPVGLMSRVAQPASKKIDQNKLKPEMDEKGNLTTAGFACSQCGQPLFVYKLEQVSEKGKAYTNYFGRCNVAEHEKLILLAQLKPEKDSDEAVTYSLGKFGQRALDFYSIHVTKESTHPVKPLAQIAGNRYASGPVGKALSDACMGTIASFLSKYQDIIIEHQKVVKGNQKRLESLRELAGKENLEYPSVTLPPQPHTKEGVDAYNEVIARVRMWVNLNLWQKLKLSRDDAKPLLRLKGFPSFPLVERQANEVDWWDMVCNVKKLINEKKEDGKVFWQNLAGYKRQEALRPYLSSEEDRKKGKKFARYQLGDLLLHLEKKHGEDWGKVYDEAWERIDKKVEGLSKHIKLEEERRSEDAQSKAALTDWLRAKASFVIEGKKEADKDEFCRCELKLQKWYGDLRGKPFAIEAENSILDISGFSKQYNCAFIWQKDGVKKLNLYLIINYFKGGKLRFKKIKPEAFEANRFYTVINKKSGEIVPMEVNFNFDDPNLIILPLAFGKRQGREFIWNDLLSLETGSLKLANGRVIEKTLYNRRTRQDEPALFVALTFERREVLDSSNIKPMNLIGVDRGENIPAVIALTDPEGCPLSRFKDSLGNPTHILRIGESYKEKQRTIQAKKEVEQRRAGGYSRKYASKAKNLADDMVRNTARDLLYYAVTQDAMLIFENLSRGFGRQGKRTFMAERQYTRMEDWLTAKLAYEGLPSKTYLSKTLAQYTSKTCSNCGFTITSADYDRVLEKLKKTATGWMTTINGKELKVEGQITYYNRYKRQNVVKDLSVELDRLSEESVNNDISSWTKGRQGEALSLLKKRFSHRPVQEKFVCLNCGFETHADEQAALNIARSWLFLRSQEYKKYQTNKTTGNTDKRAFVETWQSFYRKKLKEVWKPAV

SEQ ID NO: 29932 - protein, 978 aa, synthetic construct
  REGION 1..978: note = engineered CasX variant
QEIKRINKIRRRLVKDSNTKKAGKTGPMKTLLVRVMTPDLRERLENLRKKPENIPQPISNTSRANLNKLLTDYTEMKKAILHVYWEEFQKDPVGLMSRVAQPASKKIDQNKLKPEMDEKGNLTTAGFACSQCGQPLFVYKLEQVSEKGKAYTNYFGRCNVAEHEKLILLAQLKPEKDSDEAVTYSLGKFGQRALDFYSIHVTKESTHPVKPLAQIAGNRYASGPVGKALSDACMGTIASFLSKYQDIIIEHQKVVKGNQKRLESLRELAGKENLEYPSVTLPPQPHTKEGVDAYNEVIARVRMWVNLNLWQKLKLSRDDAKPLLRLKGFPSFPLVERQANEVDWWDMVCNVKKLINEKKEDGKVFWQNLAGYKRQEALRPYLSSEEDRKKGKKFARYQLGDLLLHLEKKHGEDWGKVYDEAWERIDKKVEGLSKHIKLEEERRSEDAQSKAALTDWLRAKASFVIEGSKEADKDEFCRCELKLQKWYGDLRGKPFAIEAENSILDISGFSKQYNCAFIWQKDGVKKLNLYLIINYFKGGKLRFKKIKPEAFEANRFYTVINKKSGEIVPMEVNFNFDDPNLIILPLAFGKRQGREFIWNDLLSLETGSLKLANGRVIEKTLYNRRTRQDEPALFVALTFERREVLDSSNIKPMNLIGVDRGENIPAVIALTDPEGCPLSRFKDSLGNPTHILRIGESYKEKQRTIQAKKEVEQRRAGGYSRKYASKAKNLADDMVRNTARDLLYYAVTQDAMLIFENLSRGFGRQGKRTFMAERQYTRMEDWLTAKLAYEGLPSKTYLSKTLAQYTSKTCSNCGFTITSADYDRVLEKLKKTATGWMTTINGKELKVEGQITYYNRYKRQNVVKDLSVELDRLSEESVNNDISSWTKGRQGEALSLLKKRFSHRPVQEKFVCLNCGFETHADEQAALNIARSWLFLRSQEYKKYQTNKTTGNTDKRAFVETWQSFYRKKLKEVWKPAV

SEQ ID NO: 29933 - protein, 979 aa, synthetic construct
  REGION 1..979: note = engineered CasX variant
QEIKRINKIRRRLVKDSNTKKAGKTGPMKTLLVRVMTPDLRERLENLRKKPENIPQPISNTSRANLNKLLTDYTEMKKAILHVYWEEFQKDPVGLMSRVAQPASKKIDQNKLKPEMDEKGNLTTAGFACSQCGQPLFVYKLEQVSEKGKAYTNYFGRCNVAEHEKLILLAQLKPEKDSDEAVTYSLGKFGQRALDFYSIHVTKESTHPVKPLAQIAGNRYASGPVGKALSDACMGTIASFLSKYQDIIIEHQKVVKGNQKRLESLRELAGKENLEYPSVTLPPQPHTKEGVDAYNEVIARVRMWVNLNLWQKLKLSRDDAKPLLRLKGFPSFPLVERQANEVDWWDMVCNVKKLINEKKEDGKVFWQNLAGYKRQEALRPYLSSEEDRKKGKKFARYQLGDLLLHLEKKHGEDWGKVYDEAWERIDKKVEGLSKHIKLEEERRSEDAQSKAALTDWLRAKASFVIEGLKEADDKDEFCRCELKLQKWYGDLRGKPFAIEAENSILDISGFSKQYNCAFIWQKDGVKKLNLYLIINYFKGGKLRFKKIKPEAFEANRFYTVINKKSGEIVPMEVNFNFDDPNLIILPLAFGKRQGREFIWNDLLSLETGSLKLANGRVIEKTLYNRRTRQDEPALFVALTFERREVLDSSNIKPMNLIGVDRGENIPAVIALTDPEGCPLSRFKDSLGNPTHILRIGESYKEKQRTIQAKKEVEQRRAGGYSRKYASKAKNLADDMVRNTARDLLYYAVTQDAMLIFENLSRGFGRQGKRTFMAERQYTRMEDWLTAKLAYEGLPSKTYLSKTLAQYTSKTCSNCGFTITSADYDRVLEKLKKTATGWMTTINGKELKVEGQITYYNRYKRQNVVKDLSVELDRLSEESVNNDISSWTKGRQGEALSLLKKRFSHRPVQEKFVCLNCGFETHADEQAALNIARSWLFLRSQEYKKYQTNKTTGNTDKRAFVETWQSFYRKKLKEVWKPAV

SEQ ID NO: 29934 - protein, 979 aa, synthetic construct
  REGION 1..979: note = engineered CasX variant
QEIKRINKIRRRLVKDSNTKKAGKTGPMKTLLVRVMTPDLRERLENLRKKPENIPQPISNTSRANLNKLLTDYTEMKKAILHVYWEEFQKDPVGLMSRVAQPASKKIDQNKLKPEMDEKGNLTTAGFACSQCGQPLFVYKLEQVSEKGKAYTNYFGRCNVAEHEKLILLAQLKPEKDSDEAVTYSLGKFGQRALDFYSIHVTKESTHPVKPLAQIAGNRYASGPVGKALSDACMGTIASFLSKYQDIIIEHQKVVKGNQKRLESLRELAGKENLEYPSVTLPPQPHTKEGVDAYNEVIARVRMWVNLNLWQKLKLSRDDAKPLLRLKGFPSFPLVERQANEVDWWDMVCNVKKLINEKKEDGKVFWQNLAGYKRQEALRPYLSSEEDRKKGKKFARYQLGDLLLHLEKKHGEDWGKVYDEAWERIDKKVEGLSKHIKLEEERRSEDAQSKAALTDWLRAKASFVIEGLKEADKDEFCRCELKLQKWYGDLRGKPFAIEAENSILDISGFSKQYNCAFIWQKDGVKKLNLYLIINYFKGGKLRFKKIKPEAFEANRFYTVINKKSGEIVPMEVNFNFDDPNLIILPLAFGKRQGREFIWNDLLSLETGSLKLANGRVIEKTLYNRRTRQDEPALFVALTFERREVLDSSNIKPMNLIGVDRGENIPAVIALTDPEGCPLSRFKDSLGNPTHILRIGESYKEKQRTIQAKKEVEQRRAGGYSRKYASKAKNLADDMVRNTARDLLYYAVTQDAMLIFENLSRGFGRQGKRTFMAERQYTRMEDWLTAKLAYEGLPSKTYLSKTLAQYTSKTCSNCGFTITSADYDRVLEKLKKTATGWMTTINGKELKVEGQITYYNRYKRQNVVKDLSVELDRLSEESVNNDISSWTKGRQGNEALSLLKKRFSHRPVQEKFVCLNCGFETHADEQAALNIARSWLFLRSQEYKKYQTNKTTGNTDKRAFVETWQSFYRKKLKEVWKPAV

SEQ ID NO: 29935 - protein, 978 aa, synthetic construct
  REGION 1..978: note = engineered CasX variant
QEIKRINKIRRRLVKDSNTKKAGKTGPMKTLLVRVMTPDLRERLENLRKKPENIPQPISNTSRANLNKLLTDYTEMKKAILHVYWEEFQKDPVGLMSRVAQPASKKIDQNKLKPEMDEKGNLTTAGFACSQCGQPLFVYKLEQVSEKGKAYTNYFGRCNVAEHEKLILLAQLKPEKDSDEAVTYSLGKFGQRALDFYSIHVTKESTHPVKPLAQIAGNRYASGPVGKALSDACMGTIASFLSKYQDIIIEHQKVVKGNQKRLESLRELAGKENLEYPSVTLPPQPHTKEGVDAYNEVIARVRMWVNLNLWQKLKLSRDDAKPLLRLKGFPSFPLVERQANEVDWWDMVCNVKKLINEKKEDGKVFWQNLAGYKRQEALRPYLSSEEDRQKGKKFARYQLGDLLLHLEKKHGEDWGKVYDEAWERIDKKVEGLSKHIKLEEERRSEDAQSKAALTDWLRAKASFVIEGLKEADKDEFCRCELKLQKWYGDLRGKPFAIEAENSILDISGFSKQYNCAFIWQKDGVKKLNLYLIINYFKGGKLRFKKIKPEAFEANRFYTVINKKSGEIVPMEVNFNFDDPNLIILPLAFGKRQGREFIWNDLLSLETGSLKLANGRVIEKTLYNRRTRQDEPALFVALTFERREVLDSSNIKPMNLIGVDRGENIPAVIALTDPEGCPLSRFKDSLGNPTHILRIGESYKEKQRTIQAKKEVEQRRAGGYSRKYASKAKNLADDMVRNTARDLLYYAVTQDAMLIFENLSRGFGRQGKRTFMAERQYTRMEDWLTAKLAYEGLPSKTYLSKTLAQYTSKTCSNCGFTITSADYDRVLEKLKKTATGWMTTINGKELKVEGQITYYNRYKRQNVVKDLSVELDRLSEESVNNDISSWTKGRQGEALSLLKKRFSHRPVQEKFVCLNCGFETHADEQAALNIARSWLFLRSQEYKKYQTNKTTGNTDKRAFVETWQSFYRKKLKEVWKPAV

SEQ ID NO: 29936 - protein, 978 aa, synthetic construct
  REGION 1..978: note = engineered CasX variant
QEIKRINKIRRRLVKDSNTKKAGKTGPMKTLLVRVMTPDLRERLENLRKKPENIPQPISNTSRANLNKLLTDYTEMKKAILHVYWEEFQKDPVGLMSRVAQPASKKIDQNKLKPEMDEKGNLTTAGFACSQCGQPLFVYKLEQVSEKGKAYTNYFGRCNVAEHEKLILLAQLKPEKDSDEAVTYSLGKFGQRALDFYSIHVTKESTHPVKPLAQIAGNRYASGPVGKALSDACMGTIASFLSKYQDIIIEHQKVVKGNQKRLESLRELAGKENLEYPSVTLPPQPHTKEGVDAYNEVIARVRMWVNLNLWQKLKLSRDDAKPLLRLKGFPSFPLVERQANEVDWWDMVCNVKKLINEKKEDGKVFWQNLAGYKRQEALRPYLSSEEDRKKGKKFARYQLGDLLLHLEKKHGEDWGKVYDEAWERIDKKVEGLSKHIKLEEERRSEDAQSKAALTDWLRAKASFVIEGLKEADKDEFCRCELKLQKWYGDLRGKPFAIEAENSILDISGFSKQYNCAFIWQKDGVKKLNLYLIINYFKGGKLRFKKIKPEAFEANRFYTVINKKSGEIVPMEVNFNFDDPNLIILPLAFGKRQGREFIWNDLLSLETGSLKLANGRVIEKTLYNRRTRQDEPALFVALTFERREVLDSSNIKPMNLIGVDRGENIPAVIALTDPEGCPLSRFKDSLGNPTHILRIGESYKEKQRTIQAKKEVEQRRAGGYSRKYASKAKNLADDMVRNTARDLLYYAVTQDAMLIFENLSRGFGRQGKRTFMAERQYTRMEDWLTAKLAYEGLPSQTYLSKTLAQYTSKTCSNCGFTITSADYDRVLEKLKKTATGWMTTINGKELKVEGQITYYNRYKRQNVVKDLSVELDRLSEESVNNDISSWTKGRQGEALSLLKKRFSHRPVQEKFVCLNCGFETHADEQAALNIARSWLFLRSQEYKKYQTNKTTGNTDKRAFVETWQSFYRKKLKEVWKPAV

SEQ ID NO: 29937 - protein, 978 aa, synthetic construct
  REGION 1..978: note = engineered CasX variant
QEIKRINKIRRRLVKDSNTKKAGKTGPMKTLLVRVMTPDLRERLENLRKKPENIPQPISNTSRANLNKLLTDYTEMKKAILHVYWEEFQKDPVGLMSRVAQPASKKIDQNKLKPEMDEKGNLTTAGFACSQCGQPLFVYKLEQVSEKGKAYTNYFGRCNVAEHEKLILLAQLKPEKDSDEAVTYSLGKFGQRALDFYSIHVTKESTHPVKPLAQIAGNRYASGPVGKALSDACMGTIASFLSKYQDIIIEHQKVVKGNQKRLESLRELAGKENLEYPSVTLPPQPHTKEGVDAYNEVIARVRMWVNLNLWQKLKLSRDDAKPLLRLKGFPSFPLVERQANEVDWWDMVCNVKKLINEKKEDGKVFWQNLAGYKRQEALRPYLSSEEDRKKGKKFARYQLGDLLLHLEKKHGEDWGKVYDEAWERIDKKVEGLSKHIKLEEERRSEDAQSKAALTDWLRAKASFVIEGLKEADKDEFCRCELKLQKWYGDLRGKPFAIEAENSILDISGFSKQYNCAFIWQKDGVKKLNLYLIINYFKGGKLRFKKIKPEAFEANRFYTVINKKSGEIVPMEVNFNFDDPNLIILPLAFGKRQGREFIWNDLLSLETGSLKLANGRVIEKTLYNRRTRQDEPALFVALTFERREVLDSSNIKPMNLIGVDRGENIPAVIALTDPEGCPLSRFKDSLGNPTHILRIGESYKEKQRTIQAKKEVEQRRAGGYSRKYASKAKNLADDMVRNTARDLLYYAVTQDAMLIFENLSRGFGRQGKRTFMAERQYTRMEDWLTAKLAYNGLPSKTYLSKTLAQYTSKTCSNCGFTITSADYDRVLEKLKKTATGWMTTINGKELKVEGQITYYNRYKRQNVVKDLSVELDRLSEESVNNDISSWTKGRQGEALSLLKKRFSHRPVQEKFVCLNCGFETHADEQAALNIARSWLFLRSQEYKKYQTNKTTGNTDKRAFVETWQSFYRKKLKEVWKPAV

SEQ ID NO: 29938 - protein, 978 aa, synthetic construct
  REGION 1..978: note = engineered CasX variant
QEIKRINKIRRRLVKDSNTKKAGKTGPMKTLLVRVMTPDLRERLENLRKKPENIPQPISNTSRANLNKLLTDYTEMKKAILHVYWEEFQKDPVGLMSRVAQPASKKIDQNKLKPEMDEKGNLTTAGFACSQCGQPLFVYKLEQVSEKGKAYTNYFGRCNVAEHEKLIQLAQLKPEKDSDEAVTYSLGKFGQRALDFYSIHVTKESTHPVKPLAQIAGNRYASGPVGKALSDACMGTIASFLSKYQDIIIEHQKVVKGNQKRLESLRELAGKENLEYPSVTLPPQPHTKEGVDAYNEVIARVRMWVNLNLWQKLKLSRDDAKPLLRLKGFPSFPLVERQANEVDWWDMVCNVKKLINEKKEDGKVFWQNLAGYKRQEALRPYLSSEEDRKKGKKFARYQLGDLLLHLEKKHGEDWGKVYDEAWERIDKKVEGLSKHIKLEEERRSEDAQSKAALTDWLRAKASFVIEGLKEADKDEFCRCELKLQKWYGDLRGKPFAIEAENSILDISGFSKQYNCAFIWQKDGVKKLNLYLIINYFKGGKLRFKKIKPEAFEANRFYTVINKKSGEIVPMEVNFNFDDPNLIILPLAFGKRQGREFIWNDLLSLETGSLKLANGRVIEKTLYNRRTRQDEPALFVALTFERREVLDSSNIKPMNLIGVDRGENIPAVIALTDPEGCPLSRFKDSLGNPTHILRIGESYKEKQRTIQAKKEVEQRRAGGYSRKYASKAKNLADDMVRNTARDLLYYAVTQDAMLIFENLSRGFGRQGKRTFMAERQYTRMEDWLTAKLAYEGLPSKTYLSKTLAQYTSKTCSNCGFTITSADYDRVLEKLKKTATGWMTTINGKELKVEGQITYYNRYKRQNVVKDLSVELDRLSEESVNNDISSWTKGRQGEALSLLKKRFSHRPVQEKFVCLNCGFETHADEQAALNIARSWLFLRSQEYKKYQTNKTTGNTDKRAFVETWQSFYRKKLKEVWKPAV

SEQ ID NO: 29939 - protein, 978 aa, synthetic construct
  REGION 1..978: note = engineered CasX variant
QEIKRINKIRRRLVKDSNTKKAGKTGPMKTLLVRVMTPDLRERLENLRKKPENIPQPISNTSRANLNKLLTDYTEMKKAILHVYWEEFQKDPVGLMSRVAQPASKKIDQNKLKPEMDEKGNLTTAGFACSQCGQPLFVYKLEQVSEKGKAYTNYFGRCNVAEHEKLILLAQLKPEKDSDEAVTYSLGKFGQRALDFYSIHVTKESTHPVKPLAQIAGNRYASGPVGKALSDACMGTIASFLSKYQDIIIEHQKVVKGNQKRLESLRELAGKENLEYPSVTLPPQPHTKEGVDAYNEVIARVRMWVNLNLWQKLKLSRDDAKPLLRLKGFPSFPLVERQANEVDWWDMVCNVKKLINEKKEDGKVFWQNLAIYKRQEALRPYLSSEEDRKKGKKFARYQLGDLLLHLEKKHGEDWGKVYDEAWERIDKKVEGLSKHIKLEEERRSEDAQSKAALTDWLRAKASFVIEGLKEADKDEFCRCELKLQKWYGDLRGKPFAIEAENSILDISGFSKQYNCAFIWQKDGVKKLNLYLIINYFKGGKLRFKKIKPEAFEANRFYTVINKKSGEIVPMEVNFNFDDPNLIILPLAFGKRQGREFIWNDLLSLETGSLKLANGRVIEKTLYNRRTRQDEPALFVALTFERREVLDSSNIKPMNLIGVDRGENIPAVIALTDPEGCPLSRFKDSLGNPTHILRIGESYKEKQRTIQAKKEVEQRRAGGYSRKYASKAKNLADDMVRNTARDLLYYAVTQDAMLIFENLSRGFGRQGKRTFMAERQYTRMEDWLTAKLAYEGLPSKTYLSKTLAQYTSKTCSNCGFTITSADYDRVLEKLKKTATGWMTTINGKELKVEGQITYYNRYKRQNVVKDLSVELDRLSEESVNNDISSWTKGRQGEALSLLKKRFSHRPVQEKFVCLNCGFETHADEQAALNIARSWLFLRSQEYKKYQTNKTTGNTDKRAFVETWQSFYRKKLKEVWKPAV

SEQ ID NO: 29940 - protein, 978 aa, synthetic construct
  REGION 1..978: note = engineered CasX variant
QEIKRINKIRRRLVKDSNTKKAGKTGPMKTLLVRVMTPDLRERLENLRKKPENIPQPISNTSRANLNKLLTDYTEMKKAILHVYWEEFQKDPVGLMSRVAQPASKKIDQNKLKPEMDEKGNLTTAGFACSQCGQPLFVYKLEQVSEKGKAYTNYFGRCNVAEHEKLILLAQLKPEKDSDEAVTYSLGKFGQRALDFYSIHVTKESTHPVKPLAQIAGNRYASGPVGKALSDACMGTIASFLSKYQDIIIEHQKVVKGNQKRLESLRELAGKENLEYPSVTLPPQPHTKEGVDAYNEVIARVRMWVNLNLWQKLKLSRDDAKPLLRLKGFPSFPLVERQANEVDWWDMVCNVKKLINEKKEDGKVFWQNLAGYKRQEALRPYLSSEEDREKGKKFARYQLGDLLLHLEKKHGEDWGKVYDEAWERIDKKVEGLSKHIKLEEERRSEDAQSKAALTDWLRAKASFVIEGLKEADKDEFCRCELKLQKWYGDLRGKPFAIEAENSILDISGFSKQYNCAFIWQKDGVKKLNLYLIINYFKGGKLRFKKIKPEAFEANRFYTVINKKSGEIVPMEVNFNFDDPNLIILPLAFGKRQGREFIWNDLLSLETGSLKLANGRVIEKTLYNRRTRQDEPALFVALTFERREVLDSSNIKPMNLIGVDRGENIPAVIALTDPEGCPLSRFKDSLGNPTHILRIGESYKEKQRTIQAKKEVEQRRAGGYSRKYASKAKNLADDMVRNTARDLLYYAVTQDAMLIFENLSRGFGRQGKRTFMAERQYTRMEDWLTAKLAYEGLPSKTYLSKTLAQYTSKTCSNCGFTITSADYDRVLEKLKKTATGWMTTINGKELKVEGQITYYNRYKRQNVVKDLSVELDRLSEESVNNDISSWTKGRQGEALSLLKKRFSHRPVQEKFVCLNCGFETHADEQAALNIARSWLFLRSQEYKKYQTNKTTGNTDKRAFVETWQSFYRKKLKEVWKPAV

SEQ ID NO: 29941 - protein, 978 aa, synthetic construct
  REGION 1..978: note = engineered CasX variant
QEIKRINKIRRRLVKDSNTKKAGKTGPMKTLLVRVMTPDLRERLENLRKKPENIPQPISNTSRANLNKLLTDYTEMKKAILHVYWEEFQKDPVGLMSRVAQPASKKIDQNKLKPEMDEKGNLTTAGFACSQCGQPLFVYKLEQVSEKGKAYTNYFGRCNVAEHEKLILLAQLKPEKDSDEAVTYSLGKFGQRALDFYSIHVTKESTHPVKPLAQIAGNRYASGPVGKALSDACMGTIASFLSKYQDIIIEHQKVVKGNQKRLESLRELAGKENLEYPSVTLPPQPHTKEGVDAYNEVIARVRMWVNLNLWQKLKLSRDDAKPLLRLKGFPSFPLVERQANEVDWWDMVCNVKKLINEKKEDGKVFWQNLAGYKRQEALRPYLSSEEDRKKGKKFARYQLGDLLLHLEKKHGEDWGKVYDEAWERIDKKVEGLSKHIKLEEERRSEDAQSKAALTDWLRAKASFVIEGLKEADKDEFCRCELKLQKWYGDLRGKPFAIEAENSILDISGFSKQYNCAFIWQKDGVKKLNLYLIINYFKGGKLRFKKIKPEAFEANRFYTVINKKSGEIVIMEVNFNFDDPNLIILPLAFGKRQGREFIWNDLLSLETGSLKLANGRVIEKTLYNRRTRQDEPALFVALTFERREVLDSSNIKPMNLIGVDRGENIPAVIALTDPEGCPLSRFKDSLGNPTHILRIGESYKEKQRTIQAKKEVEQRRAGGYSRKYASKAKNLADDMVRNTARDLLYYAVTQDAMLIFENLSRGFGRQGKRTFMAERQYTRMEDWLTAKLAYEGLPSKTYLSKTLAQYTSKTCSNCGFTITSADYDRVLEKLKKTATGWMTTINGKELKVEGQITYYNRYKRQNVVKDLSVELDRLSEESVNNDISSWTKGRQGEALSLLKKRFSHRPVQEKFVCLNCGFETHADEQAALNIARSWLFLRSQEYKKYQTNKTTGNTDKRAFVETWQSFYRKKLKEVWKPAV

SEQ ID NO: 29942 - protein, 978 aa, synthetic construct
  REGION 1..978: note = engineered CasX variant
QEIKRINKIRRRLVKDSNTKKAGKTGPMKTLLVRVMTPDLRERLENLRKKPENIPQPISNTSRANLNKLLTDYTEMKKAILHVYWEEFQKDPVGLMSRVAQPASKKIDQNKLKPEMDEKGNLTTAGFACSQCGQPLFVYKLEQVSEKGKAYTNYFGRCNVAEHEKLILLAQLKPEKDSDEAVTYSLGKFGQRALDFYSIHVTKESTHPVKPLAQIAGNRYASGPVGKALSGACMGTIASFLSKYQDIIIEHQKVVKGNQKRLESLRELAGKENLEYPSVTLPPQPHTKEGVDAYNEVIARVRMWVNLNLWQKLKLSRDDAKPLLRLKGFPSFPLVERQANEVDWWDMVCNVKKLINEKKEDGKVFWQNLAGYKRQEALRPYLSSEEDRKKGKKFARYQLGDLLLHLEKKHGEDWGKVYDEAWERIDKKVEGLSKHIKLEEERRSEDAQSKAALTDWLRAKASFVIEGLKEADKDEFCRCELKLQKWYGDLRGKPFAIEAENSILDISGFSKQYNCAFIWQKDGVKKLNLYLIINYFKGGKLRFKKIKPEAFEANRFYTVINKKSGEIVPMEVNFNFDDPNLIILPLAFGKRQGREFIWNDLLSLETGSLKLANGRVIEKTLYNRRTRQDEPALFVALTFERREVLDSSNIKPMNLIGVDRGENIPAVIALTDPEGCPLSRFKDSLGNPTHILRIGESYKEKQRTIQAKKEVEQRRAGGYSRKYASKAKNLADDMVRNTARDLLYYAVTQDAMLIFENLSRGFGRQGKRTFMAERQYTRMEDWLTAKLAYEGLPSKTYLSKTLAQYTSKTCSNCGFTITSADYDRVLEKLKKTATGWMTTINGKELKVEGQITYYNRYKRQNVVKDLSVELDRLSEESVNNDISSWTKGRSGEALSLLKKRFSHRPVQEKFVCLNCEFETHADEQAALNIARSWLFLRSQEYKKYQTNKTTGNTDKRAFVETWQSFYRKKLKEVWKPAV

SEQ ID NO: 29943 - protein, 978 aa, synthetic construct
  REGION 1..978: note = engineered CasX variant
QEIKRINKIRRRLVKDSNTKKAGKTGPMKTLLVRVMTPDLRERLENLRKKPENIPQPISNTSRANLNKLLTDYTEMKKAILHVYWEEFQKDPVGLMSRVAQPASKKIDQNKLKPEMDEKGNLTTAGFACSQCGQPLFVYKLEQVSEKGKAYTNYFGRCNVAEHEKLILLAQLKPEKDSDEAVTYSLGKFGQRALDFYSIHVTKESTHPVKPLAQIAGNRYASGPVGKALSDACMGTIASFLSKYQDIIIEHQKVVKGNQKRLESLRELAGKENLEYPSVTLPPQPHTKEGVDAYNEVIARVRMWVNLNLWQKLKLSRDDAKPLLRLKNFPSFPLVERQANEVDWWDMVCNVKKLINEKKEDGKVFWQNLAGYKRQEALRPYLSSEEDRKKGKKFARYQLGDLLLHLEKKHGEDWGKVYDEAWERIDKKVEGLSKHIKLEEERRSEDAQSKAALTDWLRAKASFVIEGLKEADKDEFCRCELKLQKWYGDLRGKPFAIEAENSILDISGFSKQYNCAFIWQKDGVKKLNLYLIINYFKGGKLRFKKIKPEAFEANRFYTVINKKSGEIVPMEVNFNFDDPNLIILPLAFGKRQGREFIWNDLLSLETGSLKLANGRVIEKTLYNRRTRQDEPALFVALTFERREVLDSSNIKPMNLIGVDRGENIPAVIALTDPEGCPLSRFKDSLGNPTHILRIGESYKEKQRTIQAKKEVEQRRAGGYSRKYASKAKNLADDMVRNTARDLLYYAVTQDAMLIFENLSRGFGRQGKRTFMAERQYTRMEDWLTAKLAYEGLPSKTYLSKTLAQYTSKTCSNCGFTITSADYDRVLEKLKKTATGWMTTINGKELKVEGQITYYNRYKRQNVVKDLSVELDRLSEESVNNDISSWTKGRSGEALSLLKKRFSHRPVQEKFVCLNCEFETHADEQAALNIARSWLFLRSQEYKKYQTNKTTGNTDKRAFVETWQSFYRKKLKEVWKPAV

SEQ ID NO: 29944 - protein, 978 aa, synthetic construct
  REGION 1..978: note = engineered CasX variant
QEIKRINKIRRRLVKDSNTKKAGKTGPMKTLLVRVMTPDLRERLENLRKKPENIPQPISNTSRANLNKLLTDYTEMKKAILHVYWEEFQKDPVGLMSRVAQPASKKIDQNKLKPEMDEKGNLTTAGFACSQCGQPLFVYKLEQVSEKGKAYTNYFGRCNVAEHEKLILLAQLKPEKDSDEAVTYSLGKFGQRALDFYSIHVTKESTHPVKPLAQIAGNRYASGPVGKALSDACMGTIASFLSKYQDIIIEHQKVVKGNQKRLESLRELAGKENLEYPSVTLPPQPHTKEGVDAYNEVIARVRMWVNLNLWQKLKLSRDDAKPLLRLKGFPSFPLVERQANEVDWWDMVCNVKKLINEKKEDGKVFWQNLAGYKRQEALRPYLSSEEDRKKGKKFARYQLGDLLNHLEKKHGEDWGKVYDEAWERIDKKVEGLSKHIKLEEERRSEDAQSKAALTDWLRAKASFVIEGLKEADKDEFCRCELKLQKWYGDLRGKPFAIEAENSILDISGFSKQYNCAFIWQKDGVKKLNLYLIINYFKGGKLRFKKIKPEAFEANRFYTVINKKSGEIVPMEVNFNFDDPNLIILPLAFGKRQGREFIWNDLLSLETGSLKLANGRVIEKTLYNRRTRQDEPALFVALTFERREVLDSSNIKPMNLIGVDRGENIPAVIALTDPEGCPLSRFKDSLGNPTHILRIGESYKEKQRTIQAKKEVEQRRAGGYSRKYASKAKNLADDMVRNTARDLLYYAVTQDAMLIFENLSRGFGRQGKRTFMAERQYTRMEDWLTAKLAYEGLPSKTYLSKTLAQYTSKTCSNCGFTITSADYDRVLEKLKKTATGWMTTINGKELKVEGQITYYNRYKRQNVVKDLSVELDRLSEESVNNDISSWTKGRSGEALSLLKKRFSHRPVQEKFVCLNCEFETHADEQAALNIARSWLFLRSQEYKKYQTNKTTGNTDKRAFVETWQSFYRKKLKEVWKPAV

SEQ ID NO: 29945 - protein, 978 aa, synthetic construct
  REGION 1..978: note = engineered CasX variant
QEIKRINKIRRRLVKDSNTKKAGKTGPMKTLLVRVMTPDLRERLENLRKKPENIPQPISNTSRANLNKLLTDYTEMKKAILHVYWEEFQKDPVGLMSRVAQPASKKIDQNKLKPEMDEKGNLTTAGFACSQCGQPLFVYKLEQVSEKGKAYTNYFGRCNVAEHEKLILLAQLKPEKDSDEAVTYSLGKFGQRALDFYSIHVTKESTHPVKPLAQIAGNRYASGPVGKALSDACMGTIASFLSKYQDIIIEHQKVVKGNQKRLESLRELAGKENLEYPSVTLPPQPHTKEGVDAYNEVIARVRMWVNLNLWQKLKLSRDDAKPLLRLKGFPSFPLVERQANEVDWWDMVCNVKKLINEKKEDGKVFWQNLAGYKRQEALRPYLSSEEDRKKGKKFARYQLGDLLWHLEKKHGEDWGKVYDEAWERIDKKVEGLSKHIKLEEERRSEDAQSKAALTDWLRAKASFVIEGLKEADKDEFCRCELKLQKWYGDLRGKPFAIEAENSILDISGFSKQYNCAFIWQKDGVKKLNLYLIINYFKGGKLRFKKIKPEAFEANRFYTVINKKSGEIVPMEVNFNFDDPNLIILPLAFGKRQGREFIWNDLLSLETGSLKLANGRVIEKTLYNRRTRQDEPALFVALTFERREVLDSSNIKPMNLIGVDRGENIPAVIALTDPEGCPLSRFKDSLGNPTHILRIGESYKEKQRTIQAKKEVEQRRAGGYSRKYASKAKNLADDMVRNTARDLLYYAVTQDAMLIFENLSRGFGRQGKRTFMAERQYTRMEDWLTAKLAYEGLPSKTYLSKTLAQYTSKTCSNCGFTITSADYDRVLEKLKKTATGWMTTINGKELKVEGQITYYNRYKRQNVVKDLSVELDRLSEESVNNDISSWTKGRSGEALSLLKKRFSHRPVQEKFVCLNCEFETHADEQAALNIARSWLFLRSQEYKKYQTNKTTGNTDKRAFVETWQSFYRKKLKEVWKPAV

SEQ ID NO: 29946 - protein, 978 aa, synthetic construct
  REGION 1..978: note = engineered CasX variant
QEIKRINKIRRRLVKDSNTKKAGKTGPMKTLLVRVMTPDLRERLENLRKKPENIPQPISNTSRANLNKLLTDYTEMKKAILHVYWEEFQKDPVGLMSRVAQPASKKIDQNKLKPEMDEKGNLTTAGFACSQCGQPLFVYKLEQVSEKGKAYTNYFGRCNVAEHEKLILLAQLKPEKDSDEAVTYSLGKFGQRALDFYSIHVTKESTHPVKPLAQIAGNRYASGPVGKALSDACMGTIASFLSKYQDIIIEHQKVVKGNQKRLESLRELAGKENLEYPSVTLPPQPHTKEGVDAYNEVIARVRMWVNLNLWQKLKLSRDDAKPLLRLKGFPSFPLVERQANEVDWWDMVCNVKKLINEKKEDGKVFWQNLAGYKRQEALRPYLSSEEDRKKGKKFARYQLGDLLLHLYKKHGEDWGKVYDEAWERIDKKVEGLSKHIKLEEERRSEDAQSKAALTDWLRAKASFVIEGLKEADKDEFCRCELKLQKWYGDLRGKPFAIEAENSILDISGFSKQYNCAFIWQKDGVKKLNLYLIINYFKGGKLRFKKIKPEAFEANRFYTVINKKSGEIVPMEVNFNFDDPNLIILPLAFGKRQGREFIWNDLLSLETGSLKLANGRVIEKTLYNRRTRQDEPALFVALTFERREVLDSSNIKPMNLIGVDRGENIPAVIALTDPEGCPLSRFKDSLGNPTHILRIGESYKEKQRTIQAKKEVEQRRAGGYSRKYASKAKNLADDMVRNTARDLLYYAVTQDAMLIFENLSRGFGRQGKRTFMAERQYTRMEDWLTAKLAYEGLPSKTYLSKTLAQYTSKTCSNCGFTITSADYDRVLEKLKKTATGWMTTINGKELKVEGQITYYNRYKRQNVVKDLSVELDRLSEESVNNDISSWTKGRSGEALSLLKKRFSHRPVQEKFVCLNCEFETHADEQAALNIARSWLFLRSQEYKKYQTNKTTGNTDKRAFVETWQSFYRKKLKEVWKPAV

SEQ ID NO: 29947 - protein, 978 aa, synthetic construct
  REGION 1..978: note = engineered CasX variant
QEIKRINKIRRRLVKDSNTKKAGKTGPMKTLLVRVMTPDLRERLENLRKKPENIPQPISNTSRANLNKLLTDYTEMKKAILHVYWEEFQKDPVGLMSRVAQPASKKIDQNKLKPEMDEKGNLTTAGFACSQCGQPLFVYKLEQVSEKGKAYTNYFGRCNVAEHEKLILLAQLKPEKDSDEAVTYSLGKFGQRALDFYSIHVTKESTHPVKPLAQIAGNRYASGPVGKALSDACMGTIASFLSKYQDIIIEHQKVVKGNQKRLESLRELAGKENLEYPSVTLPPQPHTKEGVDAYNEVIARVRMWVNLNLWQKLKLSRDDAKPLLRLKGFPSFPLVERQANEVDWWDMVCNVKKLINEKKEDGKVFWQNLAGYKRQEALRPYLSSEEDRKKGKKFARYQLGDLLLHLEKKHPEDWGKVYDEAWERIDKKVEGLSKHIKLEEERRSEDAQSKAALTDWLRAKASFVIEGLKEADKDEFCRCELKLQKWYGDLRGKPFAIEAENSILDISGFSKQYNCAFIWQKDGVKKLNLYLIINYFKGGKLRFKKIKPEAFEANRFYTVINKKSGEIVPMEVNFNFDDPNLIILPLAFGKRQGREFIWNDLLSLETGSLKLANGRVIEKTLYNRRTRQDEPALFVALTFERREVLDSSNIKPMNLIGVDRGENIPAVIALTDPEGCPLSRFKDSLGNPTHILRIGESYKEKQRTIQAKKEVEQRRAGGYSRKYASKAKNLADDMVRNTARDLLYYAVTQDAMLIFENLSRGFGRQGKRTFMAERQYTRMEDWLTAKLAYEGLPSKTYLSKTLAQYTSKTCSNCGFTITSADYDRVLEKLKKTATGWMTTINGKELKVEGQITYYNRYKRQNVVKDLSVELDRLSEESVNNDISSWTKGRSGEALSLLKKRFSHRPVQEKFVCLNCEFETHADEQAALNIARSWLFLRSQEYKKYQTNKTTGNTDKRAFVETWQSFYRKKLKEVWKPAV

SEQ ID NO: 29948 - protein, 979 aa, synthetic construct
  REGION 1..979: note = engineered CasX variant
QEIKRINKIRRRLVKDSNTKKAGKTGPMKTLLVRVMTPDLRERLENLRKKPENIPQPISNTSRANLNKLLTDYTEMKKAILHVYWEEFQKDPVGLMSRVAQPASKKIDQNKLKPEMDEKGNLTTAGFACSQCGQPLFVYKLEQVSEKGKAYTNYFGRCNVAEHEKLILLAQLKPEKDSDEAVTYSLGKFGQRALDFYSIHVTKESTHPVKPLAQIAGNRYASGPVGKALSDACMGTIASFLSKYQDIIIEHQKVVKGNQKRLESLRELAGKENLEYPSVTLPPQPHTKEGVDAYNEVIARVRMWVNLNLWQKLKLSRDDAKPLLRLKGFPSFPLVERQANEVDWWDMVCNVKKLINEKKEDGKVFWQNLAGYKRQEALRPYLSSEEDRKKGKKFARYQLGDLLLHLEKKHGERDWGKVYDEAWERIDKKVEGLSKHIKLEEERRSEDAQSKAALTDWLRAKASFVIEGLKEADKDEFCRCELKLQKWYGDLRGKPFAIEAENSILDISGFSKQYNCAFIWQKDGVKKLNLYLIINYFKGGKLRFKKIKPEAFEANRFYTVINKKSGEIVPMEVNFNFDDPNLIILPLAFGKRQGREFIWNDLLSLETGSLKLANGRVIEKTLYNRRTRQDEPALFVALTFERREVLDSSNIKPMNLIGVDRGENIPAVIALTDPEGCPLSRFKDSLGNPTHILRIGESYKEKQRTIQAKKEVEQRRAGGYSRKYASKAKNLADDMVRNTARDLLYYAVTQDAMLIFENLSRGFGRQGKRTFMAERQYTRMEDWLTAKLAYEGLPSKTYLSKTLAQYTSKTCSNCGFTITSADYDRVLEKLKKTATGWMTTINGKELKVEGQITYYNRYKRQNVVKDLSVELDRLSEESVNNDISSWTKGRSGEALSLLKKRFSHRPVQEKFVCLNCEFETHADEQAALNIARSWLFLRSQEYKKYQTNKTTGNTDKRAFVETWQSFYRKKLKEVWKPAV

SEQ ID NO: 29949 - protein, 979 aa, synthetic construct
  REGION 1..979: note = engineered CasX variant
QEIKRINKIRRRLVKDSNTKKAGKTGPMKTLLVRVMTPDLRERLENLRKKPENIPQPISNTSRANLNKLLTDYTEMKKAILHVYWEEFQKDPVGLMSRVAQPASKKIDQNKLKPEMDEKGNLTTAGFACSQCGQPLFVYKLEQVSEKGKAYTNYFGRCNVAEHEKLILLAQLKPEKDSDEAVTYSLGKFGQRALDFYSIHVTKESTHPVKPLAQIAGNRYASGPVGKALSDACMGTIASFLSKYQDIIIEHQKVVKGNQKRLESLRELAGKENLEYPSVTLPPQPHTKEGVDAYNEVIARVRMWVNLNLWQKLKLSRDDAKPLLRLKGFPSFPLVERQANEVDWWDMVCNVKKLINEKKEDGKVFWQNLAGYKRQEALRPYLSSEEDRKKGKKFARYQLGDLLLHLEKKHGEYDWGKVYDEAWERIDKKVEGLSKHIKLEEERRSEDAQSKAALTDWLRAKASFVIEGLKEADKDEFCRCELKLQKWYGDLRGKPFAIEAENSILDISGFSKQYNCAFIWQKDGVKKLNLYLIINYFKGGKLRFKKIKPEAFEANRFYTVINKKSGEIVPMEVNFNFDDPNLIILPLAFGKRQGREFIWNDLLSLETGSLKLANGRVIEKTLYNRRTRQDEPALFVALTFERREVLDSSNIKPMNLIGVDRGENIPAVIALTDPEGCPLSRFKDSLGNPTHILRIGESYKEKQRTIQAKKEVEQRRAGGYSRKYASKAKNLADDMVRNTARDLLYYAVTQDAMLIFENLSRGFGRQGKRTFMAERQYTRMEDWLTAKLAYEGLPSKTYLSKTLAQYTSKTCSNCGFTITSADYDRVLEKLKKTATGWMTTINGKELKVEGQITYYNRYKRQNVVKDLSVELDRLSEESVNNDISSWTKGRSGEALSLLKKRFSHRPVQEKFVCLNCEFETHADEQAALNIARSWLFLRSQEYKKYQTNKTTGNTDKRAFVETWQSFYRKKLKEVWKPAV

SEQ ID NO: 29950 - protein, 978 aa, synthetic construct
  REGION 1..978: note = engineered CasX variant
QEIKRINKIRRRLVKDSNTKKAGKTGPMKTLLVRVMTPDLRERLENLRKKPENIPQPISNTSRANLNKLLTDYTEMKKAILHVYWEEFQKDPVGLMSRVAQPASKKIDQNKLKPEMDEKGNLTTAGFACSQCGQPLFVYKLEQVSEKGKAYTNYFGRCNVAEHEKLILLAQLKPEKDSDEAVTYSLGKFGQRALDFYSIHVTKESTHPVKPLAQIAGNRYASGPVGKALSDACMGTIASFLSKYQDIIIEHQKVVKGNQKRLESLRELAGKENLEYPSVTLPPQPHTKEGVDAYNEVIARVRMWVNLNLWQKLKLSRDDAKPLLRLKGFPSFPLVERQANEVDWWDMVCNVKKLINEKKEDGKVFWQNLAGYKRQEALRPYLSSEEDRKKGKKFARYQLGDLLLHLEKKHGEDWGDVYDEAWERIDKKVEGLSKHIKLEEERRSEDAQSKAALTDWLRAKASFVIEGLKEADKDEFCRCELKLQKWYGDLRGKPFAIEAENSILDISGFSKQYNCAFIWQKDGVKKLNLYLIINYFKGGKLRFKKIKPEAFEANRFYTVINKKSGEIVPMEVNFNFDDPNLIILPLAFGKRQGREFIWNDLLSLETGSLKLANGRVIEKTLYNRRTRQDEPALFVALTFERREVLDSSNIKPMNLIGVDRGENIPAVIALTDPEGCPLSRFKDSLGNPTHILRIGESYKEKQRTIQAKKEVEQRRAGGYSRKYASKAKNLADDMVRNTARDLLYYAVTQDAMLIFENLSRGFGRQGKRTFMAERQYTRMEDWLTAKLAYEGLPSKTYLSKTLAQYTSKTCSNCGFTITSADYDRVLEKLKKTATGWMTTINGKELKVEGQITYYNRYKRQNVVKDLSVELDRLSEESVNNDISSWTKGRSGEALSLLKKRFSHRPVQEKFVCLNCEFETHADEQAALNIARSWLFLRSQEYKKYQTNKTTGNTDKRAFVETWQSFYRKKLKEVWKPAV

SEQ ID NO: 29951 - protein, 978 aa, synthetic construct
  REGION 1..978: note = engineered CasX variant
QEIKRINKIRRRLVKDSNTKKAGKTGPMKTLLVRVMTPDLRERLENLRKKPENIPQPISNTSRANLNKLLTDYTEMKKAILHVYWEEFQKDPVGLMSRVAQPASKKIDQNKLKPEMDEKGNLTTAGFACSQCGQPLFVYKLEQVSEKGKAYTNYFGRCNVAEHEKLILLAQLKPEKDSDEAVTYSLGKFGQRALDFYSIHVTKESTHPVKPLAQIAGNRYASGPVGKALSDACMGTIASFLSKYQDIIIEHQKVVKGNQKRLESLRELAGKENLEYPSVTLPPQPHTKEGVDAYNEVIARVRMWVNLNLWQKLKLSRDDAKPLLRLKGFPSFPLVERQANEVDWWDMVCNVKKLINEKKEDGKVFWQNLAGYKRQEALRPYLSSEEDRKKGKKFARYQLGDLLLHLEKKHGEDWGKVYGEAWERIDKKVEGLSKHIKLEEERRSEDAQSKAALTDWLRAKASFVIEGLKEADKDEFCRCELKLQKWYGDLRGKPFAIEAENSILDISGFSKQYNCAFIWQKDGVKKLNLYLIINYFKGGKLRFKKIKPEAFEANRFYTVINKKSGEIVPMEVNFNFDDPNLIILPLAFGKRQGREFIWNDLLSLETGSLKLANGRVIEKTLYNRRTRQDEPALFVALTFERREVLDSSNIKPMNLIGVDRGENIPAVIALTDPEGCPLSRFKDSLGNPTHILRIGESYKEKQRTIQAKKEVEQRRAGGYSRKYASKAKNLADDMVRNTARDLLYYAVTQDAMLIFENLSRGFGRQGKRTFMAERQYTRMEDWLTAKLAYEGLPSKTYLSKTLAQYTSKTCSNCGFTITSADYDRVLEKLKKTATGWMTTINGKELKVEGQITYYNRYKRQNVVKDLSVELDRLSEESVNNDISSWTKGRSGEALSLLKKRFSHRPVQEKFVCLNCEFETHADEQAALNIARSWLFLRSQEYKKYQTNKTTGNTDKRAFVETWQSFYRKKLKEVWKPAV

SEQ ID NO: 29952 - protein, 978 aa, synthetic construct
  REGION 1..978: note = engineered CasX variant
QEIKRINKIRRRLVKDSNTKKAGKTGPMKTLLVRVMTPDLRERLENLRKKPENIPQPISNTSRANLNKLLTDYTEMKKAILHVYWEEFQKDPVGLMSRVAQPASKKIDQNKLKPEMDEKGNLTTAGFACSQCGQPLFVYKLEQVSEKGKAYTNYFGRCNVAEHEKLILLAQLKPEKDSDEAVTYSLGKFGQRALDFYSIHVTKESTHPVKPLAQIAGNRYASGPVGKALSDACMGTIASFLSKYQDIIIEHQKVVKGNQKRLESLRELAGKENLEYPSVTLPPQPHTKEGVDAYNEVIARVRMWVNLNLWQKLKLSRDDAKPLLRLKGFPSFPLVERQANEVDWWDMVCNVKKLINEKKEDGKVFWQNLAGYKRQEALRPYLSSEEDRKKGKKFARYQLGDLLLHLEKKHGEDWGKVYDEAWERIDKKVEGLSKHIKLEEERRSEDAQSKAALTDWLRAKASFVIEGKKEADKDEFCRCELKLQKWYGDLRGKPFAIEAENSILDISGFSKQYNCAFIWQKDGVKKLNLYLIINYFKGGKLRFKKIKPEAFEANRFYTVINKKSGEIVPMEVNFNFDDPNLIILPLAFGKRQGREFIWNDLLSLETGSLKLANGRVIEKTLYNRRTRQDEPALFVALTFERREVLDSSNIKPMNLIGVDRGENIPAVIALTDPEGCPLSRFKDSLGNPTHILRIGESYKEKQRTIQAKKEVEQRRAGGYSRKYASKAKNLADDMVRNTARDLLYYAVTQDAMLIFENLSRGFGRQGKRTFMAERQYTRMEDWLTAKLAYEGLPSKTYLSKTLAQYTSKTCSNCGFTITSADYDRVLEKLKKTATGWMTTINGKELKVEGQITYYNRYKRQNVVKDLSVELDRLSEESVNNDISSWTKGRSGEALSLLKKRFSHRPVQEKFVCLNCEFETHADEQAALNIARSWLFLRSQEYKKYQTNKTTGNTDKRAFVETWQSFYRKKLKEVWKPAV

SEQ ID NO: 29953 - protein, 978 aa, synthetic construct
  REGION 1..978: note = engineered CasX variant
QEIKRINKIRRRLVKDSNTKKAGKTGPMKTLLVRVMTPDLRERLENLRKKPENIPQPISNTSRANLNKLLTDYTEMKKAILHVYWEEFQKDPVGLMSRVAQPASKKIDQNKLKPEMDEKGNLTTAGFACSQCGQPLFVYKLEQVSEKGKAYTNYFGRCNVAEHEKLILLAQLKPEKDSDEAVTYSLGKFGQRALDFYSIHVTKESTHPVKPLAQIAGNRYASGPVGKALSDACMGTIASFLSKYQDIIIEHQKVVKGNQKRLESLRELAGKENLEYPSVTLPPQPHTKEGVDAYNEVIARVRMWVNLNLWQKLKLSRDDAKPLLRLKGFPSFPLVERQANEVDWWDMVCNVKKLINEKKEDGKVFWQNLAGYKRQEALRPYLSSEEDRKKGKKFARYQLGDLLLHLEKKHGEDWGKVYDEAWERIDKKVEGLSKHIKLEEERRSEDAQSKAALTDWLRAKASFVIEGSKEADKDEFCRCELKLQKWYGDLRGKPFAIEAENSILDISGFSKQYNCAFIWQKDGVKKLNLYLIINYFKGGKLRFKKIKPEAFEANRFYTVINKKSGEIVPMEVNFNFDDPNLIILPLAFGKRQGREFIWNDLLSLETGSLKLANGRVIEKTLYNRRTRQDEPALFVALTFERREVLDSSNIKPMNLIGVDRGENIPAVIALTDPEGCPLSRFKDSLGNPTHILRIGESYKEKQRTIQAKKEVEQRRAGGYSRKYASKAKNLADDMVRNTARDLLYYAVTQDAMLIFENLSRGFGRQGKRTFMAERQYTRMEDWLTAKLAYEGLPSKTYLSKTLAQYTSKTCSNCGFTITSADYDRVLEKLKKTATGWMTTINGKELKVEGQITYYNRYKRQNVVKDLSVELDRLSEESVNNDISSWTKGRSGEALSLLKKRFSHRPVQEKFVCLNCEFETHADEQAALNIARSWLFLRSQEYKKYQTNKTTGNTDKRAFVETWQSFYRKKLKEVWKPAV

SEQ ID NO: 29954 - protein, 979 aa, synthetic construct
  REGION 1..979: note = engineered CasX variant
QEIKRINKIRRRLVKDSNTKKAGKTGPMKTLLVRVMTPDLRERLENLRKKPENIPQPISNTSRANLNKLLTDYTEMKKAILHVYWEEFQKDPVGLMSRVAQPASKKIDQNKLKPEMDEKGNLTTAGFACSQCGQPLFVYKLEQVSEKGKAYTNYFGRCNVAEHEKLILLAQLKPEKDSDEAVTYSLGKFGQRALDFYSIHVTKESTHPVKPLAQIAGNRYASGPVGKALSDACMGTIASFLSKYQDIIIEHQKVVKGNQKRLESLRELAGKENLEYPSVTLPPQPHTKEGVDAYNEVIARVRMWVNLNLWQKLKLSRDDAKPLLRLKGFPSFPLVERQANEVDWWDMVCNVKKLINEKKEDGKVFWQNLAGYKRQEALRPYLSSEEDRKKGKKFARYQLGDLLLHLEKKHGEDWGKVYDEAWERIDKKVEGLSKHIKLEEERRSEDAQSKAALTDWLRAKASFVIEGLKEADDKDEFCRCELKLQKWYGDLRGKPFAIEAENSILDISGFSKQYNCAFIWQKDGVKKLNLYLIINYFKGGKLRFKKIKPEAFEANRFYTVINKKSGEIVPMEVNFNFDDPNLIILPLAFGKRQGREFIWNDLLSLETGSLKLANGRVIEKTLYNRRTRQDEPALFVALTFERREVLDSSNIKPMNLIGVDRGENIPAVIALTDPEGCPLSRFKDSLGNPTHILRIGESYKEKQRTIQAKKEVEQRRAGGYSRKYASKAKNLADDMVRNTARDLLYYAVTQDAMLIFENLSRGFGRQGKRTFMAERQYTRMEDWLTAKLAYEGLPSKTYLSKTLAQYTSKTCSNCGFTITSADYDRVLEKLKKTATGWMTTINGKELKVEGQITYYNRYKRQNVVKDLSVELDRLSEESVNNDISSWTKGRSGEALSLLKKRFSHRPVQEKFVCLNCEFETHADEQAALNIARSWLFLRSQEYKKYQTNKTTGNTDKRAFVETWQSFYRKKLKEVWKPAV

SEQ ID NO: 29955 - protein, 979 aa, synthetic construct
  REGION 1..979: note = engineered CasX variant
QEIKRINKIRRRLVKDSNTKKAGKTGPMKTLLVRVMTPDLRERLENLRKKPENIPQPISNTSRANLNKLLTDYTEMKKAILHVYWEEFQKDPVGLMSRVAQPASKKIDQNKLKPEMDEKGNLTTAGFACSQCGQPLFVYKLEQVSEKGKAYTNYFGRCNVAEHEKLILLAQLKPEKDSDEAVTYSLGKFGQRALDFYSIHVTKESTHPVKPLAQIAGNRYASGPVGKALSDACMGTIASFLSKYQDIIIEHQKVVKGNQKRLESLRELAGKENLEYPSVTLPPQPHTKEGVDAYNEVIARVRMWVNLNLWQKLKLSRDDAKPLLRLKGFPSFPLVERQANEVDWWDMVCNVKKLINEKKEDGKVFWQNLAGYKRQEALRPYLSSEEDRKKGKKFARYQLGDLLLHLEKKHGEDWGKVYDEAWERIDKKVEGLSKHIKLEEERRSEDAQSKAALTDWLRAKASFVIEGLKEADKDEFCRCELKLQKWYGDLRGKPFAIEAENSILDISGFSKQYNCAFIWQKDGVKKLNLYLIINYFKGGKLRFKKIKPEAFEANRFYTVINKKSGEIVPMEVNFNFDDPNLIILPLAFGKRQGREFIWNDLLSLETGSLKLANGRVIEKTLYNRRTRQDEPALFVALTFERREVLDSSNIKPMNLIGVDRGENIPAVIALTDPEGCPLSRFKDSLGNPTHILRIGESYKEKQRTIQAKKEVEQRRAGGYSRKYASKAKNLADDMVRNTARDLLYYAVTQDAMLIFENLSRGFGRQGKRTFMAERQYTRMEDWLTAKLAYEGLPSKTYLSKTLAQYTSKTCSNCGFTITSADYDRVLEKLKKTATGWMTTINGKELKVEGQITYYNRYKRQNVVKDLSVELDRLSEESVNNDISSWTKGRSGNEALSLLKKRFSHRPVQEKFVCLNCEFETHADEQAALNIARSWLFLRSQEYKKYQTNKTTGNTDKRAFVETWQSFYRKKLKEVWKPAV

SEQ ID NO: 29956 - protein, 978 aa, synthetic construct
  REGION 1..978: note = engineered CasX variant
QEIKRINKIRRRLVKDSNTKKAGKTGPMKTLLVRVMTPDLRERLENLRKKPENIPQPISNTSRANLNKLLTDYTEMKKAILHVYWEEFQKDPVGLMSRVAQPASKKIDQNKLKPEMDEKGNLTTAGFACSQCGQPLFVYKLEQVSEKGKAYTNYFGRCNVAEHEKLILLAQLKPEKDSDEAVTYSLGKFGQRALDFYSIHVTKESTHPVKPLAQIAGNRYASGPVGKALSDACMGTIASFLSKYQDIIIEHQKVVKGNQKRLESLRELAGKENLEYPSVTLPPQPHTKEGVDAYNEVIARVRMWVNLNLWQKLKLSRDDAKPLLRLKGFPSFPLVERQANEVDWWDMVCNVKKLINEKKEDGKVFWQNLAGYKRQEALRPYLSSEEDRQKGKKFARYQLGDLLLHLEKKHGEDWGKVYDEAWERIDKKVEGLSKHIKLEEERRSEDAQSKAALTDWLRAKASFVIEGLKEADKDEFCRCELKLQKWYGDLRGKPFAIEAENSILDISGFSKQYNCAFIWQKDGVKKLNLYLIINYFKGGKLRFKKIKPEAFEANRFYTVINKKSGEIVPMEVNFNFDDPNLIILPLAFGKRQGREFIWNDLLSLETGSLKLANGRVIEKTLYNRRTRQDEPALFVALTFERREVLDSSNIKPMNLIGVDRGENIPAVIALTDPEGCPLSRFKDSLGNPTHILRIGESYKEKQRTIQAKKEVEQRRAGGYSRKYASKAKNLADDMVRNTARDLLYYAVTQDAMLIFENLSRGFGRQGKRTFMAERQYTRMEDWLTAKLAYEGLPSKTYLSKTLAQYTSKTCSNCGFTITSADYDRVLEKLKKTATGWMTTINGKELKVEGQITYYNRYKRQNVVKDLSVELDRLSEESVNNDISSWTKGRSGEALSLLKKRFSHRPVQEKFVCLNCEFETHADEQAALNIARSWLFLRSQEYKKYQTNKTTGNTDKRAFVETWQSFYRKKLKEVWKPAV

SEQ ID NO: 29957 - protein, 978 aa, synthetic construct
  REGION 1..978: note = engineered CasX variant
QEIKRINKIRRRLVKDSNTKKAGKTGPMKTLLVRVMTPDLRERLENLRKKPENIPQPISNTSRANLNKLLTDYTEMKKAILHVYWEEFQKDPVGLMSRVAQPASKKIDQNKLKPEMDEKGNLTTAGFACSQCGQPLFVYKLEQVSEKGKAYTNYFGRCNVAEHEKLILLAQLKPEKDSDEAVTYSLGKFGQRALDFYSIHVTKESTHPVKPLAQIAGNRYASGPVGKALSDACMGTIASFLSKYQDIIIEHQKVVKGNQKRLESLRELAGKENLEYPSVTLPPQPHTKEGVDAYNEVIARVRMWVNLNLWQKLKLSRDDAKPLLRLKGFPSFPLVERQANEVDWWDMVCNVKKLINEKKEDGKVFWQNLAGYKRQEALRPYLSSEEDRKKGKKFARYQLGDLLLHLEKKHGEDWGKVYDEAWERIDKKVEGLSKHIKLEEERRSEDAQSKAALTDWLRAKASFVIEGLKEADKDEFCRCELKLQKWYGDLRGKPFAIEAENSILDISGFSKQYNCAFIWQKDGVKKLNLYLIINYFKGGKLRFKKIKPEAFEANRFYTVINKKSGEIVPMEVNFNFDDPNLIILPLAFGKRQGREFIWNDLLSLETGSLKLANGRVIEKTLYNRRTRQDEPALFVALTFERREVLDSSNIKPMNLIGVDRGENIPAVIALTDPEGCPLSRFKDSLGNPTHILRIGESYKEKQRTIQAKKEVEQRRAGGYSRKYASKAKNLADDMVRNTARDLLYYAVTQDAMLIFENLSRGFGRQGKRTFMAERQYTRMEDWLTAKLAYEGLPSQTYLSKTLAQYTSKTCSNCGFTITSADYDRVLEKLKKTATGWMTTINGKELKVEGQITYYNRYKRQNVVKDLSVELDRLSEESVNNDISSWTKGRSGEALSLLKKRFSHRPVQEKFVCLNCEFETHADEQAALNIARSWLFLRSQEYKKYQTNKTTGNTDKRAFVETWQSFYRKKLKEVWKPAV

SEQ ID NO: 29958 - protein, 978 aa, synthetic construct
  REGION 1..978: note = engineered CasX variant
QEIKRINKIRRRLVKDSNTKKAGKTGPMKTLLVRVMTPDLRERLENLRKKPENIPQPISNTSRANLNKLLTDYTEMKKAILHVYWEEFQKDPVGLMSRVAQPASKKIDQNKLKPEMDEKGNLTTAGFACSQCGQPLFVYKLEQVSEKGKAYTNYFGRCNVAEHEKLILLAQLKPEKDSDEAVTYSLGKFGQRALDFYSIHVTKESTHPVKPLAQIAGNRYASGPVGKALSDACMGTIASFLSKYQDIIIEHQKVVKGNQKRLESLRELAGKENLEYPSVTLPPQPHTKEGVDAYNEVIARVRMWVNLNLWQKLKLSRDDAKPLLRLKGFPSFPLVERQANEVDWWDMVCNVKKLINEKKEDGKVFWQNLAGYKRQEALRPYLSSEEDRKKGKKFARYQLGDLLLHLEKKHGEDWGKVYDEAWERIDKKVEGLSKHIKLEEERRSEDAQSKAALTDWLRAKASFVIEGLKEADKDEFCRCELKLQKWYGDLRGKPFAIEAENSILDISGFSKQYNCAFIWQKDGVKKLNLYLIINYFKGGKLRFKKIKPEAFEANRFYTVINKKSGEIVPMEVNFNFDDPNLIILPLAFGKRQGREFIWNDLLSLETGSLKLANGRVIEKTLYNRRTRQDEPALFVALTFERREVLDSSNIKPMNLIGVDRGENIPAVIALTDPEGCPLSRFKDSLGNPTHILRIGESYKEKQRTIQAKKEVEQRRAGGYSRKYASKAKNLADDMVRNTARDLLYYAVTQDAMLIFENLSRGFGRQGKRTFMAERQYTRMEDWLTAKLAYNGLPSKTYLSKTLAQYTSKTCSNCGFTITSADYDRVLEKLKKTATGWMTTINGKELKVEGQITYYNRYKRQNVVKDLSVELDRLSEESVNNDISSWTKGRSGEALSLLKKRFSHRPVQEKFVCLNCEFETHADEQAALNIARSWLFLRSQEYKKYQTNKTTGNTDKRAFVETWQSFYRKKLKEVWKPAV

SEQ ID NO: 29959 - protein, 978 aa, synthetic construct
  REGION 1..978: note = engineered CasX variant
QEIKRINKIRRRLVKDSNTKKAGKTGPMKTLLVRVMTPDLRERLENLRKKPENIPQPISNTSRANLNKLLTDYTEMKKAILHVYWEEFQKDPVGLMSRVAQPASKKIDQNKLKPEMDEKGNLTTAGFACSQCGQPLFVYKLEQVSEKGKAYTNYFGRCNVAEHEKLIQLAQLKPEKDSDEAVTYSLGKFGQRALDFYSIHVTKESTHPVKPLAQIAGNRYASGPVGKALSDACMGTIASFLSKYQDIIIEHQKVVKGNQKRLESLRELAGKENLEYPSVTLPPQPHTKEGVDAYNEVIARVRMWVNLNLWQKLKLSRDDAKPLLRLKGFPSFPLVERQANEVDWWDMVCNVKKLINEKKEDGKVFWQNLAGYKRQEALRPYLSSEEDRKKGKKFARYQLGDLLLHLEKKHGEDWGKVYDEAWERIDKKVEGLSKHIKLEEERRSEDAQSKAALTDWLRAKASFVIEGLKEADKDEFCRCELKLQKWYGDLRGKPFAIEAENSILDISGFSKQYNCAFIWQKDGVKKLNLYLIINYFKGGKLRFKKIKPEAFEANRFYTVINKKSGEIVPMEVNFNFDDPNLIILPLAFGKRQGREFIWNDLLSLETGSLKLANGRVIEKTLYNRRTRQDEPALFVALTFERREVLDSSNIKPMNLIGVDRGENIPAVIALTDPEGCPLSRFKDSLGNPTHILRIGESYKEKQRTIQAKKEVEQRRAGGYSRKYASKAKNLADDMVRNTARDLLYYAVTQDAMLIFENLSRGFGRQGKRTFMAERQYTRMEDWLTAKLAYEGLPSKTYLSKTLAQYTSKTCSNCGFTITSADYDRVLEKLKKTATGWMTTINGKELKVEGQITYYNRYKRQNVVKDLSVELDRLSEESVNNDISSWTKGRSGEALSLLKKRFSHRPVQEKFVCLNCEFETHADEQAALNIARSWLFLRSQEYKKYQTNKTTGNTDKRAFVETWQSFYRKKLKEVWKPAV

SEQ ID NO: 29960 - protein, 978 aa, synthetic construct
  REGION 1..978: note = engineered CasX variant
QEIKRINKIRRRLVKDSNTKKAGKTGPMKTLLVRVMTPDLRERLENLRKKPENIPQPISNTSRANLNKLLTDYTEMKKAILHVYWEEFQKDPVGLMSRVAQPASKKIDQNKLKPEMDEKGNLTTAGFACSQCGQPLFVYKLEQVSEKGKAYTNYFGRCNVAEHEKLILLAQLKPEKDSDEAVTYSLGKFGQRALDFYSIHVTKESTHPVKPLAQIAGNRYASGPVGKALSDACMGTIASFLSKYQDIIIEHQKVVKGNQKRLESLRELAGKENLEYPSVTLPPQPHTKEGVDAYNEVIARVRMWVNLNLWQKLKLSRDDAKPLLRLKGFPSFPLVERQANEVDWWDMVCNVKKLINEKKEDGKVFWQNLAIYKRQEALRPYLSSEEDRKKGKKFARYQLGDLLLHLEKKHGEDWGKVYDEAWERIDKKVEGLSKHIKLEEERRSEDAQSKAALTDWLRAKASFVIEGLKEADKDEFCRCELKLQKWYGDLRGKPFAIEAENSILDISGFSKQYNCAFIWQKDGVKKLNLYLIINYFKGGKLRFKKIKPEAFEANRFYTVINKKSGEIVPMEVNFNFDDPNLIILPLAFGKRQGREFIWNDLLSLETGSLKLANGRVIEKTLYNRRTRQDEPALFVALTFERREVLDSSNIKPMNLIGVDRGENIPAVIALTDPEGCPLSRFKDSLGNPTHILRIGESYKEKQRTIQAKKEVEQRRAGGYSRKYASKAKNLADDMVRNTARDLLYYAVTQDAMLIFENLSRGFGRQGKRTFMAERQYTRMEDWLTAKLAYEGLPSKTYLSKTLAQYTSKTCSNCGFTITSADYDRVLEKLKKTATGWMTTINGKELKVEGQITYYNRYKRQNVVKDLSVELDRLSEESVNNDISSWTKGRSGEALSLLKKRFSHRPVQEKFVCLNCEFETHADEQAALNIARSWLFLRSQEYKKYQTNKTTGNTDKRAFVETWQSFYRKKLKEVWKPAV

SEQ ID NO: 29961 - protein, 978 aa, synthetic construct
  REGION 1..978: note = engineered CasX variant
QEIKRINKIRRRLVKDSNTKKAGKTGPMKTLLVRVMTPDLRERLENLRKKPENIPQPISNTSRANLNKLLTDYTEMKKAILHVYWEEFQKDPVGLMSRVAQPASKKIDQNKLKPEMDEKGNLTTAGFACSQCGQPLFVYKLEQVSEKGKAYTNYFGRCNVAEHEKLILLAQLKPEKDSDEAVTYSLGKFGQRALDFYSIHVTKESTHPVKPLAQIAGNRYASGPVGKALSDACMGTIASFLSKYQDIIIEHQKVVKGNQKRLESLRELAGKENLEYPSVTLPPQPHTKEGVDAYNEVIARVRMWVNLNLWQKLKLSRDDAKPLLRLKGFPSFPLVERQANEVDWWDMVCNVKKLINEKKEDGKVFWQNLAGYKRQEALRPYLSSEEDREKGKKFARYQLGDLLLHLEKKHGEDWGKVYDEAWERIDKKVEGLSKHIKLEEERRSEDAQSKAALTDWLRAKASFVIEGLKEADKDEFCRCELKLQKWYGDLRGKPFAIEAENSILDISGFSKQYNCAFIWQKDGVKKLNLYLIINYFKGGKLRFKKIKPEAFEANRFYTVINKKSGEIVPMEVNFNFDDPNLIILPLAFGKRQGREFIWNDLLSLETGSLKLANGRVIEKTLYNRRTRQDEPALFVALTFERREVLDSSNIKPMNLIGVDRGENIPAVIALTDPEGCPLSRFKDSLGNPTHILRIGESYKEKQRTIQAKKEVEQRRAGGYSRKYASKAKNLADDMVRNTARDLLYYAVTQDAMLIFENLSRGFGRQGKRTFMAERQYTRMEDWLTAKLAYEGLPSKTYLSKTLAQYTSKTCSNCGFTITSADYDRVLEKLKKTATGWMTTINGKELKVEGQITYYNRYKRQNVVKDLSVELDRLSEESVNNDISSWTKGRSGEALSLLKKRFSHRPVQEKFVCLNCEFETHADEQAALNIARSWLFLRSQEYKKYQTNKTTGNTDKRAFVETWQSFYRKKLKEVWKPAV

SEQ ID NO: 29962 - protein, 978 aa, synthetic construct
  REGION 1..978: note = engineered CasX variant
QEIKRINKIRRRLVKDSNTKKAGKTGPMKTLLVRVMTPDLRERLENLRKKPENIPQPISNTSRANLNKLLTDYTEMKKAILHVYWEEFQKDPVGLMSRVAQPASKKIDQNKLKPEMDEKGNLTTAGFACSQCGQPLFVYKLEQVSEKGKAYTNYFGRCNVAEHEKLILLAQLKPEKDSDEAVTYSLGKFGQRALDFYSIHVTKESTHPVKPLAQIAGNRYASGPVGKALSDACMGTIASFLSKYQDIIIEHQKVVKGNQKRLESLRELAGKENLEYPSVTLPPQPHTKEGVDAYNEVIARVRMWVNLNLWQKLKLSRDDAKPLLRLKGFPSFPLVERQANEVDWWDMVCNVKKLINEKKEDGKVFWQNLAGYKRQEALRPYLSSEEDRKKGKKFARYQLGDLLLHLEKKHGEDWGKVYDEAWERIDKKVEGLSKHIKLEEERRSEDAQSKAALTDWLRAKASFVIEGLKEADKDEFCRCELKLQKWYGDLRGKPFAIEAENSILDISGFSKQYNCAFIWQKDGVKKLNLYLIINYFKGGKLRFKKIKPEAFEANRFYTVINKKSGEIVIMEVNFNFDDPNLIILPLAFGKRQGREFIWNDLLSLETGSLKLANGRVIEKTLYNRRTRQDEPALFVALTFERREVLDSSNIKPMNLIGVDRGENIPAVIALTDPEGCPLSRFKDSLGNPTHILRIGESYKEKQRTIQAKKEVEQRRAGGYSRKYASKAKNLADDMVRNTARDLLYYAVTQDAMLIFENLSRGFGRQGKRTFMAERQYTRMEDWLTAKLAYEGLPSKTYLSKTLAQYTSKTCSNCGFTITSADYDRVLEKLKKTATGWMTTINGKELKVEGQITYYNRYKRQNVVKDLSVELDRLSEESVNNDISSWTKGRSGEALSLLKKRFSHRPVQEKFVCLNCEFETHADEQAALNIARSWLFLRSQEYKKYQTNKTTGNTDKRAFVETWQSFYRKKLKEVWKPAV

SEQ ID NO: 29963 - protein, 979 aa, synthetic construct
  REGION 1..979: note = engineered CasX variant
QEIKRINKIRRRLVKDSNTKKAGKTGPMKTLLVRVMTPDLRERLENLRKKPENIPQPISNTSRANLNKLLTDYTEMKKAILHVYWEEFQKDPVGLMSRVAQPASKKIDQNKLKPEMDEKGNLTTAGFACSQCGQPLFVYKLEQVSEKGKAYTNYFGRCNVAEHEKLILLAQLKPEKDSDEAVTYSLGKFGQRALDFYSIHVTKESTHPVKPLAQIAGNRYASGPVGKALSGACMGTIASFLSKYQDIIIEHQKVVKGNQKRLESLRELAGKENLEYPSVTLPPQPHTKEGVDAYNEVIARVRMWVNLNLWQKLKLSRDDAKPLLRLKGFPSFPLVERQANEVDWWDMVCNVKKLINEKKEDGKVFWQNLAGYKRQEALRPYLSSEEDRKKGKKFARYQLGDLLLHLEKKHGEDWGKVYDEAWERIDKKVEGLSKHIKLEEERRSEDAQSKAALTDWLRAKASFVIEGLKEADKDEFCRCELKLQKWYGDLRGKPFAIEAENSILDISGFSKQYNCAFIWQKDGVKKLNLYLIINYFKGGKLRFKKIKPEAFEANRFYTVINKKSGEIVPMEVNFNFDDPNLIILPLAFGKRQGREFIWNDLLSLETGSLKLANGRVIEKTLYNRRTRQDEPALFVALTFERREVLDSSNIKPMNLIGVDRGENIPAVIALTDPEGCPLSRFKDSLGNPTHILRIGESYKEKQRTIQAKKEVEQRRAGGYSRKYASKAKNLADDMVRNTARDLLYYAVTQDAMLIFENLSRGFGRQGKRTFMAERQYTRMEDWLTAKLAYEGLPSKTYLSKTLAQYTSKTCSNCGFTITSADYDRVLEKLKKTATGWMTTINGKELKVEGQITYYNRYKRQNVVKDLSVELDRLSEESVNNDISSWTKGRSGEALSLLKKRFSHRPVQEKFVCLNCGFETHADEQAALNIARSWLFLRSQEYKKYQTNKTSTGNTDKRAFVETWQSFYRKKLKEVWKPAV

SEQ ID NO: 29964 - protein, 979 aa, synthetic construct
  REGION 1..979: note = engineered CasX variant
QEIKRINKIRRRLVKDSNTKKAGKTGPMKTLLVRVMTPDLRERLENLRKKPENIPQPISNTSRANLNKLLTDYTEMKKAILHVYWEEFQKDPVGLMSRVAQPASKKIDQNKLKPEMDEKGNLTTAGFACSQCGQPLFVYKLEQVSEKGKAYTNYFGRCNVAEHEKLILLAQLKPEKDSDEAVTYSLGKFGQRALDFYSIHVTKESTHPVKPLAQIAGNRYASGPVGKALSDACMGTIASFLSKYQDIIIEHQKVVKGNQKRLESLRELAGKENLEYPSVTLPPQPHTKEGVDAYNEVIARVRMWVNLNLWQKLKLSRDDAKPLLRLKNFPSFPLVERQANEVDWWDMVCNVKKLINEKKEDGKVFWQNLAGYKRQEALRPYLSSEEDRKKGKKFARYQLGDLLLHLEKKHGEDWGKVYDEAWERIDKKVEGLSKHIKLEEERRSEDAQSKAALTDWLRAKASFVIEGLKEADKDEFCRCELKLQKWYGDLRGKPFAIEAENSILDISGFSKQYNCAFIWQKDGVKKLNLYLIINYFKGGKLRFKKIKPEAFEANRFYTVINKKSGEIVPMEVNFNFDDPNLIILPLAFGKRQGREFIWNDLLSLETGSLKLANGRVIEKTLYNRRTRQDEPALFVALTFERREVLDSSNIKPMNLIGVDRGENIPAVIALTDPEGCPLSRFKDSLGNPTHILRIGESYKEKQRTIQAKKEVEQRRAGGYSRKYASKAKNLADDMVRNTARDLLYYAVTQDAMLIFENLSRGFGRQGKRTFMAERQYTRMEDWLTAKLAYEGLPSKTYLSKTLAQYTSKTCSNCGFTITSADYDRVLEKLKKTATGWMTTINGKELKVEGQITYYNRYKRQNVVKDLSVELDRLSEESVNNDISSWTKGRSGEALSLLKKRFSHRPVQEKFVCLNCGFETHADEQAALNIARSWLFLRSQEYKKYQTNKTSTGNTDKRAFVETWQSFYRKKLKEVWKPAV

SEQ ID NO: 29965 - protein, 979 aa, synthetic construct
  REGION 1..979: note = engineered CasX variant
QEIKRINKIRRRLVKDSNTKKAGKTGPMKTLLVRVMTPDLRERLENLRKKPENIPQPISNTSRANLNKLLTDYTEMKKAILHVYWEEFQKDPVGLMSRVAQPASKKIDQNKLKPEMDEKGNLTTAGFACSQCGQPLFVYKLEQVSEKGKAYTNYFGRCNVAEHEKLILLAQLKPEKDSDEAVTYSLGKFGQRALDFYSIHVTKESTHPVKPLAQIAGNRYASGPVGKALSDACMGTIASFLSKYQDIIIEHQKVVKGNQKRLESLRELAGKENLEYPSVTLPPQPHTKEGVDAYNEVIARVRMWVNLNLWQKLKLSRDDAKPLLRLKGFPSFPLVERQANEVDWWDMVCNVKKLINEKKEDGKVFWQNLAGYKRQEALRPYLSSEEDRKKGKKFARYQLGDLLNHLEKKHGEDWGKVYDEAWERIDKKVEGLSKHIKLEEERRSEDAQSKAALTDWLRAKASFVIEGLKEADKDEFCRCELKLQKWYGDLRGKPFAIEAENSILDISGFSKQYNCAFIWQKDGVKKLNLYLIINYFKGGKLRFKKIKPEAFEANRFYTVINKKSGEIVPMEVNFNFDDPNLIILPLAFGKRQGREFIWNDLLSLETGSLKLANGRVIEKTLYNRRTRQDEPALFVALTFERREVLDSSNIKPMNLIGVDRGENIPAVIALTDPEGCPLSRFKDSLGNPTHILRIGESYKEKQRTIQAKKEVEQRRAGGYSRKYASKAKNLADDMVRNTARDLLYYAVTQDAMLIFENLSRGFGRQGKRTFMAERQYTRMEDWLTAKLAYEGLPSKTYLSKTLAQYTSKTCSNCGFTITSADYDRVLEKLKKTATGWMTTINGKELKVEGQITYYNRYKRQNVVKDLSVELDRLSEESVNNDISSWTKGRSGEALSLLKKRFSHRPVQEKFVCLNCGFETHADEQAALNIARSWLFLRSQEYKKYQTNKTSTGNTDKRAFVETWQSFYRKKLKEVWKPAV

SEQ ID NO: 29966 - protein, 979 aa, synthetic construct
  REGION 1..979: note = engineered CasX variant
QEIKRINKIRRRLVKDSNTKKAGKTGPMKTLLVRVMTPDLRERLENLRKKPENIPQPISNTSRANLNKLLTDYTEMKKAILHVYWEEFQKDPVGLMSRVAQPASKKIDQNKLKPEMDEKGNLTTAGFACSQCGQPLFVYKLEQVSEKGKAYTNYFGRCNVAEHEKLILLAQLKPEKDSDEAVTYSLGKFGQRALDFYSIHVTKESTHPVKPLAQIAGNRYASGPVGKALSDACMGTIASFLSKYQDIIIEHQKVVKGNQKRLESLRELAGKENLEYPSVTLPPQPHTKEGVDAYNEVIARVRMWVNLNLWQKLKLSRDDAKPLLRLKGFPSFPLVERQANEVDWWDMVCNVKKLINEKKEDGKVFWQNLAGYKRQEALRPYLSSEEDRKKGKKFARYQLGDLLWHLEKKHGEDWGKVYDEAWERIDKKVEGLSKHIKLEEERRSEDAQSKAALTDWLRAKASFVIEGLKEADKDEFCRCELKLQKWYGDLRGKPFAIEAENSILDISGFSKQYNCAFIWQKDGVKKLNLYLIINYFKGGKLRFKKIKPEAFEANRFYTVINKKSGEIVPMEVNFNFDDPNLIILPLAFGKRQGREFIWNDLLSLETGSLKLANGRVIEKTLYNRRTRQDEPALFVALTFERREVLDSSNIKPMNLIGVDRGENIPAVIALTDPEGCPLSRFKDSLGNPTHILRIGESYKEKQRTIQAKKEVEQRRAGGYSRKYASKAKNLADDMVRNTARDLLYYAVTQDAMLIFENLSRGFGRQGKRTFMAERQYTRMEDWLTAKLAYEGLPSKTYLSKTLAQYTSKTCSNCGFTITSADYDRVLEKLKKTATGWMTTINGKELKVEGQITYYNRYKRQNVVKDLSVELDRLSEESVNNDISSWTKGRSGEALSLLKKRFSHRPVQEKFVCLNCGFETHADEQAALNIARSWLFLRSQEYKKYQTNKTSTGNTDKRAFVETWQSFYRKKLKEVWKPAV

SEQ ID NO: 29967 - protein, 979 aa, synthetic construct
  REGION 1..979: note = engineered CasX variant
QEIKRINKIRRRLVKDSNTKKAGKTGPMKTLLVRVMTPDLRERLENLRKKPENIPQPISNTSRANLNKLLTDYTEMKKAILHVYWEEFQKDPVGLMSRVAQPASKKIDQNKLKPEMDEKGNLTTAGFACSQCGQPLFVYKLEQVSEKGKAYTNYFGRCNVAEHEKLILLAQLKPEKDSDEAVTYSLGKFGQRALDFYSIHVTKESTHPVKPLAQIAGNRYASGPVGKALSDACMGTIASFLSKYQDIIIEHQKVVKGNQKRLESLRELAGKENLEYPSVTLPPQPHTKEGVDAYNEVIARVRMWVNLNLWQKLKLSRDDAKPLLRLKGFPSFPLVERQANEVDWWDMVCNVKKLINEKKEDGKVFWQNLAGYKRQEALRPYLSSEEDRKKGKKFARYQLGDLLLHLYKKHGEDWGKVYDEAWERIDKKVEGLSKHIKLEEERRSEDAQSKAALTDWLRAKASFVIEGLKEADKDEFCRCELKLQKWYGDLRGKPFAIEAENSILDISGFSKQYNCAFIWQKDGVKKLNLYLIINYFKGGKLRFKKIKPEAFEANRFYTVINKKSGEIVPMEVNFNFDDPNLIILPLAFGKRQGREFIWNDLLSLETGSLKLANGRVIEKTLYNRRTRQDEPALFVALTFERREVLDSSNIKPMNLIGVDRGENIPAVIALTDPEGCPLSRFKDSLGNPTHILRIGESYKEKQRTIQAKKEVEQRRAGGYSRKYASKAKNLADDMVRNTARDLLYYAVTQDAMLIFENLSRGFGRQGKRTFMAERQYTRMEDWLTAKLAYEGLPSKTYLSKTLAQYTSKTCSNCGFTITSADYDRVLEKLKKTATGWMTTINGKELKVEGQITYYNRYKRQNVVKDLSVELDRLSEESVNNDISSWTKGRSGEALSLLKKRFSHRPVQEKFVCLNCGFETHADEQAALNIARSWLFLRSQEYKKYQTNKTSTGNTDKRAFVETWQSFYRKKLKEVWKPAV

SEQ ID NO: 29968 - protein, 979 aa, synthetic construct
  REGION 1..979: note = engineered CasX variant
QEIKRINKIRRRLVKDSNTKKAGKTGPMKTLLVRVMTPDLRERLENLRKKPENIPQPISNTSRANLNKLLTDYTEMKKAILHVYWEEFQKDPVGLMSRVAQPASKKIDQNKLKPEMDEKGNLTTAGFACSQCGQPLFVYKLEQVSEKGKAYTNYFGRCNVAEHEKLILLAQLKPEKDSDEAVTYSLGKFGQRALDFYSIHVTKESTHPVKPLAQIAGNRYASGPVGKALSDACMGTIASFLSKYQDIIIEHQKVVKGNQKRLESLRELAGKENLEYPSVTLPPQPHTKEGVDAYNEVIARVRMWVNLNLWQKLKLSRDDAKPLLRLKGFPSFPLVERQANEVDWWDMVCNVKKLINEKKEDGKVFWQNLAGYKRQEALRPYLSSEEDRKKGKKFARYQLGDLLLHLEKKHPEDWGKVYDEAWERIDKKVEGLSKHIKLEEERRSEDAQSKAALTDWLRAKASFVIEGLKEADKDEFCRCELKLQKWYGDLRGKPFAIEAENSILDISGFSKQYNCAFIWQKDGVKKLNLYLIINYFKGGKLRFKKIKPEAFEANRFYTVINKKSGEIVPMEVNFNFDDPNLIILPLAFGKRQGREFIWNDLLSLETGSLKLANGRVIEKTLYNRRTRQDEPALFVALTFERREVLDSSNIKPMNLIGVDRGENIPAVIALTDPEGCPLSRFKDSLGNPTHILRIGESYKEKQRTIQAKKEVEQRRAGGYSRKYASKAKNLADDMVRNTARDLLYYAVTQDAMLIFENLSRGFGRQGKRTFMAERQYTRMEDWLTAKLAYEGLPSKTYLSKTLAQYTSKTCSNCGFTITSADYDRVLEKLKKTATGWMTTINGKELKVEGQITYYNRYKRQNVVKDLSVELDRLSEESVNNDISSWTKGRSGEALSLLKKRFSHRPVQEKFVCLNCGFETHADEQAALNIARSWLFLRSQEYKKYQTNKTSTGNTDKRAFVETWQSFYRKKLKEVWKPAV

SEQ ID NO: 29969 - protein, 980 aa, synthetic construct
  REGION 1..980: note = engineered CasX variant
QEIKRINKIRRRLVKDSNTKKAGKTGPMKTLLVRVMTPDLRERLENLRKKPENIPQPISNTSRANLNKLLTDYTEMKKAILHVYWEEFQKDPVGLMSRVAQPASKKIDQNKLKPEMDEKGNLTTAGFACSQCGQPLFVYKLEQVSEKGKAYTNYFGRCNVAEHEKLILLAQLKPEKDSDEAVTYSLGKFGQRALDFYSIHVTKESTHPVKPLAQIAGNRYASGPVGKALSDACMGTIASFLSKYQDIIIEHQKVVKGNQKRLESLRELAGKENLEYPSVTLPPQPHTKEGVDAYNEVIARVRMWVNLNLWQKLKLSRDDAKPLLRLKGFPSFPLVERQANEVDWWDMVCNVKKLINEKKEDGKVFWQNLAGYKRQEALRPYLSSEEDRKKGKKFARYQLGDLLLHLEKKHGERDWGKVYDEAWERIDKKVEGLSKHIKLEEERRSEDAQSKAALTDWLRAKASFVIEGLKEADKDEFCRCELKLQKWYGDLRGKPFAIEAENSILDISGFSKQYNCAFIWQKDGVKKLNLYLIINYFKGGKLRFKKIKPEAFEANRFYTVINKKSGEIVPMEVNFNFDDPNLIILPLAFGKRQGREFIWNDLLSLETGSLKLANGRVIEKTLYNRRTRQDEPALFVALTFERREVLDSSNIKPMNLIGVDRGENIPAVIALTDPEGCPLSRFKDSLGNPTHILRIGESYKEKQRTIQAKKEVEQRRAGGYSRKYASKAKNLADDMVRNTARDLLYYAVTQDAMLIFENLSRGFGRQGKRTFMAERQYTRMEDWLTAKLAYEGLPSKTYLSKTLAQYTSKTCSNCGFTITSADYDRVLEKLKKTATGWMTTINGKELKVEGQITYYNRYKRQNVVKDLSVELDRLSEESVNNDISSWTKGRSGEALSLLKKRFSHRPVQEKFVCLNCGFETHADEQAALNIARSWLFLRSQEYKKYQTNKTSTGNTDKRAFVETWQSFYRKKLKEVWKPAV

SEQ ID NO: 29970 - protein, 980 aa, synthetic construct
  REGION 1..980: note = engineered CasX variant
QEIKRINKIRRRLVKDSNTKKAGKTGPMKTLLVRVMTPDLRERLENLRKKPENIPQPISNTSRANLNKLLTDYTEMKKAILHVYWEEFQKDPVGLMSRVAQPASKKIDQNKLKPEMDEKGNLTTAGFACSQCGQPLFVYKLEQVSEKGKAYTNYFGRCNVAEHEKLILLAQLKPEKDSDEAVTYSLGKFGQRALDFYSIHVTKESTHPVKPLAQIAGNRYASGPVGKALSDACMGTIASFLSKYQDIIIEHQKVVKGNQKRLESLRELAGKENLEYPSVTLPPQPHTKEGVDAYNEVIARVRMWVNLNLWQKLKLSRDDAKPLLRLKGFPSFPLVERQANEVDWWDMVCNVKKLINEKKEDGKVFWQNLAGYKRQEALRPYLSSEEDRKKGKKFARYQLGDLLLHLEKKHGEYDWGKVYDEAWERIDKKVEGLSKHIKLEEERRSEDAQSKAALTDWLRAKASFVIEGLKEADKDEFCRCELKLQKWYGDLRGKPFAIEAENSILDISGFSKQYNCAFIWQKDGVKKLNLYLIINYFKGGKLRFKKIKPEAFEANRFYTVINKKSGEIVPMEVNFNFDDPNLIILPLAFGKRQGREFIWNDLLSLETGSLKLANGRVIEKTLYNRRTRQDEPALFVALTFERREVLDSSNIKPMNLIGVDRGENIPAVIALTDPEGCPLSRFKDSLGNPTHILRIGESYKEKQRTIQAKKEVEQRRAGGYSRKYASKAKNLADDMVRNTARDLLYYAVTQDAMLIFENLSRGFGRQGKRTFMAERQYTRMEDWLTAKLAYEGLPSKTYLSKTLAQYTSKTCSNCGFTITSADYDRVLEKLKKTATGWMTTINGKELKVEGQITYYNRYKRQNVVKDLSVELDRLSEESVNNDISSWTKGRSGEALSLLKKRFSHRPVQEKFVCLNCGFETHADEQAALNIARSWLFLRSQEYKKYQTNKTSTGNTDKRAFVETWQSFYRKKLKEVWKPAV

SEQ ID NO: 29971 - protein, 979 aa, synthetic construct
  REGION 1..979: note = engineered CasX variant
QEIKRINKIRRRLVKDSNTKKAGKTGPMKTLLVRVMTPDLRERLENLRKKPENIPQPISNTSRANLNKLLTDYTEMKKAILHVYWEEFQKDPVGLMSRVAQPASKKIDQNKLKPEMDEKGNLTTAGFACSQCGQPLFVYKLEQVSEKGKAYTNYFGRCNVAEHEKLILLAQLKPEKDSDEAVTYSLGKFGQRALDFYSIHVTKESTHPVKPLAQIAGNRYASGPVGKALSDACMGTIASFLSKYQDIIIEHQKVVKGNQKRLESLRELAGKENLEYPSVTLPPQPHTKEGVDAYNEVIARVRMWVNLNLWQKLKLSRDDAKPLLRLKGFPSFPLVERQANEVDWWDMVCNVKKLINEKKEDGKVFWQNLAGYKRQEALRPYLSSEEDRKKGKKFARYQLGDLLLHLEKKHGEDWGDVYDEAWERIDKKVEGLSKHIKLEEERRSEDAQSKAALTDWLRAKASFVIEGLKEADKDEFCRCELKLQKWYGDLRGKPFAIEAENSILDISGFSKQYNCAFIWQKDGVKKLNLYLIINYFKGGKLRFKKIKPEAFEANRFYTVINKKSGEIVPMEVNFNFDDPNLIILPLAFGKRQGREFIWNDLLSLETGSLKLANGRVIEKTLYNRRTRQDEPALFVALTFERREVLDSSNIKPMNLIGVDRGENIPAVIALTDPEGCPLSRFKDSLGNPTHILRIGESYKEKQRTIQAKKEVEQRRAGGYSRKYASKAKNLADDMVRNTARDLLYYAVTQDAMLIFENLSRGFGRQGKRTFMAERQYTRMEDWLTAKLAYEGLPSKTYLSKTLAQYTSKTCSNCGFTITSADYDRVLEKLKKTATGWMTTINGKELKVEGQITYYNRYKRQNVVKDLSVELDRLSEESVNNDISSWTKGRSGEALSLLKKRFSHRPVQEKFVCLNCGFETHADEQAALNIARSWLFLRSQEYKKYQTNKTSTGNTDKRAFVETWQSFYRKKLKEVWKPAV

SEQ ID NO: 29972 - protein, 979 aa, synthetic construct
  REGION 1..979: note = engineered CasX variant
QEIKRINKIRRRLVKDSNTKKAGKTGPMKTLLVRVMTPDLRERLENLRKKPENIPQPISNTSRANLNKLLTDYTEMKKAILHVYWEEFQKDPVGLMSRVAQPASKKIDQNKLKPEMDEKGNLTTAGFACSQCGQPLFVYKLEQVSEKGKAYTNYFGRCNVAEHEKLILLAQLKPEKDSDEAVTYSLGKFGQRALDFYSIHVTKESTHPVKPLAQIAGNRYASGPVGKALSDACMGTIASFLSKYQDIIIEHQKVVKGNQKRLESLRELAGKENLEYPSVTLPPQPHTKEGVDAYNEVIARVRMWVNLNLWQKLKLSRDDAKPLLRLKGFPSFPLVERQANEVDWWDMVCNVKKLINEKKEDGKVFWQNLAGYKRQEALRPYLSSEEDRKKGKKFARYQLGDLLLHLEKKHGEDWGKVYGEAWERIDKKVEGLSKHIKLEEERRSEDAQSKAALTDWLRAKASFVIEGLKEADKDEFCRCELKLQKWYGDLRGKPFAIEAENSILDISGFSKQYNCAFIWQKDGVKKLNLYLIINYFKGGKLRFKKIKPEAFEANRFYTVINKKSGEIVPMEVNFNFDDPNLIILPLAFGKRQGREFIWNDLLSLETGSLKLANGRVIEKTLYNRRTRQDEPALFVALTFERREVLDSSNIKPMNLIGVDRGENIPAVIALTDPEGCPLSRFKDSLGNPTHILRIGESYKEKQRTIQAKKEVEQRRAGGYSRKYASKAKNLADDMVRNTARDLLYYAVTQDAMLIFENLSRGFGRQGKRTFMAERQYTRMEDWLTAKLAYEGLPSKTYLSKTLAQYTSKTCSNCGFTITSADYDRVLEKLKKTATGWMTTINGKELKVEGQITYYNRYKRQNVVKDLSVELDRLSEESVNNDISSWTKGRSGEALSLLKKRFSHRPVQEKFVCLNCGFETHADEQAALNIARSWLFLRSQEYKKYQTNKTSTGNTDKRAFVETWQSFYRKKLKEVWKPAV

SEQ ID NO: 29973 - protein, 979 aa, synthetic construct
  REGION 1..979: note = engineered CasX variant
QEIKRINKIRRRLVKDSNTKKAGKTGPMKTLLVRVMTPDLRERLENLRKKPENIPQPISNTSRANLNKLLTDYTEMKKAILHVYWEEFQKDPVGLMSRVAQPASKKIDQNKLKPEMDEKGNLTTAGFACSQCGQPLFVYKLEQVSEKGKAYTNYFGRCNVAEHEKLILLAQLKPEKDSDEAVTYSLGKFGQRALDFYSIHVTKESTHPVKPLAQIAGNRYASGPVGKALSDACMGTIASFLSKYQDIIIEHQKVVKGNQKRLESLRELAGKENLEYPSVTLPPQPHTKEGVDAYNEVIARVRMWVNLNLWQKLKLSRDDAKPLLRLKGFPSFPLVERQANEVDWWDMVCNVKKLINEKKEDGKVFWQNLAGYKRQEALRPYLSSEEDRKKGKKFARYQLGDLLLHLEKKHGEDWGKVYDEAWERIDKKVEGLSKHIKLEEERRSEDAQSKAALTDWLRAKASFVIEGKKEADKDEFCRCELKLQKWYGDLRGKPFAIEAENSILDISGFSKQYNCAFIWQKDGVKKLNLYLIINYFKGGKLRFKKIKPEAFEANRFYTVINKKSGEIVPMEVNFNFDDPNLIILPLAFGKRQGREFIWNDLLSLETGSLKLANGRVIEKTLYNRRTRQDEPALFVALTFERREVLDSSNIKPMNLIGVDRGENIPAVIALTDPEGCPLSRFKDSLGNPTHILRIGESYKEKQRTIQAKKEVEQRRAGGYSRKYASKAKNLADDMVRNTARDLLYYAVTQDAMLIFENLSRGFGRQGKRTFMAERQYTRMEDWLTAKLAYEGLPSKTYLSKTLAQYTSKTCSNCGFTITSADYDRVLEKLKKTATGWMTTINGKELKVEGQITYYNRYKRQNVVKDLSVELDRLSEESVNNDISSWTKGRSGEALSLLKKRFSHRPVQEKFVCLNCGFETHADEQAALNIARSWLFLRSQEYKKYQTNKTSTGNTDKRAFVETWQSFYRKKLKEVWKPAV

SEQ ID NO: 29974 - protein, 979 aa, synthetic construct
  REGION 1..979: note = engineered CasX variant
QEIKRINKIRRRLVKDSNTKKAGKTGPMKTLLVRVMTPDLRERLENLRKKPENIPQPISNTSRANLNKLLTDYTEMKKAILHVYWEEFQKDPVGLMSRVAQPASKKIDQNKLKPEMDEKGNLTTAGFACSQCGQPLFVYKLEQVSEKGKAYTNYFGRCNVAEHEKLILLAQLKPEKDSDEAVTYSLGKFGQRALDFYSIHVTKESTHPVKPLAQIAGNRYASGPVGKALSDACMGTIASFLSKYQDIIIEHQKVVKGNQKRLESLRELAGKENLEYPSVTLPPQPHTKEGVDAYNEVIARVRMWVNLNLWQKLKLSRDDAKPLLRLKGFPSFPLVERQANEVDWWDMVCNVKKLINEKKEDGKVFWQNLAGYKRQEALRPYLSSEEDRKKGKKFARYQLGDLLLHLEKKHGEDWGKVYDEAWERIDKKVEGLSKHIKLEEERRSEDAQSKAALTDWLRAKASFVIEGSKEADKDEFCRCELKLQKWYGDLRGKPFAIEAENSILDISGFSKQYNCAFIWQKDGVKKLNLYLIINYFKGGKLRFKKIKPEAFEANRFYTVINKKSGEIVPMEVNFNFDDPNLIILPLAFGKRQGREFIWNDLLSLETGSLKLANGRVIEKTLYNRRTRQDEPALFVALTFERREVLDSSNIKPMNLIGVDRGENIPAVIALTDPEGCPLSRFKDSLGNPTHILRIGESYKEKQRTIQAKKEVEQRRAGGYSRKYASKAKNLADDMVRNTARDLLYYAVTQDAMLIFENLSRGFGRQGKRTFMAERQYTRMEDWLTAKLAYEGLPSKTYLSKTLAQYTSKTCSNCGFTITSADYDRVLEKLKKTATGWMTTINGKELKVEGQITYYNRYKRQNVVKDLSVELDRLSEESVNNDISSWTKGRSGEALSLLKKRFSHRPVQEKFVCLNCGFETHADEQAALNIARSWLFLRSQEYKKYQTNKTSTGNTDKRAFVETWQSFYRKKLKEVWKPAV

SEQ ID NO: 29975 - protein, 980 aa, synthetic construct
  REGION 1..980: note = engineered CasX variant
QEIKRINKIRRRLVKDSNTKKAGKTGPMKTLLVRVMTPDLRERLENLRKKPENIPQPISNTSRANLNKLLTDYTEMKKAILHVYWEEFQKDPVGLMSRVAQPASKKIDQNKLKPEMDEKGNLTTAGFACSQCGQPLFVYKLEQVSEKGKAYTNYFGRCNVAEHEKLILLAQLKPEKDSDEAVTYSLGKFGQRALDFYSIHVTKESTHPVKPLAQIAGNRYASGPVGKALSDACMGTIASFLSKYQDIIIEHQKVVKGNQKRLESLRELAGKENLEYPSVTLPPQPHTKEGVDAYNEVIARVRMWVNLNLWQKLKLSRDDAKPLLRLKGFPSFPLVERQANEVDWWDMVCNVKKLINEKKEDGKVFWQNLAGYKRQEALRPYLSSEEDRKKGKKFARYQLGDLLLHLEKKHGEDWGKVYDEAWERIDKKVEGLSKHIKLEEERRSEDAQSKAALTDWLRAKASFVIEGLKEADDKDEFCRCELKLQKWYGDLRGKPFAIEAENSILDISGFSKQYNCAFIWQKDGVKKLNLYLIINYFKGGKLRFKKIKPEAFEANRFYTVINKKSGEIVPMEVNFNFDDPNLIILPLAFGKRQGREFIWNDLLSLETGSLKLANGRVIEKTLYNRRTRQDEPALFVALTFERREVLDSSNIKPMNLIGVDRGENIPAVIALTDPEGCPLSRFKDSLGNPTHILRIGESYKEKQRTIQAKKEVEQRRAGGYSRKYASKAKNLADDMVRNTARDLLYYAVTQDAMLIFENLSRGFGRQGKRTFMAERQYTRMEDWLTAKLAYEGLPSKTYLSKTLAQYTSKTCSNCGFTITSADYDRVLEKLKKTATGWMTTINGKELKVEGQITYYNRYKRQNVVKDLSVELDRLSEESVNNDISSWTKGRSGEALSLLKKRFSHRPVQEKFVCLNCGFETHADEQAALNIARSWLFLRSQEYKKYQTNKTSTGNTDKRAFVETWQSFYRKKLKEVWKPAV

SEQ ID NO: 29976 - protein, 980 aa, synthetic construct
  REGION 1..980: note = engineered CasX variant
QEIKRINKIRRRLVKDSNTKKAGKTGPMKTLLVRVMTPDLRERLENLRKKPENIPQPISNTSRANLNKLLTDYTEMKKAILHVYWEEFQKDPVGLMSRVAQPASKKIDQNKLKPEMDEKGNLTTAGFACSQCGQPLFVYKLEQVSEKGKAYTNYFGRCNVAEHEKLILLAQLKPEKDSDEAVTYSLGKFGQRALDFYSIHVTKESTHPVKPLAQIAGNRYASGPVGKALSDACMGTIASFLSKYQDIIIEHQKVVKGNQKRLESLRELAGKENLEYPSVTLPPQPHTKEGVDAYNEVIARVRMWVNLNLWQKLKLSRDDAKPLLRLKGFPSFPLVERQANEVDWWDMVCNVKKLINEKKEDGKVFWQNLAGYKRQEALRPYLSSEEDRKKGKKFARYQLGDLLLHLEKKHGEDWGKVYDEAWERIDKKVEGLSKHIKLEEERRSEDAQSKAALTDWLRAKASFVIEGLKEADKDEFCRCELKLQKWYGDLRGKPFAIEAENSILDISGFSKQYNCAFIWQKDGVKKLNLYLIINYFKGGKLRFKKIKPEAFEANRFYTVINKKSGEIVPMEVNFNFDDPNLIILPLAFGKRQGREFIWNDLLSLETGSLKLANGRVIEKTLYNRRTRQDEPALFVALTFERREVLDSSNIKPMNLIGVDRGENIPAVIALTDPEGCPLSRFKDSLGNPTHILRIGESYKEKQRTIQAKKEVEQRRAGGYSRKYASKAKNLADDMVRNTARDLLYYAVTQDAMLIFENLSRGFGRQGKRTFMAERQYTRMEDWLTAKLAYEGLPSKTYLSKTLAQYTSKTCSNCGFTITSADYDRVLEKLKKTATGWMTTINGKELKVEGQITYYNRYKRQNVVKDLSVELDRLSEESVNNDISSWTKGRSGNEALSLLKKRFSHRPVQEKFVCLNCGFETHADEQAALNIARSWLFLRSQEYKKYQTNKTSTGNTDKRAFVETWQSFYRKKLKEVWKPAV

SEQ ID NO: 29977 - protein, 979 aa, synthetic construct
  REGION 1..979: note = engineered CasX variant
QEIKRINKIRRRLVKDSNTKKAGKTGPMKTLLVRVMTPDLRERLENLRKKPENIPQPISNTSRANLNKLLTDYTEMKKAILHVYWEEFQKDPVGLMSRVAQPASKKIDQNKLKPEMDEKGNLTTAGFACSQCGQPLFVYKLEQVSEKGKAYTNYFGRCNVAEHEKLILLAQLKPEKDSDEAVTYSLGKFGQRALDFYSIHVTKESTHPVKPLAQIAGNRYASGPVGKALSDACMGTIASFLSKYQDIIIEHQKVVKGNQKRLESLRELAGKENLEYPSVTLPPQPHTKEGVDAYNEVIARVRMWVNLNLWQKLKLSRDDAKPLLRLKGFPSFPLVERQANEVDWWDMVCNVKKLINEKKEDGKVFWQNLAGYKRQEALRPYLSSEEDRQKGKKFARYQLGDLLLHLEKKHGEDWGKVYDEAWERIDKKVEGLSKHIKLEEERRSEDAQSKAALTDWLRAKASFVIEGLKEADKDEFCRCELKLQKWYGDLRGKPFAIEAENSILDISGFSKQYNCAFIWQKDGVKKLNLYLIINYFKGGKLRFKKIKPEAFEANRFYTVINKKSGEIVPMEVNFNFDDPNLIILPLAFGKRQGREFIWNDLLSLETGSLKLANGRVIEKTLYNRRTRQDEPALFVALTFERREVLDSSNIKPMNLIGVDRGENIPAVIALTDPEGCPLSRFKDSLGNPTHILRIGESYKEKQRTIQAKKEVEQRRAGGYSRKYASKAKNLADDMVRNTARDLLYYAVTQDAMLIFENLSRGFGRQGKRTFMAERQYTRMEDWLTAKLAYEGLPSKTYLSKTLAQYTSKTCSNCGFTITSADYDRVLEKLKKTATGWMTTINGKELKVEGQITYYNRYKRQNVVKDLSVELDRLSEESVNNDISSWTKGRSGEALSLLKKRFSHRPVQEKFVCLNCGFETHADEQAALNIARSWLFLRSQEYKKYQTNKTSTGNTDKRAFVETWQSFYRKKLKEVWKPAV

SEQ ID NO: 29978 - protein, 979 aa, synthetic construct
  REGION 1..979: note = engineered CasX variant
QEIKRINKIRRRLVKDSNTKKAGKTGPMKTLLVRVMTPDLRERLENLRKKPENIPQPISNTSRANLNKLLTDYTEMKKAILHVYWEEFQKDPVGLMSRVAQPASKKIDQNKLKPEMDEKGNLTTAGFACSQCGQPLFVYKLEQVSEKGKAYTNYFGRCNVAEHEKLILLAQLKPEKDSDEAVTYSLGKFGQRALDFYSIHVTKESTHPVKPLAQIAGNRYASGPVGKALSDACMGTIASFLSKYQDIIIEHQKVVKGNQKRLESLRELAGKENLEYPSVTLPPQPHTKEGVDAYNEVIARVRMWVNLNLWQKLKLSRDDAKPLLRLKGFPSFPLVERQANEVDWWDMVCNVKKLINEKKEDGKVFWQNLAGYKRQEALRPYLSSEEDRKKGKKFARYQLGDLLLHLEKKHGEDWGKVYDEAWERIDKKVEGLSKHIKLEEERRSEDAQSKAALTDWLRAKASFVIEGLKEADKDEFCRCELKLQKWYGDLRGKPFAIEAENSILDISGFSKQYNCAFIWQKDGVKKLNLYLIINYFKGGKLRFKKIKPEAFEANRFYTVINKKSGEIVPMEVNFNFDDPNLIILPLAFGKRQGREFIWNDLLSLETGSLKLANGRVIEKTLYNRRTRQDEPALFVALTFERREVLDSSNIKPMNLIGVDRGENIPAVIALTDPEGCPLSRFKDSLGNPTHILRIGESYKEKQRTIQAKKEVEQRRAGGYSRKYASKAKNLADDMVRNTARDLLYYAVTQDAMLIFENLSRGFGRQGKRTFMAERQYTRMEDWLTAKLAYEGLPSQTYLSKTLAQYTSKTCSNCGFTITSADYDRVLEKLKKTATGWMTTINGKELKVEGQITYYNRYKRQNVVKDLSVELDRLSEESVNNDISSWTKGRSGEALSLLKKRFSHRPVQEKFVCLNCGFETHADEQAALNIARSWLFLRSQEYKKYQTNKTSTGNTDKRAFVETWQSFYRKKLKEVWKPAV

SEQ ID NO: 29979 - protein, 979 aa, synthetic construct
  REGION 1..979: note = engineered CasX variant
QEIKRINKIRRRLVKDSNTKKAGKTGPMKTLLVRVMTPDLRERLENLRKKPENIPQPISNTSRANLNKLLTDYTEMKKAILHVYWEEFQKDPVGLMSRVAQPASKKIDQNKLKPEMDEKGNLTTAGFACSQCGQPLFVYKLEQVSEKGKAYTNYFGRCNVAEHEKLILLAQLKPEKDSDEAVTYSLGKFGQRALDFYSIHVTKESTHPVKPLAQIAGNRYASGPVGKALSDACMGTIASFLSKYQDIIIEHQKVVKGNQKRLESLRELAGKENLEYPSVTLPPQPHTKEGVDAYNEVIARVRMWVNLNLWQKLKLSRDDAKPLLRLKGFPSFPLVERQANEVDWWDMVCNVKKLINEKKEDGKVFWQNLAGYKRQEALRPYLSSEEDRKKGKKFARYQLGDLLLHLEKKHGEDWGKVYDEAWERIDKKVEGLSKHIKLEEERRSEDAQSKAALTDWLRAKASFVIEGLKEADKDEFCRCELKLQKWYGDLRGKPFAIEAENSILDISGFSKQYNCAFIWQKDGVKKLNLYLIINYFKGGKLRFKKIKPEAFEANRFYTVINKKSGEIVPMEVNFNFDDPNLIILPLAFGKRQGREFIWNDLLSLETGSLKLANGRVIEKTLYNRRTRQDEPALFVALTFERREVLDSSNIKPMNLIGVDRGENIPAVIALTDPEGCPLSRFKDSLGNPTHILRIGESYKEKQRTIQAKKEVEQRRAGGYSRKYASKAKNLADDMVRNTARDLLYYAVTQDAMLIFENLSRGFGRQGKRTFMAERQYTRMEDWLTAKLAYNGLPSKTYLSKTLAQYTSKTCSNCGFTITSADYDRVLEKLKKTATGWMTTINGKELKVEGQITYYNRYKRQNVVKDLSVELDRLSEESVNNDISSWTKGRSGEALSLLKKRFSHRPVQEKFVCLNCGFETHADEQAALNIARSWLFLRSQEYKKYQTNKTSTGNTDKRAFVETWQSFYRKKLKEVWKPAV

SEQ ID NO: 29980 - protein, 979 aa, synthetic construct
  REGION 1..979: note = engineered CasX variant
QEIKRINKIRRRLVKDSNTKKAGKTGPMKTLLVRVMTPDLRERLENLRKKPENIPQPISNTSRANLNKLLTDYTEMKKAILHVYWEEFQKDPVGLMSRVAQPASKKIDQNKLKPEMDEKGNLTTAGFACSQCGQPLFVYKLEQVSEKGKAYTNYFGRCNVAEHEKLIQLAQLKPEKDSDEAVTYSLGKFGQRALDFYSIHVTKESTHPVKPLAQIAGNRYASGPVGKALSDACMGTIASFLSKYQDIIIEHQKVVKGNQKRLESLRELAGKENLEYPSVTLPPQPHTKEGVDAYNEVIARVRMWVNLNLWQKLKLSRDDAKPLLRLKGFPSFPLVERQANEVDWWDMVCNVKKLINEKKEDGKVFWQNLAGYKRQEALRPYLSSEEDRKKGKKFARYQLGDLLLHLEKKHGEDWGKVYDEAWERIDKKVEGLSKHIKLEEERRSEDAQSKAALTDWLRAKASFVIEGLKEADKDEFCRCELKLQKWYGDLRGKPFAIEAENSILDISGFSKQYNCAFIWQKDGVKKLNLYLIINYFKGGKLRFKKIKPEAFEANRFYTVINKKSGEIVPMEVNFNFDDPNLIILPLAFGKRQGREFIWNDLLSLETGSLKLANGRVIEKTLYNRRTRQDEPALFVALTFERREVLDSSNIKPMNLIGVDRGENIPAVIALTDPEGCPLSRFKDSLGNPTHILRIGESYKEKQRTIQAKKEVEQRRAGGYSRKYASKAKNLADDMVRNTARDLLYYAVTQDAMLIFENLSRGFGRQGKRTFMAERQYTRMEDWLTAKLAYEGLPSKTYLSKTLAQYTSKTCSNCGFTITSADYDRVLEKLKKTATGWMTTINGKELKVEGQITYYNRYKRQNVVKDLSVELDRLSEESVNNDISSWTKGRSGEALSLLKKRFSHRPVQEKFVCLNCGFETHADEQAALNIARSWLFLRSQEYKKYQTNKTSTGNTDKRAFVETWQSFYRKKLKEVWKPAV

SEQ ID NO: 29981 - protein, 979 aa, synthetic construct
  REGION 1..979: note = engineered CasX variant
QEIKRINKIRRRLVKDSNTKKAGKTGPMKTLLVRVMTPDLRERLENLRKKPENIPQPISNTSRANLNKLLTDYTEMKKAILHVYWEEFQKDPVGLMSRVAQPASKKIDQNKLKPEMDEKGNLTTAGFACSQCGQPLFVYKLEQVSEKGKAYTNYFGRCNVAEHEKLILLAQLKPEKDSDEAVTYSLGKFGQRALDFYSIHVTKESTHPVKPLAQIAGNRYASGPVGKALSDACMGTIASFLSKYQDIIIEHQKVVKGNQKRLESLRELAGKENLEYPSVTLPPQPHTKEGVDAYNEVIARVRMWVNLNLWQKLKLSRDDAKPLLRLKGFPSFPLVERQANEVDWWDMVCNVKKLINEKKEDGKVFWQNLAIYKRQEALRPYLSSEEDRKKGKKFARYQLGDLLLHLEKKHGEDWGKVYDEAWERIDKKVEGLSKHIKLEEERRSEDAQSKAALTDWLRAKASFVIEGLKEADKDEFCRCELKLQKWYGDLRGKPFAIEAENSILDISGFSKQYNCAFIWQKDGVKKLNLYLIINYFKGGKLRFKKIKPEAFEANRFYTVINKKSGEIVPMEVNFNFDDPNLIILPLAFGKRQGREFIWNDLLSLETGSLKLANGRVIEKTLYNRRTRQDEPALFVALTFERREVLDSSNIKPMNLIGVDRGENIPAVIALTDPEGCPLSRFKDSLGNPTHILRIGESYKEKQRTIQAKKEVEQRRAGGYSRKYASKAKNLADDMVRNTARDLLYYAVTQDAMLIFENLSRGFGRQGKRTFMAERQYTRMEDWLTAKLAYEGLPSKTYLSKTLAQYTSKTCSNCGFTITSADYDRVLEKLKKTATGWMTTINGKELKVEGQITYYNRYKRQNVVKDLSVELDRLSEESVNNDISSWTKGRSGEALSLLKKRFSHRPVQEKFVCLNCGFETHADEQAALNIARSWLFLRSQEYKKYQTNKTSTGNTDKRAFVETWQSFYRKKLKEVWKPAV

SEQ ID NO: 29982 - protein, 979 aa, synthetic construct
  REGION 1..979: note = engineered CasX variant
QEIKRINKIRRRLVKDSNTKKAGKTGPMKTLLVRVMTPDLRERLENLRKKPENIPQPISNTSRANLNKLLTDYTEMKKAILHVYWEEFQKDPVGLMSRVAQPASKKIDQNKLKPEMDEKGNLTTAGFACSQCGQPLFVYKLEQVSEKGKAYTNYFGRCNVAEHEKLILLAQLKPEKDSDEAVTYSLGKFGQRALDFYSIHVTKESTHPVKPLAQIAGNRYASGPVGKALSDACMGTIASFLSKYQDIIIEHQKVVKGNQKRLESLRELAGKENLEYPSVTLPPQPHTKEGVDAYNEVIARVRMWVNLNLWQKLKLSRDDAKPLLRLKGFPSFPLVERQANEVDWWDMVCNVKKLINEKKEDGKVFWQNLAGYKRQEALRPYLSSEEDREKGKKFARYQLGDLLLHLEKKHGEDWGKVYDEAWERIDKKVEGLSKHIKLEEERRSEDAQSKAALTDWLRAKASFVIEGLKEADKDEFCRCELKLQKWYGDLRGKPFAIEAENSILDISGFSKQYNCAFIWQKDGVKKLNLYLIINYFKGGKLRFKKIKPEAFEANRFYTVINKKSGEIVPMEVNFNFDDPNLIILPLAFGKRQGREFIWNDLLSLETGSLKLANGRVIEKTLYNRRTRQDEPALFVALTFERREVLDSSNIKPMNLIGVDRGENIPAVIALTDPEGCPLSRFKDSLGNPTHILRIGESYKEKQRTIQAKKEVEQRRAGGYSRKYASKAKNLADDMVRNTARDLLYYAVTQDAMLIFENLSRGFGRQGKRTFMAERQYTRMEDWLTAKLAYEGLPSKTYLSKTLAQYTSKTCSNCGFTITSADYDRVLEKLKKTATGWMTTINGKELKVEGQITYYNRYKRQNVVKDLSVELDRLSEESVNNDISSWTKGRSGEALSLLKKRFSHRPVQEKFVCLNCGFETHADEQAALNIARSWLFLRSQEYKKYQTNKTSTGNTDKRAFVETWQSFYRKKLKEVWKPAV

SEQ ID NO: 29983 - protein, 979 aa, synthetic construct
  REGION 1..979: note = engineered CasX variant
QEIKRINKIRRRLVKDSNTKKAGKTGPMKTLLVRVMTPDLRERLENLRKKPENIPQPISNTSRANLNKLLTDYTEMKKAILHVYWEEFQKDPVGLMSRVAQPASKKIDQNKLKPEMDEKGNLTTAGFACSQCGQPLFVYKLEQVSEKGKAYTNYFGRCNVAEHEKLILLAQLKPEKDSDEAVTYSLGKFGQRALDFYSIHVTKESTHPVKPLAQIAGNRYASGPVGKALSDACMGTIASFLSKYQDIIIEHQKVVKGNQKRLESLRELAGKENLEYPSVTLPPQPHTKEGVDAYNEVIARVRMWVNLNLWQKLKLSRDDAKPLLRLKGFPSFPLVERQANEVDWWDMVCNVKKLINEKKEDGKVFWQNLAGYKRQEALRPYLSSEEDRKKGKKFARYQLGDLLLHLEKKHGEDWGKVYDEAWERIDKKVEGLSKHIKLEEERRSEDAQSKAALTDWLRAKASFVIEGLKEADKDEFCRCELKLQKWYGDLRGKPFAIEAENSILDISGFSKQYNCAFIWQKDGVKKLNLYLIINYFKGGKLRFKKIKPEAFEANRFYTVINKKSGEIVIMEVNFNFDDPNLIILPLAFGKRQGREFIWNDLLSLETGSLKLANGRVIEKTLYNRRTRQDEPALFVALTFERREVLDSSNIKPMNLIGVDRGENIPAVIALTDPEGCPLSRFKDSLGNPTHILRIGESYKEKQRTIQAKKEVEQRRAGGYSRKYASKAKNLADDMVRNTARDLLYYAVTQDAMLIFENLSRGFGRQGKRTFMAERQYTRMEDWLTAKLAYEGLPSKTYLSKTLAQYTSKTCSNCGFTITSADYDRVLEKLKKTATGWMTTINGKELKVEGQITYYNRYKRQNVVKDLSVELDRLSEESVNNDISSWTKGRSGEALSLLKKRFSHRPVQEKFVCLNCGFETHADEQAALNIARSWLFLRSQEYKKYQTNKTSTGNTDKRAFVETWQSFYRKKLKEVWKPAV

SEQ ID NO: 29984 - protein, 979 aa, synthetic construct
  REGION 1..979: note = engineered CasX variant
QEIKRINKIRRRLVKDSNTKKAGKTGPMKTLLVRVMTPDLRERLENLRKKPENIPQPISNTSRANLNKLLTDYTEMKKAILHVYWEEFQKDPVGLMSRVAQPASKKIDQNKLKPEMDEKGNLTTAGFACSQCGQPLFVYKLEQVSEKGKAYTNYFGRCNVAEHEKLILLAQLKPEKDSDEAVTYSLGKFGQRALDFYSIHVTKESTHPVKPLAQIAGNRYASGPVGKALSGACMGTIASFLSKYQDIIIEHQKVVKGNQKRLESLRELAGKENLEYPSVTLPPQPHTKEGVDAYNEVIARVRMWVNLNLWQKLKLSRDDAKPLLRLKGFPSFPLVERQANEVDWWDMVCNVKKLINEKKEDGKVFWQNLAGYKRQEALRPYLSSEEDRKKGKKFARYQLGDLLLHLEKKHGEDWGKVYDEAWERIDKKVEGLSKHIKLEEERRSEDAQSKAALTDWLRAKASFVIEGLKEADKDEFCRCELKLQKWYGDLRGKPFAIEAENSILDISGFSKQYNCAFIWQKDGVKKLNLYLIINYFKGGKLRFKKIKPEAFEANRFYTVINKKSGEIVPMEVNFNFDDPNLIILPLAFGKRQGREFIWNDLLSLETGSLKLANGRVIEKTLYNRRTRQDEPALFVALTFERREVLDSSNIKPMNLIGVDRGENIPAVIALTDPEGCPLSRFKDSLGNPTHILRIGESYKEKQRTIQAKKEVEQRRAGGYSRKYASKAKNLADDMVRNTARDLLYYAVTQDAMLIFENLSRGFGRQGKRTFMAERQYTRMEDWLTAKLAYEGLPSKTYLSKTLAQYTSKTCSNCGFTITSADYDRVLEKLKKTATGWMTTINGKELKVEGQITYYNRYKRQNVVKDLSVELDRLSEESVNNDISSWTKGRSGEALSLLKKRFSHRPVQEKFVCLNCGFETHADEQAALNIARSWLFLRSQEYKKYQTNKTTGKNTDKRAFVETWQSFYRKKLKEVWKPAV

SEQ ID NO: 29985 - protein, 979 aa, synthetic construct
  REGION 1..979: note = engineered CasX variant
QEIKRINKIRRRLVKDSNTKKAGKTGPMKTLLVRVMTPDLRERLENLRKKPENIPQPISNTSRANLNKLLTDYTEMKKAILHVYWEEFQKDPVGLMSRVAQPASKKIDQNKLKPEMDEKGNLTTAGFACSQCGQPLFVYKLEQVSEKGKAYTNYFGRCNVAEHEKLILLAQLKPEKDSDEAVTYSLGKFGQRALDFYSIHVTKESTHPVKPLAQIAGNRYASGPVGKALSDACMGTIASFLSKYQDIIIEHQKVVKGNQKRLESLRELAGKENLEYPSVTLPPQPHTKEGVDAYNEVIARVRMWVNLNLWQKLKLSRDDAKPLLRLKNFPSFPLVERQANEVDWWDMVCNVKKLINEKKEDGKVFWQNLAGYKRQEALRPYLSSEEDRKKGKKFARYQLGDLLLHLEKKHGEDWGKVYDEAWERIDKKVEGLSKHIKLEEERRSEDAQSKAALTDWLRAKASFVIEGLKEADKDEFCRCELKLQKWYGDLRGKPFAIEAENSILDISGFSKQYNCAFIWQKDGVKKLNLYLIINYFKGGKLRFKKIKPEAFEANRFYTVINKKSGEIVPMEVNFNFDDPNLIILPLAFGKRQGREFIWNDLLSLETGSLKLANGRVIEKTLYNRRTRQDEPALFVALTFERREVLDSSNIKPMNLIGVDRGENIPAVIALTDPEGCPLSRFKDSLGNPTHILRIGESYKEKQRTIQAKKEVEQRRAGGYSRKYASKAKNLADDMVRNTARDLLYYAVTQDAMLIFENLSRGFGRQGKRTFMAERQYTRMEDWLTAKLAYEGLPSKTYLSKTLAQYTSKTCSNCGFTITSADYDRVLEKLKKTATGWMTTINGKELKVEGQITYYNRYKRQNVVKDLSVELDRLSEESVNNDISSWTKGRSGEALSLLKKRFSHRPVQEKFVCLNCGFETHADEQAALNIARSWLFLRSQEYKKYQTNKTTGKNTDKRAFVETWQSFYRKKLKEVWKPAV

SEQ ID NO: 29986 - protein, 979 aa, synthetic construct
  REGION 1..979: note = engineered CasX variant
QEIKRINKIRRRLVKDSNTKKAGKTGPMKTLLVRVMTPDLRERLENLRKKPENIPQPISNTSRANLNKLLTDYTEMKKAILHVYWEEFQKDPVGLMSRVAQPASKKIDQNKLKPEMDEKGNLTTAGFACSQCGQPLFVYKLEQVSEKGKAYTNYFGRCNVAEHEKLILLAQLKPEKDSDEAVTYSLGKFGQRALDFYSIHVTKESTHPVKPLAQIAGNRYASGPVGKALSDACMGTIASFLSKYQDIIIEHQKVVKGNQKRLESLRELAGKENLEYPSVTLPPQPHTKEGVDAYNEVIARVRMWVNLNLWQKLKLSRDDAKPLLRLKGFPSFPLVERQANEVDWWDMVCNVKKLINEKKEDGKVFWQNLAGYKRQEALRPYLSSEEDRKKGKKFARYQLGDLLNHLEKKHGEDWGKVYDEAWERIDKKVEGLSKHIKLEEERRSEDAQSKAALTDWLRAKASFVIEGLKEADKDEFCRCELKLQKWYGDLRGKPFAIEAENSILDISGFSKQYNCAFIWQKDGVKKLNLYLIINYFKGGKLRFKKIKPEAFEANRFYTVINKKSGEIVPMEVNFNFDDPNLIILPLAFGKRQGREFIWNDLLSLETGSLKLANGRVIEKTLYNRRTRQDEPALFVALTFERREVLDSSNIKPMNLIGVDRGENIPAVIALTDPEGCPLSRFKDSLGNPTHILRIGESYKEKQRTIQAKKEVEQRRAGGYSRKYASKAKNLADDMVRNTARDLLYYAVTQDAMLIFENLSRGFGRQGKRTFMAERQYTRMEDWLTAKLAYEGLPSKTYLSKTLAQYTSKTCSNCGFTITSADYDRVLEKLKKTATGWMTTINGKELKVEGQITYYNRYKRQNVVKDLSVELDRLSEESVNNDISSWTKGRSGEALSLLKKRFSHRPVQEKFVCLNCGFETHADEQAALNIARSWLFLRSQEYKKYQTNKTTGKNTDKRAFVETWQSFYRKKLKEVWKPAV

SEQ ID NO: 29987 - protein, 979 aa, synthetic construct
  REGION 1..979: note = engineered CasX variant
QEIKRINKIRRRLVKDSNTKKAGKTGPMKTLLVRVMTPDLRERLENLRKKPENIPQPISNTSRANLNKLLTDYTEMKKAILHVYWEEFQKDPVGLMSRVAQPASKKIDQNKLKPEMDEKGNLTTAGFACSQCGQPLFVYKLEQVSEKGKAYTNYFGRCNVAEHEKLILLAQLKPEKDSDEAVTYSLGKFGQRALDFYSIHVTKESTHPVKPLAQIAGNRYASGPVGKALSDACMGTIASFLSKYQDIIIEHQKVVKGNQKRLESLRELAGKENLEYPSVTLPPQPHTKEGVDAYNEVIARVRMWVNLNLWQKLKLSRDDAKPLLRLKGFPSFPLVERQANEVDWWDMVCNVKKLINEKKEDGKVFWQNLAGYKRQEALRPYLSSEEDRKKGKKFARYQLGDLLWHLEKKHGEDWGKVYDEAWERIDKKVEGLSKHIKLEEERRSEDAQSKAALTDWLRAKASFVIEGLKEADKDEFCRCELKLQKWYGDLRGKPFAIEAENSILDISGFSKQYNCAFIWQKDGVKKLNLYLIINYFKGGKLRFKKIKPEAFEANRFYTVINKKSGEIVPMEVNFNFDDPNLIILPLAFGKRQGREFIWNDLLSLETGSLKLANGRVIEKTLYNRRTRQDEPALFVALTFERREVLDSSNIKPMNLIGVDRGENIPAVIALTDPEGCPLSRFKDSLGNPTHILRIGESYKEKQRTIQAKKEVEQRRAGGYSRKYASKAKNLADDMVRNTARDLLYYAVTQDAMLIFENLSRGFGRQGKRTFMAERQYTRMEDWLTAKLAYEGLPSKTYLSKTLAQYTSKTCSNCGFTITSADYDRVLEKLKKTATGWMTTINGKELKVEGQITYYNRYKRQNVVKDLSVELDRLSEESVNNDISSWTKGRSGEALSLLKKRFSHRPVQEKFVCLNCGFETHADEQAALNIARSWLFLRSQEYKKYQTNKTTGKNTDKRAFVETWQSFYRKKLKEVWKPAV

SEQ ID NO: 29988 - protein, 979 aa, synthetic construct
  REGION 1..979: note = engineered CasX variant
QEIKRINKIRRRLVKDSNTKKAGKTGPMKTLLVRVMTPDLRERLENLRKKPENIPQPISNTSRANLNKLLTDYTEMKKAILHVYWEEFQKDPVGLMSRVAQPASKKIDQNKLKPEMDEKGNLTTAGFACSQCGQPLFVYKLEQVSEKGKAYTNYFGRCNVAEHEKLILLAQLKPEKDSDEAVTYSLGKFGQRALDFYSIHVTKESTHPVKPLAQIAGNRYASGPVGKALSDACMGTIASFLSKYQDIIIEHQKVVKGNQKRLESLRELAGKENLEYPSVTLPPQPHTKEGVDAYNEVIARVRMWVNLNLWQKLKLSRDDAKPLLRLKGFPSFPLVERQANEVDWWDMVCNVKKLINEKKEDGKVFWQNLAGYKRQEALRPYLSSEEDRKKGKKFARYQLGDLLLHLYKKHGEDWGKVYDEAWERIDKKVEGLSKHIKLEEERRSEDAQSKAALTDWLRAKASFVIEGLKEADKDEFCRCELKLQKWYGDLRGKPFAIEAENSILDISGFSKQYNCAFIWQKDGVKKLNLYLIINYFKGGKLRFKKIKPEAFEANRFYTVINKKSGEIVPMEVNFNFDDPNLIILPLAFGKRQGREFIWNDLLSLETGSLKLANGRVIEKTLYNRRTRQDEPALFVALTFERREVLDSSNIKPMNLIGVDRGENIPAVIALTDPEGCPLSRFKDSLGNPTHILRIGESYKEKQRTIQAKKEVEQRRAGGYSRKYASKAKNLADDMVRNTARDLLYYAVTQDAMLIFENLSRGFGRQGKRTFMAERQYTRMEDWLTAKLAYEGLPSKTYLSKTLAQYTSKTCSNCGFTITSADYDRVLEKLKKTATGWMTTINGKELKVEGQITYYNRYKRQNVVKDLSVELDRLSEESVNNDISSWTKGRSGEALSLLKKRFSHRPVQEKFVCLNCGFETHADEQAALNIARSWLFLRSQEYKKYQTNKTTGKNTDKRAFVETWQSFYRKKLKEVWKPAV

SEQ ID NO: 29989 - protein, 979 aa, synthetic construct
  REGION 1..979: note = engineered CasX variant
QEIKRINKIRRRLVKDSNTKKAGKTGPMKTLLVRVMTPDLRERLENLRKKPENIPQPISNTSRANLNKLLTDYTEMKKAILHVYWEEFQKDPVGLMSRVAQPASKKIDQNKLKPEMDEKGNLTTAGFACSQCGQPLFVYKLEQVSEKGKAYTNYFGRCNVAEHEKLILLAQLKPEKDSDEAVTYSLGKFGQRALDFYSIHVTKESTHPVKPLAQIAGNRYASGPVGKALSDACMGTIASFLSKYQDIIIEHQKVVKGNQKRLESLRELAGKENLEYPSVTLPPQPHTKEGVDAYNEVIARVRMWVNLNLWQKLKLSRDDAKPLLRLKGFPSFPLVERQANEVDWWDMVCNVKKLINEKKEDGKVFWQNLAGYKRQEALRPYLSSEEDRKKGKKFARYQLGDLLLHLEKKHPEDWGKVYDEAWERIDKKVEGLSKHIKLEEERRSEDAQSKAALTDWLRAKASFVIEGLKEADKDEFCRCELKLQKWYGDLRGKPFAIEAENSILDISGFSKQYNCAFIWQKDGVKKLNLYLIINYFKGGKLRFKKIKPEAFEANRFYTVINKKSGEIVPMEVNFNFDDPNLIILPLAFGKRQGREFIWNDLLSLETGSLKLANGRVIEKTLYNRRTRQDEPALFVALTFERREVLDSSNIKPMNLIGVDRGENIPAVIALTDPEGCPLSRFKDSLGNPTHILRIGESYKEKQRTIQAKKEVEQRRAGGYSRKYASKAKNLADDMVRNTARDLLYYAVTQDAMLIFENLSRGFGRQGKRTFMAERQYTRMEDWLTAKLAYEGLPSKTYLSKTLAQYTSKTCSNCGFTITSADYDRVLEKLKKTATGWMTTINGKELKVEGQITYYNRYKRQNVVKDLSVELDRLSEESVNNDISSWTKGRSGEALSLLKKRFSHRPVQEKFVCLNCGFETHADEQAALNIARSWLFLRSQEYKKYQTNKTTGKNTDKRAFVETWQSFYRKKLKEVWKPAV

SEQ ID NO: 29990 - protein, 980 aa, synthetic construct
  REGION 1..980: note = engineered CasX variant
QEIKRINKIRRRLVKDSNTKKAGKTGPMKTLLVRVMTPDLRERLENLRKKPENIPQPISNTSRANLNKLLTDYTEMKKAILHVYWEEFQKDPVGLMSRVAQPASKKIDQNKLKPEMDEKGNLTTAGFACSQCGQPLFVYKLEQVSEKGKAYTNYFGRCNVAEHEKLILLAQLKPEKDSDEAVTYSLGKFGQRALDFYSIHVTKESTHPVKPLAQIAGNRYASGPVGKALSDACMGTIASFLSKYQDIIIEHQKVVKGNQKRLESLRELAGKENLEYPSVTLPPQPHTKEGVDAYNEVIARVRMWVNLNLWQKLKLSRDDAKPLLRLKGFPSFPLVERQANEVDWWDMVCNVKKLINEKKEDGKVFWQNLAGYKRQEALRPYLSSEEDRKKGKKFARYQLGDLLLHLEKKHGERDWGKVYDEAWERIDKKVEGLSKHIKLEEERRSEDAQSKAALTDWLRAKASFVIEGLKEADKDEFCRCELKLQKWYGDLRGKPFAIEAENSILDISGFSKQYNCAFIWQKDGVKKLNLYLIINYFKGGKLRFKKIKPEAFEANRFYTVINKKSGEIVPMEVNFNFDDPNLIILPLAFGKRQGREFIWNDLLSLETGSLKLANGRVIEKTLYNRRTRQDEPALFVALTFERREVLDSSNIKPMNLIGVDRGENIPAVIALTDPEGCPLSRFKDSLGNPTHILRIGESYKEKQRTIQAKKEVEQRRAGGYSRKYASKAKNLADDMVRNTARDLLYYAVTQDAMLIFENLSRGFGRQGKRTFMAERQYTRMEDWLTAKLAYEGLPSKTYLSKTLAQYTSKTCSNCGFTITSADYDRVLEKLKKTATGWMTTINGKELKVEGQITYYNRYKRQNVVKDLSVELDRLSEESVNNDISSWTKGRSGEALSLLKKRFSHRPVQEKFVCLNCGFETHADEQAALNIARSWLFLRSQEYKKYQTNKTTGKNTDKRAFVETWQSFYRKKLKEVWKPAV

SEQ ID NO: 29991 - protein, 980 aa, synthetic construct
  REGION 1..980: note = engineered CasX variant
QEIKRINKIRRRLVKDSNTKKAGKTGPMKTLLVRVMTPDLRERLENLRKKPENIPQPISNTSRANLNKLLTDYTEMKKAILHVYWEEFQKDPVGLMSRVAQPASKKIDQNKLKPEMDEKGNLTTAGFACSQCGQPLFVYKLEQVSEKGKAYTNYFGRCNVAEHEKLILLAQLKPEKDSDEAVTYSLGKFGQRALDFYSIHVTKESTHPVKPLAQIAGNRYASGPVGKALSDACMGTIASFLSKYQDIIIEHQKVVKGNQKRLESLRELAGKENLEYPSVTLPPQPHTKEGVDAYNEVIARVRMWVNLNLWQKLKLSRDDAKPLLRLKGFPSFPLVERQANEVDWWDMVCNVKKLINEKKEDGKVFWQNLAGYKRQEALRPYLSSEEDRKKGKKFARYQLGDLLLHLEKKHGEYDWGKVYDEAWERIDKKVEGLSKHIKLEEERRSEDAQSKAALTDWLRAKASFVIEGLKEADKDEFCRCELKLQKWYGDLRGKPFAIEAENSILDISGFSKQYNCAFIWQKDGVKKLNLYLIINYFKGGKLRFKKIKPEAFEANRFYTVINKKSGEIVPMEVNFNFDDPNLIILPLAFGKRQGREFIWNDLLSLETGSLKLANGRVIEKTLYNRRTRQDEPALFVALTFERREVLDSSNIKPMNLIGVDRGENIPAVIALTDPEGCPLSRFKDSLGNPTHILRIGESYKEKQRTIQAKKEVEQRRAGGYSRKYASKAKNLADDMVRNTARDLLYYAVTQDAMLIFENLSRGFGRQGKRTFMAERQYTRMEDWLTAKLAYEGLPSKTYLSKTLAQYTSKTCSNCGFTITSADYDRVLEKLKKTATGWMTTINGKELKVEGQITYYNRYKRQNVVKDLSVELDRLSEESVNNDISSWTKGRSGEALSLLKKRFSHRPVQEKFVCLNCGFETHADEQAALNIARSWLFLRSQEYKKYQTNKTTGKNTDKRAFVETWQSFYRKKLKEVWKPAV

SEQ ID NO: 29992 - protein, 979 aa, synthetic construct
  REGION 1..979: note = engineered CasX variant
QEIKRINKIRRRLVKDSNTKKAGKTGPMKTLLVRVMTPDLRERLENLRKKPENIPQPISNTSRANLNKLLTDYTEMKKAILHVYWEEFQKDPVGLMSRVAQPASKKIDQNKLKPEMDEKGNLTTAGFACSQCGQPLFVYKLEQVSEKGKAYTNYFGRCNVAEHEKLILLAQLKPEKDSDEAVTYSLGKFGQRALDFYSIHVTKESTHPVKPLAQIAGNRYASGPVGKALSDACMGTIASFLSKYQDIIIEHQKVVKGNQKRLESLRELAGKENLEYPSVTLPPQPHTKEGVDAYNEVIARVRMWVNLNLWQKLKLSRDDAKPLLRLKGFPSFPLVERQANEVDWWDMVCNVKKLINEKKEDGKVFWQNLAGYKRQEALRPYLSSEEDRKKGKKFARYQLGDLLLHLEKKHGEDWGDVYDEAWERIDKKVEGLSKHIKLEEERRSEDAQSKAALTDWLRAKASFVIEGLKEADKDEFCRCELKLQKWYGDLRGKPFAIEAENSILDISGFSKQYNCAFIWQKDGVKKLNLYLIINYFKGGKLRFKKIKPEAFEANRFYTVINKKSGEIVPMEVNFNFDDPNLIILPLAFGKRQGREFIWNDLLSLETGSLKLANGRVIEKTLYNRRTRQDEPALFVALTFERREVLDSSNIKPMNLIGVDRGENIPAVIALTDPEGCPLSRFKDSLGNPTHILRIGESYKEKQRTIQAKKEVEQRRAGGYSRKYASKAKNLADDMVRNTARDLLYYAVTQDAMLIFENLSRGFGRQGKRTFMAERQYTRMEDWLTAKLAYEGLPSKTYLSKTLAQYTSKTCSNCGFTITSADYDRVLEKLKKTATGWMTTINGKELKVEGQITYYNRYKRQNVVKDLSVELDRLSEESVNNDISSWTKGRSGEALSLLKKRFSHRPVQEKFVCLNCGFETHADEQAALNIARSWLFLRSQEYKKYQTNKTTGKNTDKRAFVETWQSFYRKKLKEVWKPAV

SEQ ID NO: 29993 - protein, 979 aa, synthetic construct
  REGION 1..979: note = engineered CasX variant
QEIKRINKIRRRLVKDSNTKKAGKTGPMKTLLVRVMTPDLRERLENLRKKPENIPQPISNTSRANLNKLLTDYTEMKKAILHVYWEEFQKDPVGLMSRVAQPASKKIDQNKLKPEMDEKGNLTTAGFACSQCGQPLFVYKLEQVSEKGKAYTNYFGRCNVAEHEKLILLAQLKPEKDSDEAVTYSLGKFGQRALDFYSIHVTKESTHPVKPLAQIAGNRYASGPVGKALSDACMGTIASFLSKYQDIIIEHQKVVKGNQKRLESLRELAGKENLEYPSVTLPPQPHTKEGVDAYNEVIARVRMWVNLNLWQKLKLSRDDAKPLLRLKGFPSFPLVERQANEVDWWDMVCNVKKLINEKKEDGKVFWQNLAGYKRQEALRPYLSSEEDRKKGKKFARYQLGDLLLHLEKKHGEDWGKVYGEAWERIDKKVEGLSKHIKLEEERRSEDAQSKAALTDWLRAKASFVIEGLKEADKDEFCRCELKLQKWYGDLRGKPFAIEAENSILDISGFSKQYNCAFIWQKDGVKKLNLYLIINYFKGGKLRFKKIKPEAFEANRFYTVINKKSGEIVPMEVNFNFDDPNLIILPLAFGKRQGREFIWNDLLSLETGSLKLANGRVIEKTLYNRRTRQDEPALFVALTFERREVLDSSNIKPMNLIGVDRGENIPAVIALTDPEGCPLSRFKDSLGNPTHILRIGESYKEKQRTIQAKKEVEQRRAGGYSRKYASKAKNLADDMVRNTARDLLYYAVTQDAMLIFENLSRGFGRQGKRTFMAERQYTRMEDWLTAKLAYEGLPSKTYLSKTLAQYTSKTCSNCGFTITSADYDRVLEKLKKTATGWMTTINGKELKVEGQITYYNRYKRQNVVKDLSVELDRLSEESVNNDISSWTKGRSGEALSLLKKRFSHRPVQEKFVCLNCGFETHADEQAALNIARSWLFLRSQEYKKYQTNKTTGKNTDKRAFVETWQSFYRKKLKEVWKPAV

SEQ ID NO: 29994 - protein, 979 aa, synthetic construct
  REGION 1..979: note = engineered CasX variant
QEIKRINKIRRRLVKDSNTKKAGKTGPMKTLLVRVMTPDLRERLENLRKKPENIPQPISNTSRANLNKLLTDYTEMKKAILHVYWEEFQKDPVGLMSRVAQPASKKIDQNKLKPEMDEKGNLTTAGFACSQCGQPLFVYKLEQVSEKGKAYTNYFGRCNVAEHEKLILLAQLKPEKDSDEAVTYSLGKFGQRALDFYSIHVTKESTHPVKPLAQIAGNRYASGPVGKALSDACMGTIASFLSKYQDIIIEHQKVVKGNQKRLESLRELAGKENLEYPSVTLPPQPHTKEGVDAYNEVIARVRMWVNLNLWQKLKLSRDDAKPLLRLKGFPSFPLVERQANEVDWWDMVCNVKKLINEKKEDGKVFWQNLAGYKRQEALRPYLSSEEDRKKGKKFARYQLGDLLLHLEKKHGEDWGKVYDEAWERIDKKVEGLSKHIKLEEERRSEDAQSKAALTDWLRAKASFVIEGKKEADKDEFCRCELKLQKWYGDLRGKPFAIEAENSILDISGFSKQYNCAFIWQKDGVKKLNLYLIINYFKGGKLRFKKIKPEAFEANRFYTVINKKSGEIVPMEVNFNFDDPNLIILPLAFGKRQGREFIWNDLLSLETGSLKLANGRVIEKTLYNRRTRQDEPALFVALTFERREVLDSSNIKPMNLIGVDRGENIPAVIALTDPEGCPLSRFKDSLGNPTHILRIGESYKEKQRTIQAKKEVEQRRAGGYSRKYASKAKNLADDMVRNTARDLLYYAVTQDAMLIFENLSRGFGRQGKRTFMAERQYTRMEDWLTAKLAYEGLPSKTYLSKTLAQYTSKTCSNCGFTITSADYDRVLEKLKKTATGWMTTINGKELKVEGQITYYNRYKRQNVVKDLSVELDRLSEESVNNDISSWTKGRSGEALSLLKKRFSHRPVQEKFVCLNCGFETHADEQAALNIARSWLFLRSQEYKKYQTNKTTGKNTDKRAFVETWQSFYRKKLKEVWKPAV

SEQ ID NO: 29995 - protein, 979 aa, synthetic construct
  REGION 1..979: note = engineered CasX variant
QEIKRINKIRRRLVKDSNTKKAGKTGPMKTLLVRVMTPDLRERLENLRKKPENIPQPISNTSRANLNKLLTDYTEMKKAILHVYWEEFQKDPVGLMSRVAQPASKKIDQNKLKPEMDEKGNLTTAGFACSQCGQPLFVYKLEQVSEKGKAYTNYFGRCNVAEHEKLILLAQLKPEKDSDEAVTYSLGKFGQRALDFYSIHVTKESTHPVKPLAQIAGNRYASGPVGKALSDACMGTIASFLSKYQDIIIEHQKVVKGNQKRLESLRELAGKENLEYPSVTLPPQPHTKEGVDAYNEVIARVRMWVNLNLWQKLKLSRDDAKPLLRLKGFPSFPLVERQANEVDWWDMVCNVKKLINEKKEDGKVFWQNLAGYKRQEALRPYLSSEEDRKKGKKFARYQLGDLLLHLEKKHGEDWGKVYDEAWERIDKKVEGLSKHIKLEEERRSEDAQSKAALTDWLRAKASFVIEGSKEADKDEFCRCELKLQKWYGDLRGKPFAIEAENSILDISGFSKQYNCAFIWQKDGVKKLNLYLIINYFKGGKLRFKKIKPEAFEANRFYTVINKKSGEIVPMEVNFNFDDPNLIILPLAFGKRQGREFIWNDLLSLETGSLKLANGRVIEKTLYNRRTRQDEPALFVALTFERREVLDSSNIKPMNLIGVDRGENIPAVIALTDPEGCPLSRFKDSLGNPTHILRIGESYKEKQRTIQAKKEVEQRRAGGYSRKYASKAKNLADDMVRNTARDLLYYAVTQDAMLIFENLSRGFGRQGKRTFMAERQYTRMEDWLTAKLAYEGLPSKTYLSKTLAQYTSKTCSNCGFTITSADYDRVLEKLKKTATGWMTTINGKELKVEGQITYYNRYKRQNVVKDLSVELDRLSEESVNNDISSWTKGRSGEALSLLKKRFSHRPVQEKFVCLNCGFETHADEQAALNIARSWLFLRSQEYKKYQTNKTTGKNTDKRAFVETWQSFYRKKLKEVWKPAV

SEQ ID NO: 29996 - protein, 980 aa, synthetic construct
  REGION 1..980: note = engineered CasX variant
QEIKRINKIRRRLVKDSNTKKAGKTGPMKTLLVRVMTPDLRERLENLRKKPENIPQPISNTSRANLNKLLTDYTEMKKAILHVYWEEFQKDPVGLMSRVAQPASKKIDQNKLKPEMDEKGNLTTAGFACSQCGQPLFVYKLEQVSEKGKAYTNYFGRCNVAEHEKLILLAQLKPEKDSDEAVTYSLGKFGQRALDFYSIHVTKESTHPVKPLAQIAGNRYASGPVGKALSDACMGTIASFLSKYQDIIIEHQKVVKGNQKRLESLRELAGKENLEYPSVTLPPQPHTKEGVDAYNEVIARVRMWVNLNLWQKLKLSRDDAKPLLRLKGFPSFPLVERQANEVDWWDMVCNVKKLINEKKEDGKVFWQNLAGYKRQEALRPYLSSEEDRKKGKKFARYQLGDLLLHLEKKHGEDWGKVYDEAWERIDKKVEGLSKHIKLEEERRSEDAQSKAALTDWLRAKASFVIEGLKEADDKDEFCRCELKLQKWYGDLRGKPFAIEAENSILDISGFSKQYNCAFIWQKDGVKKLNLYLIINYFKGGKLRFKKIKPEAFEANRFYTVINKKSGEIVPMEVNFNFDDPNLIILPLAFGKRQGREFIWNDLLSLETGSLKLANGRVIEKTLYNRRTRQDEPALFVALTFERREVLDSSNIKPMNLIGVDRGENIPAVIALTDPEGCPLSRFKDSLGNPTHILRIGESYKEKQRTIQAKKEVEQRRAGGYSRKYASKAKNLADDMVRNTARDLLYYAVTQDAMLIFENLSRGFGRQGKRTFMAERQYTRMEDWLTAKLAYEGLPSKTYLSKTLAQYTSKTCSNCGFTITSADYDRVLEKLKKTATGWMTTINGKELKVEGQITYYNRYKRQNVVKDLSVELDRLSEESVNNDISSWTKGRSGEALSLLKKRFSHRPVQEKFVCLNCGFETHADEQAALNIARSWLFLRSQEYKKYQTNKTTGKNTDKRAFVETWQSFYRKKLKEVWKPAV

SEQ ID NO: 29997 - protein, 980 aa, synthetic construct
  REGION 1..980: note = engineered CasX variant
QEIKRINKIRRRLVKDSNTKKAGKTGPMKTLLVRVMTPDLRERLENLRKKPENIPQPISNTSRANLNKLLTDYTEMKKAILHVYWEEFQKDPVGLMSRVAQPASKKIDQNKLKPEMDEKGNLTTAGFACSQCGQPLFVYKLEQVSEKGKAYTNYFGRCNVAEHEKLILLAQLKPEKDSDEAVTYSLGKFGQRALDFYSIHVTKESTHPVKPLAQIAGNRYASGPVGKALSDACMGTIASFLSKYQDIIIEHQKVVKGNQKRLESLRELAGKENLEYPSVTLPPQPHTKEGVDAYNEVIARVRMWVNLNLWQKLKLSRDDAKPLLRLKGFPSFPLVERQANEVDWWDMVCNVKKLINEKKEDGKVFWQNLAGYKRQEALRPYLSSEEDRKKGKKFARYQLGDLLLHLEKKHGEDWGKVYDEAWERIDKKVEGLSKHIKLEEERRSEDAQSKAALTDWLRAKASFVIEGLKEADKDEFCRCELKLQKWYGDLRGKPFAIEAENSILDISGFSKQYNCAFIWQKDGVKKLNLYLIINYFKGGKLRFKKIKPEAFEANRFYTVINKKSGEIVPMEVNFNFDDPNLIILPLAFGKRQGREFIWNDLLSLETGSLKLANGRVIEKTLYNRRTRQDEPALFVALTFERREVLDSSNIKPMNLIGVDRGENIPAVIALTDPEGCPLSRFKDSLGNPTHILRIGESYKEKQRTIQAKKEVEQRRAGGYSRKYASKAKNLADDMVRNTARDLLYYAVTQDAMLIFENLSRGFGRQGKRTFMAERQYTRMEDWLTAKLAYEGLPSKTYLSKTLAQYTSKTCSNCGFTITSADYDRVLEKLKKTATGWMTTINGKELKVEGQITYYNRYKRQNVVKDLSVELDRLSEESVNNDISSWTKGRSGNEALSLLKKRFSHRPVQEKFVCLNCGFETHADEQAALNIARSWLFLRSQEYKKYQTNKTTGKNTDKRAFVETWQSFYRKKLKEVWKPAV

SEQ ID NO: 29998 - protein, 979 aa, synthetic construct
  REGION 1..979: note = engineered CasX variant
QEIKRINKIRRRLVKDSNTKKAGKTGPMKTLLVRVMTPDLRERLENLRKKPENIPQPISNTSRANLNKLLTDYTEMKKAILHVYWEEFQKDPVGLMSRVAQPASKKIDQNKLKPEMDEKGNLTTAGFACSQCGQPLFVYKLEQVSEKGKAYTNYFGRCNVAEHEKLILLAQLKPEKDSDEAVTYSLGKFGQRALDFYSIHVTKESTHPVKPLAQIAGNRYASGPVGKALSDACMGTIASFLSKYQDIIIEHQKVVKGNQKRLESLRELAGKENLEYPSVTLPPQPHTKEGVDAYNEVIARVRMWVNLNLWQKLKLSRDDAKPLLRLKGFPSFPLVERQANEVDWWDMVCNVKKLINEKKEDGKVFWQNLAGYKRQEALRPYLSSEEDRQKGKKFARYQLGDLLLHLEKKHGEDWGKVYDEAWERIDKKVEGLSKHIKLEEERRSEDAQSKAALTDWLRAKASFVIEGLKEADKDEFCRCELKLQKWYGDLRGKPFAIEAENSILDISGFSKQYNCAFIWQKDGVKKLNLYLIINYFKGGKLRFKKIKPEAFEANRFYTVINKKSGEIVPMEVNFNFDDPNLIILPLAFGKRQGREFIWNDLLSLETGSLKLANGRVIEKTLYNRRTRQDEPALFVALTFERREVLDSSNIKPMNLIGVDRGENIPAVIALTDPEGCPLSRFKDSLGNPTHILRIGESYKEKQRTIQAKKEVEQRRAGGYSRKYASKAKNLADDMVRNTARDLLYYAVTQDAMLIFENLSRGFGRQGKRTFMAERQYTRMEDWLTAKLAYEGLPSKTYLSKTLAQYTSKTCSNCGFTITSADYDRVLEKLKKTATGWMTTINGKELKVEGQITYYNRYKRQNVVKDLSVELDRLSEESVNNDISSWTKGRSGEALSLLKKRFSHRPVQEKFVCLNCGFETHADEQAALNIARSWLFLRSQEYKKYQTNKTTGKNTDKRAFVETWQSFYRKKLKEVWKPAV

SEQ ID NO: 29999 - protein, 979 aa, synthetic construct
  REGION 1..979: note = engineered CasX variant
QEIKRINKIRRRLVKDSNTKKAGKTGPMKTLLVRVMTPDLRERLENLRKKPENIPQPISNTSRANLNKLLTDYTEMKKAILHVYWEEFQKDPVGLMSRVAQPASKKIDQNKLKPEMDEKGNLTTAGFACSQCGQPLFVYKLEQVSEKGKAYTNYFGRCNVAEHEKLILLAQLKPEKDSDEAVTYSLGKFGQRALDFYSIHVTKESTHPVKPLAQIAGNRYASGPVGKALSDACMGTIASFLSKYQDIIIEHQKVVKGNQKRLESLRELAGKENLEYPSVTLPPQPHTKEGVDAYNEVIARVRMWVNLNLWQKLKLSRDDAKPLLRLKGFPSFPLVERQANEVDWWDMVCNVKKLINEKKEDGKVFWQNLAGYKRQEALRPYLSSEEDRKKGKKFARYQLGDLLLHLEKKHGEDWGKVYDEAWERIDKKVEGLSKHIKLEEERRSEDAQSKAALTDWLRAKASFVIEGLKEADKDEFCRCELKLQKWYGDLRGKPFAIEAENSILDISGFSKQYNCAFIWQKDGVKKLNLYLIINYFKGGKLRFKKIKPEAFEANRFYTVINKKSGEIVPMEVNFNFDDPNLIILPLAFGKRQGREFIWNDLLSLETGSLKLANGRVIEKTLYNRRTRQDEPALFVALTFERREVLDSSNIKPMNLIGVDRGENIPAVIALTDPEGCPLSRFKDSLGNPTHILRIGESYKEKQRTIQAKKEVEQRRAGGYSRKYASKAKNLADDMVRNTARDLLYYAVTQDAMLIFENLSRGFGRQGKRTFMAERQYTRMEDWLTAKLAYEGLPSQTYLSKTLAQYTSKTCSNCGFTITSADYDRVLEKLKKTATGWMTTINGKELKVEGQITYYNRYKRQNVVKDLSVELDRLSEESVNNDISSWTKGRSGEALSLLKKRFSHRPVQEKFVCLNCGFETHADEQAALNIARSWLFLRSQEYKKYQTNKTTGKNTDKRAFVETWQSFYRKKLKEVWKPAV

SEQ ID NO: 30000 - protein, 979 aa, synthetic construct
  REGION 1..979: note = engineered CasX variant
QEIKRINKIRRRLVKDSNTKKAGKTGPMKTLLVRVMTPDLRERLENLRKKPENIPQPISNTSRANLNKLLTDYTEMKKAILHVYWEEFQKDPVGLMSRVAQPASKKIDQNKLKPEMDEKGNLTTAGFACSQCGQPLFVYKLEQVSEKGKAYTNYFGRCNVAEHEKLILLAQLKPEKDSDEAVTYSLGKFGQRALDFYSIHVTKESTHPVKPLAQIAGNRYASGPVGKALSDACMGTIASFLSKYQDIIIEHQKVVKGNQKRLESLRELAGKENLEYPSVTLPPQPHTKEGVDAYNEVIARVRMWVNLNLWQKLKLSRDDAKPLLRLKGFPSFPLVERQANEVDWWDMVCNVKKLINEKKEDGKVFWQNLAGYKRQEALRPYLSSEEDRKKGKKFARYQLGDLLLHLEKKHGEDWGKVYDEAWERIDKKVEGLSKHIKLEEERRSEDAQSKAALTDWLRAKASFVIEGLKEADKDEFCRCELKLQKWYGDLRGKPFAIEAENSILDISGFSKQYNCAFIWQKDGVKKLNLYLIINYFKGGKLRFKKIKPEAFEANRFYTVINKKSGEIVPMEVNFNFDDPNLIILPLAFGKRQGREFIWNDLLSLETGSLKLANGRVIEKTLYNRRTRQDEPALFVALTFERREVLDSSNIKPMNLIGVDRGENIPAVIALTDPEGCPLSRFKDSLGNPTHILRIGESYKEKQRTIQAKKEVEQRRAGGYSRKYASKAKNLADDMVRNTARDLLYYAVTQDAMLIFENLSRGFGRQGKRTFMAERQYTRMEDWLTAKLAYNGLPSKTYLSKTLAQYTSKTCSNCGFTITSADYDRVLEKLKKTATGWMTTINGKELKVEGQITYYNRYKRQNVVKDLSVELDRLSEESVNNDISSWTKGRSGEALSLLKKRFSHRPVQEKFVCLNCGFETHADEQAALNIARSWLFLRSQEYKKYQTNKTTGKNTDKRAFVETWQSFYRKKLKEVWKPAV

SEQ ID NO: 30001 - protein, 979 aa, synthetic construct
  REGION 1..979: note = engineered CasX variant
QEIKRINKIRRRLVKDSNTKKAGKTGPMKTLLVRVMTPDLRERLENLRKKPENIPQPISNTSRANLNKLLTDYTEMKKAILHVYWEEFQKDPVGLMSRVAQPASKKIDQNKLKPEMDEKGNLTTAGFACSQCGQPLFVYKLEQVSEKGKAYTNYFGRCNVAEHEKLIQLAQLKPEKDSDEAVTYSLGKFGQRALDFYSIHVTKESTHPVKPLAQIAGNRYASGPVGKALSDACMGTIASFLSKYQDIIIEHQKVVKGNQKRLESLRELAGKENLEYPSVTLPPQPHTKEGVDAYNEVIARVRMWVNLNLWQKLKLSRDDAKPLLRLKGFPSFPLVERQANEVDWWDMVCNVKKLINEKKEDGKVFWQNLAGYKRQEALRPYLSSEEDRKKGKKFARYQLGDLLLHLEKKHGEDWGKVYDEAWERIDKKVEGLSKHIKLEEERRSEDAQSKAALTDWLRAKASFVIEGLKEADKDEFCRCELKLQKWYGDLRGKPFAIEAENSILDISGFSKQYNCAFIWQKDGVKKLNLYLIINYFKGGKLRFKKIKPEAFEANRFYTVINKKSGEIVPMEVNFNFDDPNLIILPLAFGKRQGREFIWNDLLSLETGSLKLANGRVIEKTLYNRRTRQDEPALFVALTFERREVLDSSNIKPMNLIGVDRGENIPAVIALTDPEGCPLSRFKDSLGNPTHILRIGESYKEKQRTIQAKKEVEQRRAGGYSRKYASKAKNLADDMVRNTARDLLYYAVTQDAMLIFENLSRGFGRQGKRTFMAERQYTRMEDWLTAKLAYEGLPSKTYLSKTLAQYTSKTCSNCGFTITSADYDRVLEKLKKTATGWMTTINGKELKVEGQITYYNRYKRQNVVKDLSVELDRLSEESVNNDISSWTKGRSGEALSLLKKRFSHRPVQEKFVCLNCGFETHADEQAALNIARSWLFLRSQEYKKYQTNKTTGKNTDKRAFVETWQSFYRKKLKEVWKPAV

SEQ ID NO: 30002 - protein, 979 aa, synthetic construct
  REGION 1..979: note = engineered CasX variant
QEIKRINKIRRRLVKDSNTKKAGKTGPMKTLLVRVMTPDLRERLENLRKKPENIPQPISNTSRANLNKLLTDYTEMKKAILHVYWEEFQKDPVGLMSRVAQPASKKIDQNKLKPEMDEKGNLTTAGFACSQCGQPLFVYKLEQVSEKGKAYTNYFGRCNVAEHEKLILLAQLKPEKDSDEAVTYSLGKFGQRALDFYSIHVTKESTHPVKPLAQIAGNRYASGPVGKALSDACMGTIASFLSKYQDIIIEHQKVVKGNQKRLESLRELAGKENLEYPSVTLPPQPHTKEGVDAYNEVIARVRMWVNLNLWQKLKLSRDDAKPLLRLKGFPSFPLVERQANEVDWWDMVCNVKKLINEKKEDGKVFWQNLAIYKRQEALRPYLSSEEDRKKGKKFARYQLGDLLLHLEKKHGEDWGKVYDEAWERIDKKVEGLSKHIKLEEERRSEDAQSKAALTDWLRAKASFVIEGLKEADKDEFCRCELKLQKWYGDLRGKPFAIEAENSILDISGFSKQYNCAFIWQKDGVKKLNLYLIINYFKGGKLRFKKIKPEAFEANRFYTVINKKSGEIVPMEVNFNFDDPNLIILPLAFGKRQGREFIWNDLLSLETGSLKLANGRVIEKTLYNRRTRQDEPALFVALTFERREVLDSSNIKPMNLIGVDRGENIPAVIALTDPEGCPLSRFKDSLGNPTHILRIGESYKEKQRTIQAKKEVEQRRAGGYSRKYASKAKNLADDMVRNTARDLLYYAVTQDAMLIFENLSRGFGRQGKRTFMAERQYTRMEDWLTAKLAYEGLPSKTYLSKTLAQYTSKTCSNCGFTITSADYDRVLEKLKKTATGWMTTINGKELKVEGQITYYNRYKRQNVVKDLSVELDRLSEESVNNDISSWTKGRSGEALSLLKKRFSHRPVQEKFVCLNCGFETHADEQAALNIARSWLFLRSQEYKKYQTNKTTGKNTDKRAFVETWQSFYRKKLKEVWKPAV

SEQ ID NO: 30003 - protein, 979 aa, synthetic construct
  REGION 1..979: note = engineered CasX variant
QEIKRINKIRRRLVKDSNTKKAGKTGPMKTLLVRVMTPDLRERLENLRKKPENIPQPISNTSRANLNKLLTDYTEMKKAILHVYWEEFQKDPVGLMSRVAQPASKKIDQNKLKPEMDEKGNLTTAGFACSQCGQPLFVYKLEQVSEKGKAYTNYFGRCNVAEHEKLILLAQLKPEKDSDEAVTYSLGKFGQRALDFYSIHVTKESTHPVKPLAQIAGNRYASGPVGKALSDACMGTIASFLSKYQDIIIEHQKVVKGNQKRLESLRELAGKENLEYPSVTLPPQPHTKEGVDAYNEVIARVRMWVNLNLWQKLKLSRDDAKPLLRLKGFPSFPLVERQANEVDWWDMVCNVKKLINEKKEDGKVFWQNLAGYKRQEALRPYLSSEEDREKGKKFARYQLGDLLLHLEKKHGEDWGKVYDEAWERIDKKVEGLSKHIKLEEERRSEDAQSKAALTDWLRAKASFVIEGLKEADKDEFCRCELKLQKWYGDLRGKPFAIEAENSILDISGFSKQYNCAFIWQKDGVKKLNLYLIINYFKGGKLRFKKIKPEAFEANRFYTVINKKSGEIVPMEVNFNFDDPNLIILPLAFGKRQGREFIWNDLLSLETGSLKLANGRVIEKTLYNRRTRQDEPALFVALTFERREVLDSSNIKPMNLIGVDRGENIPAVIALTDPEGCPLSRFKDSLGNPTHILRIGESYKEKQRTIQAKKEVEQRRAGGYSRKYASKAKNLADDMVRNTARDLLYYAVTQDAMLIFENLSRGFGRQGKRTFMAERQYTRMEDWLTAKLAYEGLPSKTYLSKTLAQYTSKTCSNCGFTITSADYDRVLEKLKKTATGWMTTINGKELKVEGQITYYNRYKRQNVVKDLSVELDRLSEESVNNDISSWTKGRSGEALSLLKKRFSHRPVQEKFVCLNCGFETHADEQAALNIARSWLFLRSQEYKKYQTNKTTGKNTDKRAFVETWQSFYRKKLKEVWKPAV

SEQ ID NO: 30004 - protein, 979 aa, synthetic construct
  REGION 1..979: note = engineered CasX variant
QEIKRINKIRRRLVKDSNTKKAGKTGPMKTLLVRVMTPDLRERLENLRKKPENIPQPISNTSRANLNKLLTDYTEMKKAILHVYWEEFQKDPVGLMSRVAQPASKKIDQNKLKPEMDEKGNLTTAGFACSQCGQPLFVYKLEQVSEKGKAYTNYFGRCNVAEHEKLILLAQLKPEKDSDEAVTYSLGKFGQRALDFYSIHVTKESTHPVKPLAQIAGNRYASGPVGKALSDACMGTIASFLSKYQDIIIEHQKVVKGNQKRLESLRELAGKENLEYPSVTLPPQPHTKEGVDAYNEVIARVRMWVNLNLWQKLKLSRDDAKPLLRLKGFPSFPLVERQANEVDWWDMVCNVKKLINEKKEDGKVFWQNLAGYKRQEALRPYLSSEEDRKKGKKFARYQLGDLLLHLEKKHGEDWGKVYDEAWERIDKKVEGLSKHIKLEEERRSEDAQSKAALTDWLRAKASFVIEGLKEADKDEFCRCELKLQKWYGDLRGKPFAIEAENSILDISGFSKQYNCAFIWQKDGVKKLNLYLIINYFKGGKLRFKKIKPEAFEANRFYTVINKKSGEIVIMEVNFNFDDPNLIILPLAFGKRQGREFIWNDLLSLETGSLKLANGRVIEKTLYNRRTRQDEPALFVALTFERREVLDSSNIKPMNLIGVDRGENIPAVIALTDPEGCPLSRFKDSLGNPTHILRIGESYKEKQRTIQAKKEVEQRRAGGYSRKYASKAKNLADDMVRNTARDLLYYAVTQDAMLIFENLSRGFGRQGKRTFMAERQYTRMEDWLTAKLAYEGLPSKTYLSKTLAQYTSKTCSNCGFTITSADYDRVLEKLKKTATGWMTTINGKELKVEGQITYYNRYKRQNVVKDLSVELDRLSEESVNNDISSWTKGRSGEALSLLKKRFSHRPVQEKFVCLNCGFETHADEQAALNIARSWLFLRSQEYKKYQTNKTTGKNTDKRAFVETWQSFYRKKLKEVWKPAV

SEQ ID NO: 30005 - protein, 978 aa, synthetic construct
  REGION 1..978: note = engineered CasX variant
QEIKRINKIRRRLVKDSNTKKAGKTGPMKTLLVRVMTPDLRERLENLRKKPENIPQPISNTSRANLNKLLTDYTEMKKAILHVYWEEFQKDPVGLMSRVAQPASKKIDQNKLKPEMDEKGNLTTAGFACSQCGQPLFVYKLEQVSEKGKAYTNYFGRCNVAEHEKLILLAQLKPEKDSDEAVTYSLGKFGQRALDFYSIHVTKESTHPVKPLAQIAGNRYASGPVGKALSGACMGTIASFLSKYQDIIIEHQKVVKGNQKRLESLRELAGKENLEYPSVTLPPQPHTKEGVDAYNEVIARVRMWVNLNLWQKLKLSRDDAKPLLRLKKFPSFPLVERQANEVDWWDMVCNVKKLINEKKEDGKVFWQNLAGYKRQEALRPYLSSEEDRKKGKKFARYQLGDLLLHLEKKHGEDWGKVYDEAWERIDKKVEGLSKHIKLEEERRSEDAQSKAALTDWLRAKASFVIEGLKEADKDEFCRCELKLQKWYGDLRGKPFAIEAENSILDISGFSKQYNCAFIWQKDGVKKLNLYLIINYFKGGKLRFKKIKPEAFEANRFYTVINKKSGEIVPMEVNFNFDDPNLIILPLAFGKRQGREFIWNDLLSLETGSLKLANGRVIEKTLYNRRTRQDEPALFVALTFERREVLDSSNIKPMNLIGVDRGENIPAVIALTDPEGCPLSRFKDSLGNPTHILRIGESYKEKQRTIQAKKEVEQRRAGGYSRKYASKAKNLADDMVRNTARDLLYYAVTQDAMLIFENLSRGFGRQGKRTFMAERQYTRMEDWLTAKLAYEGLPSKTYLSKTLAQYTSKTCSNCGFTITSADYDRVLEKLKKTATGWMTTINGKELKVEGQITYYNRYKRQNVVKDLSVELDRLSEESVNNDISSWTKGRSGEALSLLKKRFSHRPVQEKFVCLNCGFETHADEQAALNIARSWLFLRSQEYKKYQTNKTTGNTDKRAFVETWQSFYRKKLKEVWKPAV

SEQ ID NO: 30006 - protein, 979 aa, synthetic construct
  REGION 1..979: note = engineered CasX variant
QEIKRINKIRRRLVKDSNTKKAGKTGPMKTLLVRVMTPDLRERLENLRKKPENIPQPISNTSRANLNKLLTDYTEMKKAILHVYWEEFQKDPVGLMSRVAQPASKKIDQNKLKPEMDEKGNLTTAGFACSQCGQPLFVYKLEQVSEKGKAYTNYFGRCNVAEHEKLILLAQLKPEKDSDEAVTYSLGKFGQRALDFYSIHVTKESTHPVKPLAQIAGNRYASGPVGKALSDACMGTIASFLSKYQDIIIEHQKVVKGNQKRLESLRELAGKENLEYPSVTLPPQPHTKEGVDAYNEVIARVRMWVNLNLWQKLKLSRDDAKPLLRLKKNFPSFPLVERQANEVDWWDMVCNVKKLINEKKEDGKVFWQNLAGYKRQEALRPYLSSEEDRKKGKKFARYQLGDLLLHLEKKHGEDWGKVYDEAWERIDKKVEGLSKHIKLEEERRSEDAQSKAALTDWLRAKASFVIEGLKEADKDEFCRCELKLQKWYGDLRGKPFAIEAENSILDISGFSKQYNCAFIWQKDGVKKLNLYLIINYFKGGKLRFKKIKPEAFEANRFYTVINKKSGEIVPMEVNFNFDDPNLIILPLAFGKRQGREFIWNDLLSLETGSLKLANGRVIEKTLYNRRTRQDEPALFVALTFERREVLDSSNIKPMNLIGVDRGENIPAVIALTDPEGCPLSRFKDSLGNPTHILRIGESYKEKQRTIQAKKEVEQRRAGGYSRKYASKAKNLADDMVRNTARDLLYYAVTQDAMLIFENLSRGFGRQGKRTFMAERQYTRMEDWLTAKLAYEGLPSKTYLSKTLAQYTSKTCSNCGFTITSADYDRVLEKLKKTATGWMTTINGKELKVEGQITYYNRYKRQNVVKDLSVELDRLSEESVNNDISSWTKGRSGEALSLLKKRFSHRPVQEKFVCLNCGFETHADEQAALNIARSWLFLRSQEYKKYQTNKTTGNTDKRAFVETWQSFYRKKLKEVWKPAV

SEQ ID NO: 30007 - protein, 978 aa, synthetic construct
  REGION 1..978: note = engineered CasX variant
QEIKRINKIRRRLVKDSNTKKAGKTGPMKTLLVRVMTPDLRERLENLRKKPENIPQPISNTSRANLNKLLTDYTEMKKAILHVYWEEFQKDPVGLMSRVAQPASKKIDQNKLKPEMDEKGNLTTAGFACSQCGQPLFVYKLEQVSEKGKAYTNYFGRCNVAEHEKLILLAQLKPEKDSDEAVTYSLGKFGQRALDFYSIHVTKESTHPVKPLAQIAGNRYASGPVGKALSDACMGTIASFLSKYQDIIIEHQKVVKGNQKRLESLRELAGKENLEYPSVTLPPQPHTKEGVDAYNEVIARVRMWVNLNLWQKLKLSRDDAKPLLRLKKFPSFPLVERQANEVDWWDMVCNVKKLINEKKEDGKVFWQNLAGYKRQEALRPYLSSEEDRKKGKKFARYQLGDLLNHLEKKHGEDWGKVYDEAWERIDKKVEGLSKHIKLEEERRSEDAQSKAALTDWLRAKASFVIEGLKEADKDEFCRCELKLQKWYGDLRGKPFAIEAENSILDISGFSKQYNCAFIWQKDGVKKLNLYLIINYFKGGKLRFKKIKPEAFEANRFYTVINKKSGEIVPMEVNFNFDDPNLIILPLAFGKRQGREFIWNDLLSLETGSLKLANGRVIEKTLYNRRTRQDEPALFVALTFERREVLDSSNIKPMNLIGVDRGENIPAVIALTDPEGCPLSRFKDSLGNPTHILRIGESYKEKQRTIQAKKEVEQRRAGGYSRKYASKAKNLADDMVRNTARDLLYYAVTQDAMLIFENLSRGFGRQGKRTFMAERQYTRMEDWLTAKLAYEGLPSKTYLSKTLAQYTSKTCSNCGFTITSADYDRVLEKLKKTATGWMTTINGKELKVEGQITYYNRYKRQNVVKDLSVELDRLSEESVNNDISSWTKGRSGEALSLLKKRFSHRPVQEKFVCLNCGFETHADEQAALNIARSWLFLRSQEYKKYQTNKTTGNTDKRAFVETWQSFYRKKLKEVWKPAV

SEQ ID NO: 30008 - protein, 978 aa, synthetic construct
  REGION 1..978: note = engineered CasX variant
QEIKRINKIRRRLVKDSNTKKAGKTGPMKTLLVRVMTPDLRERLENLRKKPENIPQPISNTSRANLNKLLTDYTEMKKAILHVYWEEFQKDPVGLMSRVAQPASKKIDQNKLKPEMDEKGNLTTAGFACSQCGQPLFVYKLEQVSEKGKAYTNYFGRCNVAEHEKLILLAQLKPEKDSDEAVTYSLGKFGQRALDFYSIHVTKESTHPVKPLAQIAGNRYASGPVGKALSDACMGTIASFLSKYQDIIIEHQKVVKGNQKRLESLRELAGKENLEYPSVTLPPQPHTKEGVDAYNEVIARVRMWVNLNLWQKLKLSRDDAKPLLRLKKFPSFPLVERQANEVDWWDMVCNVKKLINEKKEDGKVFWQNLAGYKRQEALRPYLSSEEDRKKGKKFARYQLGDLLWHLEKKHGEDWGKVYDEAWERIDKKVEGLSKHIKLEEERRSEDAQSKAALTDWLRAKASFVIEGLKEADKDEFCRCELKLQKWYGDLRGKPFAIEAENSILDISGFSKQYNCAFIWQKDGVKKLNLYLIINYFKGGKLRFKKIKPEAFEANRFYTVINKKSGEIVPMEVNFNFDDPNLIILPLAFGKRQGREFIWNDLLSLETGSLKLANGRVIEKTLYNRRTRQDEPALFVALTFERREVLDSSNIKPMNLIGVDRGENIPAVIALTDPEGCPLSRFKDSLGNPTHILRIGESYKEKQRTIQAKKEVEQRRAGGYSRKYASKAKNLADDMVRNTARDLLYYAVTQDAMLIFENLSRGFGRQGKRTFMAERQYTRMEDWLTAKLAYEGLPSKTYLSKTLAQYTSKTCSNCGFTITSADYDRVLEKLKKTATGWMTTINGKELKVEGQITYYNRYKRQNVVKDLSVELDRLSEESVNNDISSWTKGRSGEALSLLKKRFSHRPVQEKFVCLNCGFETHADEQAALNIARSWLFLRSQEYKKYQTNKTTGNTDKRAFVETWQSFYRKKLKEVWKPAV

SEQ ID NO: 30009 - protein, 978 aa, synthetic construct
  REGION 1..978: note = engineered CasX variant
QEIKRINKIRRRLVKDSNTKKAGKTGPMKTLLVRVMTPDLRERLENLRKKPENIPQPISNTSRANLNKLLTDYTEMKKAILHVYWEEFQKDPVGLMSRVAQPASKKIDQNKLKPEMDEKGNLTTAGFACSQCGQPLFVYKLEQVSEKGKAYTNYFGRCNVAEHEKLILLAQLKPEKDSDEAVTYSLGKFGQRALDFYSIHVTKESTHPVKPLAQIAGNRYASGPVGKALSDACMGTIASFLSKYQDIIIEHQKVVKGNQKRLESLRELAGKENLEYPSVTLPPQPHTKEGVDAYNEVIARVRMWVNLNLWQKLKLSRDDAKPLLRLKKFPSFPLVERQANEVDWWDMVCNVKKLINEKKEDGKVFWQNLAGYKRQEALRPYLSSEEDRKKGKKFARYQLGDLLLHLYKKHGEDWGKVYDEAWERIDKKVEGLSKHIKLEEERRSEDAQSKAALTDWLRAKASFVIEGLKEADKDEFCRCELKLQKWYGDLRGKPFAIEAENSILDISGFSKQYNCAFIWQKDGVKKLNLYLIINYFKGGKLRFKKIKPEAFEANRFYTVINKKSGEIVPMEVNFNFDDPNLIILPLAFGKRQGREFIWNDLLSLETGSLKLANGRVIEKTLYNRRTRQDEPALFVALTFERREVLDSSNIKPMNLIGVDRGENIPAVIALTDPEGCPLSRFKDSLGNPTHILRIGESYKEKQRTIQAKKEVEQRRAGGYSRKYASKAKNLADDMVRNTARDLLYYAVTQDAMLIFENLSRGFGRQGKRTFMAERQYTRMEDWLTAKLAYEGLPSKTYLSKTLAQYTSKTCSNCGFTITSADYDRVLEKLKKTATGWMTTINGKELKVEGQITYYNRYKRQNVVKDLSVELDRLSEESVNNDISSWTKGRSGEALSLLKKRFSHRPVQEKFVCLNCGFETHADEQAALNIARSWLFLRSQEYKKYQTNKTTGNTDKRAFVETWQSFYRKKLKEVWKPAV

SEQ ID NO: 30010 - protein, 978 aa, synthetic construct
  REGION 1..978: note = engineered CasX variant
QEIKRINKIRRRLVKDSNTKKAGKTGPMKTLLVRVMTPDLRERLENLRKKPENIPQPISNTSRANLNKLLTDYTEMKKAILHVYWEEFQKDPVGLMSRVAQPASKKIDQNKLKPEMDEKGNLTTAGFACSQCGQPLFVYKLEQVSEKGKAYTNYFGRCNVAEHEKLILLAQLKPEKDSDEAVTYSLGKFGQRALDFYSIHVTKESTHPVKPLAQIAGNRYASGPVGKALSDACMGTIASFLSKYQDIIIEHQKVVKGNQKRLESLRELAGKENLEYPSVTLPPQPHTKEGVDAYNEVIARVRMWVNLNLWQKLKLSRDDAKPLLRLKKFPSFPLVERQANEVDWWDMVCNVKKLINEKKEDGKVFWQNLAGYKRQEALRPYLSSEEDRKKGKKFARYQLGDLLLHLEKKHPEDWGKVYDEAWERIDKKVEGLSKHIKLEEERRSEDAQSKAALTDWLRAKASFVIEGLKEADKDEFCRCELKLQKWYGDLRGKPFAIEAENSILDISGFSKQYNCAFIWQKDGVKKLNLYLIINYFKGGKLRFKKIKPEAFEANRFYTVINKKSGEIVPMEVNFNFDDPNLIILPLAFGKRQGREFIWNDLLSLETGSLKLANGRVIEKTLYNRRTRQDEPALFVALTFERREVLDSSNIKPMNLIGVDRGENIPAVIALTDPEGCPLSRFKDSLGNPTHILRIGESYKEKQRTIQAKKEVEQRRAGGYSRKYASKAKNLADDMVRNTARDLLYYAVTQDAMLIFENLSRGFGRQGKRTFMAERQYTRMEDWLTAKLAYEGLPSKTYLSKTLAQYTSKTCSNCGFTITSADYDRVLEKLKKTATGWMTTINGKELKVEGQITYYNRYKRQNVVKDLSVELDRLSEESVNNDISSWTKGRSGEALSLLKKRFSHRPVQEKFVCLNCGFETHADEQAALNIARSWLFLRSQEYKKYQTNKTTGNTDKRAFVETWQSFYRKKLKEVWKPAV

SEQ ID NO: 30011 - protein, 979 aa, synthetic construct
  REGION 1..979: note = engineered CasX variant
QEIKRINKIRRRLVKDSNTKKAGKTGPMKTLLVRVMTPDLRERLENLRKKPENIPQPISNTSRANLNKLLTDYTEMKKAILHVYWEEFQKDPVGLMSRVAQPASKKIDQNKLKPEMDEKGNLTTAGFACSQCGQPLFVYKLEQVSEKGKAYTNYFGRCNVAEHEKLILLAQLKPEKDSDEAVTYSLGKFGQRALDFYSIHVTKESTHPVKPLAQIAGNRYASGPVGKALSDACMGTIASFLSKYQDIIIEHQKVVKGNQKRLESLRELAGKENLEYPSVTLPPQPHTKEGVDAYNEVIARVRMWVNLNLWQKLKLSRDDAKPLLRLKKFPSFPLVERQANEVDWWDMVCNVKKLINEKKEDGKVFWQNLAGYKRQEALRPYLSSEEDRKKGKKFARYQLGDLLLHLEKKHGERDWGKVYDEAWERIDKKVEGLSKHIKLEEERRSEDAQSKAALTDWLRAKASFVIEGLKEADKDEFCRCELKLQKWYGDLRGKPFAIEAENSILDISGFSKQYNCAFIWQKDGVKKLNLYLIINYFKGGKLRFKKIKPEAFEANRFYTVINKKSGEIVPMEVNFNFDDPNLIILPLAFGKRQGREFIWNDLLSLETGSLKLANGRVIEKTLYNRRTRQDEPALFVALTFERREVLDSSNIKPMNLIGVDRGENIPAVIALTDPEGCPLSRFKDSLGNPTHILRIGESYKEKQRTIQAKKEVEQRRAGGYSRKYASKAKNLADDMVRNTARDLLYYAVTQDAMLIFENLSRGFGRQGKRTFMAERQYTRMEDWLTAKLAYEGLPSKTYLSKTLAQYTSKTCSNCGFTITSADYDRVLEKLKKTATGWMTTINGKELKVEGQITYYNRYKRQNVVKDLSVELDRLSEESVNNDISSWTKGRSGEALSLLKKRFSHRPVQEKFVCLNCGFETHADEQAALNIARSWLFLRSQEYKKYQTNKTTGNTDKRAFVETWQSFYRKKLKEVWKPAV

SEQ ID NO: 30012 - protein, 979 aa, synthetic construct
  REGION 1..979: note = engineered CasX variant
QEIKRINKIRRRLVKDSNTKKAGKTGPMKTLLVRVMTPDLRERLENLRKKPENIPQPISNTSRANLNKLLTDYTEMKKAILHVYWEEFQKDPVGLMSRVAQPASKKIDQNKLKPEMDEKGNLTTAGFACSQCGQPLFVYKLEQVSEKGKAYTNYFGRCNVAEHEKLILLAQLKPEKDSDEAVTYSLGKFGQRALDFYSIHVTKESTHPVKPLAQIAGNRYASGPVGKALSDACMGTIASFLSKYQDIIIEHQKVVKGNQKRLESLRELAGKENLEYPSVTLPPQPHTKEGVDAYNEVIARVRMWVNLNLWQKLKLSRDDAKPLLRLKKFPSFPLVERQANEVDWWDMVCNVKKLINEKKEDGKVFWQNLAGYKRQEALRPYLSSEEDRKKGKKFARYQLGDLLLHLEKKHGEYDWGKVYDEAWERIDKKVEGLSKHIKLEEERRSEDAQSKAALTDWLRAKASFVIEGLKEADKDEFCRCELKLQKWYGDLRGKPFAIEAENSILDISGFSKQYNCAFIWQKDGVKKLNLYLIINYFKGGKLRFKKIKPEAFEANRFYTVINKKSGEIVPMEVNFNFDDPNLIILPLAFGKRQGREFIWNDLLSLETGSLKLANGRVIEKTLYNRRTRQDEPALFVALTFERREVLDSSNIKPMNLIGVDRGENIPAVIALTDPEGCPLSRFKDSLGNPTHILRIGESYKEKQRTIQAKKEVEQRRAGGYSRKYASKAKNLADDMVRNTARDLLYYAVTQDAMLIFENLSRGFGRQGKRTFMAERQYTRMEDWLTAKLAYEGLPSKTYLSKTLAQYTSKTCSNCGFTITSADYDRVLEKLKKTATGWMTTINGKELKVEGQITYYNRYKRQNVVKDLSVELDRLSEESVNNDISSWTKGRSGEALSLLKKRFSHRPVQEKFVCLNCGFETHADEQAALNIARSWLFLRSQEYKKYQTNKTTGNTDKRAFVETWQSFYRKKLKEVWKPAV

SEQ ID NO: 30013 - protein, 978 aa, synthetic construct
  REGION 1..978: note = engineered CasX variant
QEIKRINKIRRRLVKDSNTKKAGKTGPMKTLLVRVMTPDLRERLENLRKKPENIPQPISNTSRANLNKLLTDYTEMKKAILHVYWEEFQKDPVGLMSRVAQPASKKIDQNKLKPEMDEKGNLTTAGFACSQCGQPLFVYKLEQVSEKGKAYTNYFGRCNVAEHEKLILLAQLKPEKDSDEAVTYSLGKFGQRALDFYSIHVTKESTHPVKPLAQIAGNRYASGPVGKALSDACMGTIASFLSKYQDIIIEHQKVVKGNQKRLESLRELAGKENLEYPSVTLPPQPHTKEGVDAYNEVIARVRMWVNLNLWQKLKLSRDDAKPLLRLKKFPSFPLVERQANEVDWWDMVCNVKKLINEKKEDGKVFWQNLAGYKRQEALRPYLSSEEDRKKGKKFARYQLGDLLLHLEKKHGEDWGDVYDEAWERIDKKVEGLSKHIKLEEERRSEDAQSKAALTDWLRAKASFVIEGLKEADKDEFCRCELKLQKWYGDLRGKPFAIEAENSILDISGFSKQYNCAFIWQKDGVKKLNLYLIINYFKGGKLRFKKIKPEAFEANRFYTVINKKSGEIVPMEVNFNFDDPNLIILPLAFGKRQGREFIWNDLLSLETGSLKLANGRVIEKTLYNRRTRQDEPALFVALTFERREVLDSSNIKPMNLIGVDRGENIPAVIALTDPEGCPLSRFKDSLGNPTHILRIGESYKEKQRTIQAKKEVEQRRAGGYSRKYASKAKNLADDMVRNTARDLLYYAVTQDAMLIFENLSRGFGRQGKRTFMAERQYTRMEDWLTAKLAYEGLPSKTYLSKTLAQYTSKTCSNCGFTITSADYDRVLEKLKKTATGWMTTINGKELKVEGQITYYNRYKRQNVVKDLSVELDRLSEESVNNDISSWTKGRSGEALSLLKKRFSHRPVQEKFVCLNCGFETHADEQAALNIARSWLFLRSQEYKKYQTNKTTGNTDKRAFVETWQSFYRKKLKEVWKPAV

SEQ ID NO: 30014 - protein, 978 aa, synthetic construct
  REGION 1..978: note = engineered CasX variant
QEIKRINKIRRRLVKDSNTKKAGKTGPMKTLLVRVMTPDLRERLENLRKKPENIPQPISNTSRANLNKLLTDYTEMKKAILHVYWEEFQKDPVGLMSRVAQPASKKIDQNKLKPEMDEKGNLTTAGFACSQCGQPLFVYKLEQVSEKGKAYTNYFGRCNVAEHEKLILLAQLKPEKDSDEAVTYSLGKFGQRALDFYSIHVTKESTHPVKPLAQIAGNRYASGPVGKALSDACMGTIASFLSKYQDIIIEHQKVVKGNQKRLESLRELAGKENLEYPSVTLPPQPHTKEGVDAYNEVIARVRMWVNLNLWQKLKLSRDDAKPLLRLKKFPSFPLVERQANEVDWWDMVCNVKKLINEKKEDGKVFWQNLAGYKRQEALRPYLSSEEDRKKGKKFARYQLGDLLLHLEKKHGEDWGKVYGEAWERIDKKVEGLSKHIKLEEERRSEDAQSKAALTDWLRAKASFVIEGLKEADKDEFCRCELKLQKWYGDLRGKPFAIEAENSILDISGFSKQYNCAFIWQKDGVKKLNLYLIINYFKGGKLRFKKIKPEAFEANRFYTVINKKSGEIVPMEVNFNFDDPNLIILPLAFGKRQGREFIWNDLLSLETGSLKLANGRVIEKTLYNRRTRQDEPALFVALTFERREVLDSSNIKPMNLIGVDRGENIPAVIALTDPEGCPLSRFKDSLGNPTHILRIGESYKEKQRTIQAKKEVEQRRAGGYSRKYASKAKNLADDMVRNTARDLLYYAVTQDAMLIFENLSRGFGRQGKRTFMAERQYTRMEDWLTAKLAYEGLPSKTYLSKTLAQYTSKTCSNCGFTITSADYDRVLEKLKKTATGWMTTINGKELKVEGQITYYNRYKRQNVVKDLSVELDRLSEESVNNDISSWTKGRSGEALSLLKKRFSHRPVQEKFVCLNCGFETHADEQAALNIARSWLFLRSQEYKKYQTNKTTGNTDKRAFVETWQSFYRKKLKEVWKPAV

SEQ ID NO: 30015 - protein, 978 aa, synthetic construct
  REGION 1..978: note = engineered CasX variant
QEIKRINKIRRRLVKDSNTKKAGKTGPMKTLLVRVMTPDLRERLENLRKKPENIPQPISNTSRANLNKLLTDYTEMKKAILHVYWEEFQKDPVGLMSRVAQPASKKIDQNKLKPEMDEKGNLTTAGFACSQCGQPLFVYKLEQVSEKGKAYTNYFGRCNVAEHEKLILLAQLKPEKDSDEAVTYSLGKFGQRALDFYSIHVTKESTHPVKPLAQIAGNRYASGPVGKALSDACMGTIASFLSKYQDIIIEHQKVVKGNQKRLESLRELAGKENLEYPSVTLPPQPHTKEGVDAYNEVIARVRMWVNLNLWQKLKLSRDDAKPLLRLKKFPSFPLVERQANEVDWWDMVCNVKKLINEKKEDGKVFWQNLAGYKRQEALRPYLSSEEDRKKGKKFARYQLGDLLLHLEKKHGEDWGKVYDEAWERIDKKVEGLSKHIKLEEERRSEDAQSKAALTDWLRAKASFVIEGKKEADKDEFCRCELKLQKWYGDLRGKPFAIEAENSILDISGFSKQYNCAFIWQKDGVKKLNLYLIINYFKGGKLRFKKIKPEAFEANRFYTVINKKSGEIVPMEVNFNFDDPNLIILPLAFGKRQGREFIWNDLLSLETGSLKLANGRVIEKTLYNRRTRQDEPALFVALTFERREVLDSSNIKPMNLIGVDRGENIPAVIALTDPEGCPLSRFKDSLGNPTHILRIGESYKEKQRTIQAKKEVEQRRAGGYSRKYASKAKNLADDMVRNTARDLLYYAVTQDAMLIFENLSRGFGRQGKRTFMAERQYTRMEDWLTAKLAYEGLPSKTYLSKTLAQYTSKTCSNCGFTITSADYDRVLEKLKKTATGWMTTINGKELKVEGQITYYNRYKRQNVVKDLSVELDRLSEESVNNDISSWTKGRSGEALSLLKKRFSHRPVQEKFVCLNCGFETHADEQAALNIARSWLFLRSQEYKKYQTNKTTGNTDKRAFVETWQSFYRKKLKEVWKPAV

SEQ ID NO: 30016 - protein, 978 aa, synthetic construct
  REGION 1..978: note = engineered CasX variant
QEIKRINKIRRRLVKDSNTKKAGKTGPMKTLLVRVMTPDLRERLENLRKKPENIPQPISNTSRANLNKLLTDYTEMKKAILHVYWEEFQKDPVGLMSRVAQPASKKIDQNKLKPEMDEKGNLTTAGFACSQCGQPLFVYKLEQVSEKGKAYTNYFGRCNVAEHEKLILLAQLKPEKDSDEAVTYSLGKFGQRALDFYSIHVTKESTHPVKPLAQIAGNRYASGPVGKALSDACMGTIASFLSKYQDIIIEHQKVVKGNQKRLESLRELAGKENLEYPSVTLPPQPHTKEGVDAYNEVIARVRMWVNLNLWQKLKLSRDDAKPLLRLKKFPSFPLVERQANEVDWWDMVCNVKKLINEKKEDGKVFWQNLAGYKRQEALRPYLSSEEDRKKGKKFARYQLGDLLLHLEKKHGEDWGKVYDEAWERIDKKVEGLSKHIKLEEERRSEDAQSKAALTDWLRAKASFVIEGSKEADKDEFCRCELKLQKWYGDLRGKPFAIEAENSILDISGFSKQYNCAFIWQKDGVKKLNLYLIINYFKGGKLRFKKIKPEAFEANRFYTVINKKSGEIVPMEVNFNFDDPNLIILPLAFGKRQGREFIWNDLLSLETGSLKLANGRVIEKTLYNRRTRQDEPALFVALTFERREVLDSSNIKPMNLIGVDRGENIPAVIALTDPEGCPLSRFKDSLGNPTHILRIGESYKEKQRTIQAKKEVEQRRAGGYSRKYASKAKNLADDMVRNTARDLLYYAVTQDAMLIFENLSRGFGRQGKRTFMAERQYTRMEDWLTAKLAYEGLPSKTYLSKTLAQYTSKTCSNCGFTITSADYDRVLEKLKKTATGWMTTINGKELKVEGQITYYNRYKRQNVVKDLSVELDRLSEESVNNDISSWTKGRSGEALSLLKKRFSHRPVQEKFVCLNCGFETHADEQAALNIARSWLFLRSQEYKKYQTNKTTGNTDKRAFVETWQSFYRKKLKEVWKPAV

SEQ ID NO: 30017 - protein, 979 aa, synthetic construct
  REGION 1..979: note = engineered CasX variant
QEIKRINKIRRRLVKDSNTKKAGKTGPMKTLLVRVMTPDLRERLENLRKKPENIPQPISNTSRANLNKLLTDYTEMKKAILHVYWEEFQKDPVGLMSRVAQPASKKIDQNKLKPEMDEKGNLTTAGFACSQCGQPLFVYKLEQVSEKGKAYTNYFGRCNVAEHEKLILLAQLKPEKDSDEAVTYSLGKFGQRALDFYSIHVTKESTHPVKPLAQIAGNRYASGPVGKALSDACMGTIASFLSKYQDIIIEHQKVVKGNQKRLESLRELAGKENLEYPSVTLPPQPHTKEGVDAYNEVIARVRMWVNLNLWQKLKLSRDDAKPLLRLKKFPSFPLVERQANEVDWWDMVCNVKKLINEKKEDGKVFWQNLAGYKRQEALRPYLSSEEDRKKGKKFARYQLGDLLLHLEKKHGEDWGKVYDEAWERIDKKVEGLSKHIKLEEERRSEDAQSKAALTDWLRAKASFVIEGLKEADDKDEFCRCELKLQKWYGDLRGKPFAIEAENSILDISGFSKQYNCAFIWQKDGVKKLNLYLIINYFKGGKLRFKKIKPEAFEANRFYTVINKKSGEIVPMEVNFNFDDPNLIILPLAFGKRQGREFIWNDLLSLETGSLKLANGRVIEKTLYNRRTRQDEPALFVALTFERREVLDSSNIKPMNLIGVDRGENIPAVIALTDPEGCPLSRFKDSLGNPTHILRIGESYKEKQRTIQAKKEVEQRRAGGYSRKYASKAKNLADDMVRNTARDLLYYAVTQDAMLIFENLSRGFGRQGKRTFMAERQYTRMEDWLTAKLAYEGLPSKTYLSKTLAQYTSKTCSNCGFTITSADYDRVLEKLKKTATGWMTTINGKELKVEGQITYYNRYKRQNVVKDLSVELDRLSEESVNNDISSWTKGRSGEALSLLKKRFSHRPVQEKFVCLNCGFETHADEQAALNIARSWLFLRSQEYKKYQTNKTTGNTDKRAFVETWQSFYRKKLKEVWKPAV

SEQ ID NO: 30018 - protein, 979 aa, synthetic construct
  REGION 1..979: note = engineered CasX variant
QEIKRINKIRRRLVKDSNTKKAGKTGPMKTLLVRVMTPDLRERLENLRKKPENIPQPISNTSRANLNKLLTDYTEMKKAILHVYWEEFQKDPVGLMSRVAQPASKKIDQNKLKPEMDEKGNLTTAGFACSQCGQPLFVYKLEQVSEKGKAYTNYFGRCNVAEHEKLILLAQLKPEKDSDEAVTYSLGKFGQRALDFYSIHVTKESTHPVKPLAQIAGNRYASGPVGKALSDACMGTIASFLSKYQDIIIEHQKVVKGNQKRLESLRELAGKENLEYPSVTLPPQPHTKEGVDAYNEVIARVRMWVNLNLWQKLKLSRDDAKPLLRLKKFPSFPLVERQANEVDWWDMVCNVKKLINEKKEDGKVFWQNLAGYKRQEALRPYLSSEEDRKKGKKFARYQLGDLLLHLEKKHGEDWGKVYDEAWERIDKKVEGLSKHIKLEEERRSEDAQSKAALTDWLRAKASFVIEGLKEADKDEFCRCELKLQKWYGDLRGKPFAIEAENSILDISGFSKQYNCAFIWQKDGVKKLNLYLIINYFKGGKLRFKKIKPEAFEANRFYTVINKKSGEIVPMEVNFNFDDPNLIILPLAFGKRQGREFIWNDLLSLETGSLKLANGRVIEKTLYNRRTRQDEPALFVALTFERREVLDSSNIKPMNLIGVDRGENIPAVIALTDPEGCPLSRFKDSLGNPTHILRIGESYKEKQRTIQAKKEVEQRRAGGYSRKYASKAKNLADDMVRNTARDLLYYAVTQDAMLIFENLSRGFGRQGKRTFMAERQYTRMEDWLTAKLAYEGLPSKTYLSKTLAQYTSKTCSNCGFTITSADYDRVLEKLKKTATGWMTTINGKELKVEGQITYYNRYKRQNVVKDLSVELDRLSEESVNNDISSWTKGRSGNEALSLLKKRFSHRPVQEKFVCLNCGFETHADEQAALNIARSWLFLRSQEYKKYQTNKTTGNTDKRAFVETWQSFYRKKLKEVWKPAV

SEQ ID NO: 30019 - protein, 978 aa, synthetic construct
  REGION 1..978: note = engineered CasX variant
QEIKRINKIRRRLVKDSNTKKAGKTGPMKTLLVRVMTPDLRERLENLRKKPENIPQPISNTSRANLNKLLTDYTEMKKAILHVYWEEFQKDPVGLMSRVAQPASKKIDQNKLKPEMDEKGNLTTAGFACSQCGQPLFVYKLEQVSEKGKAYTNYFGRCNVAEHEKLILLAQLKPEKDSDEAVTYSLGKFGQRALDFYSIHVTKESTHPVKPLAQIAGNRYASGPVGKALSDACMGTIASFLSKYQDIIIEHQKVVKGNQKRLESLRELAGKENLEYPSVTLPPQPHTKEGVDAYNEVIARVRMWVNLNLWQKLKLSRDDAKPLLRLKKFPSFPLVERQANEVDWWDMVCNVKKLINEKKEDGKVFWQNLAGYKRQEALRPYLSSEEDRQKGKKFARYQLGDLLLHLEKKHGEDWGKVYDEAWERIDKKVEGLSKHIKLEEERRSEDAQSKAALTDWLRAKASFVIEGLKEADKDEFCRCELKLQKWYGDLRGKPFAIEAENSILDISGFSKQYNCAFIWQKDGVKKLNLYLIINYFKGGKLRFKKIKPEAFEANRFYTVINKKSGEIVPMEVNFNFDDPNLIILPLAFGKRQGREFIWNDLLSLETGSLKLANGRVIEKTLYNRRTRQDEPALFVALTFERREVLDSSNIKPMNLIGVDRGENIPAVIALTDPEGCPLSRFKDSLGNPTHILRIGESYKEKQRTIQAKKEVEQRRAGGYSRKYASKAKNLADDMVRNTARDLLYYAVTQDAMLIFENLSRGFGRQGKRTFMAERQYTRMEDWLTAKLAYEGLPSKTYLSKTLAQYTSKTCSNCGFTITSADYDRVLEKLKKTATGWMTTINGKELKVEGQITYYNRYKRQNVVKDLSVELDRLSEESVNNDISSWTKGRSGEALSLLKKRFSHRPVQEKFVCLNCGFETHADEQAALNIARSWLFLRSQEYKKYQTNKTTGNTDKRAFVETWQSFYRKKLKEVWKPAV

SEQ ID NO: 30020 - protein, 978 aa, synthetic construct
  REGION 1..978: note = engineered CasX variant
QEIKRINKIRRRLVKDSNTKKAGKTGPMKTLLVRVMTPDLRERLENLRKKPENIPQPISNTSRANLNKLLTDYTEMKKAILHVYWEEFQKDPVGLMSRVAQPASKKIDQNKLKPEMDEKGNLTTAGFACSQCGQPLFVYKLEQVSEKGKAYTNYFGRCNVAEHEKLILLAQLKPEKDSDEAVTYSLGKFGQRALDFYSIHVTKESTHPVKPLAQIAGNRYASGPVGKALSDACMGTIASFLSKYQDIIIEHQKVVKGNQKRLESLRELAGKENLEYPSVTLPPQPHTKEGVDAYNEVIARVRMWVNLNLWQKLKLSRDDAKPLLRLKKFPSFPLVERQANEVDWWDMVCNVKKLINEKKEDGKVFWQNLAGYKRQEALRPYLSSEEDRKKGKKFARYQLGDLLLHLEKKHGEDWGKVYDEAWERIDKKVEGLSKHIKLEEERRSEDAQSKAALTDWLRAKASFVIEGLKEADKDEFCRCELKLQKWYGDLRGKPFAIEAENSILDISGFSKQYNCAFIWQKDGVKKLNLYLIINYFKGGKLRFKKIKPEAFEANRFYTVINKKSGEIVPMEVNFNFDDPNLIILPLAFGKRQGREFIWNDLLSLETGSLKLANGRVIEKTLYNRRTRQDEPALFVALTFERREVLDSSNIKPMNLIGVDRGENIPAVIALTDPEGCPLSRFKDSLGNPTHILRIGESYKEKQRTIQAKKEVEQRRAGGYSRKYASKAKNLADDMVRNTARDLLYYAVTQDAMLIFENLSRGFGRQGKRTFMAERQYTRMEDWLTAKLAYEGLPSQTYLSKTLAQYTSKTCSNCGFTITSADYDRVLEKLKKTATGWMTTINGKELKVEGQITYYNRYKRQNVVKDLSVELDRLSEESVNNDISSWTKGRSGEALSLLKKRFSHRPVQEKFVCLNCGFETHADEQAALNIARSWLFLRSQEYKKYQTNKTTGNTDKRAFVETWQSFYRKKLKEVWKPAV

SEQ ID NO: 30021 - protein, 978 aa, synthetic construct
  REGION 1..978: note = engineered CasX variant
QEIKRINKIRRRLVKDSNTKKAGKTGPMKTLLVRVMTPDLRERLENLRKKPENIPQPISNTSRANLNKLLTDYTEMKKAILHVYWEEFQKDPVGLMSRVAQPASKKIDQNKLKPEMDEKGNLTTAGFACSQCGQPLFVYKLEQVSEKGKAYTNYFGRCNVAEHEKLILLAQLKPEKDSDEAVTYSLGKFGQRALDFYSIHVTKESTHPVKPLAQIAGNRYASGPVGKALSDACMGTIASFLSKYQDIIIEHQKVVKGNQKRLESLRELAGKENLEYPSVTLPPQPHTKEGVDAYNEVIARVRMWVNLNLWQKLKLSRDDAKPLLRLKKFPSFPLVERQANEVDWWDMVCNVKKLINEKKEDGKVFWQNLAGYKRQEALRPYLSSEEDRKKGKKFARYQLGDLLLHLEKKHGEDWGKVYDEAWERIDKKVEGLSKHIKLEEERRSEDAQSKAALTDWLRAKASFVIEGLKEADKDEFCRCELKLQKWYGDLRGKPFAIEAENSILDISGFSKQYNCAFIWQKDGVKKLNLYLIINYFKGGKLRFKKIKPEAFEANRFYTVINKKSGEIVPMEVNFNFDDPNLIILPLAFGKRQGREFIWNDLLSLETGSLKLANGRVIEKTLYNRRTRQDEPALFVALTFERREVLDSSNIKPMNLIGVDRGENIPAVIALTDPEGCPLSRFKDSLGNPTHILRIGESYKEKQRTIQAKKEVEQRRAGGYSRKYASKAKNLADDMVRNTARDLLYYAVTQDAMLIFENLSRGFGRQGKRTFMAERQYTRMEDWLTAKLAYNGLPSKTYLSKTLAQYTSKTCSNCGFTITSADYDRVLEKLKKTATGWMTTINGKELKVEGQITYYNRYKRQNVVKDLSVELDRLSEESVNNDISSWTKGRSGEALSLLKKRFSHRPVQEKFVCLNCGFETHADEQAALNIARSWLFLRSQEYKKYQTNKTTGNTDKRAFVETWQSFYRKKLKEVWKPAV

SEQ ID NO: 30022 - protein, 978 aa, synthetic construct
  REGION 1..978: note = engineered CasX variant
QEIKRINKIRRRLVKDSNTKKAGKTGPMKTLLVRVMTPDLRERLENLRKKPENIPQPISNTSRANLNKLLTDYTEMKKAILHVYWEEFQKDPVGLMSRVAQPASKKIDQNKLKPEMDEKGNLTTAGFACSQCGQPLFVYKLEQVSEKGKAYTNYFGRCNVAEHEKLIQLAQLKPEKDSDEAVTYSLGKFGQRALDFYSIHVTKESTHPVKPLAQIAGNRYASGPVGKALSDACMGTIASFLSKYQDIIIEHQKVVKGNQKRLESLRELAGKENLEYPSVTLPPQPHTKEGVDAYNEVIARVRMWVNLNLWQKLKLSRDDAKPLLRLKKFPSFPLVERQANEVDWWDMVCNVKKLINEKKEDGKVFWQNLAGYKRQEALRPYLSSEEDRKKGKKFARYQLGDLLLHLEKKHGEDWGKVYDEAWERIDKKVEGLSKHIKLEEERRSEDAQSKAALTDWLRAKASFVIEGLKEADKDEFCRCELKLQKWYGDLRGKPFAIEAENSILDISGFSKQYNCAFIWQKDGVKKLNLYLIINYFKGGKLRFKKIKPEAFEANRFYTVINKKSGEIVPMEVNFNFDDPNLIILPLAFGKRQGREFIWNDLLSLETGSLKLANGRVIEKTLYNRRTRQDEPALFVALTFERREVLDSSNIKPMNLIGVDRGENIPAVIALTDPEGCPLSRFKDSLGNPTHILRIGESYKEKQRTIQAKKEVEQRRAGGYSRKYASKAKNLADDMVRNTARDLLYYAVTQDAMLIFENLSRGFGRQGKRTFMAERQYTRMEDWLTAKLAYEGLPSKTYLSKTLAQYTSKTCSNCGFTITSADYDRVLEKLKKTATGWMTTINGKELKVEGQITYYNRYKRQNVVKDLSVELDRLSEESVNNDISSWTKGRSGEALSLLKKRFSHRPVQEKFVCLNCGFETHADEQAALNIARSWLFLRSQEYKKYQTNKTTGNTDKRAFVETWQSFYRKKLKEVWKPAV

SEQ ID NO: 30023 - protein, 978 aa, synthetic construct
  REGION 1..978: note = engineered CasX variant
QEIKRINKIRRRLVKDSNTKKAGKTGPMKTLLVRVMTPDLRERLENLRKKPENIPQPISNTSRANLNKLLTDYTEMKKAILHVYWEEFQKDPVGLMSRVAQPASKKIDQNKLKPEMDEKGNLTTAGFACSQCGQPLFVYKLEQVSEKGKAYTNYFGRCNVAEHEKLILLAQLKPEKDSDEAVTYSLGKFGQRALDFYSIHVTKESTHPVKPLAQIAGNRYASGPVGKALSDACMGTIASFLSKYQDIIIEHQKVVKGNQKRLESLRELAGKENLEYPSVTLPPQPHTKEGVDAYNEVIARVRMWVNLNLWQKLKLSRDDAKPLLRLKKFPSFPLVERQANEVDWWDMVCNVKKLINEKKEDGKVFWQNLAIYKRQEALRPYLSSEEDRKKGKKFARYQLGDLLLHLEKKHGEDWGKVYDEAWERIDKKVEGLSKHIKLEEERRSEDAQSKAALTDWLRAKASFVIEGLKEADKDEFCRCELKLQKWYGDLRGKPFAIEAENSILDISGFSKQYNCAFIWQKDGVKKLNLYLIINYFKGGKLRFKKIKPEAFEANRFYTVINKKSGEIVPMEVNFNFDDPNLIILPLAFGKRQGREFIWNDLLSLETGSLKLANGRVIEKTLYNRRTRQDEPALFVALTFERREVLDSSNIKPMNLIGVDRGENIPAVIALTDPEGCPLSRFKDSLGNPTHILRIGESYKEKQRTIQAKKEVEQRRAGGYSRKYASKAKNLADDMVRNTARDLLYYAVTQDAMLIFENLSRGFGRQGKRTFMAERQYTRMEDWLTAKLAYEGLPSKTYLSKTLAQYTSKTCSNCGFTITSADYDRVLEKLKKTATGWMTTINGKELKVEGQITYYNRYKRQNVVKDLSVELDRLSEESVNNDISSWTKGRSGEALSLLKKRFSHRPVQEKFVCLNCGFETHADEQAALNIARSWLFLRSQEYKKYQTNKTTGNTDKRAFVETWQSFYRKKLKEVWKPAV

SEQ ID NO: 30024 - protein, 978 aa, synthetic construct
  REGION 1..978: note = engineered CasX variant
QEIKRINKIRRRLVKDSNTKKAGKTGPMKTLLVRVMTPDLRERLENLRKKPENIPQPISNTSRANLNKLLTDYTEMKKAILHVYWEEFQKDPVGLMSRVAQPASKKIDQNKLKPEMDEKGNLTTAGFACSQCGQPLFVYKLEQVSEKGKAYTNYFGRCNVAEHEKLILLAQLKPEKDSDEAVTYSLGKFGQRALDFYSIHVTKESTHPVKPLAQIAGNRYASGPVGKALSDACMGTIASFLSKYQDIIIEHQKVVKGNQKRLESLRELAGKENLEYPSVTLPPQPHTKEGVDAYNEVIARVRMWVNLNLWQKLKLSRDDAKPLLRLKKFPSFPLVERQANEVDWWDMVCNVKKLINEKKEDGKVFWQNLAGYKRQEALRPYLSSEEDREKGKKFARYQLGDLLLHLEKKHGEDWGKVYDEAWERIDKKVEGLSKHIKLEEERRSEDAQSKAALTDWLRAKASFVIEGLKEADKDEFCRCELKLQKWYGDLRGKPFAIEAENSILDISGFSKQYNCAFIWQKDGVKKLNLYLIINYFKGGKLRFKKIKPEAFEANRFYTVINKKSGEIVPMEVNFNFDDPNLIILPLAFGKRQGREFIWNDLLSLETGSLKLANGRVIEKTLYNRRTRQDEPALFVALTFERREVLDSSNIKPMNLIGVDRGENIPAVIALTDPEGCPLSRFKDSLGNPTHILRIGESYKEKQRTIQAKKEVEQRRAGGYSRKYASKAKNLADDMVRNTARDLLYYAVTQDAMLIFENLSRGFGRQGKRTFMAERQYTRMEDWLTAKLAYEGLPSKTYLSKTLAQYTSKTCSNCGFTITSADYDRVLEKLKKTATGWMTTINGKELKVEGQITYYNRYKRQNVVKDLSVELDRLSEESVNNDISSWTKGRSGEALSLLKKRFSHRPVQEKFVCLNCGFETHADEQAALNIARSWLFLRSQEYKKYQTNKTTGNTDKRAFVETWQSFYRKKLKEVWKPAV

SEQ ID NO: 30025 - protein, 978 aa, synthetic construct
  REGION 1..978: note = engineered CasX variant
QEIKRINKIRRRLVKDSNTKKAGKTGPMKTLLVRVMTPDLRERLENLRKKPENIPQPISNTSRANLNKLLTDYTEMKKAILHVYWEEFQKDPVGLMSRVAQPASKKIDQNKLKPEMDEKGNLTTAGFACSQCGQPLFVYKLEQVSEKGKAYTNYFGRCNVAEHEKLILLAQLKPEKDSDEAVTYSLGKFGQRALDFYSIHVTKESTHPVKPLAQIAGNRYASGPVGKALSDACMGTIASFLSKYQDIIIEHQKVVKGNQKRLESLRELAGKENLEYPSVTLPPQPHTKEGVDAYNEVIARVRMWVNLNLWQKLKLSRDDAKPLLRLKKFPSFPLVERQANEVDWWDMVCNVKKLINEKKEDGKVFWQNLAGYKRQEALRPYLSSEEDRKKGKKFARYQLGDLLLHLEKKHGEDWGKVYDEAWERIDKKVEGLSKHIKLEEERRSEDAQSKAALTDWLRAKASFVIEGLKEADKDEFCRCELKLQKWYGDLRGKPFAIEAENSILDISGFSKQYNCAFIWQKDGVKKLNLYLIINYFKGGKLRFKKIKPEAFEANRFYTVINKKSGEIVIMEVNFNFDDPNLIILPLAFGKRQGREFIWNDLLSLETGSLKLANGRVIEKTLYNRRTRQDEPALFVALTFERREVLDSSNIKPMNLIGVDRGENIPAVIALTDPEGCPLSRFKDSLGNPTHILRIGESYKEKQRTIQAKKEVEQRRAGGYSRKYASKAKNLADDMVRNTARDLLYYAVTQDAMLIFENLSRGFGRQGKRTFMAERQYTRMEDWLTAKLAYEGLPSKTYLSKTLAQYTSKTCSNCGFTITSADYDRVLEKLKKTATGWMTTINGKELKVEGQITYYNRYKRQNVVKDLSVELDRLSEESVNNDISSWTKGRSGEALSLLKKRFSHRPVQEKFVCLNCGFETHADEQAALNIARSWLFLRSQEYKKYQTNKTTGNTDKRAFVETWQSFYRKKLKEVWKPAV

SEQ ID NO: 30026 - protein, 978 aa, synthetic construct
  REGION 1..978: note = engineered CasX variant
QEIKRINKIRRRLVKDSNTKKAGKTGPMKTLLVRVMTPDLRERLENLRKKPENIPQPISNTSRANLNKLLTDYTEMKKAILHVYWEEFQKDPVGLMSRVAQPASKKIDQNKLKPEMDEKGNLTTAGFACSQCGQPLFVYKLEQVSEKGKAYTNYFGRCNVAEHEKLILLAQLKPEKDSDEAVTYSLGKFGQRALDFYSIHVTKESTHPVKPLAQIAGNRYASGPVGKALSGACMGTIASFLSKYQDIIIEHQKVVKGNQKRLESLRELAGKENLEYPSVTLPPQPHTKEGVDAYNEVIARVRMWVNLNLWQKLKLSRDDAKPLLRLKGFPSFPLVERQANEVDWWDMVCNVKKLINEKKEDGKVFWQNLAGYKRQEALRPYLSSEEDRKKGKKFARYQLGDLLLHLEKKHGEDWGKVYDEAWERIDKKVEGLSKHIKLEEERRSEDAQSKAALTDWLRAKASFVIEGLKEADKDEFCRCELKLQKWYGDLRGKPFAIEAENSILDISGFSKQYNCAFIWQKDGVKKLNLYLIINYFKGGKLRFKKIKPEAFEANRFYTVINKKSGEIVPMEVNFNFDDPNLIILPLAFGKRQGREFIWNDLLSLETGSLKLANGRVIEKTLYNRRTRQDEPALFVALTFERREVLDSSNIKPMNLIGVDRGENIPAVIALTDPEGCPLSRFKDSLGNPTHILRIGERYKEKQRTIQAKKEVEQRRAGGYSRKYASKAKNLADDMVRNTARDLLYYAVTQDAMLIFENLSRGFGRQGKRTFMAERQYTRMEDWLTAKLAYEGLPSKTYLSKTLAQYTSKTCSNCGFTITSADYDRVLEKLKKTATGWMTTINGKELKVEGQITYYNRYKRQNVVKDLSVELDRLSEESVNNDISSWTKGRSGEALSLLKKRFSHRPVQEKFVCLNCGFETHADEQAALNIARSWLFLRSQEYKKYQTNKTTGNTDKRAFVETWQSFYRKKLKEVWKPAV

SEQ ID NO: 30027 - protein, 978 aa, synthetic construct
  REGION 1..978: note = engineered CasX variant
QEIKRINKIRRRLVKDSNTKKAGKTGPMKTLLVRVMTPDLRERLENLRKKPENIPQPISNTSRANLNKLLTDYTEMKKAILHVYWEEFQKDPVGLMSRVAQPASKKIDQNKLKPEMDEKGNLTTAGFACSQCGQPLFVYKLEQVSEKGKAYTNYFGRCNVAEHEKLILLAQLKPEKDSDEAVTYSLGKFGQRALDFYSIHVTKESTHPVKPLAQIAGNRYASGPVGKALSDACMGTIASFLSKYQDIIIEHQKVVKGNQKRLESLRELAGKENLEYPSVTLPPQPHTKEGVDAYNEVIARVRMWVNLNLWQKLKLSRDDAKPLLRLKNFPSFPLVERQANEVDWWDMVCNVKKLINEKKEDGKVFWQNLAGYKRQEALRPYLSSEEDRKKGKKFARYQLGDLLLHLEKKHGEDWGKVYDEAWERIDKKVEGLSKHIKLEEERRSEDAQSKAALTDWLRAKASFVIEGLKEADKDEFCRCELKLQKWYGDLRGKPFAIEAENSILDISGFSKQYNCAFIWQKDGVKKLNLYLIINYFKGGKLRFKKIKPEAFEANRFYTVINKKSGEIVPMEVNFNFDDPNLIILPLAFGKRQGREFIWNDLLSLETGSLKLANGRVIEKTLYNRRTRQDEPALFVALTFERREVLDSSNIKPMNLIGVDRGENIPAVIALTDPEGCPLSRFKDSLGNPTHILRIGERYKEKQRTIQAKKEVEQRRAGGYSRKYASKAKNLADDMVRNTARDLLYYAVTQDAMLIFENLSRGFGRQGKRTFMAERQYTRMEDWLTAKLAYEGLPSKTYLSKTLAQYTSKTCSNCGFTITSADYDRVLEKLKKTATGWMTTINGKELKVEGQITYYNRYKRQNVVKDLSVELDRLSEESVNNDISSWTKGRSGEALSLLKKRFSHRPVQEKFVCLNCGFETHADEQAALNIARSWLFLRSQEYKKYQTNKTTGNTDKRAFVETWQSFYRKKLKEVWKPAV

SEQ ID NO: 30028 - protein, 978 aa, synthetic construct
  REGION 1..978: note = engineered CasX variant
QEIKRINKIRRRLVKDSNTKKAGKTGPMKTLLVRVMTPDLRERLENLRKKPENIPQPISNTSRANLNKLLTDYTEMKKAILHVYWEEFQKDPVGLMSRVAQPASKKIDQNKLKPEMDEKGNLTTAGFACSQCGQPLFVYKLEQVSEKGKAYTNYFGRCNVAEHEKLILLAQLKPEKDSDEAVTYSLGKFGQRALDFYSIHVTKESTHPVKPLAQIAGNRYASGPVGKALSDACMGTIASFLSKYQDIIIEHQKVVKGNQKRLESLRELAGKENLEYPSVTLPPQPHTKEGVDAYNEVIARVRMWVNLNLWQKLKLSRDDAKPLLRLKGFPSFPLVERQANEVDWWDMVCNVKKLINEKKEDGKVFWQNLAGYKRQEALRPYLSSEEDRKKGKKFARYQLGDLLNHLEKKHGEDWGKVYDEAWERIDKKVEGLSKHIKLEEERRSEDAQSKAALTDWLRAKASFVIEGLKEADKDEFCRCELKLQKWYGDLRGKPFAIEAENSILDISGFSKQYNCAFIWQKDGVKKLNLYLIINYFKGGKLRFKKIKPEAFEANRFYTVINKKSGEIVPMEVNFNFDDPNLIILPLAFGKRQGREFIWNDLLSLETGSLKLANGRVIEKTLYNRRTRQDEPALFVALTFERREVLDSSNIKPMNLIGVDRGENIPAVIALTDPEGCPLSRFKDSLGNPTHILRIGERYKEKQRTIQAKKEVEQRRAGGYSRKYASKAKNLADDMVRNTARDLLYYAVTQDAMLIFENLSRGFGRQGKRTFMAERQYTRMEDWLTAKLAYEGLPSKTYLSKTLAQYTSKTCSNCGFTITSADYDRVLEKLKKTATGWMTTINGKELKVEGQITYYNRYKRQNVVKDLSVELDRLSEESVNNDISSWTKGRSGEALSLLKKRFSHRPVQEKFVCLNCGFETHADEQAALNIARSWLFLRSQEYKKYQTNKTTGNTDKRAFVETWQSFYRKKLKEVWKPAV

SEQ ID NO: 30029 - protein, 978 aa, synthetic construct
  REGION 1..978: note = engineered CasX variant
QEIKRINKIRRRLVKDSNTKKAGKTGPMKTLLVRVMTPDLRERLENLRKKPENIPQPISNTSRANLNKLLTDYTEMKKAILHVYWEEFQKDPVGLMSRVAQPASKKIDQNKLKPEMDEKGNLTTAGFACSQCGQPLFVYKLEQVSEKGKAYTNYFGRCNVAEHEKLILLAQLKPEKDSDEAVTYSLGKFGQRALDFYSIHVTKESTHPVKPLAQIAGNRYASGPVGKALSDACMGTIASFLSKYQDIIIEHQKVVKGNQKRLESLRELAGKENLEYPSVTLPPQPHTKEGVDAYNEVIARVRMWVNLNLWQKLKLSRDDAKPLLRLKGFPSFPLVERQANEVDWWDMVCNVKKLINEKKEDGKVFWQNLAGYKRQEALRPYLSSEEDRKKGKKFARYQLGDLLWHLEKKHGEDWGKVYDEAWERIDKKVEGLSKHIKLEEERRSEDAQSKAALTDWLRAKASFVIEGLKEADKDEFCRCELKLQKWYGDLRGKPFAIEAENSILDISGFSKQYNCAFIWQKDGVKKLNLYLIINYFKGGKLRFKKIKPEAFEANRFYTVINKKSGEIVPMEVNFNFDDPNLIILPLAFGKRQGREFIWNDLLSLETGSLKLANGRVIEKTLYNRRTRQDEPALFVALTFERREVLDSSNIKPMNLIGVDRGENIPAVIALTDPEGCPLSRFKDSLGNPTHILRIGERYKEKQRTIQAKKEVEQRRAGGYSRKYASKAKNLADDMVRNTARDLLYYAVTQDAMLIFENLSRGFGRQGKRTFMAERQYTRMEDWLTAKLAYEGLPSKTYLSKTLAQYTSKTCSNCGFTITSADYDRVLEKLKKTATGWMTTINGKELKVEGQITYYNRYKRQNVVKDLSVELDRLSEESVNNDISSWTKGRSGEALSLLKKRFSHRPVQEKFVCLNCGFETHADEQAALNIARSWLFLRSQEYKKYQTNKTTGNTDKRAFVETWQSFYRKKLKEVWKPAV

SEQ ID NO: 30030 - protein, 978 aa, synthetic construct
  REGION 1..978: note = engineered CasX variant
QEIKRINKIRRRLVKDSNTKKAGKTGPMKTLLVRVMTPDLRERLENLRKKPENIPQPISNTSRANLNKLLTDYTEMKKAILHVYWEEFQKDPVGLMSRVAQPASKKIDQNKLKPEMDEKGNLTTAGFACSQCGQPLFVYKLEQVSEKGKAYTNYFGRCNVAEHEKLILLAQLKPEKDSDEAVTYSLGKFGQRALDFYSIHVTKESTHPVKPLAQIAGNRYASGPVGKALSDACMGTIASFLSKYQDIIIEHQKVVKGNQKRLESLRELAGKENLEYPSVTLPPQPHTKEGVDAYNEVIARVRMWVNLNLWQKLKLSRDDAKPLLRLKGFPSFPLVERQANEVDWWDMVCNVKKLINEKKEDGKVFWQNLAGYKRQEALRPYLSSEEDRKKGKKFARYQLGDLLLHLYKKHGEDWGKVYDEAWERIDKKVEGLSKHIKLEEERRSEDAQSKAALTDWLRAKASFVIEGLKEADKDEFCRCELKLQKWYGDLRGKPFAIEAENSILDISGFSKQYNCAFIWQKDGVKKLNLYLIINYFKGGKLRFKKIKPEAFEANRFYTVINKKSGEIVPMEVNFNFDDPNLIILPLAFGKRQGREFIWNDLLSLETGSLKLANGRVIEKTLYNRRTRQDEPALFVALTFERREVLDSSNIKPMNLIGVDRGENIPAVIALTDPEGCPLSRFKDSLGNPTHILRIGERYKEKQRTIQAKKEVEQRRAGGYSRKYASKAKNLADDMVRNTARDLLYYAVTQDAMLIFENLSRGFGRQGKRTFMAERQYTRMEDWLTAKLAYEGLPSKTYLSKTLAQYTSKTCSNCGFTITSADYDRVLEKLKKTATGWMTTINGKELKVEGQITYYNRYKRQNVVKDLSVELDRLSEESVNNDISSWTKGRSGEALSLLKKRFSHRPVQEKFVCLNCGFETHADEQAALNIARSWLFLRSQEYKKYQTNKTTGNTDKRAFVETWQSFYRKKLKEVWKPAV

SEQ ID NO: 30031 - protein, 978 aa, synthetic construct
  REGION 1..978: note = engineered CasX variant
QEIKRINKIRRRLVKDSNTKKAGKTGPMKTLLVRVMTPDLRERLENLRKKPENIPQPISNTSRANLNKLLTDYTEMKKAILHVYWEEFQKDPVGLMSRVAQPASKKIDQNKLKPEMDEKGNLTTAGFACSQCGQPLFVYKLEQVSEKGKAYTNYFGRCNVAEHEKLILLAQLKPEKDSDEAVTYSLGKFGQRALDFYSIHVTKESTHPVKPLAQIAGNRYASGPVGKALSDACMGTIASFLSKYQDIIIEHQKVVKGNQKRLESLRELAGKENLEYPSVTLPPQPHTKEGVDAYNEVIARVRMWVNLNLWQKLKLSRDDAKPLLRLKGFPSFPLVERQANEVDWWDMVCNVKKLINEKKEDGKVFWQNLAGYKRQEALRPYLSSEEDRKKGKKFARYQLGDLLLHLEKKHPEDWGKVYDEAWERIDKKVEGLSKHIKLEEERRSEDAQSKAALTDWLRAKASFVIEGLKEADKDEFCRCELKLQKWYGDLRGKPFAIEAENSILDISGFSKQYNCAFIWQKDGVKKLNLYLIINYFKGGKLRFKKIKPEAFEANRFYTVINKKSGEIVPMEVNFNFDDPNLIILPLAFGKRQGREFIWNDLLSLETGSLKLANGRVIEKTLYNRRTRQDEPALFVALTFERREVLDSSNIKPMNLIGVDRGENIPAVIALTDPEGCPLSRFKDSLGNPTHILRIGERYKEKQRTIQAKKEVEQRRAGGYSRKYASKAKNLADDMVRNTARDLLYYAVTQDAMLIFENLSRGFGRQGKRTFMAERQYTRMEDWLTAKLAYEGLPSKTYLSKTLAQYTSKTCSNCGFTITSADYDRVLEKLKKTATGWMTTINGKELKVEGQITYYNRYKRQNVVKDLSVELDRLSEESVNNDISSWTKGRSGEALSLLKKRFSHRPVQEKFVCLNCGFETHADEQAALNIARSWLFLRSQEYKKYQTNKTTGNTDKRAFVETWQSFYRKKLKEVWKPAV

SEQ ID NO: 30032 - protein, 979 aa, synthetic construct
  REGION 1..979: note = engineered CasX variant
QEIKRINKIRRRLVKDSNTKKAGKTGPMKTLLVRVMTPDLRERLENLRKKPENIPQPISNTSRANLNKLLTDYTEMKKAILHVYWEEFQKDPVGLMSRVAQPASKKIDQNKLKPEMDEKGNLTTAGFACSQCGQPLFVYKLEQVSEKGKAYTNYFGRCNVAEHEKLILLAQLKPEKDSDEAVTYSLGKFGQRALDFYSIHVTKESTHPVKPLAQIAGNRYASGPVGKALSDACMGTIASFLSKYQDIIIEHQKVVKGNQKRLESLRELAGKENLEYPSVTLPPQPHTKEGVDAYNEVIARVRMWVNLNLWQKLKLSRDDAKPLLRLKGFPSFPLVERQANEVDWWDMVCNVKKLINEKKEDGKVFWQNLAGYKRQEALRPYLSSEEDRKKGKKFARYQLGDLLLHLEKKHGERDWGKVYDEAWERIDKKVEGLSKHIKLEEERRSEDAQSKAALTDWLRAKASFVIEGLKEADKDEFCRCELKLQKWYGDLRGKPFAIEAENSILDISGFSKQYNCAFIWQKDGVKKLNLYLIINYFKGGKLRFKKIKPEAFEANRFYTVINKKSGEIVPMEVNFNFDDPNLIILPLAFGKRQGREFIWNDLLSLETGSLKLANGRVIEKTLYNRRTRQDEPALFVALTFERREVLDSSNIKPMNLIGVDRGENIPAVIALTDPEGCPLSRFKDSLGNPTHILRIGERYKEKQRTIQAKKEVEQRRAGGYSRKYASKAKNLADDMVRNTARDLLYYAVTQDAMLIFENLSRGFGRQGKRTFMAERQYTRMEDWLTAKLAYEGLPSKTYLSKTLAQYTSKTCSNCGFTITSADYDRVLEKLKKTATGWMTTINGKELKVEGQITYYNRYKRQNVVKDLSVELDRLSEESVNNDISSWTKGRSGEALSLLKKRFSHRPVQEKFVCLNCGFETHADEQAALNIARSWLFLRSQEYKKYQTNKTTGNTDKRAFVETWQSFYRKKLKEVWKPAV

SEQ ID NO: 30033 - protein, 979 aa, synthetic construct
  REGION 1..979: note = engineered CasX variant
QEIKRINKIRRRLVKDSNTKKAGKTGPMKTLLVRVMTPDLRERLENLRKKPENIPQPISNTSRANLNKLLTDYTEMKKAILHVYWEEFQKDPVGLMSRVAQPASKKIDQNKLKPEMDEKGNLTTAGFACSQCGQPLFVYKLEQVSEKGKAYTNYFGRCNVAEHEKLILLAQLKPEKDSDEAVTYSLGKFGQRALDFYSIHVTKESTHPVKPLAQIAGNRYASGPVGKALSDACMGTIASFLSKYQDIIIEHQKVVKGNQKRLESLRELAGKENLEYPSVTLPPQPHTKEGVDAYNEVIARVRMWVNLNLWQKLKLSRDDAKPLLRLKGFPSFPLVERQANEVDWWDMVCNVKKLINEKKEDGKVFWQNLAGYKRQEALRPYLSSEEDRKKGKKFARYQLGDLLLHLEKKHGEYDWGKVYDEAWERIDKKVEGLSKHIKLEEERRSEDAQSKAALTDWLRAKASFVIEGLKEADKDEFCRCELKLQKWYGDLRGKPFAIEAENSILDISGFSKQYNCAFIWQKDGVKKLNLYLIINYFKGGKLRFKKIKPEAFEANRFYTVINKKSGEIVPMEVNFNFDDPNLIILPLAFGKRQGREFIWNDLLSLETGSLKLANGRVIEKTLYNRRTRQDEPALFVALTFERREVLDSSNIKPMNLIGVDRGENIPAVIALTDPEGCPLSRFKDSLGNPTHILRIGERYKEKQRTIQAKKEVEQRRAGGYSRKYASKAKNLADDMVRNTARDLLYYAVTQDAMLIFENLSRGFGRQGKRTFMAERQYTRMEDWLTAKLAYEGLPSKTYLSKTLAQYTSKTCSNCGFTITSADYDRVLEKLKKTATGWMTTINGKELKVEGQITYYNRYKRQNVVKDLSVELDRLSEESVNNDISSWTKGRSGEALSLLKKRFSHRPVQEKFVCLNCGFETHADEQAALNIARSWLFLRSQEYKKYQTNKTTGNTDKRAFVETWQSFYRKKLKEVWKPAV

SEQ ID NO: 30034 - protein, 978 aa, synthetic construct
  REGION 1..978: note = engineered CasX variant
QEIKRINKIRRRLVKDSNTKKAGKTGPMKTLLVRVMTPDLRERLENLRKKPENIPQPISNTSRANLNKLLTDYTEMKKAILHVYWEEFQKDPVGLMSRVAQPASKKIDQNKLKPEMDEKGNLTTAGFACSQCGQPLFVYKLEQVSEKGKAYTNYFGRCNVAEHEKLILLAQLKPEKDSDEAVTYSLGKFGQRALDFYSIHVTKESTHPVKPLAQIAGNRYASGPVGKALSDACMGTIASFLSKYQDIIIEHQKVVKGNQKRLESLRELAGKENLEYPSVTLPPQPHTKEGVDAYNEVIARVRMWVNLNLWQKLKLSRDDAKPLLRLKGFPSFPLVERQANEVDWWDMVCNVKKLINEKKEDGKVFWQNLAGYKRQEALRPYLSSEEDRKKGKKFARYQLGDLLLHLEKKHGEDWGDVYDEAWERIDKKVEGLSKHIKLEEERRSEDAQSKAALTDWLRAKASFVIEGLKEADKDEFCRCELKLQKWYGDLRGKPFAIEAENSILDISGFSKQYNCAFIWQKDGVKKLNLYLIINYFKGGKLRFKKIKPEAFEANRFYTVINKKSGEIVPMEVNFNFDDPNLIILPLAFGKRQGREFIWNDLLSLETGSLKLANGRVIEKTLYNRRTRQDEPALFVALTFERREVLDSSNIKPMNLIGVDRGENIPAVIALTDPEGCPLSRFKDSLGNPTHILRIGERYKEKQRTIQAKKEVEQRRAGGYSRKYASKAKNLADDMVRNTARDLLYYAVTQDAMLIFENLSRGFGRQGKRTFMAERQYTRMEDWLTAKLAYEGLPSKTYLSKTLAQYTSKTCSNCGFTITSADYDRVLEKLKKTATGWMTTINGKELKVEGQITYYNRYKRQNVVKDLSVELDRLSEESVNNDISSWTKGRSGEALSLLKKRFSHRPVQEKFVCLNCGFETHADEQAALNIARSWLFLRSQEYKKYQTNKTTGNTDKRAFVETWQSFYRKKLKEVWKPAV

SEQ ID NO: 30035 - protein, 978 aa, synthetic construct
  REGION 1..978: note = engineered CasX variant
QEIKRINKIRRRLVKDSNTKKAGKTGPMKTLLVRVMTPDLRERLENLRKKPENIPQPISNTSRANLNKLLTDYTEMKKAILHVYWEEFQKDPVGLMSRVAQPASKKIDQNKLKPEMDEKGNLTTAGFACSQCGQPLFVYKLEQVSEKGKAYTNYFGRCNVAEHEKLILLAQLKPEKDSDEAVTYSLGKFGQRALDFYSIHVTKESTHPVKPLAQIAGNRYASGPVGKALSDACMGTIASFLSKYQDIIIEHQKVVKGNQKRLESLRELAGKENLEYPSVTLPPQPHTKEGVDAYNEVIARVRMWVNLNLWQKLKLSRDDAKPLLRLKGFPSFPLVERQANEVDWWDMVCNVKKLINEKKEDGKVFWQNLAGYKRQEALRPYLSSEEDRKKGKKFARYQLGDLLLHLEKKHGEDWGKVYGEAWERIDKKVEGLSKHIKLEEERRSEDAQSKAALTDWLRAKASFVIEGLKEADKDEFCRCELKLQKWYGDLRGKPFAIEAENSILDISGFSKQYNCAFIWQKDGVKKLNLYLIINYFKGGKLRFKKIKPEAFEANRFYTVINKKSGEIVPMEVNFNFDDPNLIILPLAFGKRQGREFIWNDLLSLETGSLKLANGRVIEKTLYNRRTRQDEPALFVALTFERREVLDSSNIKPMNLIGVDRGENIPAVIALTDPEGCPLSRFKDSLGNPTHILRIGERYKEKQRTIQAKKEVEQRRAGGYSRKYASKAKNLADDMVRNTARDLLYYAVTQDAMLIFENLSRGFGRQGKRTFMAERQYTRMEDWLTAKLAYEGLPSKTYLSKTLAQYTSKTCSNCGFTITSADYDRVLEKLKKTATGWMTTINGKELKVEGQITYYNRYKRQNVVKDLSVELDRLSEESVNNDISSWTKGRSGEALSLLKKRFSHRPVQEKFVCLNCGFETHADEQAALNIARSWLFLRSQEYKKYQTNKTTGNTDKRAFVETWQSFYRKKLKEVWKPAV

SEQ ID NO: 30036 - protein, 978 aa, synthetic construct
  REGION 1..978: note = engineered CasX variant
QEIKRINKIRRRLVKDSNTKKAGKTGPMKTLLVRVMTPDLRERLENLRKKPENIPQPISNTSRANLNKLLTDYTEMKKAILHVYWEEFQKDPVGLMSRVAQPASKKIDQNKLKPEMDEKGNLTTAGFACSQCGQPLFVYKLEQVSEKGKAYTNYFGRCNVAEHEKLILLAQLKPEKDSDEAVTYSLGKFGQRALDFYSIHVTKESTHPVKPLAQIAGNRYASGPVGKALSDACMGTIASFLSKYQDIIIEHQKVVKGNQKRLESLRELAGKENLEYPSVTLPPQPHTKEGVDAYNEVIARVRMWVNLNLWQKLKLSRDDAKPLLRLKGFPSFPLVERQANEVDWWDMVCNVKKLINEKKEDGKVFWQNLAGYKRQEALRPYLSSEEDRKKGKKFARYQLGDLLLHLEKKHGEDWGKVYDEAWERIDKKVEGLSKHIKLEEERRSEDAQSKAALTDWLRAKASFVIEGKKEADKDEFCRCELKLQKWYGDLRGKPFAIEAENSILDISGFSKQYNCAFIWQKDGVKKLNLYLIINYFKGGKLRFKKIKPEAFEANRFYTVINKKSGEIVPMEVNFNFDDPNLIILPLAFGKRQGREFIWNDLLSLETGSLKLANGRVIEKTLYNRRTRQDEPALFVALTFERREVLDSSNIKPMNLIGVDRGENIPAVIALTDPEGCPLSRFKDSLGNPTHILRIGERYKEKQRTIQAKKEVEQRRAGGYSRKYASKAKNLADDMVRNTARDLLYYAVTQDAMLIFENLSRGFGRQGKRTFMAERQYTRMEDWLTAKLAYEGLPSKTYLSKTLAQYTSKTCSNCGFTITSADYDRVLEKLKKTATGWMTTINGKELKVEGQITYYNRYKRQNVVKDLSVELDRLSEESVNNDISSWTKGRSGEALSLLKKRFSHRPVQEKFVCLNCGFETHADEQAALNIARSWLFLRSQEYKKYQTNKTTGNTDKRAFVETWQSFYRKKLKEVWKPAV

SEQ ID NO: 30037 - protein, 978 aa, synthetic construct
  REGION 1..978: note = engineered CasX variant
QEIKRINKIRRRLVKDSNTKKAGKTGPMKTLLVRVMTPDLRERLENLRKKPENIPQPISNTSRANLNKLLTDYTEMKKAILHVYWEEFQKDPVGLMSRVAQPASKKIDQNKLKPEMDEKGNLTTAGFACSQCGQPLFVYKLEQVSEKGKAYTNYFGRCNVAEHEKLILLAQLKPEKDSDEAVTYSLGKFGQRALDFYSIHVTKESTHPVKPLAQIAGNRYASGPVGKALSDACMGTIASFLSKYQDIIIEHQKVVKGNQKRLESLRELAGKENLEYPSVTLPPQPHTKEGVDAYNEVIARVRMWVNLNLWQKLKLSRDDAKPLLRLKGFPSFPLVERQANEVDWWDMVCNVKKLINEKKEDGKVFWQNLAGYKRQEALRPYLSSEEDRKKGKKFARYQLGDLLLHLEKKHGEDWGKVYDEAWERIDKKVEGLSKHIKLEEERRSEDAQSKAALTDWLRAKASFVIEGSKEADKDEFCRCELKLQKWYGDLRGKPFAIEAENSILDISGFSKQYNCAFIWQKDGVKKLNLYLIINYFKGGKLRFKKIKPEAFEANRFYTVINKKSGEIVPMEVNFNFDDPNLIILPLAFGKRQGREFIWNDLLSLETGSLKLANGRVIEKTLYNRRTRQDEPALFVALTFERREVLDSSNIKPMNLIGVDRGENIPAVIALTDPEGCPLSRFKDSLGNPTHILRIGERYKEKQRTIQAKKEVEQRRAGGYSRKYASKAKNLADDMVRNTARDLLYYAVTQDAMLIFENLSRGFGRQGKRTFMAERQYTRMEDWLTAKLAYEGLPSKTYLSKTLAQYTSKTCSNCGFTITSADYDRVLEKLKKTATGWMTTINGKELKVEGQITYYNRYKRQNVVKDLSVELDRLSEESVNNDISSWTKGRSGEALSLLKKRFSHRPVQEKFVCLNCGFETHADEQAALNIARSWLFLRSQEYKKYQTNKTTGNTDKRAFVETWQSFYRKKLKEVWKPAV

SEQ ID NO: 30038 - protein, 979 aa, synthetic construct
  REGION 1..979: note = engineered CasX variant
QEIKRINKIRRRLVKDSNTKKAGKTGPMKTLLVRVMTPDLRERLENLRKKPENIPQPISNTSRANLNKLLTDYTEMKKAILHVYWEEFQKDPVGLMSRVAQPASKKIDQNKLKPEMDEKGNLTTAGFACSQCGQPLFVYKLEQVSEKGKAYTNYFGRCNVAEHEKLILLAQLKPEKDSDEAVTYSLGKFGQRALDFYSIHVTKESTHPVKPLAQIAGNRYASGPVGKALSDACMGTIASFLSKYQDIIIEHQKVVKGNQKRLESLRELAGKENLEYPSVTLPPQPHTKEGVDAYNEVIARVRMWVNLNLWQKLKLSRDDAKPLLRLKGFPSFPLVERQANEVDWWDMVCNVKKLINEKKEDGKVFWQNLAGYKRQEALRPYLSSEEDRKKGKKFARYQLGDLLLHLEKKHGEDWGKVYDEAWERIDKKVEGLSKHIKLEEERRSEDAQSKAALTDWLRAKASFVIEGLKEADDKDEFCRCELKLQKWYGDLRGKPFAIEAENSILDISGFSKQYNCAFIWQKDGVKKLNLYLIINYFKGGKLRFKKIKPEAFEANRFYTVINKKSGEIVPMEVNFNFDDPNLIILPLAFGKRQGREFIWNDLLSLETGSLKLANGRVIEKTLYNRRTRQDEPALFVALTFERREVLDSSNIKPMNLIGVDRGENIPAVIALTDPEGCPLSRFKDSLGNPTHILRIGERYKEKQRTIQAKKEVEQRRAGGYSRKYASKAKNLADDMVRNTARDLLYYAVTQDAMLIFENLSRGFGRQGKRTFMAERQYTRMEDWLTAKLAYEGLPSKTYLSKTLAQYTSKTCSNCGFTITSADYDRVLEKLKKTATGWMTTINGKELKVEGQITYYNRYKRQNVVKDLSVELDRLSEESVNNDISSWTKGRSGEALSLLKKRFSHRPVQEKFVCLNCGFETHADEQAALNIARSWLFLRSQEYKKYQTNKTTGNTDKRAFVETWQSFYRKKLKEVWKPAV

SEQ ID NO: 30039 - protein, 979 aa, synthetic construct
  REGION 1..979: note = engineered CasX variant
QEIKRINKIRRRLVKDSNTKKAGKTGPMKTLLVRVMTPDLRERLENLRKKPENIPQPISNTSRANLNKLLTDYTEMKKAILHVYWEEFQKDPVGLMSRVAQPASKKIDQNKLKPEMDEKGNLTTAGFACSQCGQPLFVYKLEQVSEKGKAYTNYFGRCNVAEHEKLILLAQLKPEKDSDEAVTYSLGKFGQRALDFYSIHVTKESTHPVKPLAQIAGNRYASGPVGKALSDACMGTIASFLSKYQDIIIEHQKVVKGNQKRLESLRELAGKENLEYPSVTLPPQPHTKEGVDAYNEVIARVRMWVNLNLWQKLKLSRDDAKPLLRLKGFPSFPLVERQANEVDWWDMVCNVKKLINEKKEDGKVFWQNLAGYKRQEALRPYLSSEEDRKKGKKFARYQLGDLLLHLEKKHGEDWGKVYDEAWERIDKKVEGLSKHIKLEEERRSEDAQSKAALTDWLRAKASFVIEGLKEADKDEFCRCELKLQKWYGDLRGKPFAIEAENSILDISGFSKQYNCAFIWQKDGVKKLNLYLIINYFKGGKLRFKKIKPEAFEANRFYTVINKKSGEIVPMEVNFNFDDPNLIILPLAFGKRQGREFIWNDLLSLETGSLKLANGRVIEKTLYNRRTRQDEPALFVALTFERREVLDSSNIKPMNLIGVDRGENIPAVIALTDPEGCPLSRFKDSLGNPTHILRIGERYKEKQRTIQAKKEVEQRRAGGYSRKYASKAKNLADDMVRNTARDLLYYAVTQDAMLIFENLSRGFGRQGKRTFMAERQYTRMEDWLTAKLAYEGLPSKTYLSKTLAQYTSKTCSNCGFTITSADYDRVLEKLKKTATGWMTTINGKELKVEGQITYYNRYKRQNVVKDLSVELDRLSEESVNNDISSWTKGRSGNEALSLLKKRFSHRPVQEKFVCLNCGFETHADEQAALNIARSWLFLRSQEYKKYQTNKTTGNTDKRAFVETWQSFYRKKLKEVWKPAV

SEQ ID NO: 30040 - protein, 978 aa, synthetic construct
  REGION 1..978: note = engineered CasX variant
QEIKRINKIRRRLVKDSNTKKAGKTGPMKTLLVRVMTPDLRERLENLRKKPENIPQPISNTSRANLNKLLTDYTEMKKAILHVYWEEFQKDPVGLMSRVAQPASKKIDQNKLKPEMDEKGNLTTAGFACSQCGQPLFVYKLEQVSEKGKAYTNYFGRCNVAEHEKLILLAQLKPEKDSDEAVTYSLGKFGQRALDFYSIHVTKESTHPVKPLAQIAGNRYASGPVGKALSDACMGTIASFLSKYQDIIIEHQKVVKGNQKRLESLRELAGKENLEYPSVTLPPQPHTKEGVDAYNEVIARVRMWVNLNLWQKLKLSRDDAKPLLRLKGFPSFPLVERQANEVDWWDMVCNVKKLINEKKEDGKVFWQNLAGYKRQEALRPYLSSEEDRQKGKKFARYQLGDLLLHLEKKHGEDWGKVYDEAWERIDKKVEGLSKHIKLEEERRSEDAQSKAALTDWLRAKASFVIEGLKEADKDEFCRCELKLQKWYGDLRGKPFAIEAENSILDISGFSKQYNCAFIWQKDGVKKLNLYLIINYFKGGKLRFKKIKPEAFEANRFYTVINKKSGEIVPMEVNFNFDDPNLIILPLAFGKRQGREFIWNDLLSLETGSLKLANGRVIEKTLYNRRTRQDEPALFVALTFERREVLDSSNIKPMNLIGVDRGENIPAVIALTDPEGCPLSRFKDSLGNPTHILRIGERYKEKQRTIQAKKEVEQRRAGGYSRKYASKAKNLADDMVRNTARDLLYYAVTQDAMLIFENLSRGFGRQGKRTFMAERQYTRMEDWLTAKLAYEGLPSKTYLSKTLAQYTSKTCSNCGFTITSADYDRVLEKLKKTATGWMTTINGKELKVEGQITYYNRYKRQNVVKDLSVELDRLSEESVNNDISSWTKGRSGEALSLLKKRFSHRPVQEKFVCLNCGFETHADEQAALNIARSWLFLRSQEYKKYQTNKTTGNTDKRAFVETWQSFYRKKLKEVWKPAV

SEQ ID NO: 30041 - protein, 978 aa, synthetic construct
  REGION 1..978: note = engineered CasX variant
QEIKRINKIRRRLVKDSNTKKAGKTGPMKTLLVRVMTPDLRERLENLRKKPENIPQPISNTSRANLNKLLTDYTEMKKAILHVYWEEFQKDPVGLMSRVAQPASKKIDQNKLKPEMDEKGNLTTAGFACSQCGQPLFVYKLEQVSEKGKAYTNYFGRCNVAEHEKLILLAQLKPEKDSDEAVTYSLGKFGQRALDFYSIHVTKESTHPVKPLAQIAGNRYASGPVGKALSDACMGTIASFLSKYQDIIIEHQKVVKGNQKRLESLRELAGKENLEYPSVTLPPQPHTKEGVDAYNEVIARVRMWVNLNLWQKLKLSRDDAKPLLRLKGFPSFPLVERQANEVDWWDMVCNVKKLINEKKEDGKVFWQNLAGYKRQEALRPYLSSEEDRKKGKKFARYQLGDLLLHLEKKHGEDWGKVYDEAWERIDKKVEGLSKHIKLEEERRSEDAQSKAALTDWLRAKASFVIEGLKEADKDEFCRCELKLQKWYGDLRGKPFAIEAENSILDISGFSKQYNCAFIWQKDGVKKLNLYLIINYFKGGKLRFKKIKPEAFEANRFYTVINKKSGEIVPMEVNFNFDDPNLIILPLAFGKRQGREFIWNDLLSLETGSLKLANGRVIEKTLYNRRTRQDEPALFVALTFERREVLDSSNIKPMNLIGVDRGENIPAVIALTDPEGCPLSRFKDSLGNPTHILRIGERYKEKQRTIQAKKEVEQRRAGGYSRKYASKAKNLADDMVRNTARDLLYYAVTQDAMLIFENLSRGFGRQGKRTFMAERQYTRMEDWLTAKLAYEGLPSQTYLSKTLAQYTSKTCSNCGFTITSADYDRVLEKLKKTATGWMTTINGKELKVEGQITYYNRYKRQNVVKDLSVELDRLSEESVNNDISSWTKGRSGEALSLLKKRFSHRPVQEKFVCLNCGFETHADEQAALNIARSWLFLRSQEYKKYQTNKTTGNTDKRAFVETWQSFYRKKLKEVWKPAV

SEQ ID NO: 30042 - protein, 978 aa, synthetic construct
  REGION 1..978: note = engineered CasX variant
QEIKRINKIRRRLVKDSNTKKAGKTGPMKTLLVRVMTPDLRERLENLRKKPENIPQPISNTSRANLNKLLTDYTEMKKAILHVYWEEFQKDPVGLMSRVAQPASKKIDQNKLKPEMDEKGNLTTAGFACSQCGQPLFVYKLEQVSEKGKAYTNYFGRCNVAEHEKLILLAQLKPEKDSDEAVTYSLGKFGQRALDFYSIHVTKESTHPVKPLAQIAGNRYASGPVGKALSDACMGTIASFLSKYQDIIIEHQKVVKGNQKRLESLRELAGKENLEYPSVTLPPQPHTKEGVDAYNEVIARVRMWVNLNLWQKLKLSRDDAKPLLRLKGFPSFPLVERQANEVDWWDMVCNVKKLINEKKEDGKVFWQNLAGYKRQEALRPYLSSEEDRKKGKKFARYQLGDLLLHLEKKHGEDWGKVYDEAWERIDKKVEGLSKHIKLEEERRSEDAQSKAALTDWLRAKASFVIEGLKEADKDEFCRCELKLQKWYGDLRGKPFAIEAENSILDISGFSKQYNCAFIWQKDGVKKLNLYLIINYFKGGKLRFKKIKPEAFEANRFYTVINKKSGEIVPMEVNFNFDDPNLIILPLAFGKRQGREFIWNDLLSLETGSLKLANGRVIEKTLYNRRTRQDEPALFVALTFERREVLDSSNIKPMNLIGVDRGENIPAVIALTDPEGCPLSRFKDSLGNPTHILRIGERYKEKQRTIQAKKEVEQRRAGGYSRKYASKAKNLADDMVRNTARDLLYYAVTQDAMLIFENLSRGFGRQGKRTFMAERQYTRMEDWLTAKLAYNGLPSKTYLSKTLAQYTSKTCSNCGFTITSADYDRVLEKLKKTATGWMTTINGKELKVEGQITYYNRYKRQNVVKDLSVELDRLSEESVNNDISSWTKGRSGEALSLLKKRFSHRPVQEKFVCLNCGFETHADEQAALNIARSWLFLRSQEYKKYQTNKTTGNTDKRAFVETWQSFYRKKLKEVWKPAV

SEQ ID NO: 30043 - protein, 978 aa, synthetic construct
  REGION 1..978: note = engineered CasX variant
QEIKRINKIRRRLVKDSNTKKAGKTGPMKTLLVRVMTPDLRERLENLRKKPENIPQPISNTSRANLNKLLTDYTEMKKAILHVYWEEFQKDPVGLMSRVAQPASKKIDQNKLKPEMDEKGNLTTAGFACSQCGQPLFVYKLEQVSEKGKAYTNYFGRCNVAEHEKLIQLAQLKPEKDSDEAVTYSLGKFGQRALDFYSIHVTKESTHPVKPLAQIAGNRYASGPVGKALSDACMGTIASFLSKYQDIIIEHQKVVKGNQKRLESLRELAGKENLEYPSVTLPPQPHTKEGVDAYNEVIARVRMWVNLNLWQKLKLSRDDAKPLLRLKGFPSFPLVERQANEVDWWDMVCNVKKLINEKKEDGKVFWQNLAGYKRQEALRPYLSSEEDRKKGKKFARYQLGDLLLHLEKKHGEDWGKVYDEAWERIDKKVEGLSKHIKLEEERRSEDAQSKAALTDWLRAKASFVIEGLKEADKDEFCRCELKLQKWYGDLRGKPFAIEAENSILDISGFSKQYNCAFIWQKDGVKKLNLYLIINYFKGGKLRFKKIKPEAFEANRFYTVINKKSGEIVPMEVNFNFDDPNLIILPLAFGKRQGREFIWNDLLSLETGSLKLANGRVIEKTLYNRRTRQDEPALFVALTFERREVLDSSNIKPMNLIGVDRGENIPAVIALTDPEGCPLSRFKDSLGNPTHILRIGERYKEKQRTIQAKKEVEQRRAGGYSRKYASKAKNLADDMVRNTARDLLYYAVTQDAMLIFENLSRGFGRQGKRTFMAERQYTRMEDWLTAKLAYEGLPSKTYLSKTLAQYTSKTCSNCGFTITSADYDRVLEKLKKTATGWMTTINGKELKVEGQITYYNRYKRQNVVKDLSVELDRLSEESVNNDISSWTKGRSGEALSLLKKRFSHRPVQEKFVCLNCGFETHADEQAALNIARSWLFLRSQEYKKYQTNKTTGNTDKRAFVETWQSFYRKKLKEVWKPAV

SEQ ID NO: 30044 - protein, 978 aa, synthetic construct
  REGION 1..978: note = engineered CasX variant
QEIKRINKIRRRLVKDSNTKKAGKTGPMKTLLVRVMTPDLRERLENLRKKPENIPQPISNTSRANLNKLLTDYTEMKKAILHVYWEEFQKDPVGLMSRVAQPASKKIDQNKLKPEMDEKGNLTTAGFACSQCGQPLFVYKLEQVSEKGKAYTNYFGRCNVAEHEKLILLAQLKPEKDSDEAVTYSLGKFGQRALDFYSIHVTKESTHPVKPLAQIAGNRYASGPVGKALSDACMGTIASFLSKYQDIIIEHQKVVKGNQKRLESLRELAGKENLEYPSVTLPPQPHTKEGVDAYNEVIARVRMWVNLNLWQKLKLSRDDAKPLLRLKGFPSFPLVERQANEVDWWDMVCNVKKLINEKKEDGKVFWQNLAIYKRQEALRPYLSSEEDRKKGKKFARYQLGDLLLHLEKKHGEDWGKVYDEAWERIDKKVEGLSKHIKLEEERRSEDAQSKAALTDWLRAKASFVIEGLKEADKDEFCRCELKLQKWYGDLRGKPFAIEAENSILDISGFSKQYNCAFIWQKDGVKKLNLYLIINYFKGGKLRFKKIKPEAFEANRFYTVINKKSGEIVPMEVNFNFDDPNLIILPLAFGKRQGREFIWNDLLSLETGSLKLANGRVIEKTLYNRRTRQDEPALFVALTFERREVLDSSNIKPMNLIGVDRGENIPAVIALTDPEGCPLSRFKDSLGNPTHILRIGERYKEKQRTIQAKKEVEQRRAGGYSRKYASKAKNLADDMVRNTARDLLYYAVTQDAMLIFENLSRGFGRQGKRTFMAERQYTRMEDWLTAKLAYEGLPSKTYLSKTLAQYTSKTCSNCGFTITSADYDRVLEKLKKTATGWMTTINGKELKVEGQITYYNRYKRQNVVKDLSVELDRLSEESVNNDISSWTKGRSGEALSLLKKRFSHRPVQEKFVCLNCGFETHADEQAALNIARSWLFLRSQEYKKYQTNKTTGNTDKRAFVETWQSFYRKKLKEVWKPAV

SEQ ID NO: 30045 - protein, 978 aa, synthetic construct
  REGION 1..978: note = engineered CasX variant
QEIKRINKIRRRLVKDSNTKKAGKTGPMKTLLVRVMTPDLRERLENLRKKPENIPQPISNTSRANLNKLLTDYTEMKKAILHVYWEEFQKDPVGLMSRVAQPASKKIDQNKLKPEMDEKGNLTTAGFACSQCGQPLFVYKLEQVSEKGKAYTNYFGRCNVAEHEKLILLAQLKPEKDSDEAVTYSLGKFGQRALDFYSIHVTKESTHPVKPLAQIAGNRYASGPVGKALSDACMGTIASFLSKYQDIIIEHQKVVKGNQKRLESLRELAGKENLEYPSVTLPPQPHTKEGVDAYNEVIARVRMWVNLNLWQKLKLSRDDAKPLLRLKGFPSFPLVERQANEVDWWDMVCNVKKLINEKKEDGKVFWQNLAGYKRQEALRPYLSSEEDREKGKKFARYQLGDLLLHLEKKHGEDWGKVYDEAWERIDKKVEGLSKHIKLEEERRSEDAQSKAALTDWLRAKASFVIEGLKEADKDEFCRCELKLQKWYGDLRGKPFAIEAENSILDISGFSKQYNCAFIWQKDGVKKLNLYLIINYFKGGKLRFKKIKPEAFEANRFYTVINKKSGEIVPMEVNFNFDDPNLIILPLAFGKRQGREFIWNDLLSLETGSLKLANGRVIEKTLYNRRTRQDEPALFVALTFERREVLDSSNIKPMNLIGVDRGENIPAVIALTDPEGCPLSRFKDSLGNPTHILRIGERYKEKQRTIQAKKEVEQRRAGGYSRKYASKAKNLADDMVRNTARDLLYYAVTQDAMLIFENLSRGFGRQGKRTFMAERQYTRMEDWLTAKLAYEGLPSKTYLSKTLAQYTSKTCSNCGFTITSADYDRVLEKLKKTATGWMTTINGKELKVEGQITYYNRYKRQNVVKDLSVELDRLSEESVNNDISSWTKGRSGEALSLLKKRFSHRPVQEKFVCLNCGFETHADEQAALNIARSWLFLRSQEYKKYQTNKTTGNTDKRAFVETWQSFYRKKLKEVWKPAV

SEQ ID NO: 30046 - protein, 978 aa, synthetic construct
  REGION 1..978: note = engineered CasX variant
QEIKRINKIRRRLVKDSNTKKAGKTGPMKTLLVRVMTPDLRERLENLRKKPENIPQPISNTSRANLNKLLTDYTEMKKAILHVYWEEFQKDPVGLMSRVAQPASKKIDQNKLKPEMDEKGNLTTAGFACSQCGQPLFVYKLEQVSEKGKAYTNYFGRCNVAEHEKLILLAQLKPEKDSDEAVTYSLGKFGQRALDFYSIHVTKESTHPVKPLAQIAGNRYASGPVGKALSDACMGTIASFLSKYQDIIIEHQKVVKGNQKRLESLRELAGKENLEYPSVTLPPQPHTKEGVDAYNEVIARVRMWVNLNLWQKLKLSRDDAKPLLRLKGFPSFPLVERQANEVDWWDMVCNVKKLINEKKEDGKVFWQNLAGYKRQEALRPYLSSEEDRKKGKKFARYQLGDLLLHLEKKHGEDWGKVYDEAWERIDKKVEGLSKHIKLEEERRSEDAQSKAALTDWLRAKASFVIEGLKEADKDEFCRCELKLQKWYGDLRGKPFAIEAENSILDISGFSKQYNCAFIWQKDGVKKLNLYLIINYFKGGKLRFKKIKPEAFEANRFYTVINKKSGEIVIMEVNFNFDDPNLIILPLAFGKRQGREFIWNDLLSLETGSLKLANGRVIEKTLYNRRTRQDEPALFVALTFERREVLDSSNIKPMNLIGVDRGENIPAVIALTDPEGCPLSRFKDSLGNPTHILRIGERYKEKQRTIQAKKEVEQRRAGGYSRKYASKAKNLADDMVRNTARDLLYYAVTQDAMLIFENLSRGFGRQGKRTFMAERQYTRMEDWLTAKLAYEGLPSKTYLSKTLAQYTSKTCSNCGFTITSADYDRVLEKLKKTATGWMTTINGKELKVEGQITYYNRYKRQNVVKDLSVELDRLSEESVNNDISSWTKGRSGEALSLLKKRFSHRPVQEKFVCLNCGFETHADEQAALNIARSWLFLRSQEYKKYQTNKTTGNTDKRAFVETWQSFYRKKLKEVWKPAV

SEQ ID NO: 30047 - protein, 978 aa, synthetic construct
  REGION 1..978: note = engineered CasX variant
QEIKRINKIRRRLVKDSNTKKAGKTGPMKTLLVRVMTPDLRERLENLRKKPENIPQPISNTSRANLNKLLTDYTEMKKAILHVYWEEFQKDPVGLMSRVAQPASKKIDQNKLKPEMDEKGNLTTAGFACSQCGQPLFVYKLEQVSEKGKAYTNYFGRCNVAEHEKLILLAQLKPEKDSDEAVTYSLGKFGQRALDFYSIHVTKESTHPVKPLAQIAGNRYASGPVGKALSGACMGTIASFLSKYQDIIIEHQKVVKGNQKRLESLRELAGKENLEYPSVTLPPQPHTKEGVDAYNEVIARVRMWVNLNLWQKLKLSRDDAKPLLRLKGFPSFPLVERQANEVDWWDMVCNVKKLINEKKEDGKVFWQNLAGYKRQEALRPYLSSEEDRKKGKKFARYQLGDLLLHLEKKHGEDWGKVYDEAWERIDKKVEGLSKHIKLEEERRSEDAQSKAALTDWLRAKASFVIEGLKEADKDEFCRCELKLQKWYGDLRGKPFAIEAENSILDISGFSKQYNCAFIWQKDGVKKLNLYLIINYFKGGKLRFKKIKPEAFEANRFYTVINKKSGEIVPMEVNFNFDDPNLIILPLAFGKRQGREFIWNDLLSLETGSLQLANGRVIEKTLYNRRTRQDEPALFVALTFERREVLDSSNIKPMNLIGVDRGENIPAVIALTDPEGCPLSRFKDSLGNPTHILRIGESYKEKQRTIQAKKEVEQRRAGGYSRKYASKAKNLADDMVRNTARDLLYYAVTQDAMLIFENLSRGFGRQGKRTFMAERQYTRMEDWLTAKLAYEGLPSKTYLSKTLAQYTSKTCSNCGFTITSADYDRVLEKLKKTATGWMTTINGKELKVEGQITYYNRYKRQNVVKDLSVELDRLSEESVNNDISSWTKGRSGEALSLLKKRFSHRPVQEKFVCLNCGFETHADEQAALNIARSWLFLRSQEYKKYQTNKTTGNTDKRAFVETWQSFYRKKLKEVWKPAV

SEQ ID NO: 30048 - protein, 978 aa, synthetic construct
  REGION 1..978: note = engineered CasX variant
QEIKRINKIRRRLVKDSNTKKAGKTGPMKTLLVRVMTPDLRERLENLRKKPENIPQPISNTSRANLNKLLTDYTEMKKAILHVYWEEFQKDPVGLMSRVAQPASKKIDQNKLKPEMDEKGNLTTAGFACSQCGQPLFVYKLEQVSEKGKAYTNYFGRCNVAEHEKLILLAQLKPEKDSDEAVTYSLGKFGQRALDFYSIHVTKESTHPVKPLAQIAGNRYASGPVGKALSDACMGTIASFLSKYQDIIIEHQKVVKGNQKRLESLRELAGKENLEYPSVTLPPQPHTKEGVDAYNEVIARVRMWVNLNLWQKLKLSRDDAKPLLRLKNFPSFPLVERQANEVDWWDMVCNVKKLINEKKEDGKVFWQNLAGYKRQEALRPYLSSEEDRKKGKKFARYQLGDLLLHLEKKHGEDWGKVYDEAWERIDKKVEGLSKHIKLEEERRSEDAQSKAALTDWLRAKASFVIEGLKEADKDEFCRCELKLQKWYGDLRGKPFAIEAENSILDISGFSKQYNCAFIWQKDGVKKLNLYLIINYFKGGKLRFKKIKPEAFEANRFYTVINKKSGEIVPMEVNFNFDDPNLIILPLAFGKRQGREFIWNDLLSLETGSLQLANGRVIEKTLYNRRTRQDEPALFVALTFERREVLDSSNIKPMNLIGVDRGENIPAVIALTDPEGCPLSRFKDSLGNPTHILRIGESYKEKQRTIQAKKEVEQRRAGGYSRKYASKAKNLADDMVRNTARDLLYYAVTQDAMLIFENLSRGFGRQGKRTFMAERQYTRMEDWLTAKLAYEGLPSKTYLSKTLAQYTSKTCSNCGFTITSADYDRVLEKLKKTATGWMTTINGKELKVEGQITYYNRYKRQNVVKDLSVELDRLSEESVNNDISSWTKGRSGEALSLLKKRFSHRPVQEKFVCLNCGFETHADEQAALNIARSWLFLRSQEYKKYQTNKTTGNTDKRAFVETWQSFYRKKLKEVWKPAV

SEQ ID NO: 30049 - protein, 978 aa, synthetic construct
  REGION 1..978: note = engineered CasX variant
QEIKRINKIRRRLVKDSNTKKAGKTGPMKTLLVRVMTPDLRERLENLRKKPENIPQPISNTSRANLNKLLTDYTEMKKAILHVYWEEFQKDPVGLMSRVAQPASKKIDQNKLKPEMDEKGNLTTAGFACSQCGQPLFVYKLEQVSEKGKAYTNYFGRCNVAEHEKLILLAQLKPEKDSDEAVTYSLGKFGQRALDFYSIHVTKESTHPVKPLAQIAGNRYASGPVGKALSDACMGTIASFLSKYQDIIIEHQKVVKGNQKRLESLRELAGKENLEYPSVTLPPQPHTKEGVDAYNEVIARVRMWVNLNLWQKLKLSRDDAKPLLRLKGFPSFPLVERQANEVDWWDMVCNVKKLINEKKEDGKVFWQNLAGYKRQEALRPYLSSEEDRKKGKKFARYQLGDLLNHLEKKHGEDWGKVYDEAWERIDKKVEGLSKHIKLEEERRSEDAQSKAALTDWLRAKASFVIEGLKEADKDEFCRCELKLQKWYGDLRGKPFAIEAENSILDISGFSKQYNCAFIWQKDGVKKLNLYLIINYFKGGKLRFKKIKPEAFEANRFYTVINKKSGEIVPMEVNFNFDDPNLIILPLAFGKRQGREFIWNDLLSLETGSLQLANGRVIEKTLYNRRTRQDEPALFVALTFERREVLDSSNIKPMNLIGVDRGENIPAVIALTDPEGCPLSRFKDSLGNPTHILRIGESYKEKQRTIQAKKEVEQRRAGGYSRKYASKAKNLADDMVRNTARDLLYYAVTQDAMLIFENLSRGFGRQGKRTFMAERQYTRMEDWLTAKLAYEGLPSKTYLSKTLAQYTSKTCSNCGFTITSADYDRVLEKLKKTATGWMTTINGKELKVEGQITYYNRYKRQNVVKDLSVELDRLSEESVNNDISSWTKGRSGEALSLLKKRFSHRPVQEKFVCLNCGFETHADEQAALNIARSWLFLRSQEYKKYQTNKTTGNTDKRAFVETWQSFYRKKLKEVWKPAV

SEQ ID NO: 30050 - protein, 978 aa, synthetic construct
  REGION 1..978: note = engineered CasX variant
QEIKRINKIRRRLVKDSNTKKAGKTGPMKTLLVRVMTPDLRERLENLRKKPENIPQPISNTSRANLNKLLTDYTEMKKAILHVYWEEFQKDPVGLMSRVAQPASKKIDQNKLKPEMDEKGNLTTAGFACSQCGQPLFVYKLEQVSEKGKAYTNYFGRCNVAEHEKLILLAQLKPEKDSDEAVTYSLGKFGQRALDFYSIHVTKESTHPVKPLAQIAGNRYASGPVGKALSDACMGTIASFLSKYQDIIIEHQKVVKGNQKRLESLRELAGKENLEYPSVTLPPQPHTKEGVDAYNEVIARVRMWVNLNLWQKLKLSRDDAKPLLRLKGFPSFPLVERQANEVDWWDMVCNVKKLINEKKEDGKVFWQNLAGYKRQEALRPYLSSEEDRKKGKKFARYQLGDLLWHLEKKHGEDWGKVYDEAWERIDKKVEGLSKHIKLEEERRSEDAQSKAALTDWLRAKASFVIEGLKEADKDEFCRCELKLQKWYGDLRGKPFAIEAENSILDISGFSKQYNCAFIWQKDGVKKLNLYLIINYFKGGKLRFKKIKPEAFEANRFYTVINKKSGEIVPMEVNFNFDDPNLIILPLAFGKRQGREFIWNDLLSLETGSLQLANGRVIEKTLYNRRTRQDEPALFVALTFERREVLDSSNIKPMNLIGVDRGENIPAVIALTDPEGCPLSRFKDSLGNPTHILRIGESYKEKQRTIQAKKEVEQRRAGGYSRKYASKAKNLADDMVRNTARDLLYYAVTQDAMLIFENLSRGFGRQGKRTFMAERQYTRMEDWLTAKLAYEGLPSKTYLSKTLAQYTSKTCSNCGFTITSADYDRVLEKLKKTATGWMTTINGKELKVEGQITYYNRYKRQNVVKDLSVELDRLSEESVNNDISSWTKGRSGEALSLLKKRFSHRPVQEKFVCLNCGFETHADEQAALNIARSWLFLRSQEYKKYQTNKTTGNTDKRAFVETWQSFYRKKLKEVWKPAV

SEQ ID NO: 30051 - protein, 978 aa, synthetic construct
  REGION 1..978: note = engineered CasX variant
QEIKRINKIRRRLVKDSNTKKAGKTGPMKTLLVRVMTPDLRERLENLRKKPENIPQPISNTSRANLNKLLTDYTEMKKAILHVYWEEFQKDPVGLMSRVAQPASKKIDQNKLKPEMDEKGNLTTAGFACSQCGQPLFVYKLEQVSEKGKAYTNYFGRCNVAEHEKLILLAQLKPEKDSDEAVTYSLGKFGQRALDFYSIHVTKESTHPVKPLAQIAGNRYASGPVGKALSDACMGTIASFLSKYQDIIIEHQKVVKGNQKRLESLRELAGKENLEYPSVTLPPQPHTKEGVDAYNEVIARVRMWVNLNLWQKLKLSRDDAKPLLRLKGFPSFPLVERQANEVDWWDMVCNVKKLINEKKEDGKVFWQNLAGYKRQEALRPYLSSEEDRKKGKKFARYQLGDLLLHLYKKHGEDWGKVYDEAWERIDKKVEGLSKHIKLEEERRSEDAQSKAALTDWLRAKASFVIEGLKEADKDEFCRCELKLQKWYGDLRGKPFAIEAENSILDISGFSKQYNCAFIWQKDGVKKLNLYLIINYFKGGKLRFKKIKPEAFEANRFYTVINKKSGEIVPMEVNFNFDDPNLIILPLAFGKRQGREFIWNDLLSLETGSLQLANGRVIEKTLYNRRTRQDEPALFVALTFERREVLDSSNIKPMNLIGVDRGENIPAVIALTDPEGCPLSRFKDSLGNPTHILRIGESYKEKQRTIQAKKEVEQRRAGGYSRKYASKAKNLADDMVRNTARDLLYYAVTQDAMLIFENLSRGFGRQGKRTFMAERQYTRMEDWLTAKLAYEGLPSKTYLSKTLAQYTSKTCSNCGFTITSADYDRVLEKLKKTATGWMTTINGKELKVEGQITYYNRYKRQNVVKDLSVELDRLSEESVNNDISSWTKGRSGEALSLLKKRFSHRPVQEKFVCLNCGFETHADEQAALNIARSWLFLRSQEYKKYQTNKTTGNTDKRAFVETWQSFYRKKLKEVWKPAV

SEQ ID NO: 30052 - protein, 978 aa, synthetic construct
  REGION 1..978: note = engineered CasX variant
QEIKRINKIRRRLVKDSNTKKAGKTGPMKTLLVRVMTPDLRERLENLRKKPENIPQPISNTSRANLNKLLTDYTEMKKAILHVYWEEFQKDPVGLMSRVAQPASKKIDQNKLKPEMDEKGNLTTAGFACSQCGQPLFVYKLEQVSEKGKAYTNYFGRCNVAEHEKLILLAQLKPEKDSDEAVTYSLGKFGQRALDFYSIHVTKESTHPVKPLAQIAGNRYASGPVGKALSDACMGTIASFLSKYQDIIIEHQKVVKGNQKRLESLRELAGKENLEYPSVTLPPQPHTKEGVDAYNEVIARVRMWVNLNLWQKLKLSRDDAKPLLRLKGFPSFPLVERQANEVDWWDMVCNVKKLINEKKEDGKVFWQNLAGYKRQEALRPYLSSEEDRKKGKKFARYQLGDLLLHLEKKHPEDWGKVYDEAWERIDKKVEGLSKHIKLEEERRSEDAQSKAALTDWLRAKASFVIEGLKEADKDEFCRCELKLQKWYGDLRGKPFAIEAENSILDISGFSKQYNCAFIWQKDGVKKLNLYLIINYFKGGKLRFKKIKPEAFEANRFYTVINKKSGEIVPMEVNFNFDDPNLIILPLAFGKRQGREFIWNDLLSLETGSLQLANGRVIEKTLYNRRTRQDEPALFVALTFERREVLDSSNIKPMNLIGVDRGENIPAVIALTDPEGCPLSRFKDSLGNPTHILRIGESYKEKQRTIQAKKEVEQRRAGGYSRKYASKAKNLADDMVRNTARDLLYYAVTQDAMLIFENLSRGFGRQGKRTFMAERQYTRMEDWLTAKLAYEGLPSKTYLSKTLAQYTSKTCSNCGFTITSADYDRVLEKLKKTATGWMTTINGKELKVEGQITYYNRYKRQNVVKDLSVELDRLSEESVNNDISSWTKGRSGEALSLLKKRFSHRPVQEKFVCLNCGFETHADEQAALNIARSWLFLRSQEYKKYQTNKTTGNTDKRAFVETWQSFYRKKLKEVWKPAV

SEQ ID NO: 30053 - protein, 979 aa, synthetic construct
  REGION 1..979: note = engineered CasX variant
QEIKRINKIRRRLVKDSNTKKAGKTGPMKTLLVRVMTPDLRERLENLRKKPENIPQPISNTSRANLNKLLTDYTEMKKAILHVYWEEFQKDPVGLMSRVAQPASKKIDQNKLKPEMDEKGNLTTAGFACSQCGQPLFVYKLEQVSEKGKAYTNYFGRCNVAEHEKLILLAQLKPEKDSDEAVTYSLGKFGQRALDFYSIHVTKESTHPVKPLAQIAGNRYASGPVGKALSDACMGTIASFLSKYQDIIIEHQKVVKGNQKRLESLRELAGKENLEYPSVTLPPQPHTKEGVDAYNEVIARVRMWVNLNLWQKLKLSRDDAKPLLRLKGFPSFPLVERQANEVDWWDMVCNVKKLINEKKEDGKVFWQNLAGYKRQEALRPYLSSEEDRKKGKKFARYQLGDLLLHLEKKHGERDWGKVYDEAWERIDKKVEGLSKHIKLEEERRSEDAQSKAALTDWLRAKASFVIEGLKEADKDEFCRCELKLQKWYGDLRGKPFAIEAENSILDISGFSKQYNCAFIWQKDGVKKLNLYLIINYFKGGKLRFKKIKPEAFEANRFYTVINKKSGEIVPMEVNFNFDDPNLIILPLAFGKRQGREFIWNDLLSLETGSLQLANGRVIEKTLYNRRTRQDEPALFVALTFERREVLDSSNIKPMNLIGVDRGENIPAVIALTDPEGCPLSRFKDSLGNPTHILRIGESYKEKQRTIQAKKEVEQRRAGGYSRKYASKAKNLADDMVRNTARDLLYYAVTQDAMLIFENLSRGFGRQGKRTFMAERQYTRMEDWLTAKLAYEGLPSKTYLSKTLAQYTSKTCSNCGFTITSADYDRVLEKLKKTATGWMTTINGKELKVEGQITYYNRYKRQNVVKDLSVELDRLSEESVNNDISSWTKGRSGEALSLLKKRFSHRPVQEKFVCLNCGFETHADEQAALNIARSWLFLRSQEYKKYQTNKTTGNTDKRAFVETWQSFYRKKLKEVWKPAV

SEQ ID NO: 30054 - protein, 979 aa, synthetic construct
  REGION 1..979: note = engineered CasX variant
QEIKRINKIRRRLVKDSNTKKAGKTGPMKTLLVRVMTPDLRERLENLRKKPENIPQPISNTSRANLNKLLTDYTEMKKAILHVYWEEFQKDPVGLMSRVAQPASKKIDQNKLKPEMDEKGNLTTAGFACSQCGQPLFVYKLEQVSEKGKAYTNYFGRCNVAEHEKLILLAQLKPEKDSDEAVTYSLGKFGQRALDFYSIHVTKESTHPVKPLAQIAGNRYASGPVGKALSDACMGTIASFLSKYQDIIIEHQKVVKGNQKRLESLRELAGKENLEYPSVTLPPQPHTKEGVDAYNEVIARVRMWVNLNLWQKLKLSRDDAKPLLRLKGFPSFPLVERQANEVDWWDMVCNVKKLINEKKEDGKVFWQNLAGYKRQEALRPYLSSEEDRKKGKKFARYQLGDLLLHLEKKHGEYDWGKVYDEAWERIDKKVEGLSKHIKLEEERRSEDAQSKAALTDWLRAKASFVIEGLKEADKDEFCRCELKLQKWYGDLRGKPFAIEAENSILDISGFSKQYNCAFIWQKDGVKKLNLYLIINYFKGGKLRFKKIKPEAFEANRFYTVINKKSGEIVPMEVNFNFDDPNLIILPLAFGKRQGREFIWNDLLSLETGSLQLANGRVIEKTLYNRRTRQDEPALFVALTFERREVLDSSNIKPMNLIGVDRGENIPAVIALTDPEGCPLSRFKDSLGNPTHILRIGESYKEKQRTIQAKKEVEQRRAGGYSRKYASKAKNLADDMVRNTARDLLYYAVTQDAMLIFENLSRGFGRQGKRTFMAERQYTRMEDWLTAKLAYEGLPSKTYLSKTLAQYTSKTCSNCGFTITSADYDRVLEKLKKTATGWMTTINGKELKVEGQITYYNRYKRQNVVKDLSVELDRLSEESVNNDISSWTKGRSGEALSLLKKRFSHRPVQEKFVCLNCGFETHADEQAALNIARSWLFLRSQEYKKYQTNKTTGNTDKRAFVETWQSFYRKKLKEVWKPAV

SEQ ID NO: 30055 - protein, 978 aa, synthetic construct
  REGION 1..978: note = engineered CasX variant
QEIKRINKIRRRLVKDSNTKKAGKTGPMKTLLVRVMTPDLRERLENLRKKPENIPQPISNTSRANLNKLLTDYTEMKKAILHVYWEEFQKDPVGLMSRVAQPASKKIDQNKLKPEMDEKGNLTTAGFACSQCGQPLFVYKLEQVSEKGKAYTNYFGRCNVAEHEKLILLAQLKPEKDSDEAVTYSLGKFGQRALDFYSIHVTKESTHPVKPLAQIAGNRYASGPVGKALSDACMGTIASFLSKYQDIIIEHQKVVKGNQKRLESLRELAGKENLEYPSVTLPPQPHTKEGVDAYNEVIARVRMWVNLNLWQKLKLSRDDAKPLLRLKGFPSFPLVERQANEVDWWDMVCNVKKLINEKKEDGKVFWQNLAGYKRQEALRPYLSSEEDRKKGKKFARYQLGDLLLHLEKKHGEDWGDVYDEAWERIDKKVEGLSKHIKLEEERRSEDAQSKAALTDWLRAKASFVIEGLKEADKDEFCRCELKLQKWYGDLRGKPFAIEAENSILDISGFSKQYNCAFIWQKDGVKKLNLYLIINYFKGGKLRFKKIKPEAFEANRFYTVINKKSGEIVPMEVNFNFDDPNLIILPLAFGKRQGREFIWNDLLSLETGSLQLANGRVIEKTLYNRRTRQDEPALFVALTFERREVLDSSNIKPMNLIGVDRGENIPAVIALTDPEGCPLSRFKDSLGNPTHILRIGESYKEKQRTIQAKKEVEQRRAGGYSRKYASKAKNLADDMVRNTARDLLYYAVTQDAMLIFENLSRGFGRQGKRTFMAERQYTRMEDWLTAKLAYEGLPSKTYLSKTLAQYTSKTCSNCGFTITSADYDRVLEKLKKTATGWMTTINGKELKVEGQITYYNRYKRQNVVKDLSVELDRLSEESVNNDISSWTKGRSGEALSLLKKRFSHRPVQEKFVCLNCGFETHADEQAALNIARSWLFLRSQEYKKYQTNKTTGNTDKRAFVETWQSFYRKKLKEVWKPAV

SEQ ID NO: 30056 - protein, 978 aa, synthetic construct
  REGION 1..978: note = engineered CasX variant
QEIKRINKIRRRLVKDSNTKKAGKTGPMKTLLVRVMTPDLRERLENLRKKPENIPQPISNTSRANLNKLLTDYTEMKKAILHVYWEEFQKDPVGLMSRVAQPASKKIDQNKLKPEMDEKGNLTTAGFACSQCGQPLFVYKLEQVSEKGKAYTNYFGRCNVAEHEKLILLAQLKPEKDSDEAVTYSLGKFGQRALDFYSIHVTKESTHPVKPLAQIAGNRYASGPVGKALSDACMGTIASFLSKYQDIIIEHQKVVKGNQKRLESLRELAGKENLEYPSVTLPPQPHTKEGVDAYNEVIARVRMWVNLNLWQKLKLSRDDAKPLLRLKGFPSFPLVERQANEVDWWDMVCNVKKLINEKKEDGKVFWQNLAGYKRQEALRPYLSSEEDRKKGKKFARYQLGDLLLHLEKKHGEDWGKVYGEAWERIDKKVEGLSKHIKLEEERRSEDAQSKAALTDWLRAKASFVIEGLKEADKDEFCRCELKLQKWYGDLRGKPFAIEAENSILDISGFSKQYNCAFIWQKDGVKKLNLYLIINYFKGGKLRFKKIKPEAFEANRFYTVINKKSGEIVPMEVNFNFDDPNLIILPLAFGKRQGREFIWNDLLSLETGSLQLANGRVIEKTLYNRRTRQDEPALFVALTFERREVLDSSNIKPMNLIGVDRGENIPAVIALTDPEGCPLSRFKDSLGNPTHILRIGESYKEKQRTIQAKKEVEQRRAGGYSRKYASKAKNLADDMVRNTARDLLYYAVTQDAMLIFENLSRGFGRQGKRTFMAERQYTRMEDWLTAKLAYEGLPSKTYLSKTLAQYTSKTCSNCGFTITSADYDRVLEKLKKTATGWMTTINGKELKVEGQITYYNRYKRQNVVKDLSVELDRLSEESVNNDISSWTKGRSGEALSLLKKRFSHRPVQEKFVCLNCGFETHADEQAALNIARSWLFLRSQEYKKYQTNKTTGNTDKRAFVETWQSFYRKKLKEVWKPAV

SEQ ID NO: 30057 - protein, 978 aa, synthetic construct
  REGION 1..978: note = engineered CasX variant
QEIKRINKIRRRLVKDSNTKKAGKTGPMKTLLVRVMTPDLRERLENLRKKPENIPQPISNTSRANLNKLLTDYTEMKKAILHVYWEEFQKDPVGLMSRVAQPASKKIDQNKLKPEMDEKGNLTTAGFACSQCGQPLFVYKLEQVSEKGKAYTNYFGRCNVAEHEKLILLAQLKPEKDSDEAVTYSLGKFGQRALDFYSIHVTKESTHPVKPLAQIAGNRYASGPVGKALSDACMGTIASFLSKYQDIIIEHQKVVKGNQKRLESLRELAGKENLEYPSVTLPPQPHTKEGVDAYNEVIARVRMWVNLNLWQKLKLSRDDAKPLLRLKGFPSFPLVERQANEVDWWDMVCNVKKLINEKKEDGKVFWQNLAGYKRQEALRPYLSSEEDRKKGKKFARYQLGDLLLHLEKKHGEDWGKVYDEAWERIDKKVEGLSKHIKLEEERRSEDAQSKAALTDWLRAKASFVIEGKKEADKDEFCRCELKLQKWYGDLRGKPFAIEAENSILDISGFSKQYNCAFIWQKDGVKKLNLYLIINYFKGGKLRFKKIKPEAFEANRFYTVINKKSGEIVPMEVNFNFDDPNLIILPLAFGKRQGREFIWNDLLSLETGSLQLANGRVIEKTLYNRRTRQDEPALFVALTFERREVLDSSNIKPMNLIGVDRGENIPAVIALTDPEGCPLSRFKDSLGNPTHILRIGESYKEKQRTIQAKKEVEQRRAGGYSRKYASKAKNLADDMVRNTARDLLYYAVTQDAMLIFENLSRGFGRQGKRTFMAERQYTRMEDWLTAKLAYEGLPSKTYLSKTLAQYTSKTCSNCGFTITSADYDRVLEKLKKTATGWMTTINGKELKVEGQITYYNRYKRQNVVKDLSVELDRLSEESVNNDISSWTKGRSGEALSLLKKRFSHRPVQEKFVCLNCGFETHADEQAALNIARSWLFLRSQEYKKYQTNKTTGNTDKRAFVETWQSFYRKKLKEVWKPAV

SEQ ID NO: 30058 - protein, 978 aa, synthetic construct
  REGION 1..978: note = engineered CasX variant
QEIKRINKIRRRLVKDSNTKKAGKTGPMKTLLVRVMTPDLRERLENLRKKPENIPQPISNTSRANLNKLLTDYTEMKKAILHVYWEEFQKDPVGLMSRVAQPASKKIDQNKLKPEMDEKGNLTTAGFACSQCGQPLFVYKLEQVSEKGKAYTNYFGRCNVAEHEKLILLAQLKPEKDSDEAVTYSLGKFGQRALDFYSIHVTKESTHPVKPLAQIAGNRYASGPVGKALSDACMGTIASFLSKYQDIIIEHQKVVKGNQKRLESLRELAGKENLEYPSVTLPPQPHTKEGVDAYNEVIARVRMWVNLNLWQKLKLSRDDAKPLLRLKGFPSFPLVERQANEVDWWDMVCNVKKLINEKKEDGKVFWQNLAGYKRQEALRPYLSSEEDRKKGKKFARYQLGDLLLHLEKKHGEDWGKVYDEAWERIDKKVEGLSKHIKLEEERRSEDAQSKAALTDWLRAKASFVIEGSKEADKDEFCRCELKLQKWYGDLRGKPFAIEAENSILDISGFSKQYNCAFIWQKDGVKKLNLYLIINYFKGGKLRFKKIKPEAFEANRFYTVINKKSGEIVPMEVNFNFDDPNLIILPLAFGKRQGREFIWNDLLSLETGSLQLANGRVIEKTLYNRRTRQDEPALFVALTFERREVLDSSNIKPMNLIGVDRGENIPAVIALTDPEGCPLSRFKDSLGNPTHILRIGESYKEKQRTIQAKKEVEQRRAGGYSRKYASKAKNLADDMVRNTARDLLYYAVTQDAMLIFENLSRGFGRQGKRTFMAERQYTRMEDWLTAKLAYEGLPSKTYLSKTLAQYTSKTCSNCGFTITSADYDRVLEKLKKTATGWMTTINGKELKVEGQITYYNRYKRQNVVKDLSVELDRLSEESVNNDISSWTKGRSGEALSLLKKRFSHRPVQEKFVCLNCGFETHADEQAALNIARSWLFLRSQEYKKYQTNKTTGNTDKRAFVETWQSFYRKKLKEVWKPAV

SEQ ID NO: 30059 - protein, 979 aa, synthetic construct
  REGION 1..979: note = engineered CasX variant
QEIKRINKIRRRLVKDSNTKKAGKTGPMKTLLVRVMTPDLRERLENLRKKPENIPQPISNTSRANLNKLLTDYTEMKKAILHVYWEEFQKDPVGLMSRVAQPASKKIDQNKLKPEMDEKGNLTTAGFACSQCGQPLFVYKLEQVSEKGKAYTNYFGRCNVAEHEKLILLAQLKPEKDSDEAVTYSLGKFGQRALDFYSIHVTKESTHPVKPLAQIAGNRYASGPVGKALSDACMGTIASFLSKYQDIIIEHQKVVKGNQKRLESLRELAGKENLEYPSVTLPPQPHTKEGVDAYNEVIARVRMWVNLNLWQKLKLSRDDAKPLLRLKGFPSFPLVERQANEVDWWDMVCNVKKLINEKKEDGKVFWQNLAGYKRQEALRPYLSSEEDRKKGKKFARYQLGDLLLHLEKKHGEDWGKVYDEAWERIDKKVEGLSKHIKLEEERRSEDAQSKAALTDWLRAKASFVIEGLKEADDKDEFCRCELKLQKWYGDLRGKPFAIEAENSILDISGFSKQYNCAFIWQKDGVKKLNLYLIINYFKGGKLRFKKIKPEAFEANRFYTVINKKSGEIVPMEVNFNFDDPNLIILPLAFGKRQGREFIWNDLLSLETGSLQLANGRVIEKTLYNRRTRQDEPALFVALTFERREVLDSSNIKPMNLIGVDRGENIPAVIALTDPEGCPLSRFKDSLGNPTHILRIGESYKEKQRTIQAKKEVEQRRAGGYSRKYASKAKNLADDMVRNTARDLLYYAVTQDAMLIFENLSRGFGRQGKRTFMAERQYTRMEDWLTAKLAYEGLPSKTYLSKTLAQYTSKTCSNCGFTITSADYDRVLEKLKKTATGWMTTINGKELKVEGQITYYNRYKRQNVVKDLSVELDRLSEESVNNDISSWTKGRSGEALSLLKKRFSHRPVQEKFVCLNCGFETHADEQAALNIARSWLFLRSQEYKKYQTNKTTGNTDKRAFVETWQSFYRKKLKEVWKPAV

SEQ ID NO: 30060 - protein, 979 aa, synthetic construct
  REGION 1..979: note = engineered CasX variant
QEIKRINKIRRRLVKDSNTKKAGKTGPMKTLLVRVMTPDLRERLENLRKKPENIPQPISNTSRANLNKLLTDYTEMKKAILHVYWEEFQKDPVGLMSRVAQPASKKIDQNKLKPEMDEKGNLTTAGFACSQCGQPLFVYKLEQVSEKGKAYTNYFGRCNVAEHEKLILLAQLKPEKDSDEAVTYSLGKFGQRALDFYSIHVTKESTHPVKPLAQIAGNRYASGPVGKALSDACMGTIASFLSKYQDIIIEHQKVVKGNQKRLESLRELAGKENLEYPSVTLPPQPHTKEGVDAYNEVIARVRMWVNLNLWQKLKLSRDDAKPLLRLKGFPSFPLVERQANEVDWWDMVCNVKKLINEKKEDGKVFWQNLAGYKRQEALRPYLSSEEDRKKGKKFARYQLGDLLLHLEKKHGEDWGKVYDEAWERIDKKVEGLSKHIKLEEERRSEDAQSKAALTDWLRAKASFVIEGLKEADKDEFCRCELKLQKWYGDLRGKPFAIEAENSILDISGFSKQYNCAFIWQKDGVKKLNLYLIINYFKGGKLRFKKIKPEAFEANRFYTVINKKSGEIVPMEVNFNFDDPNLIILPLAFGKRQGREFIWNDLLSLETGSLQLANGRVIEKTLYNRRTRQDEPALFVALTFERREVLDSSNIKPMNLIGVDRGENIPAVIALTDPEGCPLSRFKDSLGNPTHILRIGESYKEKQRTIQAKKEVEQRRAGGYSRKYASKAKNLADDMVRNTARDLLYYAVTQDAMLIFENLSRGFGRQGKRTFMAERQYTRMEDWLTAKLAYEGLPSKTYLSKTLAQYTSKTCSNCGFTITSADYDRVLEKLKKTATGWMTTINGKELKVEGQITYYNRYKRQNVVKDLSVELDRLSEESVNNDISSWTKGRSGNEALSLLKKRFSHRPVQEKFVCLNCGFETHADEQAALNIARSWLFLRSQEYKKYQTNKTTGNTDKRAFVETWQSFYRKKLKEVWKPAV

SEQ ID NO: 30061 - protein, 978 aa, synthetic construct
  REGION 1..978: note = engineered CasX variant
QEIKRINKIRRRLVKDSNTKKAGKTGPMKTLLVRVMTPDLRERLENLRKKPENIPQPISNTSRANLNKLLTDYTEMKKAILHVYWEEFQKDPVGLMSRVAQPASKKIDQNKLKPEMDEKGNLTTAGFACSQCGQPLFVYKLEQVSEKGKAYTNYFGRCNVAEHEKLILLAQLKPEKDSDEAVTYSLGKFGQRALDFYSIHVTKESTHPVKPLAQIAGNRYASGPVGKALSDACMGTIASFLSKYQDIIIEHQKVVKGNQKRLESLRELAGKENLEYPSVTLPPQPHTKEGVDAYNEVIARVRMWVNLNLWQKLKLSRDDAKPLLRLKGFPSFPLVERQANEVDWWDMVCNVKKLINEKKEDGKVFWQNLAGYKRQEALRPYLSSEEDRQKGKKFARYQLGDLLLHLEKKHGEDWGKVYDEAWERIDKKVEGLSKHIKLEEERRSEDAQSKAALTDWLRAKASFVIEGLKEADKDEFCRCELKLQKWYGDLRGKPFAIEAENSILDISGFSKQYNCAFIWQKDGVKKLNLYLIINYFKGGKLRFKKIKPEAFEANRFYTVINKKSGEIVPMEVNFNFDDPNLIILPLAFGKRQGREFIWNDLLSLETGSLQLANGRVIEKTLYNRRTRQDEPALFVALTFERREVLDSSNIKPMNLIGVDRGENIPAVIALTDPEGCPLSRFKDSLGNPTHILRIGESYKEKQRTIQAKKEVEQRRAGGYSRKYASKAKNLADDMVRNTARDLLYYAVTQDAMLIFENLSRGFGRQGKRTFMAERQYTRMEDWLTAKLAYEGLPSKTYLSKTLAQYTSKTCSNCGFTITSADYDRVLEKLKKTATGWMTTINGKELKVEGQITYYNRYKRQNVVKDLSVELDRLSEESVNNDISSWTKGRSGEALSLLKKRFSHRPVQEKFVCLNCGFETHADEQAALNIARSWLFLRSQEYKKYQTNKTTGNTDKRAFVETWQSFYRKKLKEVWKPAV

SEQ ID NO: 30062 - protein, 978 aa, synthetic construct
  REGION 1..978: note = engineered CasX variant
QEIKRINKIRRRLVKDSNTKKAGKTGPMKTLLVRVMTPDLRERLENLRKKPENIPQPISNTSRANLNKLLTDYTEMKKAILHVYWEEFQKDPVGLMSRVAQPASKKIDQNKLKPEMDEKGNLTTAGFACSQCGQPLFVYKLEQVSEKGKAYTNYFGRCNVAEHEKLILLAQLKPEKDSDEAVTYSLGKFGQRALDFYSIHVTKESTHPVKPLAQIAGNRYASGPVGKALSDACMGTIASFLSKYQDIIIEHQKVVKGNQKRLESLRELAGKENLEYPSVTLPPQPHTKEGVDAYNEVIARVRMWVNLNLWQKLKLSRDDAKPLLRLKGFPSFPLVERQANEVDWWDMVCNVKKLINEKKEDGKVFWQNLAGYKRQEALRPYLSSEEDRKKGKKFARYQLGDLLLHLEKKHGEDWGKVYDEAWERIDKKVEGLSKHIKLEEERRSEDAQSKAALTDWLRAKASFVIEGLKEADKDEFCRCELKLQKWYGDLRGKPFAIEAENSILDISGFSKQYNCAFIWQKDGVKKLNLYLIINYFKGGKLRFKKIKPEAFEANRFYTVINKKSGEIVPMEVNFNFDDPNLIILPLAFGKRQGREFIWNDLLSLETGSLQLANGRVIEKTLYNRRTRQDEPALFVALTFERREVLDSSNIKPMNLIGVDRGENIPAVIALTDPEGCPLSRFKDSLGNPTHILRIGESYKEKQRTIQAKKEVEQRRAGGYSRKYASKAKNLADDMVRNTARDLLYYAVTQDAMLIFENLSRGFGRQGKRTFMAERQYTRMEDWLTAKLAYEGLPSQTYLSKTLAQYTSKTCSNCGFTITSADYDRVLEKLKKTATGWMTTINGKELKVEGQITYYNRYKRQNVVKDLSVELDRLSEESVNNDISSWTKGRSGEALSLLKKRFSHRPVQEKFVCLNCGFETHADEQAALNIARSWLFLRSQEYKKYQTNKTTGNTDKRAFVETWQSFYRKKLKEVWKPAV

SEQ ID NO: 30063 - protein, 978 aa, synthetic construct
  REGION 1..978: note = engineered CasX variant
QEIKRINKIRRRLVKDSNTKKAGKTGPMKTLLVRVMTPDLRERLENLRKKPENIPQPISNTSRANLNKLLTDYTEMKKAILHVYWEEFQKDPVGLMSRVAQPASKKIDQNKLKPEMDEKGNLTTAGFACSQCGQPLFVYKLEQVSEKGKAYTNYFGRCNVAEHEKLILLAQLKPEKDSDEAVTYSLGKFGQRALDFYSIHVTKESTHPVKPLAQIAGNRYASGPVGKALSDACMGTIASFLSKYQDIIIEHQKVVKGNQKRLESLRELAGKENLEYPSVTLPPQPHTKEGVDAYNEVIARVRMWVNLNLWQKLKLSRDDAKPLLRLKGFPSFPLVERQANEVDWWDMVCNVKKLINEKKEDGKVFWQNLAGYKRQEALRPYLSSEEDRKKGKKFARYQLGDLLLHLEKKHGEDWGKVYDEAWERIDKKVEGLSKHIKLEEERRSEDAQSKAALTDWLRAKASFVIEGLKEADKDEFCRCELKLQKWYGDLRGKPFAIEAENSILDISGFSKQYNCAFIWQKDGVKKLNLYLIINYFKGGKLRFKKIKPEAFEANRFYTVINKKSGEIVPMEVNFNFDDPNLIILPLAFGKRQGREFIWNDLLSLETGSLQLANGRVIEKTLYNRRTRQDEPALFVALTFERREVLDSSNIKPMNLIGVDRGENIPAVIALTDPEGCPLSRFKDSLGNPTHILRIGESYKEKQRTIQAKKEVEQRRAGGYSRKYASKAKNLADDMVRNTARDLLYYAVTQDAMLIFENLSRGFGRQGKRTFMAERQYTRMEDWLTAKLAYNGLPSKTYLSKTLAQYTSKTCSNCGFTITSADYDRVLEKLKKTATGWMTTINGKELKVEGQITYYNRYKRQNVVKDLSVELDRLSEESVNNDISSWTKGRSGEALSLLKKRFSHRPVQEKFVCLNCGFETHADEQAALNIARSWLFLRSQEYKKYQTNKTTGNTDKRAFVETWQSFYRKKLKEVWKPAV

SEQ ID NO: 30064 - protein, 978 aa, synthetic construct
  REGION 1..978: note = engineered CasX variant
QEIKRINKIRRRLVKDSNTKKAGKTGPMKTLLVRVMTPDLRERLENLRKKPENIPQPISNTSRANLNKLLTDYTEMKKAILHVYWEEFQKDPVGLMSRVAQPASKKIDQNKLKPEMDEKGNLTTAGFACSQCGQPLFVYKLEQVSEKGKAYTNYFGRCNVAEHEKLIQLAQLKPEKDSDEAVTYSLGKFGQRALDFYSIHVTKESTHPVKPLAQIAGNRYASGPVGKALSDACMGTIASFLSKYQDIIIEHQKVVKGNQKRLESLRELAGKENLEYPSVTLPPQPHTKEGVDAYNEVIARVRMWVNLNLWQKLKLSRDDAKPLLRLKGFPSFPLVERQANEVDWWDMVCNVKKLINEKKEDGKVFWQNLAGYKRQEALRPYLSSEEDRKKGKKFARYQLGDLLLHLEKKHGEDWGKVYDEAWERIDKKVEGLSKHIKLEEERRSEDAQSKAALTDWLRAKASFVIEGLKEADKDEFCRCELKLQKWYGDLRGKPFAIEAENSILDISGFSKQYNCAFIWQKDGVKKLNLYLIINYFKGGKLRFKKIKPEAFEANRFYTVINKKSGEIVPMEVNFNFDDPNLIILPLAFGKRQGREFIWNDLLSLETGSLQLANGRVIEKTLYNRRTRQDEPALFVALTFERREVLDSSNIKPMNLIGVDRGENIPAVIALTDPEGCPLSRFKDSLGNPTHILRIGESYKEKQRTIQAKKEVEQRRAGGYSRKYASKAKNLADDMVRNTARDLLYYAVTQDAMLIFENLSRGFGRQGKRTFMAERQYTRMEDWLTAKLAYEGLPSKTYLSKTLAQYTSKTCSNCGFTITSADYDRVLEKLKKTATGWMTTINGKELKVEGQITYYNRYKRQNVVKDLSVELDRLSEESVNNDISSWTKGRSGEALSLLKKRFSHRPVQEKFVCLNCGFETHADEQAALNIARSWLFLRSQEYKKYQTNKTTGNTDKRAFVETWQSFYRKKLKEVWKPAV

SEQ ID NO: 30065 - protein, 978 aa, synthetic construct
  REGION 1..978: note = engineered CasX variant
QEIKRINKIRRRLVKDSNTKKAGKTGPMKTLLVRVMTPDLRERLENLRKKPENIPQPISNTSRANLNKLLTDYTEMKKAILHVYWEEFQKDPVGLMSRVAQPASKKIDQNKLKPEMDEKGNLTTAGFACSQCGQPLFVYKLEQVSEKGKAYTNYFGRCNVAEHEKLILLAQLKPEKDSDEAVTYSLGKFGQRALDFYSIHVTKESTHPVKPLAQIAGNRYASGPVGKALSDACMGTIASFLSKYQDIIIEHQKVVKGNQKRLESLRELAGKENLEYPSVTLPPQPHTKEGVDAYNEVIARVRMWVNLNLWQKLKLSRDDAKPLLRLKGFPSFPLVERQANEVDWWDMVCNVKKLINEKKEDGKVFWQNLAIYKRQEALRPYLSSEEDRKKGKKFARYQLGDLLLHLEKKHGEDWGKVYDEAWERIDKKVEGLSKHIKLEEERRSEDAQSKAALTDWLRAKASFVIEGLKEADKDEFCRCELKLQKWYGDLRGKPFAIEAENSILDISGFSKQYNCAFIWQKDGVKKLNLYLIINYFKGGKLRFKKIKPEAFEANRFYTVINKKSGEIVPMEVNFNFDDPNLIILPLAFGKRQGREFIWNDLLSLETGSLQLANGRVIEKTLYNRRTRQDEPALFVALTFERREVLDSSNIKPMNLIGVDRGENIPAVIALTDPEGCPLSRFKDSLGNPTHILRIGESYKEKQRTIQAKKEVEQRRAGGYSRKYASKAKNLADDMVRNTARDLLYYAVTQDAMLIFENLSRGFGRQGKRTFMAERQYTRMEDWLTAKLAYEGLPSKTYLSKTLAQYTSKTCSNCGFTITSADYDRVLEKLKKTATGWMTTINGKELKVEGQITYYNRYKRQNVVKDLSVELDRLSEESVNNDISSWTKGRSGEALSLLKKRFSHRPVQEKFVCLNCGFETHADEQAALNIARSWLFLRSQEYKKYQTNKTTGNTDKRAFVETWQSFYRKKLKEVWKPAV

SEQ ID NO: 30066 - protein, 978 aa, synthetic construct
  REGION 1..978: note = engineered CasX variant
QEIKRINKIRRRLVKDSNTKKAGKTGPMKTLLVRVMTPDLRERLENLRKKPENIPQPISNTSRANLNKLLTDYTEMKKAILHVYWEEFQKDPVGLMSRVAQPASKKIDQNKLKPEMDEKGNLTTAGFACSQCGQPLFVYKLEQVSEKGKAYTNYFGRCNVAEHEKLILLAQLKPEKDSDEAVTYSLGKFGQRALDFYSIHVTKESTHPVKPLAQIAGNRYASGPVGKALSDACMGTIASFLSKYQDIIIEHQKVVKGNQKRLESLRELAGKENLEYPSVTLPPQPHTKEGVDAYNEVIARVRMWVNLNLWQKLKLSRDDAKPLLRLKGFPSFPLVERQANEVDWWDMVCNVKKLINEKKEDGKVFWQNLAGYKRQEALRPYLSSEEDREKGKKFARYQLGDLLLHLEKKHGEDWGKVYDEAWERIDKKVEGLSKHIKLEEERRSEDAQSKAALTDWLRAKASFVIEGLKEADKDEFCRCELKLQKWYGDLRGKPFAIEAENSILDISGFSKQYNCAFIWQKDGVKKLNLYLIINYFKGGKLRFKKIKPEAFEANRFYTVINKKSGEIVPMEVNFNFDDPNLIILPLAFGKRQGREFIWNDLLSLETGSLQLANGRVIEKTLYNRRTRQDEPALFVALTFERREVLDSSNIKPMNLIGVDRGENIPAVIALTDPEGCPLSRFKDSLGNPTHILRIGESYKEKQRTIQAKKEVEQRRAGGYSRKYASKAKNLADDMVRNTARDLLYYAVTQDAMLIFENLSRGFGRQGKRTFMAERQYTRMEDWLTAKLAYEGLPSKTYLSKTLAQYTSKTCSNCGFTITSADYDRVLEKLKKTATGWMTTINGKELKVEGQITYYNRYKRQNVVKDLSVELDRLSEESVNNDISSWTKGRSGEALSLLKKRFSHRPVQEKFVCLNCGFETHADEQAALNIARSWLFLRSQEYKKYQTNKTTGNTDKRAFVETWQSFYRKKLKEVWKPAV

SEQ ID NO: 30067 - protein, 978 aa, synthetic construct
  REGION 1..978: note = engineered CasX variant
QEIKRINKIRRRLVKDSNTKKAGKTGPMKTLLVRVMTPDLRERLENLRKKPENIPQPISNTSRANLNKLLTDYTEMKKAILHVYWEEFQKDPVGLMSRVAQPASKKIDQNKLKPEMDEKGNLTTAGFACSQCGQPLFVYKLEQVSEKGKAYTNYFGRCNVAEHEKLILLAQLKPEKDSDEAVTYSLGKFGQRALDFYSIHVTKESTHPVKPLAQIAGNRYASGPVGKALSDACMGTIASFLSKYQDIIIEHQKVVKGNQKRLESLRELAGKENLEYPSVTLPPQPHTKEGVDAYNEVIARVRMWVNLNLWQKLKLSRDDAKPLLRLKGFPSFPLVERQANEVDWWDMVCNVKKLINEKKEDGKVFWQNLAGYKRQEALRPYLSSEEDRKKGKKFARYQLGDLLLHLEKKHGEDWGKVYDEAWERIDKKVEGLSKHIKLEEERRSEDAQSKAALTDWLRAKASFVIEGLKEADKDEFCRCELKLQKWYGDLRGKPFAIEAENSILDISGFSKQYNCAFIWQKDGVKKLNLYLIINYFKGGKLRFKKIKPEAFEANRFYTVINKKSGEIVIMEVNFNFDDPNLIILPLAFGKRQGREFIWNDLLSLETGSLQLANGRVIEKTLYNRRTRQDEPALFVALTFERREVLDSSNIKPMNLIGVDRGENIPAVIALTDPEGCPLSRFKDSLGNPTHILRIGESYKEKQRTIQAKKEVEQRRAGGYSRKYASKAKNLADDMVRNTARDLLYYAVTQDAMLIFENLSRGFGRQGKRTFMAERQYTRMEDWLTAKLAYEGLPSKTYLSKTLAQYTSKTCSNCGFTITSADYDRVLEKLKKTATGWMTTINGKELKVEGQITYYNRYKRQNVVKDLSVELDRLSEESVNNDISSWTKGRSGEALSLLKKRFSHRPVQEKFVCLNCGFETHADEQAALNIARSWLFLRSQEYKKYQTNKTTGNTDKRAFVETWQSFYRKKLKEVWKPAV

SEQ ID NO: 30068 - protein, 980 aa, synthetic construct
  REGION 1..980: note = engineered CasX variant
QEIKRINKIRRRLVKDSNTKKAGKTRGPMKTLLVRVMTPDLRERLENLRKKPENIPQPISNTSRANLNKLLTDYTEMKKAILHVYWEEFQKDPVGLMSRVAQPASKKIDQNKLKPEMDEKGNLTTAGFACSQCGQPLFVYKLEQVSEKGKAYTNYFGRCNVAEHEKLILLAQLKPEKDSDEAVTYSLGKFGQRALDFYSIHVTKESTHPVKPLAQIAGNRYASSYPVGKALSDACMGTIASFLSKYQDIIIEHQKVVKGNQKRLESLRELAGKENLEYPSVTLPPQPHTKEGVDAYNEVIARVRMWVNLNLWQKLKLSRDDAKPLLRLKGFPSFPLVERQANEVDWWDMVCNVKKLINEKKEDGKVFWQNLAGYKRQEALRPYLSSEEDRKKGKKFARYQLGDLLLHLEKKHGEDWGKVYDEAWERIDKKVEGLSKHIKLEEERRSEDAQSKAALTDWLRAKASFVIEGLKEADKDEFCRCELKLQKWYGDLRGKPFAIEAENSILDISGFSKQYNCAFIWQKDGVKKLNLYLIINYFKGGKLRFKKIKPEAFEANRFYTVINKKSGEIVPMEVNFNFDDPNLIILPLAFGKRQGREFIWNDLLSLETGSLKLANGRVIEKTLYNRRTRQDEPALFVALTFERREVLDSSNIKPMNLIGVDRGENIPAVIALTDPEGCPLSRFKDSLGNPTHILRIGESYKEKQRTIQAKKEVEQRRAGGYSRKYASKAKNLADDMVRNTARDLLYYAVTQDAMLIFENLSRGFGRQGKRTFMAERQYTRMEDWLTAKLAYEGLPSKTYLSKTLAQYTSKTCSNCGFTITSADYDRVLEKLKKTATGWMTTINGKELKVEGQITYYNRYKRQNVVKDLSVELDRLSEESVNNDISSWTKGRSGEALSLLKKRFSHRPVQEKFVCLNCGFETHADEQAALNIARSWLFLRSQEYKKYQTNKTTGNTDKRAFVETWQSFYRKKLKEVWKPAV

SEQ ID NO: 30069 - protein, 980 aa, synthetic construct
  REGION 1..980: note = engineered CasX variant
QEIKRINKIRRRLVKDSNTKKAGKTRGPMKTLLVRVMTPDLRERLENLRKKPENIPQPISNTSRANLNKLLTDYTEMKKAILHVYWEEFQKDPVGLMSRVAQPASKKIDQNKLKPEMDEKGNLTTAGFACSQCGQPLFVYKLEQVSEKGKAYTNYFGRCNVAEHEKLILLAQLKPEKDSDEAVTYSLGKFGQRALDFYSIHVTKESTHPVKPLAQIAGNRYASSHPVGKALSDACMGTIASFLSKYQDIIIEHQKVVKGNQKRLESLRELAGKENLEYPSVTLPPQPHTKEGVDAYNEVIARVRMWVNLNLWQKLKLSRDDAKPLLRLKGFPSFPLVERQANEVDWWDMVCNVKKLINEKKEDGKVFWQNLAGYKRQEALRPYLSSEEDRKKGKKFARYQLGDLLLHLEKKHGEDWGKVYDEAWERIDKKVEGLSKHIKLEEERRSEDAQSKAALTDWLRAKASFVIEGLKEADKDEFCRCELKLQKWYGDLRGKPFAIEAENSILDISGFSKQYNCAFIWQKDGVKKLNLYLIINYFKGGKLRFKKIKPEAFEANRFYTVINKKSGEIVPMEVNFNFDDPNLIILPLAFGKRQGREFIWNDLLSLETGSLKLANGRVIEKTLYNRRTRQDEPALFVALTFERREVLDSSNIKPMNLIGVDRGENIPAVIALTDPEGCPLSRFKDSLGNPTHILRIGESYKEKQRTIQAKKEVEQRRAGGYSRKYASKAKNLADDMVRNTARDLLYYAVTQDAMLIFENLSRGFGRQGKRTFMAERQYTRMEDWLTAKLAYEGLPSKTYLSKTLAQYTSKTCSNCGFTITSADYDRVLEKLKKTATGWMTTINGKELKVEGQITYYNRYKRQNVVKDLSVELDRLSEESVNNDISSWTKGRSGEALSLLKKRFSHRPVQEKFVCLNCGFETHADEQAALNIARSWLFLRSQEYKKYQTNKTTGNTDKRAFVETWQSFYRKKLKEVWKPAV

SEQ ID NO: 30070 - protein, 980 aa, synthetic construct
  REGION 1..980: note = engineered CasX variant
QEIKRINKIRRRLVKDSNTKKAGKTRGPMKTLLVRVMTPDLRERLENLRKKPENIPQPISNTSRANLNKLLTDYTEMKKAILHVYWEEFQKDPVGLMSRVAQPASKKIDQNKLKPEMDEKGNLTTAGFACSQCGQPLFVYKLEQVSEKGKAYTNYFGRCNVAEHEKLILLAQLKPEKDSDEAVTYSLGKFGQRALDFYSIHVTKESTHPVKPLAQIAGNRYASSSPVGKALSDACMGTIASFLSKYQDIIIEHQKVVKGNQKRLESLRELAGKENLEYPSVTLPPQPHTKEGVDAYNEVIARVRMWVNLNLWQKLKLSRDDAKPLLRLKGFPSFPLVERQANEVDWWDMVCNVKKLINEKKEDGKVFWQNLAGYKRQEALRPYLSSEEDRKKGKKFARYQLGDLLLHLEKKHGEDWGKVYDEAWERIDKKVEGLSKHIKLEEERRSEDAQSKAALTDWLRAKASFVIEGLKEADKDEFCRCELKLQKWYGDLRGKPFAIEAENSILDISGFSKQYNCAFIWQKDGVKKLNLYLIINYFKGGKLRFKKIKPEAFEANRFYTVINKKSGEIVPMEVNFNFDDPNLIILPLAFGKRQGREFIWNDLLSLETGSLKLANGRVIEKTLYNRRTRQDEPALFVALTFERREVLDSSNIKPMNLIGVDRGENIPAVIALTDPEGCPLSRFKDSLGNPTHILRIGESYKEKQRTIQAKKEVEQRRAGGYSRKYASKAKNLADDMVRNTARDLLYYAVTQDAMLIFENLSRGFGRQGKRTFMAERQYTRMEDWLTAKLAYEGLPSKTYLSKTLAQYTSKTCSNCGFTITSADYDRVLEKLKKTATGWMTTINGKELKVEGQITYYNRYKRQNVVKDLSVELDRLSEESVNNDISSWTKGRSGEALSLLKKRFSHRPVQEKFVCLNCGFETHADEQAALNIARSWLFLRSQEYKKYQTNKTTGNTDKRAFVETWQSFYRKKLKEVWKPAV

SEQ ID NO: 30071 - protein, 980 aa, synthetic construct
  REGION 1..980: note = engineered CasX variant
QEIKRINKIRRRLVKDSNTKKAGKTRGPMKTLLVRVMTPDLRERLENLRKKPENIPQPISNTSRANLNKLLTDYTEMKKAILHVYWEEFQKDPVGLMSRVAQPASKKIDQNKLKPEMDEKGNLTTAGFACSQCGQPLFVYKLEQVSEKGKAYTNYFGRCNVAEHEKLILLAQLKPEKDSDEAVTYSLGKFGQRALDFYSIHVTKESTHPVKPLAQIAGNRYASSTPVGKALSDACMGTIASFLSKYQDIIIEHQKVVKGNQKRLESLRELAGKENLEYPSVTLPPQPHTKEGVDAYNEVIARVRMWVNLNLWQKLKLSRDDAKPLLRLKGFPSFPLVERQANEVDWWDMVCNVKKLINEKKEDGKVFWQNLAGYKRQEALRPYLSSEEDRKKGKKFARYQLGDLLLHLEKKHGEDWGKVYDEAWERIDKKVEGLSKHIKLEEERRSEDAQSKAALTDWLRAKASFVIEGLKEADKDEFCRCELKLQKWYGDLRGKPFAIEAENSILDISGFSKQYNCAFIWQKDGVKKLNLYLIINYFKGGKLRFKKIKPEAFEANRFYTVINKKSGEIVPMEVNFNFDDPNLIILPLAFGKRQGREFIWNDLLSLETGSLKLANGRVIEKTLYNRRTRQDEPALFVALTFERREVLDSSNIKPMNLIGVDRGENIPAVIALTDPEGCPLSRFKDSLGNPTHILRIGESYKEKQRTIQAKKEVEQRRAGGYSRKYASKAKNLADDMVRNTARDLLYYAVTQDAMLIFENLSRGFGRQGKRTFMAERQYTRMEDWLTAKLAYEGLPSKTYLSKTLAQYTSKTCSNCGFTITSADYDRVLEKLKKTATGWMTTINGKELKVEGQITYYNRYKRQNVVKDLSVELDRLSEESVNNDISSWTKGRSGEALSLLKKRFSHRPVQEKFVCLNCGFETHADEQAALNIARSWLFLRSQEYKKYQTNKTTGNTDKRAFVETWQSFYRKKLKEVWKPAV

SEQ ID NO: 30072 - protein, 980 aa, synthetic construct
  REGION 1..980: note = engineered CasX variant
QEIKRINKIRRRLVKDSNTKKAGKTRGPMKTLLVRVMTPDLRERLENLRKKPENIPQPISNTSRANLNKLLTDYTEMKKAILHVYWEEFQKDPVGLMSRVAQPASKKIDQNKLKPEMDEKGNLTTAGFACSQCGQPLFVYKLEQVSEKGKAYTNYFGRCNVAEHEKLILLAQLKPEKDSDEAVTYSLGKFGQRALDFYSIHVTKESTHPVKPLAQIAGNRYASSAPVGKALSDACMGTIASFLSKYQDIIIEHQKVVKGNQKRLESLRELAGKENLEYPSVTLPPQPHTKEGVDAYNEVIARVRMWVNLNLWQKLKLSRDDAKPLLRLKGFPSFPLVERQANEVDWWDMVCNVKKLINEKKEDGKVFWQNLAGYKRQEALRPYLSSEEDRKKGKKFARYQLGDLLLHLEKKHGEDWGKVYDEAWERIDKKVEGLSKHIKLEEERRSEDAQSKAALTDWLRAKASFVIEGLKEADKDEFCRCELKLQKWYGDLRGKPFAIEAENSILDISGFSKQYNCAFIWQKDGVKKLNLYLIINYFKGGKLRFKKIKPEAFEANRFYTVINKKSGEIVPMEVNFNFDDPNLIILPLAFGKRQGREFIWNDLLSLETGSLKLANGRVIEKTLYNRRTRQDEPALFVALTFERREVLDSSNIKPMNLIGVDRGENIPAVIALTDPEGCPLSRFKDSLGNPTHILRIGESYKEKQRTIQAKKEVEQRRAGGYSRKYASKAKNLADDMVRNTARDLLYYAVTQDAMLIFENLSRGFGRQGKRTFMAERQYTRMEDWLTAKLAYEGLPSKTYLSKTLAQYTSKTCSNCGFTITSADYDRVLEKLKKTATGWMTTINGKELKVEGQITYYNRYKRQNVVKDLSVELDRLSEESVNNDISSWTKGRSGEALSLLKKRFSHRPVQEKFVCLNCGFETHADEQAALNIARSWLFLRSQEYKKYQTNKTTGNTDKRAFVETWQSFYRKKLKEVWKPAV

SEQ ID NO: 30073 - protein, 980 aa, synthetic construct
  REGION 1..980: note = engineered CasX variant
QEIKRINKIRRRLVKDSNTKKAGKTRGPMKTLLVRVMTPDLRERLENLRKKPENIPQPISNTSRANLNKLLTDYTEMKKAILHVYWEEFQKDPVGLMSRVAQPASKKIDQNKLKPEMDEKGNLTTAGFACSQCGQPLFVYKLEQVSEKGKAYTNYFGRCNVAEHEKLILLAQLKPEKDSDEAVTYSLGKFGQRALDFYSIHVTKESTHPVKPLAQIAGNRYASSVPVGKALSDACMGTIASFLSKYQDIIIEHQKVVKGNQKRLESLRELAGKENLEYPSVTLPPQPHTKEGVDAYNEVIARVRMWVNLNLWQKLKLSRDDAKPLLRLKGFPSFPLVERQANEVDWWDMVCNVKKLINEKKEDGKVFWQNLAGYKRQEALRPYLSSEEDRKKGKKFARYQLGDLLLHLEKKHGEDWGKVYDEAWERIDKKVEGLSKHIKLEEERRSEDAQSKAALTDWLRAKASFVIEGLKEADKDEFCRCELKLQKWYGDLRGKPFAIEAENSILDISGFSKQYNCAFIWQKDGVKKLNLYLIINYFKGGKLRFKKIKPEAFEANRFYTVINKKSGEIVPMEVNFNFDDPNLIILPLAFGKRQGREFIWNDLLSLETGSLKLANGRVIEKTLYNRRTRQDEPALFVALTFERREVLDSSNIKPMNLIGVDRGENIPAVIALTDPEGCPLSRFKDSLGNPTHILRIGESYKEKQRTIQAKKEVEQRRAGGYSRKYASKAKNLADDMVRNTARDLLYYAVTQDAMLIFENLSRGFGRQGKRTFMAERQYTRMEDWLTAKLAYEGLPSKTYLSKTLAQYTSKTCSNCGFTITSADYDRVLEKLKKTATGWMTTINGKELKVEGQITYYNRYKRQNVVKDLSVELDRLSEESVNNDISSWTKGRSGEALSLLKKRFSHRPVQEKFVCLNCGFETHADEQAALNIARSWLFLRSQEYKKYQTNKTTGNTDKRAFVETWQSFYRKKLKEVWKPAV

SEQ ID NO: 30074 - protein, 979 aa, synthetic construct
  REGION 1..979: note = engineered CasX variant
QEIKRINKIRRRLVKDSNTKKAGKTRGPMKTLLVRVMTPDLRERLENLRKKPENIPQPISNTSRANLNKLLTDYTEMKKAILHVYWEEFQKDPVGLMSRVAQPASKKIDQNKLKPEMDEKGNLTTAGFACSQCGQPLFVYKLEQVSEKGKAYTNYFGRCNVAEHEKLIKLAQLKPEKDSDEAVTYSLGKFGQRALDFYSIHVTKESTHPVKPLAQIAGNRYASSPVGKALSDACMGTIASFLSKYQDIIIEHQKVVKGNQKRLESLRELAGKENLEYPSVTLPPQPHTKEGVDAYNEVIARVRMWVNLNLWQKLKLSRDDAKPLLRLKGFPSFPLVERQANEVDWWDMVCNVKKLINEKKEDGKVFWQNLAGYKRQEALRPYLSSEEDRKKGKKFARYQLGDLLLHLEKKHGEDWGKVYDEAWERIDKKVEGLSKHIKLEEERRSEDAQSKAALTDWLRAKASFVIEGLKEADKDEFCRCELKLQKWYGDLRGKPFAIEAENSILDISGFSKQYNCAFIWQKDGVKKLNLYLIINYFKGGKLRFKKIKPEAFEANRFYTVINKKSGEIVPMEVNFNFDDPNLIILPLAFGKRQGREFIWNDLLSLETGSLKLANGRVIEKTLYNRRTRQDEPALFVALTFERREVLDSSNIKPMNLIGVDRGENIPAVIALTDPEGCPLSRFKDSLGNPTHILRIGESYKEKQRTIQAKKEVEQRRAGGYSRKYASKAKNLADDMVRNTARDLLYYAVTQDAMLIFENLSRGFGRQGKRTFMAERQYTRMEDWLTAKLAYEGLPSKTYLSKTLAQYTSKTCSNCGFTITSADYDRVLEKLKKTATGWMTTINGKELKVEGQITYYNRYKRQNVVKDLSVELDRLSEESVNNDISSWTKGRSGEALSLLKKRFSHRPVQEKFVCLNCGFETHADEQAALNIARSWLFLRSQEYKKYQTNKTTGNTDKRAFVETWQSFYRKKLKEVWKPAV

SEQ ID NO: 30075 - protein, 979 aa, synthetic construct
  REGION 1..979: note = engineered CasX variant
QEIKRINKIRRRLVKDSNTKKAGKTRGPMKTLLVRVMTPDLRERLENLRKKPENIPQPISNTSRANLNKLLTDYTEMKKAILHVYWEEFQKDPVGLMSRVAQPASKKIDQNKLKPEMDEKGNLTTAGFACSQCGQPLFVYKLEQVSEKGKAYTNYFGRCNVAEHEKLILLDQLKPEKDSDEAVTYSLGKFGQRALDFYSIHVTKESTHPVKPLAQIAGNRYASYPVGKALSDACMGTIASFLSKYQDIIIEHQKVVKGNQKRLESLRELAGKENLEYPSVTLPPQPHTKEGVDAYNEVIARVRMWVNLNLWQKLKLSRDDAKPLLRLKGFPSFPLVERQANEVDWWDMVCNVKKLINEKKEDGKVFWQNLAGYKRQEALRPYLSSEEDRKKGKKFARYQLGDLLLHLEKKHGEDWGKVYDEAWERIDKKVEGLSKHIKLEEERRSEDAQSKAALTDWLRAKASFVIEGLKEADKDEFCRCELKLQKWYGDLRGKPFAIEAENSILDISGFSKQYNCAFIWQKDGVKKLNLYLIINYFKGGKLRFKKIKPEAFEANRFYTVINKKSGEIVPMEVNFNFDDPNLIILPLAFGKRQGREFIWNDLLSLETGSLKLANGRVIEKTLYNRRTRQDEPALFVALTFERREVLDSSNIKPMNLIGVDRGENIPAVIALTDPEGCPLSRFKDSLGNPTHILRIGESYKEKQRTIQAKKEVEQRRAGGYSRKYASKAKNLADDMVRNTARDLLYYAVTQDAMLIFENLSRGFGRQGKRTFMAERQYTRMEDWLTAKLAYEGLPSKTYLSKTLAQYTSKTCSNCGFTITSADYDRVLEKLKKTATGWMTTINGKELKVEGQITYYNRYKRQNVVKDLSVELDRLSEESVNNDISSWTKGRSGEALSLLKKRFSHRPVQEKFVCLNCGFETHADEQAALNIARSWLFLRSQEYKKYQTNKTTGNTDKRAFVETWQSFYRKKLKEVWKPAV

SEQ ID NO: 30076 - protein, 979 aa, synthetic construct
  REGION 1..979: note = engineered CasX variant
QEIKRINKIRRRLVKDSNTKKAGKTRGPMKTLLVRVMTPDLRERLENLRKKPENIPQPISNTSRANLNKLLTDYTEMKKAILHVYWEEFQKDPVGLMSRVAQPASKKIDQNKLKPEMDEKGNLTTAGFACSQCGQPLFVYKLEQVSEKGKAYTNYFGRCNVAEHEKLILLDQLKPEKDSDEAVTYSLGKFGQRALDFYSIHVTKESTHPVKPLAQIAGNRYASHPVGKALSDACMGTIASFLSKYQDIIIEHQKVVKGNQKRLESLRELAGKENLEYPSVTLPPQPHTKEGVDAYNEVIARVRMWVNLNLWQKLKLSRDDAKPLLRLKGFPSFPLVERQANEVDWWDMVCNVKKLINEKKEDGKVFWQNLAGYKRQEALRPYLSSEEDRKKGKKFARYQLGDLLLHLEKKHGEDWGKVYDEAWERIDKKVEGLSKHIKLEEERRSEDAQSKAALTDWLRAKASFVIEGLKEADKDEFCRCELKLQKWYGDLRGKPFAIEAENSILDISGFSKQYNCAFIWQKDGVKKLNLYLIINYFKGGKLRFKKIKPEAFEANRFYTVINKKSGEIVPMEVNFNFDDPNLIILPLAFGKRQGREFIWNDLLSLETGSLKLANGRVIEKTLYNRRTRQDEPALFVALTFERREVLDSSNIKPMNLIGVDRGENIPAVIALTDPEGCPLSRFKDSLGNPTHILRIGESYKEKQRTIQAKKEVEQRRAGGYSRKYASKAKNLADDMVRNTARDLLYYAVTQDAMLIFENLSRGFGRQGKRTFMAERQYTRMEDWLTAKLAYEGLPSKTYLSKTLAQYTSKTCSNCGFTITSADYDRVLEKLKKTATGWMTTINGKELKVEGQITYYNRYKRQNVVKDLSVELDRLSEESVNNDISSWTKGRSGEALSLLKKRFSHRPVQEKFVCLNCGFETHADEQAALNIARSWLFLRSQEYKKYQTNKTTGNTDKRAFVETWQSFYRKKLKEVWKPAV

SEQ ID NO: 30077 - protein, 979 aa, synthetic construct
  REGION 1..979: note = engineered CasX variant
QEIKRINKIRRRLVKDSNTKKAGKTRGPMKTLLVRVMTPDLRERLENLRKKPENIPQPISNTSRANLNKLLTDYTEMKKAILHVYWEEFQKDPVGLMSRVAQPASKKIDQNKLKPEMDEKGNLTTAGFACSQCGQPLFVYKLEQVSEKGKAYTNYFGRCNVAEHEKLILLDQLKPEKDSDEAVTYSLGKFGQRALDFYSIHVTKESTHPVKPLAQIAGNRYASSPVGKALSDACMGTIASFLSKYQDIIIEHQKVVKGNQKRLESLRELAGKENLEYPSVTLPPQPHTKEGVDAYNEVIARVRMWVNLNLWQKLKLSRDDAKPLLRLKGFPSFPLVERQANEVDWWDMVCNVKKLINEKKEDGKVFWQNLAGYKRQEALRPYLSSEEDRKKGKKFARYQLGDLLLHLEKKHGEDWGKVYDEAWERIDKKVEGLSKHIKLEEERRSEDAQSKAALTDWLRAKASFVIEGLKEADKDEFCRCELKLQKWYGDLRGKPFAIEAENSILDISGFSKQYNCAFIWQKDGVKKLNLYLIINYFKGGKLRFKKIKPEAFEANRFYTVINKKSGEIVPMEVNFNFDDPNLIILPLAFGKRQGREFIWNDLLSLETGSLKLANGRVIEKTLYNRRTRQDEPALFVALTFERREVLDSSNIKPMNLIGVDRGENIPAVIALTDPEGCPLSRFKDSLGNPTHILRIGESYKEKQRTIQAKKEVEQRRAGGYSRKYASKAKNLADDMVRNTARDLLYYAVTQDAMLIFENLSRGFGRQGKRTFMAERQYTRMEDWLTAKLAYEGLPSKTYLSKTLAQYTSKTCSNCGFTITSADYDRVLEKLKKTATGWMTTINGKELKVEGQITYYNRYKRQNVVKDLSVELDRLSEESVNNDISSWTKGRSGEALSLLKKRFSHRPVQEKFVCLNCGFETHADEQAALNIARSWLFLRSQEYKKYQTNKTTGNTDKRAFVETWQSFYRKKLKEVWKPAV

SEQ ID NO: 30078 - protein, 979 aa, synthetic construct
  REGION 1..979: note = engineered CasX variant
QEIKRINKIRRRLVKDSNTKKAGKTRGPMKTLLVRVMTPDLRERLENLRKKPENIPQPISNTSRANLNKLLTDYTEMKKAILHVYWEEFQKDPVGLMSRVAQPASKKIDQNKLKPEMDEKGNLTTAGFACSQCGQPLFVYKLEQVSEKGKAYTNYFGRCNVAEHEKLILLDQLKPEKDSDEAVTYSLGKFGQRALDFYSIHVTKESTHPVKPLAQIAGNRYASTPVGKALSDACMGTIASFLSKYQDIIIEHQKVVKGNQKRLESLRELAGKENLEYPSVTLPPQPHTKEGVDAYNEVIARVRMWVNLNLWQKLKLSRDDAKPLLRLKGFPSFPLVERQANEVDWWDMVCNVKKLINEKKEDGKVFWQNLAGYKRQEALRPYLSSEEDRKKGKKFARYQLGDLLLHLEKKHGEDWGKVYDEAWERIDKKVEGLSKHIKLEEERRSEDAQSKAALTDWLRAKASFVIEGLKEADKDEFCRCELKLQKWYGDLRGKPFAIEAENSILDISGFSKQYNCAFIWQKDGVKKLNLYLIINYFKGGKLRFKKIKPEAFEANRFYTVINKKSGEIVPMEVNFNFDDPNLIILPLAFGKRQGREFIWNDLLSLETGSLKLANGRVIEKTLYNRRTRQDEPALFVALTFERREVLDSSNIKPMNLIGVDRGENIPAVIALTDPEGCPLSRFKDSLGNPTHILRIGESYKEKQRTIQAKKEVEQRRAGGYSRKYASKAKNLADDMVRNTARDLLYYAVTQDAMLIFENLSRGFGRQGKRTFMAERQYTRMEDWLTAKLAYEGLPSKTYLSKTLAQYTSKTCSNCGFTITSADYDRVLEKLKKTATGWMTTINGKELKVEGQITYYNRYKRQNVVKDLSVELDRLSEESVNNDISSWTKGRSGEALSLLKKRFSHRPVQEKFVCLNCGFETHADEQAALNIARSWLFLRSQEYKKYQTNKTTGNTDKRAFVETWQSFYRKKLKEVWKPAV

SEQ ID NO: 30079 - protein, 979 aa, synthetic construct
  REGION 1..979: note = engineered CasX variant
QEIKRINKIRRRLVKDSNTKKAGKTRGPMKTLLVRVMTPDLRERLENLRKKPENIPQPISNTSRANLNKLLTDYTEMKKAILHVYWEEFQKDPVGLMSRVAQPASKKIDQNKLKPEMDEKGNLTTAGFACSQCGQPLFVYKLEQVSEKGKAYTNYFGRCNVAEHEKLILLDQLKPEKDSDEAVTYSLGKFGQRALDFYSIHVTKESTHPVKPLAQIAGNRYASAPVGKALSDACMGTIASFLSKYQDIIIEHQKVVKGNQKRLESLRELAGKENLEYPSVTLPPQPHTKEGVDAYNEVIARVRMWVNLNLWQKLKLSRDDAKPLLRLKGFPSFPLVERQANEVDWWDMVCNVKKLINEKKEDGKVFWQNLAGYKRQEALRPYLSSEEDRKKGKKFARYQLGDLLLHLEKKHGEDWGKVYDEAWERIDKKVEGLSKHIKLEEERRSEDAQSKAALTDWLRAKASFVIEGLKEADKDEFCRCELKLQKWYGDLRGKPFAIEAENSILDISGFSKQYNCAFIWQKDGVKKLNLYLIINYFKGGKLRFKKIKPEAFEANRFYTVINKKSGEIVPMEVNFNFDDPNLIILPLAFGKRQGREFIWNDLLSLETGSLKLANGRVIEKTLYNRRTRQDEPALFVALTFERREVLDSSNIKPMNLIGVDRGENIPAVIALTDPEGCPLSRFKDSLGNPTHILRIGESYKEKQRTIQAKKEVEQRRAGGYSRKYASKAKNLADDMVRNTARDLLYYAVTQDAMLIFENLSRGFGRQGKRTFMAERQYTRMEDWLTAKLAYEGLPSKTYLSKTLAQYTSKTCSNCGFTITSADYDRVLEKLKKTATGWMTTINGKELKVEGQITYYNRYKRQNVVKDLSVELDRLSEESVNNDISSWTKGRSGEALSLLKKRFSHRPVQEKFVCLNCGFETHADEQAALNIARSWLFLRSQEYKKYQTNKTTGNTDKRAFVETWQSFYRKKLKEVWKPAV

SEQ ID NO: 30080 - protein, 979 aa, synthetic construct
  REGION 1..979: note = engineered CasX variant
QEIKRINKIRRRLVKDSNTKKAGKTRGPMKTLLVRVMTPDLRERLENLRKKPENIPQPISNTSRANLNKLLTDYTEMKKAILHVYWEEFQKDPVGLMSRVAQPASKKIDQNKLKPEMDEKGNLTTAGFACSQCGQPLFVYKLEQVSEKGKAYTNYFGRCNVAEHEKLILLDQLKPEKDSDEAVTYSLGKFGQRALDFYSIHVTKESTHPVKPLAQIAGNRYASVPVGKALSDACMGTIASFLSKYQDIIIEHQKVVKGNQKRLESLRELAGKENLEYPSVTLPPQPHTKEGVDAYNEVIARVRMWVNLNLWQKLKLSRDDAKPLLRLKGFPSFPLVERQANEVDWWDMVCNVKKLINEKKEDGKVFWQNLAGYKRQEALRPYLSSEEDRKKGKKFARYQLGDLLLHLEKKHGEDWGKVYDEAWERIDKKVEGLSKHIKLEEERRSEDAQSKAALTDWLRAKASFVIEGLKEADKDEFCRCELKLQKWYGDLRGKPFAIEAENSILDISGFSKQYNCAFIWQKDGVKKLNLYLIINYFKGGKLRFKKIKPEAFEANRFYTVINKKSGEIVPMEVNFNFDDPNLIILPLAFGKRQGREFIWNDLLSLETGSLKLANGRVIEKTLYNRRTRQDEPALFVALTFERREVLDSSNIKPMNLIGVDRGENIPAVIALTDPEGCPLSRFKDSLGNPTHILRIGESYKEKQRTIQAKKEVEQRRAGGYSRKYASKAKNLADDMVRNTARDLLYYAVTQDAMLIFENLSRGFGRQGKRTFMAERQYTRMEDWLTAKLAYEGLPSKTYLSKTLAQYTSKTCSNCGFTITSADYDRVLEKLKKTATGWMTTINGKELKVEGQITYYNRYKRQNVVKDLSVELDRLSEESVNNDISSWTKGRSGEALSLLKKRFSHRPVQEKFVCLNCGFETHADEQAALNIARSWLFLRSQEYKKYQTNKTTGNTDKRAFVETWQSFYRKKLKEVWKPAV

SEQ ID NO: 30081 - protein, 979 aa, synthetic construct
  REGION 1..979: note = engineered CasX variant
QEIKRINKIRRRLVKDSNTKKAGKTRGPMKTLLVRVMTPDLRERLENLRKKPENIPQPISNTSRANLNKLLTDYTEMKKAILHVYWEEFQKDPVGLMSRVAQPASKKIDQNKLKPEMDEKGNLTTAGFACSQCGQPLFVYKLEQVSEKGKAYTNYFGRCNVAEHEKLIKLDQLKPEKDSDEAVTYSLGKFGQRALDFYSIHVTKESTHPVKPLAQIAGNRYASGPVGKALSDACMGTIASFLSKYQDIIIEHQKVVKGNQKRLESLRELAGKENLEYPSVTLPPQPHTKEGVDAYNEVIARVRMWVNLNLWQKLKLSRDDAKPLLRLKGFPSFPLVERQANEVDWWDMVCNVKKLINEKKEDGKVFWQNLAGYKRQEALRPYLSSEEDRKKGKKFARYQLGDLLLHLEKKHGEDWGKVYDEAWERIDKKVEGLSKHIKLEEERRSEDAQSKAALTDWLRAKASFVIEGLKEADKDEFCRCELKLQKWYGDLRGKPFAIEAENSILDISGFSKQYNCAFIWQKDGVKKLNLYLIINYFKGGKLRFKKIKPEAFEANRFYTVINKKSGEIVPMEVNFNFDDPNLIILPLAFGKRQGREFIWNDLLSLETGSLKLANGRVIEKTLYNRRTRQDEPALFVALTFERREVLDSSNIKPMNLIGVDRGENIPAVIALTDPEGCPLSRFKDSLGNPTHILRIGESYKEKQRTIQAKKEVEQRRAGGYSRKYASKAKNLADDMVRNTARDLLYYAVTQDAMLIFENLSRGFGRQGKRTFMAERQYTRMEDWLTAKLAYEGLPSKTYLSKTLAQYTSKTCSNCGFTITSADYDRVLEKLKKTATGWMTTINGKELKVEGQITYYNRYKRQNVVKDLSVELDRLSEESVNNDISSWTKGRSGEALSLLKKRFSHRPVQEKFVCLNCGFETHADEQAALNIARSWLFLRSQEYKKYQTNKTTGNTDKRAFVETWQSFYRKKLKEVWKPAV

SEQ ID NO: 30082 - protein, 978 aa, synthetic construct
  REGION 1..978: note = engineered CasX variant
QEIKRINKIRRRLVKDSNTKKAGKTRGPMKTLLVRVMTPDLRERLENLRKKPENIPQPISNTSRANLNKLLTDYTEMKKAILHVYWEEFQKDPVGLMSRVAQPASKKIDQNKLKPEMDEKGNLTTAGFACSQCGQPLFVYKLEQVSEKGKAYTNYFGRCNVAEHEKLILLDQLKPEKDSDEAVTYSLGKFGQRALDFYSIHVTKESTHPVKPLAQIAGNRYASPVGKALSDACMGTIASFLSKYQDIIIEHQKVVKGNQKRLESLRELAGKENLEYPSVTLPPQPHTKEGVDAYNEVIARVRMWVNLNLWQKLKLSRDDAKPLLRLKGFPSFPLVERQANEVDWWDMVCNVKKLINEKKEDGKVFWQNLAGYKRQEALRPYLSSEEDRKKGKKFARYQLGDLLLHLEKKHGEDWGKVYDEAWERIDKKVEGLSKHIKLEEERRSEDAQSKAALTDWLRAKASFVIEGLKEADKDEFCRCELKLQKWYGDLRGKPFAIEAENSILDISGFSKQYNCAFIWQKDGVKKLNLYLIINYFKGGKLRFKKIKPEAFEANRFYTVINKKSGEIVPMEVNFNFDDPNLIILPLAFGKRQGREFIWNDLLSLETGSLKLANGRVIEKTLYNRRTRQDEPALFVALTFERREVLDSSNIKPMNLIGVDRGENIPAVIALTDPEGCPLSRFKDSLGNPTHILRIGESYKEKQRTIQAKKEVEQRRAGGYSRKYASKAKNLADDMVRNTARDLLYYAVTQDAMLIFENLSRGFGRQGKRTFMAERQYTRMEDWLTAKLAYEGLPSKTYLSKTLAQYTSKTCSNCGFTITSADYDRVLEKLKKTATGWMTTINGKELKVEGQITYYNRYKRQNVVKDLSVELDRLSEESVNNDISSWTKGRSGEALSLLKKRFSHRPVQEKFVCLNCGFETHADEQAALNIARSWLFLRSQEYKKYQTNKTTGNTDKRAFVETWQSFYRKKLKEVWKPAV

SEQ ID NO: 30083 - protein, 979 aa, synthetic construct
  REGION 1..979: note = engineered CasX variant
QEGKRINKIRRRLVKDSNTKKAGKTRGPMKTLLVRVMTPDLRERLENLRKKPENIPQPISNTSRANLNKLLTDYTEMKKAILHVYWEEFQKDPVGLMSRVAQPASKKIDQNKLKPEMDEKGNLTTAGFACSQCGQPLFVYKLEQVSEKGKAYTNYFGRCNVAEHEKLILLAQLKPEKDSDEAVTYSLGKFGQRALDFYSIHVTKESTHPVKPLAQIAGNRYASYPVGKALSDACMGTIASFLSKYQDIIIEHQKVVKGNQKRLESLRELAGKENLEYPSVTLPPQPHTKEGVDAYNEVIARVRMWVNLNLWQKLKLSRDDAKPLLRLKGFPSFPLVERQANEVDWWDMVCNVKKLINEKKEDGKVFWQNLAGYKRQEALRPYLSSEEDRKKGKKFARYQLGDLLLHLEKKHGEDWGKVYDEAWERIDKKVEGLSKHIKLEEERRSEDAQSKAALTDWLRAKASFVIEGLKEADKDEFCRCELKLQKWYGDLRGKPFAIEAENSILDISGFSKQYNCAFIWQKDGVKKLNLYLIINYFKGGKLRFKKIKPEAFEANRFYTVINKKSGEIVPMEVNFNFDDPNLIILPLAFGKRQGREFIWNDLLSLETGSLKLANGRVIEKTLYNRRTRQDEPALFVALTFERREVLDSSNIKPMNLIGVDRGENIPAVIALTDPEGCPLSRFKDSLGNPTHILRIGESYKEKQRTIQAKKEVEQRRAGGYSRKYASKAKNLADDMVRNTARDLLYYAVTQDAMLIFENLSRGFGRQGKRTFMAERQYTRMEDWLTAKLAYEGLPSKTYLSKTLAQYTSKTCSNCGFTITSADYDRVLEKLKKTATGWMTTINGKELKVEGQITYYNRYKRQNVVKDLSVELDRLSEESVNNDISSWTKGRSGEALSLLKKRFSHRPVQEKFVCLNCGFETHADEQAALNIARSWLFLRSQEYKKYQTNKTTGNTDKRAFVETWQSFYRKKLKEVWKPAV

SEQ ID NO: 30084 - protein, 979 aa, synthetic construct
  REGION 1..979: note = engineered CasX variant
QEGKRINKIRRRLVKDSNTKKAGKTRGPMKTLLVRVMTPDLRERLENLRKKPENIPQPISNTSRANLNKLLTDYTEMKKAILHVYWEEFQKDPVGLMSRVAQPASKKIDQNKLKPEMDEKGNLTTAGFACSQCGQPLFVYKLEQVSEKGKAYTNYFGRCNVAEHEKLILLAQLKPEKDSDEAVTYSLGKFGQRALDFYSIHVTKESTHPVKPLAQIAGNRYASHPVGKALSDACMGTIASFLSKYQDIIIEHQKVVKGNQKRLESLRELAGKENLEYPSVTLPPQPHTKEGVDAYNEVIARVRMWVNLNLWQKLKLSRDDAKPLLRLKGFPSFPLVERQANEVDWWDMVCNVKKLINEKKEDGKVFWQNLAGYKRQEALRPYLSSEEDRKKGKKFARYQLGDLLLHLEKKHGEDWGKVYDEAWERIDKKVEGLSKHIKLEEERRSEDAQSKAALTDWLRAKASFVIEGLKEADKDEFCRCELKLQKWYGDLRGKPFAIEAENSILDISGFSKQYNCAFIWQKDGVKKLNLYLIINYFKGGKLRFKKIKPEAFEANRFYTVINKKSGEIVPMEVNFNFDDPNLIILPLAFGKRQGREFIWNDLLSLETGSLKLANGRVIEKTLYNRRTRQDEPALFVALTFERREVLDSSNIKPMNLIGVDRGENIPAVIALTDPEGCPLSRFKDSLGNPTHILRIGESYKEKQRTIQAKKEVEQRRAGGYSRKYASKAKNLADDMVRNTARDLLYYAVTQDAMLIFENLSRGFGRQGKRTFMAERQYTRMEDWLTAKLAYEGLPSKTYLSKTLAQYTSKTCSNCGFTITSADYDRVLEKLKKTATGWMTTINGKELKVEGQITYYNRYKRQNVVKDLSVELDRLSEESVNNDISSWTKGRSGEALSLLKKRFSHRPVQEKFVCLNCGFETHADEQAALNIARSWLFLRSQEYKKYQTNKTTGNTDKRAFVETWQSFYRKKLKEVWKPAV

SEQ ID NO: 30085 - protein, 979 aa, synthetic construct
  REGION 1..979: note = engineered CasX variant
QEGKRINKIRRRLVKDSNTKKAGKTRGPMKTLLVRVMTPDLRERLENLRKKPENIPQPISNTSRANLNKLLTDYTEMKKAILHVYWEEFQKDPVGLMSRVAQPASKKIDQNKLKPEMDEKGNLTTAGFACSQCGQPLFVYKLEQVSEKGKAYTNYFGRCNVAEHEKLILLAQLKPEKDSDEAVTYSLGKFGQRALDFYSIHVTKESTHPVKPLAQIAGNRYASSPVGKALSDACMGTIASFLSKYQDIIIEHQKVVKGNQKRLESLRELAGKENLEYPSVTLPPQPHTKEGVDAYNEVIARVRMWVNLNLWQKLKLSRDDAKPLLRLKGFPSFPLVERQANEVDWWDMVCNVKKLINEKKEDGKVFWQNLAGYKRQEALRPYLSSEEDRKKGKKFARYQLGDLLLHLEKKHGEDWGKVYDEAWERIDKKVEGLSKHIKLEEERRSEDAQSKAALTDWLRAKASFVIEGLKEADKDEFCRCELKLQKWYGDLRGKPFAIEAENSILDISGFSKQYNCAFIWQKDGVKKLNLYLIINYFKGGKLRFKKIKPEAFEANRFYTVINKKSGEIVPMEVNFNFDDPNLIILPLAFGKRQGREFIWNDLLSLETGSLKLANGRVIEKTLYNRRTRQDEPALFVALTFERREVLDSSNIKPMNLIGVDRGENIPAVIALTDPEGCPLSRFKDSLGNPTHILRIGESYKEKQRTIQAKKEVEQRRAGGYSRKYASKAKNLADDMVRNTARDLLYYAVTQDAMLIFENLSRGFGRQGKRTFMAERQYTRMEDWLTAKLAYEGLPSKTYLSKTLAQYTSKTCSNCGFTITSADYDRVLEKLKKTATGWMTTINGKELKVEGQITYYNRYKRQNVVKDLSVELDRLSEESVNNDISSWTKGRSGEALSLLKKRFSHRPVQEKFVCLNCGFETHADEQAALNIARSWLFLRSQEYKKYQTNKTTGNTDKRAFVETWQSFYRKKLKEVWKPAV

SEQ ID NO: 30086 - protein, 979 aa, synthetic construct
  REGION 1..979: note = engineered CasX variant
QEGKRINKIRRRLVKDSNTKKAGKTRGPMKTLLVRVMTPDLRERLENLRKKPENIPQPISNTSRANLNKLLTDYTEMKKAILHVYWEEFQKDPVGLMSRVAQPASKKIDQNKLKPEMDEKGNLTTAGFACSQCGQPLFVYKLEQVSEKGKAYTNYFGRCNVAEHEKLILLAQLKPEKDSDEAVTYSLGKFGQRALDFYSIHVTKESTHPVKPLAQIAGNRYASTPVGKALSDACMGTIASFLSKYQDIIIEHQKVVKGNQKRLESLRELAGKENLEYPSVTLPPQPHTKEGVDAYNEVIARVRMWVNLNLWQKLKLSRDDAKPLLRLKGFPSFPLVERQANEVDWWDMVCNVKKLINEKKEDGKVFWQNLAGYKRQEALRPYLSSEEDRKKGKKFARYQLGDLLLHLEKKHGEDWGKVYDEAWERIDKKVEGLSKHIKLEEERRSEDAQSKAALTDWLRAKASFVIEGLKEADKDEFCRCELKLQKWYGDLRGKPFAIEAENSILDISGFSKQYNCAFIWQKDGVKKLNLYLIINYFKGGKLRFKKIKPEAFEANRFYTVINKKSGEIVPMEVNFNFDDPNLIILPLAFGKRQGREFIWNDLLSLETGSLKLANGRVIEKTLYNRRTRQDEPALFVALTFERREVLDSSNIKPMNLIGVDRGENIPAVIALTDPEGCPLSRFKDSLGNPTHILRIGESYKEKQRTIQAKKEVEQRRAGGYSRKYASKAKNLADDMVRNTARDLLYYAVTQDAMLIFENLSRGFGRQGKRTFMAERQYTRMEDWLTAKLAYEGLPSKTYLSKTLAQYTSKTCSNCGFTITSADYDRVLEKLKKTATGWMTTINGKELKVEGQITYYNRYKRQNVVKDLSVELDRLSEESVNNDISSWTKGRSGEALSLLKKRFSHRPVQEKFVCLNCGFETHADEQAALNIARSWLFLRSQEYKKYQTNKTTGNTDKRAFVETWQSFYRKKLKEVWKPAV

SEQ ID NO: 30087 - protein, 979 aa, synthetic construct
  REGION 1..979: note = engineered CasX variant
QEGKRINKIRRRLVKDSNTKKAGKTRGPMKTLLVRVMTPDLRERLENLRKKPENIPQPISNTSRANLNKLLTDYTEMKKAILHVYWEEFQKDPVGLMSRVAQPASKKIDQNKLKPEMDEKGNLTTAGFACSQCGQPLFVYKLEQVSEKGKAYTNYFGRCNVAEHEKLILLAQLKPEKDSDEAVTYSLGKFGQRALDFYSIHVTKESTHPVKPLAQIAGNRYASAPVGKALSDACMGTIASFLSKYQDIIIEHQKVVKGNQKRLESLRELAGKENLEYPSVTLPPQPHTKEGVDAYNEVIARVRMWVNLNLWQKLKLSRDDAKPLLRLKGFPSFPLVERQANEVDWWDMVCNVKKLINEKKEDGKVFWQNLAGYKRQEALRPYLSSEEDRKKGKKFARYQLGDLLLHLEKKHGEDWGKVYDEAWERIDKKVEGLSKHIKLEEERRSEDAQSKAALTDWLRAKASFVIEGLKEADKDEFCRCELKLQKWYGDLRGKPFAIEAENSILDISGFSKQYNCAFIWQKDGVKKLNLYLIINYFKGGKLRFKKIKPEAFEANRFYTVINKKSGEIVPMEVNFNFDDPNLIILPLAFGKRQGREFIWNDLLSLETGSLKLANGRVIEKTLYNRRTRQDEPALFVALTFERREVLDSSNIKPMNLIGVDRGENIPAVIALTDPEGCPLSRFKDSLGNPTHILRIGESYKEKQRTIQAKKEVEQRRAGGYSRKYASKAKNLADDMVRNTARDLLYYAVTQDAMLIFENLSRGFGRQGKRTFMAERQYTRMEDWLTAKLAYEGLPSKTYLSKTLAQYTSKTCSNCGFTITSADYDRVLEKLKKTATGWMTTINGKELKVEGQITYYNRYKRQNVVKDLSVELDRLSEESVNNDISSWTKGRSGEALSLLKKRFSHRPVQEKFVCLNCGFETHADEQAALNIARSWLFLRSQEYKKYQTNKTTGNTDKRAFVETWQSFYRKKLKEVWKPAV

SEQ ID NO: 30088 - protein, 979 aa, synthetic construct
  REGION 1..979: note = engineered CasX variant
QEGKRINKIRRRLVKDSNTKKAGKTRGPMKTLLVRVMTPDLRERLENLRKKPENIPQPISNTSRANLNKLLTDYTEMKKAILHVYWEEFQKDPVGLMSRVAQPASKKIDQNKLKPEMDEKGNLTTAGFACSQCGQPLFVYKLEQVSEKGKAYTNYFGRCNVAEHEKLILLAQLKPEKDSDEAVTYSLGKFGQRALDFYSIHVTKESTHPVKPLAQIAGNRYASVPVGKALSDACMGTIASFLSKYQDIIIEHQKVVKGNQKRLESLRELAGKENLEYPSVTLPPQPHTKEGVDAYNEVIARVRMWVNLNLWQKLKLSRDDAKPLLRLKGFPSFPLVERQANEVDWWDMVCNVKKLINEKKEDGKVFWQNLAGYKRQEALRPYLSSEEDRKKGKKFARYQLGDLLLHLEKKHGEDWGKVYDEAWERIDKKVEGLSKHIKLEEERRSEDAQSKAALTDWLRAKASFVIEGLKEADKDEFCRCELKLQKWYGDLRGKPFAIEAENSILDISGFSKQYNCAFIWQKDGVKKLNLYLIINYFKGGKLRFKKIKPEAFEANRFYTVINKKSGEIVPMEVNFNFDDPNLIILPLAFGKRQGREFIWNDLLSLETGSLKLANGRVIEKTLYNRRTRQDEPALFVALTFERREVLDSSNIKPMNLIGVDRGENIPAVIALTDPEGCPLSRFKDSLGNPTHILRIGESYKEKQRTIQAKKEVEQRRAGGYSRKYASKAKNLADDMVRNTARDLLYYAVTQDAMLIFENLSRGFGRQGKRTFMAERQYTRMEDWLTAKLAYEGLPSKTYLSKTLAQYTSKTCSNCGFTITSADYDRVLEKLKKTATGWMTTINGKELKVEGQITYYNRYKRQNVVKDLSVELDRLSEESVNNDISSWTKGRSGEALSLLKKRFSHRPVQEKFVCLNCGFETHADEQAALNIARSWLFLRSQEYKKYQTNKTTGNTDKRAFVETWQSFYRKKLKEVWKPAV

SEQ ID NO: 30089 - protein, 979 aa, synthetic construct
  REGION 1..979: note = engineered CasX variant
QEGKRINKIRRRLVKDSNTKKAGKTRGPMKTLLVRVMTPDLRERLENLRKKPENIPQPISNTSRANLNKLLTDYTEMKKAILHVYWEEFQKDPVGLMSRVAQPASKKIDQNKLKPEMDEKGNLTTAGFACSQCGQPLFVYKLEQVSEKGKAYTNYFGRCNVAEHEKLIKLAQLKPEKDSDEAVTYSLGKFGQRALDFYSIHVTKESTHPVKPLAQIAGNRYASGPVGKALSDACMGTIASFLSKYQDIIIEHQKVVKGNQKRLESLRELAGKENLEYPSVTLPPQPHTKEGVDAYNEVIARVRMWVNLNLWQKLKLSRDDAKPLLRLKGFPSFPLVERQANEVDWWDMVCNVKKLINEKKEDGKVFWQNLAGYKRQEALRPYLSSEEDRKKGKKFARYQLGDLLLHLEKKHGEDWGKVYDEAWERIDKKVEGLSKHIKLEEERRSEDAQSKAALTDWLRAKASFVIEGLKEADKDEFCRCELKLQKWYGDLRGKPFAIEAENSILDISGFSKQYNCAFIWQKDGVKKLNLYLIINYFKGGKLRFKKIKPEAFEANRFYTVINKKSGEIVPMEVNFNFDDPNLIILPLAFGKRQGREFIWNDLLSLETGSLKLANGRVIEKTLYNRRTRQDEPALFVALTFERREVLDSSNIKPMNLIGVDRGENIPAVIALTDPEGCPLSRFKDSLGNPTHILRIGESYKEKQRTIQAKKEVEQRRAGGYSRKYASKAKNLADDMVRNTARDLLYYAVTQDAMLIFENLSRGFGRQGKRTFMAERQYTRMEDWLTAKLAYEGLPSKTYLSKTLAQYTSKTCSNCGFTITSADYDRVLEKLKKTATGWMTTINGKELKVEGQITYYNRYKRQNVVKDLSVELDRLSEESVNNDISSWTKGRSGEALSLLKKRFSHRPVQEKFVCLNCGFETHADEQAALNIARSWLFLRSQEYKKYQTNKTTGNTDKRAFVETWQSFYRKKLKEVWKPAV

SEQ ID NO: 30090 - protein, 978 aa, synthetic construct
  REGION 1..978: note = engineered CasX variant
QEGKRINKIRRRLVKDSNTKKAGKTRGPMKTLLVRVMTPDLRERLENLRKKPENIPQPISNTSRANLNKLLTDYTEMKKAILHVYWEEFQKDPVGLMSRVAQPASKKIDQNKLKPEMDEKGNLTTAGFACSQCGQPLFVYKLEQVSEKGKAYTNYFGRCNVAEHEKLILLAQLKPEKDSDEAVTYSLGKFGQRALDFYSIHVTKESTHPVKPLAQIAGNRYASPVGKALSDACMGTIASFLSKYQDIIIEHQKVVKGNQKRLESLRELAGKENLEYPSVTLPPQPHTKEGVDAYNEVIARVRMWVNLNLWQKLKLSRDDAKPLLRLKGFPSFPLVERQANEVDWWDMVCNVKKLINEKKEDGKVFWQNLAGYKRQEALRPYLSSEEDRKKGKKFARYQLGDLLLHLEKKHGEDWGKVYDEAWERIDKKVEGLSKHIKLEEERRSEDAQSKAALTDWLRAKASFVIEGLKEADKDEFCRCELKLQKWYGDLRGKPFAIEAENSILDISGFSKQYNCAFIWQKDGVKKLNLYLIINYFKGGKLRFKKIKPEAFEANRFYTVINKKSGEIVPMEVNFNFDDPNLIILPLAFGKRQGREFIWNDLLSLETGSLKLANGRVIEKTLYNRRTRQDEPALFVALTFERREVLDSSNIKPMNLIGVDRGENIPAVIALTDPEGCPLSRFKDSLGNPTHILRIGESYKEKQRTIQAKKEVEQRRAGGYSRKYASKAKNLADDMVRNTARDLLYYAVTQDAMLIFENLSRGFGRQGKRTFMAERQYTRMEDWLTAKLAYEGLPSKTYLSKTLAQYTSKTCSNCGFTITSADYDRVLEKLKKTATGWMTTINGKELKVEGQITYYNRYKRQNVVKDLSVELDRLSEESVNNDISSWTKGRSGEALSLLKKRFSHRPVQEKFVCLNCGFETHADEQAALNIARSWLFLRSQEYKKYQTNKTTGNTDKRAFVETWQSFYRKKLKEVWKPAV

SEQ ID NO: 30091 - protein, 980 aa, synthetic construct
  REGION 1..980: note = engineered CasX variant
QEIGKRINKIRRRLVKDSNTKKAGKTRGPMKTLLVRVMTPDLRERLENLRKKPENIPQPISNTSRANLNKLLTDYTEMKKAILHVYWEEFQKDPVGLMSRVAQPASKKIDQNKLKPEMDEKGNLTTAGFACSQCGQPLFVYKLEQVSEKGKAYTNYFGRCNVAEHEKLILLAQLKPEKDSDEAVTYSLGKFGQRALDFYSIHVTKESTHPVKPLAQIAGNRYASYPVGKALSDACMGTIASFLSKYQDIIIEHQKVVKGNQKRLESLRELAGKENLEYPSVTLPPQPHTKEGVDAYNEVIARVRMWVNLNLWQKLKLSRDDAKPLLRLKGFPSFPLVERQANEVDWWDMVCNVKKLINEKKEDGKVFWQNLAGYKRQEALRPYLSSEEDRKKGKKFARYQLGDLLLHLEKKHGEDWGKVYDEAWERIDKKVEGLSKHIKLEEERRSEDAQSKAALTDWLRAKASFVIEGLKEADKDEFCRCELKLQKWYGDLRGKPFAIEAENSILDISGFSKQYNCAFIWQKDGVKKLNLYLIINYFKGGKLRFKKIKPEAFEANRFYTVINKKSGEIVPMEVNFNFDDPNLIILPLAFGKRQGREFIWNDLLSLETGSLKLANGRVIEKTLYNRRTRQDEPALFVALTFERREVLDSSNIKPMNLIGVDRGENIPAVIALTDPEGCPLSRFKDSLGNPTHILRIGESYKEKQRTIQAKKEVEQRRAGGYSRKYASKAKNLADDMVRNTARDLLYYAVTQDAMLIFENLSRGFGRQGKRTFMAERQYTRMEDWLTAKLAYEGLPSKTYLSKTLAQYTSKTCSNCGFTITSADYDRVLEKLKKTATGWMTTINGKELKVEGQITYYNRYKRQNVVKDLSVELDRLSEESVNNDISSWTKGRSGEALSLLKKRFSHRPVQEKFVCLNCGFETHADEQAALNIARSWLFLRSQEYKKYQTNKTTGNTDKRAFVETWQSFYRKKLKEVWKPAV

SEQ ID NO: 30092 - protein, 980 aa, synthetic construct
  REGION 1..980: note = engineered CasX variant
QEIGKRINKIRRRLVKDSNTKKAGKTRGPMKTLLVRVMTPDLRERLENLRKKPENIPQPISNTSRANLNKLLTDYTEMKKAILHVYWEEFQKDPVGLMSRVAQPASKKIDQNKLKPEMDEKGNLTTAGFACSQCGQPLFVYKLEQVSEKGKAYTNYFGRCNVAEHEKLILLAQLKPEKDSDEAVTYSLGKFGQRALDFYSIHVTKESTHPVKPLAQIAGNRYASHPVGKALSDACMGTIASFLSKYQDIIIEHQKVVKGNQKRLESLRELAGKENLEYPSVTLPPQPHTKEGVDAYNEVIARVRMWVNLNLWQKLKLSRDDAKPLLRLKGFPSFPLVERQANEVDWWDMVCNVKKLINEKKEDGKVFWQNLAGYKRQEALRPYLSSEEDRKKGKKFARYQLGDLLLHLEKKHGEDWGKVYDEAWERIDKKVEGLSKHIKLEEERRSEDAQSKAALTDWLRAKASFVIEGLKEADKDEFCRCELKLQKWYGDLRGKPFAIEAENSILDISGFSKQYNCAFIWQKDGVKKLNLYLIINYFKGGKLRFKKIKPEAFEANRFYTVINKKSGEIVPMEVNFNFDDPNLIILPLAFGKRQGREFIWNDLLSLETGSLKLANGRVIEKTLYNRRTRQDEPALFVALTFERREVLDSSNIKPMNLIGVDRGENIPAVIALTDPEGCPLSRFKDSLGNPTHILRIGESYKEKQRTIQAKKEVEQRRAGGYSRKYASKAKNLADDMVRNTARDLLYYAVTQDAMLIFENLSRGFGRQGKRTFMAERQYTRMEDWLTAKLAYEGLPSKTYLSKTLAQYTSKTCSNCGFTITSADYDRVLEKLKKTATGWMTTINGKELKVEGQITYYNRYKRQNVVKDLSVELDRLSEESVNNDISSWTKGRSGEALSLLKKRFSHRPVQEKFVCLNCGFETHADEQAALNIARSWLFLRSQEYKKYQTNKTTGNTDKRAFVETWQSFYRKKLKEVWKPAV

SEQ ID NO: 30093 - protein, 980 aa, synthetic construct
  REGION 1..980: note = engineered CasX variant
QEIGKRINKIRRRLVKDSNTKKAGKTRGPMKTLLVRVMTPDLRERLENLRKKPENIPQPISNTSRANLNKLLTDYTEMKKAILHVYWEEFQKDPVGLMSRVAQPASKKIDQNKLKPEMDEKGNLTTAGFACSQCGQPLFVYKLEQVSEKGKAYTNYFGRCNVAEHEKLILLAQLKPEKDSDEAVTYSLGKFGQRALDFYSIHVTKESTHPVKPLAQIAGNRYASSPVGKALSDACMGTIASFLSKYQDIIIEHQKVVKGNQKRLESLRELAGKENLEYPSVTLPPQPHTKEGVDAYNEVIARVRMWVNLNLWQKLKLSRDDAKPLLRLKGFPSFPLVERQANEVDWWDMVCNVKKLINEKKEDGKVFWQNLAGYKRQEALRPYLSSEEDRKKGKKFARYQLGDLLLHLEKKHGEDWGKVYDEAWERIDKKVEGLSKHIKLEEERRSEDAQSKAALTDWLRAKASFVIEGLKEADKDEFCRCELKLQKWYGDLRGKPFAIEAENSILDISGFSKQYNCAFIWQKDGVKKLNLYLIINYFKGGKLRFKKIKPEAFEANRFYTVINKKSGEIVPMEVNFNFDDPNLIILPLAFGKRQGREFIWNDLLSLETGSLKLANGRVIEKTLYNRRTRQDEPALFVALTFERREVLDSSNIKPMNLIGVDRGENIPAVIALTDPEGCPLSRFKDSLGNPTHILRIGESYKEKQRTIQAKKEVEQRRAGGYSRKYASKAKNLADDMVRNTARDLLYYAVTQDAMLIFENLSRGFGRQGKRTFMAERQYTRMEDWLTAKLAYEGLPSKTYLSKTLAQYTSKTCSNCGFTITSADYDRVLEKLKKTATGWMTTINGKELKVEGQITYYNRYKRQNVVKDLSVELDRLSEESVNNDISSWTKGRSGEALSLLKKRFSHRPVQEKFVCLNCGFETHADEQAALNIARSWLFLRSQEYKKYQTNKTTGNTDKRAFVETWQSFYRKKLKEVWKPAV

SEQ ID NO: 30094 - protein, 980 aa, synthetic construct
  REGION 1..980: note = engineered CasX variant
QEIGKRINKIRRRLVKDSNTKKAGKTRGPMKTLLVRVMTPDLRERLENLRKKPENIPQPISNTSRANLNKLLTDYTEMKKAILHVYWEEFQKDPVGLMSRVAQPASKKIDQNKLKPEMDEKGNLTTAGFACSQCGQPLFVYKLEQVSEKGKAYTNYFGRCNVAEHEKLILLAQLKPEKDSDEAVTYSLGKFGQRALDFYSIHVTKESTHPVKPLAQIAGNRYASTPVGKALSDACMGTIASFLSKYQDIIIEHQKVVKGNQKRLESLRELAGKENLEYPSVTLPPQPHTKEGVDAYNEVIARVRMWVNLNLWQKLKLSRDDAKPLLRLKGFPSFPLVERQANEVDWWDMVCNVKKLINEKKEDGKVFWQNLAGYKRQEALRPYLSSEEDRKKGKKFARYQLGDLLLHLEKKHGEDWGKVYDEAWERIDKKVEGLSKHIKLEEERRSEDAQSKAALTDWLRAKASFVIEGLKEADKDEFCRCELKLQKWYGDLRGKPFAIEAENSILDISGFSKQYNCAFIWQKDGVKKLNLYLIINYFKGGKLRFKKIKPEAFEANRFYTVINKKSGEIVPMEVNFNFDDPNLIILPLAFGKRQGREFIWNDLLSLETGSLKLANGRVIEKTLYNRRTRQDEPALFVALTFERREVLDSSNIKPMNLIGVDRGENIPAVIALTDPEGCPLSRFKDSLGNPTHILRIGESYKEKQRTIQAKKEVEQRRAGGYSRKYASKAKNLADDMVRNTARDLLYYAVTQDAMLIFENLSRGFGRQGKRTFMAERQYTRMEDWLTAKLAYEGLPSKTYLSKTLAQYTSKTCSNCGFTITSADYDRVLEKLKKTATGWMTTINGKELKVEGQITYYNRYKRQNVVKDLSVELDRLSEESVNNDISSWTKGRSGEALSLLKKRFSHRPVQEKFVCLNCGFETHADEQAALNIARSWLFLRSQEYKKYQTNKTTGNTDKRAFVETWQSFYRKKLKEVWKPAV

SEQ ID NO: 30095 - protein, 980 aa, synthetic construct
  REGION 1..980: note = engineered CasX variant
QEIGKRINKIRRRLVKDSNTKKAGKTRGPMKTLLVRVMTPDLRERLENLRKKPENIPQPISNTSRANLNKLLTDYTEMKKAILHVYWEEFQKDPVGLMSRVAQPASKKIDQNKLKPEMDEKGNLTTAGFACSQCGQPLFVYKLEQVSEKGKAYTNYFGRCNVAEHEKLILLAQLKPEKDSDEAVTYSLGKFGQRALDFYSIHVTKESTHPVKPLAQIAGNRYASAPVGKALSDACMGTIASFLSKYQDIIIEHQKVVKGNQKRLESLRELAGKENLEYPSVTLPPQPHTKEGVDAYNEVIARVRMWVNLNLWQKLKLSRDDAKPLLRLKGFPSFPLVERQANEVDWWDMVCNVKKLINEKKEDGKVFWQNLAGYKRQEALRPYLSSEEDRKKGKKFARYQLGDLLLHLEKKHGEDWGKVYDEAWERIDKKVEGLSKHIKLEEERRSEDAQSKAALTDWLRAKASFVIEGLKEADKDEFCRCELKLQKWYGDLRGKPFAIEAENSILDISGFSKQYNCAFIWQKDGVKKLNLYLIINYFKGGKLRFKKIKPEAFEANRFYTVINKKSGEIVPMEVNFNFDDPNLIILPLAFGKRQGREFIWNDLLSLETGSLKLANGRVIEKTLYNRRTRQDEPALFVALTFERREVLDSSNIKPMNLIGVDRGENIPAVIALTDPEGCPLSRFKDSLGNPTHILRIGESYKEKQRTIQAKKEVEQRRAGGYSRKYASKAKNLADDMVRNTARDLLYYAVTQDAMLIFENLSRGFGRQGKRTFMAERQYTRMEDWLTAKLAYEGLPSKTYLSKTLAQYTSKTCSNCGFTITSADYDRVLEKLKKTATGWMTTINGKELKVEGQITYYNRYKRQNVVKDLSVELDRLSEESVNNDISSWTKGRSGEALSLLKKRFSHRPVQEKFVCLNCGFETHADEQAALNIARSWLFLRSQEYKKYQTNKTTGNTDKRAFVETWQSFYRKKLKEVWKPAV

SEQ ID NO: 30096 - protein, 980 aa, synthetic construct
  REGION 1..980: note = engineered CasX variant
QEIGKRINKIRRRLVKDSNTKKAGKTRGPMKTLLVRVMTPDLRERLENLRKKPENIPQPISNTSRANLNKLLTDYTEMKKAILHVYWEEFQKDPVGLMSRVAQPASKKIDQNKLKPEMDEKGNLTTAGFACSQCGQPLFVYKLEQVSEKGKAYTNYFGRCNVAEHEKLILLAQLKPEKDSDEAVTYSLGKFGQRALDFYSIHVTKESTHPVKPLAQIAGNRYASVPVGKALSDACMGTIASFLSKYQDIIIEHQKVVKGNQKRLESLRELAGKENLEYPSVTLPPQPHTKEGVDAYNEVIARVRMWVNLNLWQKLKLSRDDAKPLLRLKGFPSFPLVERQANEVDWWDMVCNVKKLINEKKEDGKVFWQNLAGYKRQEALRPYLSSEEDRKKGKKFARYQLGDLLLHLEKKHGEDWGKVYDEAWERIDKKVEGLSKHIKLEEERRSEDAQSKAALTDWLRAKASFVIEGLKEADKDEFCRCELKLQKWYGDLRGKPFAIEAENSILDISGFSKQYNCAFIWQKDGVKKLNLYLIINYFKGGKLRFKKIKPEAFEANRFYTVINKKSGEIVPMEVNFNFDDPNLIILPLAFGKRQGREFIWNDLLSLETGSLKLANGRVIEKTLYNRRTRQDEPALFVALTFERREVLDSSNIKPMNLIGVDRGENIPAVIALTDPEGCPLSRFKDSLGNPTHILRIGESYKEKQRTIQAKKEVEQRRAGGYSRKYASKAKNLADDMVRNTARDLLYYAVTQDAMLIFENLSRGFGRQGKRTFMAERQYTRMEDWLTAKLAYEGLPSKTYLSKTLAQYTSKTCSNCGFTITSADYDRVLEKLKKTATGWMTTINGKELKVEGQITYYNRYKRQNVVKDLSVELDRLSEESVNNDISSWTKGRSGEALSLLKKRFSHRPVQEKFVCLNCGFETHADEQAALNIARSWLFLRSQEYKKYQTNKTTGNTDKRAFVETWQSFYRKKLKEVWKPAV

SEQ ID NO: 30097 - protein, 980 aa, synthetic construct
  REGION 1..980: note = engineered CasX variant
QEIGKRINKIRRRLVKDSNTKKAGKTRGPMKTLLVRVMTPDLRERLENLRKKPENIPQPISNTSRANLNKLLTDYTEMKKAILHVYWEEFQKDPVGLMSRVAQPASKKIDQNKLKPEMDEKGNLTTAGFACSQCGQPLFVYKLEQVSEKGKAYTNYFGRCNVAEHEKLIKLAQLKPEKDSDEAVTYSLGKFGQRALDFYSIHVTKESTHPVKPLAQIAGNRYASGPVGKALSDACMGTIASFLSKYQDIIIEHQKVVKGNQKRLESLRELAGKENLEYPSVTLPPQPHTKEGVDAYNEVIARVRMWVNLNLWQKLKLSRDDAKPLLRLKGFPSFPLVERQANEVDWWDMVCNVKKLINEKKEDGKVFWQNLAGYKRQEALRPYLSSEEDRKKGKKFARYQLGDLLLHLEKKHGEDWGKVYDEAWERIDKKVEGLSKHIKLEEERRSEDAQSKAALTDWLRAKASFVIEGLKEADKDEFCRCELKLQKWYGDLRGKPFAIEAENSILDISGFSKQYNCAFIWQKDGVKKLNLYLIINYFKGGKLRFKKIKPEAFEANRFYTVINKKSGEIVPMEVNFNFDDPNLIILPLAFGKRQGREFIWNDLLSLETGSLKLANGRVIEKTLYNRRTRQDEPALFVALTFERREVLDSSNIKPMNLIGVDRGENIPAVIALTDPEGCPLSRFKDSLGNPTHILRIGESYKEKQRTIQAKKEVEQRRAGGYSRKYASKAKNLADDMVRNTARDLLYYAVTQDAMLIFENLSRGFGRQGKRTFMAERQYTRMEDWLTAKLAYEGLPSKTYLSKTLAQYTSKTCSNCGFTITSADYDRVLEKLKKTATGWMTTINGKELKVEGQITYYNRYKRQNVVKDLSVELDRLSEESVNNDISSWTKGRSGEALSLLKKRFSHRPVQEKFVCLNCGFETHADEQAALNIARSWLFLRSQEYKKYQTNKTTGNTDKRAFVETWQSFYRKKLKEVWKPAV

SEQ ID NO: 30098 - protein, 979 aa, synthetic construct
  REGION 1..979: note = engineered CasX variant
QEIGKRINKIRRRLVKDSNTKKAGKTRGPMKTLLVRVMTPDLRERLENLRKKPENIPQPISNTSRANLNKLLTDYTEMKKAILHVYWEEFQKDPVGLMSRVAQPASKKIDQNKLKPEMDEKGNLTTAGFACSQCGQPLFVYKLEQVSEKGKAYTNYFGRCNVAEHEKLILLAQLKPEKDSDEAVTYSLGKFGQRALDFYSIHVTKESTHPVKPLAQIAGNRYASPVGKALSDACMGTIASFLSKYQDIIIEHQKVVKGNQKRLESLRELAGKENLEYPSVTLPPQPHTKEGVDAYNEVIARVRMWVNLNLWQKLKLSRDDAKPLLRLKGFPSFPLVERQANEVDWWDMVCNVKKLINEKKEDGKVFWQNLAGYKRQEALRPYLSSEEDRKKGKKFARYQLGDLLLHLEKKHGEDWGKVYDEAWERIDKKVEGLSKHIKLEEERRSEDAQSKAALTDWLRAKASFVIEGLKEADKDEFCRCELKLQKWYGDLRGKPFAIEAENSILDISGFSKQYNCAFIWQKDGVKKLNLYLIINYFKGGKLRFKKIKPEAFEANRFYTVINKKSGEIVPMEVNFNFDDPNLIILPLAFGKRQGREFIWNDLLSLETGSLKLANGRVIEKTLYNRRTRQDEPALFVALTFERREVLDSSNIKPMNLIGVDRGENIPAVIALTDPEGCPLSRFKDSLGNPTHILRIGESYKEKQRTIQAKKEVEQRRAGGYSRKYASKAKNLADDMVRNTARDLLYYAVTQDAMLIFENLSRGFGRQGKRTFMAERQYTRMEDWLTAKLAYEGLPSKTYLSKTLAQYTSKTCSNCGFTITSADYDRVLEKLKKTATGWMTTINGKELKVEGQITYYNRYKRQNVVKDLSVELDRLSEESVNNDISSWTKGRSGEALSLLKKRFSHRPVQEKFVCLNCGFETHADEQAALNIARSWLFLRSQEYKKYQTNKTTGNTDKRAFVETWQSFYRKKLKEVWKPAV

SEQ ID NO: 30099 - protein, 979 aa, synthetic construct
  REGION 1..979: note = engineered CasX variant
QEIGRINKIRRRLVKDSNTKKAGKTRGPMKTLLVRVMTPDLRERLENLRKKPENIPQPISNTSRANLNKLLTDYTEMKKAILHVYWEEFQKDPVGLMSRVAQPASKKIDQNKLKPEMDEKGNLTTAGFACSQCGQPLFVYKLEQVSEKGKAYTNYFGRCNVAEHEKLILLAQLKPEKDSDEAVTYSLGKFGQRALDFYSIHVTKESTHPVKPLAQIAGNRYASYPVGKALSDACMGTIASFLSKYQDIIIEHQKVVKGNQKRLESLRELAGKENLEYPSVTLPPQPHTKEGVDAYNEVIARVRMWVNLNLWQKLKLSRDDAKPLLRLKGFPSFPLVERQANEVDWWDMVCNVKKLINEKKEDGKVFWQNLAGYKRQEALRPYLSSEEDRKKGKKFARYQLGDLLLHLEKKHGEDWGKVYDEAWERIDKKVEGLSKHIKLEEERRSEDAQSKAALTDWLRAKASFVIEGLKEADKDEFCRCELKLQKWYGDLRGKPFAIEAENSILDISGFSKQYNCAFIWQKDGVKKLNLYLIINYFKGGKLRFKKIKPEAFEANRFYTVINKKSGEIVPMEVNFNFDDPNLIILPLAFGKRQGREFIWNDLLSLETGSLKLANGRVIEKTLYNRRTRQDEPALFVALTFERREVLDSSNIKPMNLIGVDRGENIPAVIALTDPEGCPLSRFKDSLGNPTHILRIGESYKEKQRTIQAKKEVEQRRAGGYSRKYASKAKNLADDMVRNTARDLLYYAVTQDAMLIFENLSRGFGRQGKRTFMAERQYTRMEDWLTAKLAYEGLPSKTYLSKTLAQYTSKTCSNCGFTITSADYDRVLEKLKKTATGWMTTINGKELKVEGQITYYNRYKRQNVVKDLSVELDRLSEESVNNDISSWTKGRSGEALSLLKKRFSHRPVQEKFVCLNCGFETHADEQAALNIARSWLFLRSQEYKKYQTNKTTGNTDKRAFVETWQSFYRKKLKEVWKPAV

SEQ ID NO: 30100 - protein, 979 aa, synthetic construct
  REGION 1..979: note = engineered CasX variant
QEIGRINKIRRRLVKDSNTKKAGKTRGPMKTLLVRVMTPDLRERLENLRKKPENIPQPISNTSRANLNKLLTDYTEMKKAILHVYWEEFQKDPVGLMSRVAQPASKKIDQNKLKPEMDEKGNLTTAGFACSQCGQPLFVYKLEQVSEKGKAYTNYFGRCNVAEHEKLILLAQLKPEKDSDEAVTYSLGKFGQRALDFYSIHVTKESTHPVKPLAQIAGNRYASHPVGKALSDACMGTIASFLSKYQDIIIEHQKVVKGNQKRLESLRELAGKENLEYPSVTLPPQPHTKEGVDAYNEVIARVRMWVNLNLWQKLKLSRDDAKPLLRLKGFPSFPLVERQANEVDWWDMVCNVKKLINEKKEDGKVFWQNLAGYKRQEALRPYLSSEEDRKKGKKFARYQLGDLLLHLEKKHGEDWGKVYDEAWERIDKKVEGLSKHIKLEEERRSEDAQSKAALTDWLRAKASFVIEGLKEADKDEFCRCELKLQKWYGDLRGKPFAIEAENSILDISGFSKQYNCAFIWQKDGVKKLNLYLIINYFKGGKLRFKKIKPEAFEANRFYTVINKKSGEIVPMEVNFNFDDPNLIILPLAFGKRQGREFIWNDLLSLETGSLKLANGRVIEKTLYNRRTRQDEPALFVALTFERREVLDSSNIKPMNLIGVDRGENIPAVIALTDPEGCPLSRFKDSLGNPTHILRIGESYKEKQRTIQAKKEVEQRRAGGYSRKYASKAKNLADDMVRNTARDLLYYAVTQDAMLIFENLSRGFGRQGKRTFMAERQYTRMEDWLTAKLAYEGLPSKTYLSKTLAQYTSKTCSNCGFTITSADYDRVLEKLKKTATGWMTTINGKELKVEGQITYYNRYKRQNVVKDLSVELDRLSEESVNNDISSWTKGRSGEALSLLKKRFSHRPVQEKFVCLNCGFETHADEQAALNIARSWLFLRSQEYKKYQTNKTTGNTDKRAFVETWQSFYRKKLKEVWKPAV

SEQ ID NO: 30101 - protein, 979 aa, synthetic construct
  REGION 1..979: note = engineered CasX variant
QEIGRINKIRRRLVKDSNTKKAGKTRGPMKTLLVRVMTPDLRERLENLRKKPENIPQPISNTSRANLNKLLTDYTEMKKAILHVYWEEFQKDPVGLMSRVAQPASKKIDQNKLKPEMDEKGNLTTAGFACSQCGQPLFVYKLEQVSEKGKAYTNYFGRCNVAEHEKLILLAQLKPEKDSDEAVTYSLGKFGQRALDFYSIHVTKESTHPVKPLAQIAGNRYASSPVGKALSDACMGTIASFLSKYQDIIIEHQKVVKGNQKRLESLRELAGKENLEYPSVTLPPQPHTKEGVDAYNEVIARVRMWVNLNLWQKLKLSRDDAKPLLRLKGFPSFPLVERQANEVDWWDMVCNVKKLINEKKEDGKVFWQNLAGYKRQEALRPYLSSEEDRKKGKKFARYQLGDLLLHLEKKHGEDWGKVYDEAWERIDKKVEGLSKHIKLEEERRSEDAQSKAALTDWLRAKASFVIEGLKEADKDEFCRCELKLQKWYGDLRGKPFAIEAENSILDISGFSKQYNCAFIWQKDGVKKLNLYLIINYFKGGKLRFKKIKPEAFEANRFYTVINKKSGEIVPMEVNFNFDDPNLIILPLAFGKRQGREFIWNDLLSLETGSLKLANGRVIEKTLYNRRTRQDEPALFVALTFERREVLDSSNIKPMNLIGVDRGENIPAVIALTDPEGCPLSRFKDSLGNPTHILRIGESYKEKQRTIQAKKEVEQRRAGGYSRKYASKAKNLADDMVRNTARDLLYYAVTQDAMLIFENLSRGFGRQGKRTFMAERQYTRMEDWLTAKLAYEGLPSKTYLSKTLAQYTSKTCSNCGFTITSADYDRVLEKLKKTATGWMTTINGKELKVEGQITYYNRYKRQNVVKDLSVELDRLSEESVNNDISSWTKGRSGEALSLLKKRFSHRPVQEKFVCLNCGFETHADEQAALNIARSWLFLRSQEYKKYQTNKTTGNTDKRAFVETWQSFYRKKLKEVWKPAV

SEQ ID NO: 30102 - protein, 979 aa, synthetic construct
  REGION 1..979: note = engineered CasX variant
QEIGRINKIRRRLVKDSNTKKAGKTRGPMKTLLVRVMTPDLRERLENLRKKPENIPQPISNTSRANLNKLLTDYTEMKKAILHVYWEEFQKDPVGLMSRVAQPASKKIDQNKLKPEMDEKGNLTTAGFACSQCGQPLFVYKLEQVSEKGKAYTNYFGRCNVAEHEKLILLAQLKPEKDSDEAVTYSLGKFGQRALDFYSIHVTKESTHPVKPLAQIAGNRYASTPVGKALSDACMGTIASFLSKYQDIIIEHQKVVKGNQKRLESLRELAGKENLEYPSVTLPPQPHTKEGVDAYNEVIARVRMWVNLNLWQKLKLSRDDAKPLLRLKGFPSFPLVERQANEVDWWDMVCNVKKLINEKKEDGKVFWQNLAGYKRQEALRPYLSSEEDRKKGKKFARYQLGDLLLHLEKKHGEDWGKVYDEAWERIDKKVEGLSKHIKLEEERRSEDAQSKAALTDWLRAKASFVIEGLKEADKDEFCRCELKLQKWYGDLRGKPFAIEAENSILDISGFSKQYNCAFIWQKDGVKKLNLYLIINYFKGGKLRFKKIKPEAFEANRFYTVINKKSGEIVPMEVNFNFDDPNLIILPLAFGKRQGREFIWNDLLSLETGSLKLANGRVIEKTLYNRRTRQDEPALFVALTFERREVLDSSNIKPMNLIGVDRGENIPAVIALTDPEGCPLSRFKDSLGNPTHILRIGESYKEKQRTIQAKKEVEQRRAGGYSRKYASKAKNLADDMVRNTARDLLYYAVTQDAMLIFENLSRGFGRQGKRTFMAERQYTRMEDWLTAKLAYEGLPSKTYLSKTLAQYTSKTCSNCGFTITSADYDRVLEKLKKTATGWMTTINGKELKVEGQITYYNRYKRQNVVKDLSVELDRLSEESVNNDISSWTKGRSGEALSLLKKRFSHRPVQEKFVCLNCGFETHADEQAALNIARSWLFLRSQEYKKYQTNKTTGNTDKRAFVETWQSFYRKKLKEVWKPAV

SEQ ID NO: 30103 - protein, 979 aa, synthetic construct
  REGION 1..979: note = engineered CasX variant
QEIGRINKIRRRLVKDSNTKKAGKTRGPMKTLLVRVMTPDLRERLENLRKKPENIPQPISNTSRANLNKLLTDYTEMKKAILHVYWEEFQKDPVGLMSRVAQPASKKIDQNKLKPEMDEKGNLTTAGFACSQCGQPLFVYKLEQVSEKGKAYTNYFGRCNVAEHEKLILLAQLKPEKDSDEAVTYSLGKFGQRALDFYSIHVTKESTHPVKPLAQIAGNRYASAPVGKALSDACMGTIASFLSKYQDIIIEHQKVVKGNQKRLESLRELAGKENLEYPSVTLPPQPHTKEGVDAYNEVIARVRMWVNLNLWQKLKLSRDDAKPLLRLKGFPSFPLVERQANEVDWWDMVCNVKKLINEKKEDGKVFWQNLAGYKRQEALRPYLSSEEDRKKGKKFARYQLGDLLLHLEKKHGEDWGKVYDEAWERIDKKVEGLSKHIKLEEERRSEDAQSKAALTDWLRAKASFVIEGLKEADKDEFCRCELKLQKWYGDLRGKPFAIEAENSILDISGFSKQYNCAFIWQKDGVKKLNLYLIINYFKGGKLRFKKIKPEAFEANRFYTVINKKSGEIVPMEVNFNFDDPNLIILPLAFGKRQGREFIWNDLLSLETGSLKLANGRVIEKTLYNRRTRQDEPALFVALTFERREVLDSSNIKPMNLIGVDRGENIPAVIALTDPEGCPLSRFKDSLGNPTHILRIGESYKEKQRTIQAKKEVEQRRAGGYSRKYASKAKNLADDMVRNTARDLLYYAVTQDAMLIFENLSRGFGRQGKRTFMAERQYTRMEDWLTAKLAYEGLPSKTYLSKTLAQYTSKTCSNCGFTITSADYDRVLEKLKKTATGWMTTINGKELKVEGQITYYNRYKRQNVVKDLSVELDRLSEESVNNDISSWTKGRSGEALSLLKKRFSHRPVQEKFVCLNCGFETHADEQAALNIARSWLFLRSQEYKKYQTNKTTGNTDKRAFVETWQSFYRKKLKEVWKPAV

SEQ ID NO: 30104 - protein, 979 aa, synthetic construct
  REGION 1..979: note = engineered CasX variant
QEIGRINKIRRRLVKDSNTKKAGKTRGPMKTLLVRVMTPDLRERLENLRKKPENIPQPISNTSRANLNKLLTDYTEMKKAILHVYWEEFQKDPVGLMSRVAQPASKKIDQNKLKPEMDEKGNLTTAGFACSQCGQPLFVYKLEQVSEKGKAYTNYFGRCNVAEHEKLILLAQLKPEKDSDEAVTYSLGKFGQRALDFYSIHVTKESTHPVKPLAQIAGNRYASVPVGKALSDACMGTIASFLSKYQDIIIEHQKVVKGNQKRLESLRELAGKENLEYPSVTLPPQPHTKEGVDAYNEVIARVRMWVNLNLWQKLKLSRDDAKPLLRLKGFPSFPLVERQANEVDWWDMVCNVKKLINEKKEDGKVFWQNLAGYKRQEALRPYLSSEEDRKKGKKFARYQLGDLLLHLEKKHGEDWGKVYDEAWERIDKKVEGLSKHIKLEEERRSEDAQSKAALTDWLRAKASFVIEGLKEADKDEFCRCELKLQKWYGDLRGKPFAIEAENSILDISGFSKQYNCAFIWQKDGVKKLNLYLIINYFKGGKLRFKKIKPEAFEANRFYTVINKKSGEIVPMEVNFNFDDPNLIILPLAFGKRQGREFIWNDLLSLETGSLKLANGRVIEKTLYNRRTRQDEPALFVALTFERREVLDSSNIKPMNLIGVDRGENIPAVIALTDPEGCPLSRFKDSLGNPTHILRIGESYKEKQRTIQAKKEVEQRRAGGYSRKYASKAKNLADDMVRNTARDLLYYAVTQDAMLIFENLSRGFGRQGKRTFMAERQYTRMEDWLTAKLAYEGLPSKTYLSKTLAQYTSKTCSNCGFTITSADYDRVLEKLKKTATGWMTTINGKELKVEGQITYYNRYKRQNVVKDLSVELDRLSEESVNNDISSWTKGRSGEALSLLKKRFSHRPVQEKFVCLNCGFETHADEQAALNIARSWLFLRSQEYKKYQTNKTTGNTDKRAFVETWQSFYRKKLKEVWKPAV

SEQ ID NO: 30105 - protein, 979 aa, synthetic construct
  REGION 1..979: note = engineered CasX variant
QEIGRINKIRRRLVKDSNTKKAGKTRGPMKTLLVRVMTPDLRERLENLRKKPENIPQPISNTSRANLNKLLTDYTEMKKAILHVYWEEFQKDPVGLMSRVAQPASKKIDQNKLKPEMDEKGNLTTAGFACSQCGQPLFVYKLEQVSEKGKAYTNYFGRCNVAEHEKLIKLAQLKPEKDSDEAVTYSLGKFGQRALDFYSIHVTKESTHPVKPLAQIAGNRYASGPVGKALSDACMGTIASFLSKYQDIIIEHQKVVKGNQKRLESLRELAGKENLEYPSVTLPPQPHTKEGVDAYNEVIARVRMWVNLNLWQKLKLSRDDAKPLLRLKGFPSFPLVERQANEVDWWDMVCNVKKLINEKKEDGKVFWQNLAGYKRQEALRPYLSSEEDRKKGKKFARYQLGDLLLHLEKKHGEDWGKVYDEAWERIDKKVEGLSKHIKLEEERRSEDAQSKAALTDWLRAKASFVIEGLKEADKDEFCRCELKLQKWYGDLRGKPFAIEAENSILDISGFSKQYNCAFIWQKDGVKKLNLYLIINYFKGGKLRFKKIKPEAFEANRFYTVINKKSGEIVPMEVNFNFDDPNLIILPLAFGKRQGREFIWNDLLSLETGSLKLANGRVIEKTLYNRRTRQDEPALFVALTFERREVLDSSNIKPMNLIGVDRGENIPAVIALTDPEGCPLSRFKDSLGNPTHILRIGESYKEKQRTIQAKKEVEQRRAGGYSRKYASKAKNLADDMVRNTARDLLYYAVTQDAMLIFENLSRGFGRQGKRTFMAERQYTRMEDWLTAKLAYEGLPSKTYLSKTLAQYTSKTCSNCGFTITSADYDRVLEKLKKTATGWMTTINGKELKVEGQITYYNRYKRQNVVKDLSVELDRLSEESVNNDISSWTKGRSGEALSLLKKRFSHRPVQEKFVCLNCGFETHADEQAALNIARSWLFLRSQEYKKYQTNKTTGNTDKRAFVETWQSFYRKKLKEVWKPAV

SEQ ID NO: 30106 - protein, 978 aa, synthetic construct
  REGION 1..978: note = engineered CasX variant
QEIGRINKIRRRLVKDSNTKKAGKTRGPMKTLLVRVMTPDLRERLENLRKKPENIPQPISNTSRANLNKLLTDYTEMKKAILHVYWEEFQKDPVGLMSRVAQPASKKIDQNKLKPEMDEKGNLTTAGFACSQCGQPLFVYKLEQVSEKGKAYTNYFGRCNVAEHEKLILLAQLKPEKDSDEAVTYSLGKFGQRALDFYSIHVTKESTHPVKPLAQIAGNRYASPVGKALSDACMGTIASFLSKYQDIIIEHQKVVKGNQKRLESLRELAGKENLEYPSVTLPPQPHTKEGVDAYNEVIARVRMWVNLNLWQKLKLSRDDAKPLLRLKGFPSFPLVERQANEVDWWDMVCNVKKLINEKKEDGKVFWQNLAGYKRQEALRPYLSSEEDRKKGKKFARYQLGDLLLHLEKKHGEDWGKVYDEAWERIDKKVEGLSKHIKLEEERRSEDAQSKAALTDWLRAKASFVIEGLKEADKDEFCRCELKLQKWYGDLRGKPFAIEAENSILDISGFSKQYNCAFIWQKDGVKKLNLYLIINYFKGGKLRFKKIKPEAFEANRFYTVINKKSGEIVPMEVNFNFDDPNLIILPLAFGKRQGREFIWNDLLSLETGSLKLANGRVIEKTLYNRRTRQDEPALFVALTFERREVLDSSNIKPMNLIGVDRGENIPAVIALTDPEGCPLSRFKDSLGNPTHILRIGESYKEKQRTIQAKKEVEQRRAGGYSRKYASKAKNLADDMVRNTARDLLYYAVTQDAMLIFENLSRGFGRQGKRTFMAERQYTRMEDWLTAKLAYEGLPSKTYLSKTLAQYTSKTCSNCGFTITSADYDRVLEKLKKTATGWMTTINGKELKVEGQITYYNRYKRQNVVKDLSVELDRLSEESVNNDISSWTKGRSGEALSLLKKRFSHRPVQEKFVCLNCGFETHADEQAALNIARSWLFLRSQEYKKYQTNKTTGNTDKRAFVETWQSFYRKKLKEVWKPAV

SEQ ID NO: 30107 - protein, 980 aa, synthetic construct
  REGION 1..980: note = engineered CasX variant
QEIKGRINKIRRRLVKDSNTKKAGKTRGPMKTLLVRVMTPDLRERLENLRKKPENIPQPISNTSRANLNKLLTDYTEMKKAILHVYWEEFQKDPVGLMSRVAQPASKKIDQNKLKPEMDEKGNLTTAGFACSQCGQPLFVYKLEQVSEKGKAYTNYFGRCNVAEHEKLILLAQLKPEKDSDEAVTYSLGKFGQRALDFYSIHVTKESTHPVKPLAQIAGNRYASYPVGKALSDACMGTIASFLSKYQDIIIEHQKVVKGNQKRLESLRELAGKENLEYPSVTLPPQPHTKEGVDAYNEVIARVRMWVNLNLWQKLKLSRDDAKPLLRLKGFPSFPLVERQANEVDWWDMVCNVKKLINEKKEDGKVFWQNLAGYKRQEALRPYLSSEEDRKKGKKFARYQLGDLLLHLEKKHGEDWGKVYDEAWERIDKKVEGLSKHIKLEEERRSEDAQSKAALTDWLRAKASFVIEGLKEADKDEFCRCELKLQKWYGDLRGKPFAIEAENSILDISGFSKQYNCAFIWQKDGVKKLNLYLIINYFKGGKLRFKKIKPEAFEANRFYTVINKKSGEIVPMEVNFNFDDPNLIILPLAFGKRQGREFIWNDLLSLETGSLKLANGRVIEKTLYNRRTRQDEPALFVALTFERREVLDSSNIKPMNLIGVDRGENIPAVIALTDPEGCPLSRFKDSLGNPTHILRIGESYKEKQRTIQAKKEVEQRRAGGYSRKYASKAKNLADDMVRNTARDLLYYAVTQDAMLIFENLSRGFGRQGKRTFMAERQYTRMEDWLTAKLAYEGLPSKTYLSKTLAQYTSKTCSNCGFTITSADYDRVLEKLKKTATGWMTTINGKELKVEGQITYYNRYKRQNVVKDLSVELDRLSEESVNNDISSWTKGRSGEALSLLKKRFSHRPVQEKFVCLNCGFETHADEQAALNIARSWLFLRSQEYKKYQTNKTTGNTDKRAFVETWQSFYRKKLKEVWKPAV

SEQ ID NO: 30108 - protein, 980 aa, synthetic construct
  REGION 1..980: note = engineered CasX variant
QEIKGRINKIRRRLVKDSNTKKAGKTRGPMKTLLVRVMTPDLRERLENLRKKPENIPQPISNTSRANLNKLLTDYTEMKKAILHVYWEEFQKDPVGLMSRVAQPASKKIDQNKLKPEMDEKGNLTTAGFACSQCGQPLFVYKLEQVSEKGKAYTNYFGRCNVAEHEKLILLAQLKPEKDSDEAVTYSLGKFGQRALDFYSIHVTKESTHPVKPLAQIAGNRYASHPVGKALSDACMGTIASFLSKYQDIIIEHQKVVKGNQKRLESLRELAGKENLEYPSVTLPPQPHTKEGVDAYNEVIARVRMWVNLNLWQKLKLSRDDAKPLLRLKGFPSFPLVERQANEVDWWDMVCNVKKLINEKKEDGKVFWQNLAGYKRQEALRPYLSSEEDRKKGKKFARYQLGDLLLHLEKKHGEDWGKVYDEAWERIDKKVEGLSKHIKLEEERRSEDAQSKAALTDWLRAKASFVIEGLKEADKDEFCRCELKLQKWYGDLRGKPFAIEAENSILDISGFSKQYNCAFIWQKDGVKKLNLYLIINYFKGGKLRFKKIKPEAFEANRFYTVINKKSGEIVPMEVNFNFDDPNLIILPLAFGKRQGREFIWNDLLSLETGSLKLANGRVIEKTLYNRRTRQDEPALFVALTFERREVLDSSNIKPMNLIGVDRGENIPAVIALTDPEGCPLSRFKDSLGNPTHILRIGESYKEKQRTIQAKKEVEQRRAGGYSRKYASKAKNLADDMVRNTARDLLYYAVTQDAMLIFENLSRGFGRQGKRTFMAERQYTRMEDWLTAKLAYEGLPSKTYLSKTLAQYTSKTCSNCGFTITSADYDRVLEKLKKTATGWMTTINGKELKVEGQITYYNRYKRQNVVKDLSVELDRLSEESVNNDISSWTKGRSGEALSLLKKRFSHRPVQEKFVCLNCGFETHADEQAALNIARSWLFLRSQEYKKYQTNKTTGNTDKRAFVETWQSFYRKKLKEVWKPAV

SEQ ID NO: 30109 - protein, 980 aa, synthetic construct
  REGION 1..980: note = engineered CasX variant
QEIKGRINKIRRRLVKDSNTKKAGKTRGPMKTLLVRVMTPDLRERLENLRKKPENIPQPISNTSRANLNKLLTDYTEMKKAILHVYWEEFQKDPVGLMSRVAQPASKKIDQNKLKPEMDEKGNLTTAGFACSQCGQPLFVYKLEQVSEKGKAYTNYFGRCNVAEHEKLILLAQLKPEKDSDEAVTYSLGKFGQRALDFYSIHVTKESTHPVKPLAQIAGNRYASSPVGKALSDACMGTIASFLSKYQDIIIEHQKVVKGNQKRLESLRELAGKENLEYPSVTLPPQPHTKEGVDAYNEVIARVRMWVNLNLWQKLKLSRDDAKPLLRLKGFPSFPLVERQANEVDWWDMVCNVKKLINEKKEDGKVFWQNLAGYKRQEALRPYLSSEEDRKKGKKFARYQLGDLLLHLEKKHGEDWGKVYDEAWERIDKKVEGLSKHIKLEEERRSEDAQSKAALTDWLRAKASFVIEGLKEADKDEFCRCELKLQKWYGDLRGKPFAIEAENSILDISGFSKQYNCAFIWQKDGVKKLNLYLIINYFKGGKLRFKKIKPEAFEANRFYTVINKKSGEIVPMEVNFNFDDPNLIILPLAFGKRQGREFIWNDLLSLETGSLKLANGRVIEKTLYNRRTRQDEPALFVALTFERREVLDSSNIKPMNLIGVDRGENIPAVIALTDPEGCPLSRFKDSLGNPTHILRIGESYKEKQRTIQAKKEVEQRRAGGYSRKYASKAKNLADDMVRNTARDLLYYAVTQDAMLIFENLSRGFGRQGKRTFMAERQYTRMEDWLTAKLAYEGLPSKTYLSKTLAQYTSKTCSNCGFTITSADYDRVLEKLKKTATGWMTTINGKELKVEGQITYYNRYKRQNVVKDLSVELDRLSEESVNNDISSWTKGRSGEALSLLKKRFSHRPVQEKFVCLNCGFETHADEQAALNIARSWLFLRSQEYKKYQTNKTTGNTDKRAFVETWQSFYRKKLKEVWKPAV

SEQ ID NO: 30110 - protein, 980 aa, synthetic construct
  REGION 1..980: note = engineered CasX variant
QEIKGRINKIRRRLVKDSNTKKAGKTRGPMKTLLVRVMTPDLRERLENLRKKPENIPQPISNTSRANLNKLLTDYTEMKKAILHVYWEEFQKDPVGLMSRVAQPASKKIDQNKLKPEMDEKGNLTTAGFACSQCGQPLFVYKLEQVSEKGKAYTNYFGRCNVAEHEKLILLAQLKPEKDSDEAVTYSLGKFGQRALDFYSIHVTKESTHPVKPLAQIAGNRYASTPVGKALSDACMGTIASFLSKYQDIIIEHQKVVKGNQKRLESLRELAGKENLEYPSVTLPPQPHTKEGVDAYNEVIARVRMWVNLNLWQKLKLSRDDAKPLLRLKGFPSFPLVERQANEVDWWDMVCNVKKLINEKKEDGKVFWQNLAGYKRQEALRPYLSSEEDRKKGKKFARYQLGDLLLHLEKKHGEDWGKVYDEAWERIDKKVEGLSKHIKLEEERRSEDAQSKAALTDWLRAKASFVIEGLKEADKDEFCRCELKLQKWYGDLRGKPFAIEAENSILDISGFSKQYNCAFIWQKDGVKKLNLYLIINYFKGGKLRFKKIKPEAFEANRFYTVINKKSGEIVPMEVNFNFDDPNLIILPLAFGKRQGREFIWNDLLSLETGSLKLANGRVIEKTLYNRRTRQDEPALFVALTFERREVLDSSNIKPMNLIGVDRGENIPAVIALTDPEGCPLSRFKDSLGNPTHILRIGESYKEKQRTIQAKKEVEQRRAGGYSRKYASKAKNLADDMVRNTARDLLYYAVTQDAMLIFENLSRGFGRQGKRTFMAERQYTRMEDWLTAKLAYEGLPSKTYLSKTLAQYTSKTCSNCGFTITSADYDRVLEKLKKTATGWMTTINGKELKVEGQITYYNRYKRQNVVKDLSVELDRLSEESVNNDISSWTKGRSGEALSLLKKRFSHRPVQEKFVCLNCGFETHADEQAALNIARSWLFLRSQEYKKYQTNKTTGNTDKRAFVETWQSFYRKKLKEVWKPAV

SEQ ID NO: 30111 - protein, 980 aa, synthetic construct
  REGION 1..980: note = engineered CasX variant
QEIKGRINKIRRRLVKDSNTKKAGKTRGPMKTLLVRVMTPDLRERLENLRKKPENIPQPISNTSRANLNKLLTDYTEMKKAILHVYWEEFQKDPVGLMSRVAQPASKKIDQNKLKPEMDEKGNLTTAGFACSQCGQPLFVYKLEQVSEKGKAYTNYFGRCNVAEHEKLILLAQLKPEKDSDEAVTYSLGKFGQRALDFYSIHVTKESTHPVKPLAQIAGNRYASAPVGKALSDACMGTIASFLSKYQDIIIEHQKVVKGNQKRLESLRELAGKENLEYPSVTLPPQPHTKEGVDAYNEVIARVRMWVNLNLWQKLKLSRDDAKPLLRLKGFPSFPLVERQANEVDWWDMVCNVKKLINEKKEDGKVFWQNLAGYKRQEALRPYLSSEEDRKKGKKFARYQLGDLLLHLEKKHGEDWGKVYDEAWERIDKKVEGLSKHIKLEEERRSEDAQSKAALTDWLRAKASFVIEGLKEADKDEFCRCELKLQKWYGDLRGKPFAIEAENSILDISGFSKQYNCAFIWQKDGVKKLNLYLIINYFKGGKLRFKKIKPEAFEANRFYTVINKKSGEIVPMEVNFNFDDPNLIILPLAFGKRQGREFIWNDLLSLETGSLKLANGRVIEKTLYNRRTRQDEPALFVALTFERREVLDSSNIKPMNLIGVDRGENIPAVIALTDPEGCPLSRFKDSLGNPTHILRIGESYKEKQRTIQAKKEVEQRRAGGYSRKYASKAKNLADDMVRNTARDLLYYAVTQDAMLIFENLSRGFGRQGKRTFMAERQYTRMEDWLTAKLAYEGLPSKTYLSKTLAQYTSKTCSNCGFTITSADYDRVLEKLKKTATGWMTTINGKELKVEGQITYYNRYKRQNVVKDLSVELDRLSEESVNNDISSWTKGRSGEALSLLKKRFSHRPVQEKFVCLNCGFETHADEQAALNIARSWLFLRSQEYKKYQTNKTTGNTDKRAFVETWQSFYRKKLKEVWKPAV

SEQ ID NO: 30112 - protein, 980 aa, synthetic construct
  REGION 1..980: note = engineered CasX variant
QEIKGRINKIRRRLVKDSNTKKAGKTRGPMKTLLVRVMTPDLRERLENLRKKPENIPQPISNTSRANLNKLLTDYTEMKKAILHVYWEEFQKDPVGLMSRVAQPASKKIDQNKLKPEMDEKGNLTTAGFACSQCGQPLFVYKLEQVSEKGKAYTNYFGRCNVAEHEKLILLAQLKPEKDSDEAVTYSLGKFGQRALDFYSIHVTKESTHPVKPLAQIAGNRYASVPVGKALSDACMGTIASFLSKYQDIIIEHQKVVKGNQKRLESLRELAGKENLEYPSVTLPPQPHTKEGVDAYNEVIARVRMWVNLNLWQKLKLSRDDAKPLLRLKGFPSFPLVERQANEVDWWDMVCNVKKLINEKKEDGKVFWQNLAGYKRQEALRPYLSSEEDRKKGKKFARYQLGDLLLHLEKKHGEDWGKVYDEAWERIDKKVEGLSKHIKLEEERRSEDAQSKAALTDWLRAKASFVIEGLKEADKDEFCRCELKLQKWYGDLRGKPFAIEAENSILDISGFSKQYNCAFIWQKDGVKKLNLYLIINYFKGGKLRFKKIKPEAFEANRFYTVINKKSGEIVPMEVNFNFDDPNLIILPLAFGKRQGREFIWNDLLSLETGSLKLANGRVIEKTLYNRRTRQDEPALFVALTFERREVLDSSNIKPMNLIGVDRGENIPAVIALTDPEGCPLSRFKDSLGNPTHILRIGESYKEKQRTIQAKKEVEQRRAGGYSRKYASKAKNLADDMVRNTARDLLYYAVTQDAMLIFENLSRGFGRQGKRTFMAERQYTRMEDWLTAKLAYEGLPSKTYLSKTLAQYTSKTCSNCGFTITSADYDRVLEKLKKTATGWMTTINGKELKVEGQITYYNRYKRQNVVKDLSVELDRLSEESVNNDISSWTKGRSGEALSLLKKRFSHRPVQEKFVCLNCGFETHADEQAALNIARSWLFLRSQEYKKYQTNKTTGNTDKRAFVETWQSFYRKKLKEVWKPAV

SEQ ID NO: 30113 - protein, 980 aa, synthetic construct
  REGION 1..980: note = engineered CasX variant
QEIKGRINKIRRRLVKDSNTKKAGKTRGPMKTLLVRVMTPDLRERLENLRKKPENIPQPISNTSRANLNKLLTDYTEMKKAILHVYWEEFQKDPVGLMSRVAQPASKKIDQNKLKPEMDEKGNLTTAGFACSQCGQPLFVYKLEQVSEKGKAYTNYFGRCNVAEHEKLIKLAQLKPEKDSDEAVTYSLGKFGQRALDFYSIHVTKESTHPVKPLAQIAGNRYASGPVGKALSDACMGTIASFLSKYQDIIIEHQKVVKGNQKRLESLRELAGKENLEYPSVTLPPQPHTKEGVDAYNEVIARVRMWVNLNLWQKLKLSRDDAKPLLRLKGFPSFPLVERQANEVDWWDMVCNVKKLINEKKEDGKVFWQNLAGYKRQEALRPYLSSEEDRKKGKKFARYQLGDLLLHLEKKHGEDWGKVYDEAWERIDKKVEGLSKHIKLEEERRSEDAQSKAALTDWLRAKASFVIEGLKEADKDEFCRCELKLQKWYGDLRGKPFAIEAENSILDISGFSKQYNCAFIWQKDGVKKLNLYLIINYFKGGKLRFKKIKPEAFEANRFYTVINKKSGEIVPMEVNFNFDDPNLIILPLAFGKRQGREFIWNDLLSLETGSLKLANGRVIEKTLYNRRTRQDEPALFVALTFERREVLDSSNIKPMNLIGVDRGENIPAVIALTDPEGCPLSRFKDSLGNPTHILRIGESYKEKQRTIQAKKEVEQRRAGGYSRKYASKAKNLADDMVRNTARDLLYYAVTQDAMLIFENLSRGFGRQGKRTFMAERQYTRMEDWLTAKLAYEGLPSKTYLSKTLAQYTSKTCSNCGFTITSADYDRVLEKLKKTATGWMTTINGKELKVEGQITYYNRYKRQNVVKDLSVELDRLSEESVNNDISSWTKGRSGEALSLLKKRFSHRPVQEKFVCLNCGFETHADEQAALNIARSWLFLRSQEYKKYQTNKTTGNTDKRAFVETWQSFYRKKLKEVWKPAV

SEQ ID NO: 30114 - protein, 979 aa, synthetic construct
  REGION 1..979: note = engineered CasX variant
QEIKGRINKIRRRLVKDSNTKKAGKTRGPMKTLLVRVMTPDLRERLENLRKKPENIPQPISNTSRANLNKLLTDYTEMKKAILHVYWEEFQKDPVGLMSRVAQPASKKIDQNKLKPEMDEKGNLTTAGFACSQCGQPLFVYKLEQVSEKGKAYTNYFGRCNVAEHEKLILLAQLKPEKDSDEAVTYSLGKFGQRALDFYSIHVTKESTHPVKPLAQIAGNRYASPVGKALSDACMGTIASFLSKYQDIIIEHQKVVKGNQKRLESLRELAGKENLEYPSVTLPPQPHTKEGVDAYNEVIARVRMWVNLNLWQKLKLSRDDAKPLLRLKGFPSFPLVERQANEVDWWDMVCNVKKLINEKKEDGKVFWQNLAGYKRQEALRPYLSSEEDRKKGKKFARYQLGDLLLHLEKKHGEDWGKVYDEAWERIDKKVEGLSKHIKLEEERRSEDAQSKAALTDWLRAKASFVIEGLKEADKDEFCRCELKLQKWYGDLRGKPFAIEAENSILDISGFSKQYNCAFIWQKDGVKKLNLYLIINYFKGGKLRFKKIKPEAFEANRFYTVINKKSGEIVPMEVNFNFDDPNLIILPLAFGKRQGREFIWNDLLSLETGSLKLANGRVIEKTLYNRRTRQDEPALFVALTFERREVLDSSNIKPMNLIGVDRGENIPAVIALTDPEGCPLSRFKDSLGNPTHILRIGESYKEKQRTIQAKKEVEQRRAGGYSRKYASKAKNLADDMVRNTARDLLYYAVTQDAMLIFENLSRGFGRQGKRTFMAERQYTRMEDWLTAKLAYEGLPSKTYLSKTLAQYTSKTCSNCGFTITSADYDRVLEKLKKTATGWMTTINGKELKVEGQITYYNRYKRQNVVKDLSVELDRLSEESVNNDISSWTKGRSGEALSLLKKRFSHRPVQEKFVCLNCGFETHADEQAALNIARSWLFLRSQEYKKYQTNKTTGNTDKRAFVETWQSFYRKKLKEVWKPAV

SEQ ID NO: 30115 - protein, 979 aa, synthetic construct
  REGION 1..979: note = engineered CasX variant
QEIKRANKIRRRLVKDSNTKKAGKTRGPMKTLLVRVMTPDLRERLENLRKKPENIPQPISNTSRANLNKLLTDYTEMKKAILHVYWEEFQKDPVGLMSRVAQPASKKIDQNKLKPEMDEKGNLTTAGFACSQCGQPLFVYKLEQVSEKGKAYTNYFGRCNVAEHEKLILLAQLKPEKDSDEAVTYSLGKFGQRALDFYSIHVTKESTHPVKPLAQIAGNRYASYPVGKALSDACMGTIASFLSKYQDIIIEHQKVVKGNQKRLESLRELAGKENLEYPSVTLPPQPHTKEGVDAYNEVIARVRMWVNLNLWQKLKLSRDDAKPLLRLKGFPSFPLVERQANEVDWWDMVCNVKKLINEKKEDGKVFWQNLAGYKRQEALRPYLSSEEDRKKGKKFARYQLGDLLLHLEKKHGEDWGKVYDEAWERIDKKVEGLSKHIKLEEERRSEDAQSKAALTDWLRAKASFVIEGLKEADKDEFCRCELKLQKWYGDLRGKPFAIEAENSILDISGFSKQYNCAFIWQKDGVKKLNLYLIINYFKGGKLRFKKIKPEAFEANRFYTVINKKSGEIVPMEVNFNFDDPNLIILPLAFGKRQGREFIWNDLLSLETGSLKLANGRVIEKTLYNRRTRQDEPALFVALTFERREVLDSSNIKPMNLIGVDRGENIPAVIALTDPEGCPLSRFKDSLGNPTHILRIGESYKEKQRTIQAKKEVEQRRAGGYSRKYASKAKNLADDMVRNTARDLLYYAVTQDAMLIFENLSRGFGRQGKRTFMAERQYTRMEDWLTAKLAYEGLPSKTYLSKTLAQYTSKTCSNCGFTITSADYDRVLEKLKKTATGWMTTINGKELKVEGQITYYNRYKRQNVVKDLSVELDRLSEESVNNDISSWTKGRSGEALSLLKKRFSHRPVQEKFVCLNCGFETHADEQAALNIARSWLFLRSQEYKKYQTNKTTGNTDKRAFVETWQSFYRKKLKEVWKPAV

SEQ ID NO: 30116 - protein, 979 aa, synthetic construct
  REGION 1..979: note = engineered CasX variant
QEIKRANKIRRRLVKDSNTKKAGKTRGPMKTLLVRVMTPDLRERLENLRKKPENIPQPISNTSRANLNKLLTDYTEMKKAILHVYWEEFQKDPVGLMSRVAQPASKKIDQNKLKPEMDEKGNLTTAGFACSQCGQPLFVYKLEQVSEKGKAYTNYFGRCNVAEHEKLILLAQLKPEKDSDEAVTYSLGKFGQRALDFYSIHVTKESTHPVKPLAQIAGNRYASHPVGKALSDACMGTIASFLSKYQDIIIEHQKVVKGNQKRLESLRELAGKENLEYPSVTLPPQPHTKEGVDAYNEVIARVRMWVNLNLWQKLKLSRDDAKPLLRLKGFPSFPLVERQANEVDWWDMVCNVKKLINEKKEDGKVFWQNLAGYKRQEALRPYLSSEEDRKKGKKFARYQLGDLLLHLEKKHGEDWGKVYDEAWERIDKKVEGLSKHIKLEEERRSEDAQSKAALTDWLRAKASFVIEGLKEADKDEFCRCELKLQKWYGDLRGKPFAIEAENSILDISGFSKQYNCAFIWQKDGVKKLNLYLIINYFKGGKLRFKKIKPEAFEANRFYTVINKKSGEIVPMEVNFNFDDPNLIILPLAFGKRQGREFIWNDLLSLETGSLKLANGRVIEKTLYNRRTRQDEPALFVALTFERREVLDSSNIKPMNLIGVDRGENIPAVIALTDPEGCPLSRFKDSLGNPTHILRIGESYKEKQRTIQAKKEVEQRRAGGYSRKYASKAKNLADDMVRNTARDLLYYAVTQDAMLIFENLSRGFGRQGKRTFMAERQYTRMEDWLTAKLAYEGLPSKTYLSKTLAQYTSKTCSNCGFTITSADYDRVLEKLKKTATGWMTTINGKELKVEGQITYYNRYKRQNVVKDLSVELDRLSEESVNNDISSWTKGRSGEALSLLKKRFSHRPVQEKFVCLNCGFETHADEQAALNIARSWLFLRSQEYKKYQTNKTTGNTDKRAFVETWQSFYRKKLKEVWKPAV

SEQ ID NO: 30117 - protein, 979 aa, synthetic construct
  REGION 1..979: note = engineered CasX variant
QEIKRANKIRRRLVKDSNTKKAGKTRGPMKTLLVRVMTPDLRERLENLRKKPENIPQPISNTSRANLNKLLTDYTEMKKAILHVYWEEFQKDPVGLMSRVAQPASKKIDQNKLKPEMDEKGNLTTAGFACSQCGQPLFVYKLEQVSEKGKAYTNYFGRCNVAEHEKLILLAQLKPEKDSDEAVTYSLGKFGQRALDFYSIHVTKESTHPVKPLAQIAGNRYASSPVGKALSDACMGTIASFLSKYQDIIIEHQKVVKGNQKRLESLRELAGKENLEYPSVTLPPQPHTKEGVDAYNEVIARVRMWVNLNLWQKLKLSRDDAKPLLRLKGFPSFPLVERQANEVDWWDMVCNVKKLINEKKEDGKVFWQNLAGYKRQEALRPYLSSEEDRKKGKKFARYQLGDLLLHLEKKHGEDWGKVYDEAWERIDKKVEGLSKHIKLEEERRSEDAQSKAALTDWLRAKASFVIEGLKEADKDEFCRCELKLQKWYGDLRGKPFAIEAENSILDISGFSKQYNCAFIWQKDGVKKLNLYLIINYFKGGKLRFKKIKPEAFEANRFYTVINKKSGEIVPMEVNFNFDDPNLIILPLAFGKRQGREFIWNDLLSLETGSLKLANGRVIEKTLYNRRTRQDEPALFVALTFERREVLDSSNIKPMNLIGVDRGENIPAVIALTDPEGCPLSRFKDSLGNPTHILRIGESYKEKQRTIQAKKEVEQRRAGGYSRKYASKAKNLADDMVRNTARDLLYYAVTQDAMLIFENLSRGFGRQGKRTFMAERQYTRMEDWLTAKLAYEGLPSKTYLSKTLAQYTSKTCSNCGFTITSADYDRVLEKLKKTATGWMTTINGKELKVEGQITYYNRYKRQNVVKDLSVELDRLSEESVNNDISSWTKGRSGEALSLLKKRFSHRPVQEKFVCLNCGFETHADEQAALNIARSWLFLRSQEYKKYQTNKTTGNTDKRAFVETWQSFYRKKLKEVWKPAV

SEQ ID NO: 30118 - protein, 979 aa, synthetic construct
  REGION 1..979: note = engineered CasX variant
QEIKRANKIRRRLVKDSNTKKAGKTRGPMKTLLVRVMTPDLRERLENLRKKPENIPQPISNTSRANLNKLLTDYTEMKKAILHVYWEEFQKDPVGLMSRVAQPASKKIDQNKLKPEMDEKGNLTTAGFACSQCGQPLFVYKLEQVSEKGKAYTNYFGRCNVAEHEKLILLAQLKPEKDSDEAVTYSLGKFGQRALDFYSIHVTKESTHPVKPLAQIAGNRYASTPVGKALSDACMGTIASFLSKYQDIIIEHQKVVKGNQKRLESLRELAGKENLEYPSVTLPPQPHTKEGVDAYNEVIARVRMWVNLNLWQKLKLSRDDAKPLLRLKGFPSFPLVERQANEVDWWDMVCNVKKLINEKKEDGKVFWQNLAGYKRQEALRPYLSSEEDRKKGKKFARYQLGDLLLHLEKKHGEDWGKVYDEAWERIDKKVEGLSKHIKLEEERRSEDAQSKAALTDWLRAKASFVIEGLKEADKDEFCRCELKLQKWYGDLRGKPFAIEAENSILDISGFSKQYNCAFIWQKDGVKKLNLYLIINYFKGGKLRFKKIKPEAFEANRFYTVINKKSGEIVPMEVNFNFDDPNLIILPLAFGKRQGREFIWNDLLSLETGSLKLANGRVIEKTLYNRRTRQDEPALFVALTFERREVLDSSNIKPMNLIGVDRGENIPAVIALTDPEGCPLSRFKDSLGNPTHILRIGESYKEKQRTIQAKKEVEQRRAGGYSRKYASKAKNLADDMVRNTARDLLYYAVTQDAMLIFENLSRGFGRQGKRTFMAERQYTRMEDWLTAKLAYEGLPSKTYLSKTLAQYTSKTCSNCGFTITSADYDRVLEKLKKTATGWMTTINGKELKVEGQITYYNRYKRQNVVKDLSVELDRLSEESVNNDISSWTKGRSGEALSLLKKRFSHRPVQEKFVCLNCGFETHADEQAALNIARSWLFLRSQEYKKYQTNKTTGNTDKRAFVETWQSFYRKKLKEVWKPAV

SEQ ID NO: 30119 - protein, 979 aa, synthetic construct
  REGION 1..979: note = engineered CasX variant
QEIKRANKIRRRLVKDSNTKKAGKTRGPMKTLLVRVMTPDLRERLENLRKKPENIPQPISNTSRANLNKLLTDYTEMKKAILHVYWEEFQKDPVGLMSRVAQPASKKIDQNKLKPEMDEKGNLTTAGFACSQCGQPLFVYKLEQVSEKGKAYTNYFGRCNVAEHEKLILLAQLKPEKDSDEAVTYSLGKFGQRALDFYSIHVTKESTHPVKPLAQIAGNRYASAPVGKALSDACMGTIASFLSKYQDIIIEHQKVVKGNQKRLESLRELAGKENLEYPSVTLPPQPHTKEGVDAYNEVIARVRMWVNLNLWQKLKLSRDDAKPLLRLKGFPSFPLVERQANEVDWWDMVCNVKKLINEKKEDGKVFWQNLAGYKRQEALRPYLSSEEDRKKGKKFARYQLGDLLLHLEKKHGEDWGKVYDEAWERIDKKVEGLSKHIKLEEERRSEDAQSKAALTDWLRAKASFVIEGLKEADKDEFCRCELKLQKWYGDLRGKPFAIEAENSILDISGFSKQYNCAFIWQKDGVKKLNLYLIINYFKGGKLRFKKIKPEAFEANRFYTVINKKSGEIVPMEVNFNFDDPNLIILPLAFGKRQGREFIWNDLLSLETGSLKLANGRVIEKTLYNRRTRQDEPALFVALTFERREVLDSSNIKPMNLIGVDRGENIPAVIALTDPEGCPLSRFKDSLGNPTHILRIGESYKEKQRTIQAKKEVEQRRAGGYSRKYASKAKNLADDMVRNTARDLLYYAVTQDAMLIFENLSRGFGRQGKRTFMAERQYTRMEDWLTAKLAYEGLPSKTYLSKTLAQYTSKTCSNCGFTITSADYDRVLEKLKKTATGWMTTINGKELKVEGQITYYNRYKRQNVVKDLSVELDRLSEESVNNDISSWTKGRSGEALSLLKKRFSHRPVQEKFVCLNCGFETHADEQAALNIARSWLFLRSQEYKKYQTNKTTGNTDKRAFVETWQSFYRKKLKEVWKPAV

SEQ ID NO: 30120 - protein, 979 aa, synthetic construct
  REGION 1..979: note = engineered CasX variant
QEIKRANKIRRRLVKDSNTKKAGKTRGPMKTLLVRVMTPDLRERLENLRKKPENIPQPISNTSRANLNKLLTDYTEMKKAILHVYWEEFQKDPVGLMSRVAQPASKKIDQNKLKPEMDEKGNLTTAGFACSQCGQPLFVYKLEQVSEKGKAYTNYFGRCNVAEHEKLILLAQLKPEKDSDEAVTYSLGKFGQRALDFYSIHVTKESTHPVKPLAQIAGNRYASVPVGKALSDACMGTIASFLSKYQDIIIEHQKVVKGNQKRLESLRELAGKENLEYPSVTLPPQPHTKEGVDAYNEVIARVRMWVNLNLWQKLKLSRDDAKPLLRLKGFPSFPLVERQANEVDWWDMVCNVKKLINEKKEDGKVFWQNLAGYKRQEALRPYLSSEEDRKKGKKFARYQLGDLLLHLEKKHGEDWGKVYDEAWERIDKKVEGLSKHIKLEEERRSEDAQSKAALTDWLRAKASFVIEGLKEADKDEFCRCELKLQKWYGDLRGKPFAIEAENSILDISGFSKQYNCAFIWQKDGVKKLNLYLIINYFKGGKLRFKKIKPEAFEANRFYTVINKKSGEIVPMEVNFNFDDPNLIILPLAFGKRQGREFIWNDLLSLETGSLKLANGRVIEKTLYNRRTRQDEPALFVALTFERREVLDSSNIKPMNLIGVDRGENIPAVIALTDPEGCPLSRFKDSLGNPTHILRIGESYKEKQRTIQAKKEVEQRRAGGYSRKYASKAKNLADDMVRNTARDLLYYAVTQDAMLIFENLSRGFGRQGKRTFMAERQYTRMEDWLTAKLAYEGLPSKTYLSKTLAQYTSKTCSNCGFTITSADYDRVLEKLKKTATGWMTTINGKELKVEGQITYYNRYKRQNVVKDLSVELDRLSEESVNNDISSWTKGRSGEALSLLKKRFSHRPVQEKFVCLNCGFETHADEQAALNIARSWLFLRSQEYKKYQTNKTTGNTDKRAFVETWQSFYRKKLKEVWKPAV

SEQ ID NO: 30121 - protein, 979 aa, synthetic construct
  REGION 1..979: note = engineered CasX variant
QEIKRANKIRRRLVKDSNTKKAGKTRGPMKTLLVRVMTPDLRERLENLRKKPENIPQPISNTSRANLNKLLTDYTEMKKAILHVYWEEFQKDPVGLMSRVAQPASKKIDQNKLKPEMDEKGNLTTAGFACSQCGQPLFVYKLEQVSEKGKAYTNYFGRCNVAEHEKLIKLAQLKPEKDSDEAVTYSLGKFGQRALDFYSIHVTKESTHPVKPLAQIAGNRYASGPVGKALSDACMGTIASFLSKYQDIIIEHQKVVKGNQKRLESLRELAGKENLEYPSVTLPPQPHTKEGVDAYNEVIARVRMWVNLNLWQKLKLSRDDAKPLLRLKGFPSFPLVERQANEVDWWDMVCNVKKLINEKKEDGKVFWQNLAGYKRQEALRPYLSSEEDRKKGKKFARYQLGDLLLHLEKKHGEDWGKVYDEAWERIDKKVEGLSKHIKLEEERRSEDAQSKAALTDWLRAKASFVIEGLKEADKDEFCRCELKLQKWYGDLRGKPFAIEAENSILDISGFSKQYNCAFIWQKDGVKKLNLYLIINYFKGGKLRFKKIKPEAFEANRFYTVINKKSGEIVPMEVNFNFDDPNLIILPLAFGKRQGREFIWNDLLSLETGSLKLANGRVIEKTLYNRRTRQDEPALFVALTFERREVLDSSNIKPMNLIGVDRGENIPAVIALTDPEGCPLSRFKDSLGNPTHILRIGESYKEKQRTIQAKKEVEQRRAGGYSRKYASKAKNLADDMVRNTARDLLYYAVTQDAMLIFENLSRGFGRQGKRTFMAERQYTRMEDWLTAKLAYEGLPSKTYLSKTLAQYTSKTCSNCGFTITSADYDRVLEKLKKTATGWMTTINGKELKVEGQITYYNRYKRQNVVKDLSVELDRLSEESVNNDISSWTKGRSGEALSLLKKRFSHRPVQEKFVCLNCGFETHADEQAALNIARSWLFLRSQEYKKYQTNKTTGNTDKRAFVETWQSFYRKKLKEVWKPAV

SEQ ID NO: 30122 - protein, 978 aa, synthetic construct
  REGION 1..978: note = engineered CasX variant
QEIKRANKIRRRLVKDSNTKKAGKTRGPMKTLLVRVMTPDLRERLENLRKKPENIPQPISNTSRANLNKLLTDYTEMKKAILHVYWEEFQKDPVGLMSRVAQPASKKIDQNKLKPEMDEKGNLTTAGFACSQCGQPLFVYKLEQVSEKGKAYTNYFGRCNVAEHEKLILLAQLKPEKDSDEAVTYSLGKFGQRALDFYSIHVTKESTHPVKPLAQIAGNRYASPVGKALSDACMGTIASFLSKYQDIIIEHQKVVKGNQKRLESLRELAGKENLEYPSVTLPPQPHTKEGVDAYNEVIARVRMWVNLNLWQKLKLSRDDAKPLLRLKGFPSFPLVERQANEVDWWDMVCNVKKLINEKKEDGKVFWQNLAGYKRQEALRPYLSSEEDRKKGKKFARYQLGDLLLHLEKKHGEDWGKVYDEAWERIDKKVEGLSKHIKLEEERRSEDAQSKAALTDWLRAKASFVIEGLKEADKDEFCRCELKLQKWYGDLRGKPFAIEAENSILDISGFSKQYNCAFIWQKDGVKKLNLYLIINYFKGGKLRFKKIKPEAFEANRFYTVINKKSGEIVPMEVNFNFDDPNLIILPLAFGKRQGREFIWNDLLSLETGSLKLANGRVIEKTLYNRRTRQDEPALFVALTFERREVLDSSNIKPMNLIGVDRGENIPAVIALTDPEGCPLSRFKDSLGNPTHILRIGESYKEKQRTIQAKKEVEQRRAGGYSRKYASKAKNLADDMVRNTARDLLYYAVTQDAMLIFENLSRGFGRQGKRTFMAERQYTRMEDWLTAKLAYEGLPSKTYLSKTLAQYTSKTCSNCGFTITSADYDRVLEKLKKTATGWMTTINGKELKVEGQITYYNRYKRQNVVKDLSVELDRLSEESVNNDISSWTKGRSGEALSLLKKRFSHRPVQEKFVCLNCGFETHADEQAALNIARSWLFLRSQEYKKYQTNKTTGNTDKRAFVETWQSFYRKKLKEVWKPAV

SEQ ID NO: 30123 - protein, 979 aa, synthetic construct
  REGION 1..979: note = engineered CasX variant
QEIKRISKIRRRLVKDSNTKKAGKTRGPMKTLLVRVMTPDLRERLENLRKKPENIPQPISNTSRANLNKLLTDYTEMKKAILHVYWEEFQKDPVGLMSRVAQPASKKIDQNKLKPEMDEKGNLTTAGFACSQCGQPLFVYKLEQVSEKGKAYTNYFGRCNVAEHEKLILLAQLKPEKDSDEAVTYSLGKFGQRALDFYSIHVTKESTHPVKPLAQIAGNRYASYPVGKALSDACMGTIASFLSKYQDIIIEHQKVVKGNQKRLESLRELAGKENLEYPSVTLPPQPHTKEGVDAYNEVIARVRMWVNLNLWQKLKLSRDDAKPLLRLKGFPSFPLVERQANEVDWWDMVCNVKKLINEKKEDGKVFWQNLAGYKRQEALRPYLSSEEDRKKGKKFARYQLGDLLLHLEKKHGEDWGKVYDEAWERIDKKVEGLSKHIKLEEERRSEDAQSKAALTDWLRAKASFVIEGLKEADKDEFCRCELKLQKWYGDLRGKPFAIEAENSILDISGFSKQYNCAFIWQKDGVKKLNLYLIINYFKGGKLRFKKIKPEAFEANRFYTVINKKSGEIVPMEVNFNFDDPNLIILPLAFGKRQGREFIWNDLLSLETGSLKLANGRVIEKTLYNRRTRQDEPALFVALTFERREVLDSSNIKPMNLIGVDRGENIPAVIALTDPEGCPLSRFKDSLGNPTHILRIGESYKEKQRTIQAKKEVEQRRAGGYSRKYASKAKNLADDMVRNTARDLLYYAVTQDAMLIFENLSRGFGRQGKRTFMAERQYTRMEDWLTAKLAYEGLPSKTYLSKTLAQYTSKTCSNCGFTITSADYDRVLEKLKKTATGWMTTINGKELKVEGQITYYNRYKRQNVVKDLSVELDRLSEESVNNDISSWTKGRSGEALSLLKKRFSHRPVQEKFVCLNCGFETHADEQAALNIARSWLFLRSQEYKKYQTNKTTGNTDKRAFVETWQSFYRKKLKEVWKPAV

SEQ ID NO: 30124 - protein, 979 aa, synthetic construct
  REGION 1..979: note = engineered CasX variant
QEIKRISKIRRRLVKDSNTKKAGKTRGPMKTLLVRVMTPDLRERLENLRKKPENIPQPISNTSRANLNKLLTDYTEMKKAILHVYWEEFQKDPVGLMSRVAQPASKKIDQNKLKPEMDEKGNLTTAGFACSQCGQPLFVYKLEQVSEKGKAYTNYFGRCNVAEHEKLILLAQLKPEKDSDEAVTYSLGKFGQRALDFYSIHVTKESTHPVKPLAQIAGNRYASHPVGKALSDACMGTIASFLSKYQDIIIEHQKVVKGNQKRLESLRELAGKENLEYPSVTLPPQPHTKEGVDAYNEVIARVRMWVNLNLWQKLKLSRDDAKPLLRLKGFPSFPLVERQANEVDWWDMVCNVKKLINEKKEDGKVFWQNLAGYKRQEALRPYLSSEEDRKKGKKFARYQLGDLLLHLEKKHGEDWGKVYDEAWERIDKKVEGLSKHIKLEEERRSEDAQSKAALTDWLRAKASFVIEGLKEADKDEFCRCELKLQKWYGDLRGKPFAIEAENSILDISGFSKQYNCAFIWQKDGVKKLNLYLIINYFKGGKLRFKKIKPEAFEANRFYTVINKKSGEIVPMEVNFNFDDPNLIILPLAFGKRQGREFIWNDLLSLETGSLKLANGRVIEKTLYNRRTRQDEPALFVALTFERREVLDSSNIKPMNLIGVDRGENIPAVIALTDPEGCPLSRFKDSLGNPTHILRIGESYKEKQRTIQAKKEVEQRRAGGYSRKYASKAKNLADDMVRNTARDLLYYAVTQDAMLIFENLSRGFGRQGKRTFMAERQYTRMEDWLTAKLAYEGLPSKTYLSKTLAQYTSKTCSNCGFTITSADYDRVLEKLKKTATGWMTTINGKELKVEGQITYYNRYKRQNVVKDLSVELDRLSEESVNNDISSWTKGRSGEALSLLKKRFSHRPVQEKFVCLNCGFETHADEQAALNIARSWLFLRSQEYKKYQTNKTTGNTDKRAFVETWQSFYRKKLKEVWKPAV

SEQ ID NO: 30125 - protein, 979 aa, synthetic construct
  REGION 1..979: note = engineered CasX variant
QEIKRISKIRRRLVKDSNTKKAGKTRGPMKTLLVRVMTPDLRERLENLRKKPENIPQPISNTSRANLNKLLTDYTEMKKAILHVYWEEFQKDPVGLMSRVAQPASKKIDQNKLKPEMDEKGNLTTAGFACSQCGQPLFVYKLEQVSEKGKAYTNYFGRCNVAEHEKLILLAQLKPEKDSDEAVTYSLGKFGQRALDFYSIHVTKESTHPVKPLAQIAGNRYASSPVGKALSDACMGTIASFLSKYQDIIIEHQKVVKGNQKRLESLRELAGKENLEYPSVTLPPQPHTKEGVDAYNEVIARVRMWVNLNLWQKLKLSRDDAKPLLRLKGFPSFPLVERQANEVDWWDMVCNVKKLINEKKEDGKVFWQNLAGYKRQEALRPYLSSEEDRKKGKKFARYQLGDLLLHLEKKHGEDWGKVYDEAWERIDKKVEGLSKHIKLEEERRSEDAQSKAALTDWLRAKASFVIEGLKEADKDEFCRCELKLQKWYGDLRGKPFAIEAENSILDISGFSKQYNCAFIWQKDGVKKLNLYLIINYFKGGKLRFKKIKPEAFEANRFYTVINKKSGEIVPMEVNFNFDDPNLIILPLAFGKRQGREFIWNDLLSLETGSLKLANGRVIEKTLYNRRTRQDEPALFVALTFERREVLDSSNIKPMNLIGVDRGENIPAVIALTDPEGCPLSRFKDSLGNPTHILRIGESYKEKQRTIQAKKEVEQRRAGGYSRKYASKAKNLADDMVRNTARDLLYYAVTQDAMLIFENLSRGFGRQGKRTFMAERQYTRMEDWLTAKLAYEGLPSKTYLSKTLAQYTSKTCSNCGFTITSADYDRVLEKLKKTATGWMTTINGKELKVEGQITYYNRYKRQNVVKDLSVELDRLSEESVNNDISSWTKGRSGEALSLLKKRFSHRPVQEKFVCLNCGFETHADEQAALNIARSWLFLRSQEYKKYQTNKTTGNTDKRAFVETWQSFYRKKLKEVWKPAV

SEQ ID NO: 30126 - protein, 979 aa, synthetic construct
  REGION 1..979: note = engineered CasX variant
QEIKRISKIRRRLVKDSNTKKAGKTRGPMKTLLVRVMTPDLRERLENLRKKPENIPQPISNTSRANLNKLLTDYTEMKKAILHVYWEEFQKDPVGLMSRVAQPASKKIDQNKLKPEMDEKGNLTTAGFACSQCGQPLFVYKLEQVSEKGKAYTNYFGRCNVAEHEKLILLAQLKPEKDSDEAVTYSLGKFGQRALDFYSIHVTKESTHPVKPLAQIAGNRYASTPVGKALSDACMGTIASFLSKYQDIIIEHQKVVKGNQKRLESLRELAGKENLEYPSVTLPPQPHTKEGVDAYNEVIARVRMWVNLNLWQKLKLSRDDAKPLLRLKGFPSFPLVERQANEVDWWDMVCNVKKLINEKKEDGKVFWQNLAGYKRQEALRPYLSSEEDRKKGKKFARYQLGDLLLHLEKKHGEDWGKVYDEAWERIDKKVEGLSKHIKLEEERRSEDAQSKAALTDWLRAKASFVIEGLKEADKDEFCRCELKLQKWYGDLRGKPFAIEAENSILDISGFSKQYNCAFIWQKDGVKKLNLYLIINYFKGGKLRFKKIKPEAFEANRFYTVINKKSGEIVPMEVNFNFDDPNLIILPLAFGKRQGREFIWNDLLSLETGSLKLANGRVIEKTLYNRRTRQDEPALFVALTFERREVLDSSNIKPMNLIGVDRGENIPAVIALTDPEGCPLSRFKDSLGNPTHILRIGESYKEKQRTIQAKKEVEQRRAGGYSRKYASKAKNLADDMVRNTARDLLYYAVTQDAMLIFENLSRGFGRQGKRTFMAERQYTRMEDWLTAKLAYEGLPSKTYLSKTLAQYTSKTCSNCGFTITSADYDRVLEKLKKTATGWMTTINGKELKVEGQITYYNRYKRQNVVKDLSVELDRLSEESVNNDISSWTKGRSGEALSLLKKRFSHRPVQEKFVCLNCGFETHADEQAALNIARSWLFLRSQEYKKYQTNKTTGNTDKRAFVETWQSFYRKKLKEVWKPAV

SEQ ID NO: 30127 - protein, 979 aa, synthetic construct
  REGION 1..979: note = engineered CasX variant
QEIKRISKIRRRLVKDSNTKKAGKTRGPMKTLLVRVMTPDLRERLENLRKKPENIPQPISNTSRANLNKLLTDYTEMKKAILHVYWEEFQKDPVGLMSRVAQPASKKIDQNKLKPEMDEKGNLTTAGFACSQCGQPLFVYKLEQVSEKGKAYTNYFGRCNVAEHEKLILLAQLKPEKDSDEAVTYSLGKFGQRALDFYSIHVTKESTHPVKPLAQIAGNRYASAPVGKALSDACMGTIASFLSKYQDIIIEHQKVVKGNQKRLESLRELAGKENLEYPSVTLPPQPHTKEGVDAYNEVIARVRMWVNLNLWQKLKLSRDDAKPLLRLKGFPSFPLVERQANEVDWWDMVCNVKKLINEKKEDGKVFWQNLAGYKRQEALRPYLSSEEDRKKGKKFARYQLGDLLLHLEKKHGEDWGKVYDEAWERIDKKVEGLSKHIKLEEERRSEDAQSKAALTDWLRAKASFVIEGLKEADKDEFCRCELKLQKWYGDLRGKPFAIEAENSILDISGFSKQYNCAFIWQKDGVKKLNLYLIINYFKGGKLRFKKIKPEAFEANRFYTVINKKSGEIVPMEVNFNFDDPNLIILPLAFGKRQGREFIWNDLLSLETGSLKLANGRVIEKTLYNRRTRQDEPALFVALTFERREVLDSSNIKPMNLIGVDRGENIPAVIALTDPEGCPLSRFKDSLGNPTHILRIGESYKEKQRTIQAKKEVEQRRAGGYSRKYASKAKNLADDMVRNTARDLLYYAVTQDAMLIFENLSRGFGRQGKRTFMAERQYTRMEDWLTAKLAYEGLPSKTYLSKTLAQYTSKTCSNCGFTITSADYDRVLEKLKKTATGWMTTINGKELKVEGQITYYNRYKRQNVVKDLSVELDRLSEESVNNDISSWTKGRSGEALSLLKKRFSHRPVQEKFVCLNCGFETHADEQAALNIARSWLFLRSQEYKKYQTNKTTGNTDKRAFVETWQSFYRKKLKEVWKPAV

SEQ ID NO: 30128 - protein, 979 aa, synthetic construct
  REGION 1..979: note = engineered CasX variant
QEIKRISKIRRRLVKDSNTKKAGKTRGPMKTLLVRVMTPDLRERLENLRKKPENIPQPISNTSRANLNKLLTDYTEMKKAILHVYWEEFQKDPVGLMSRVAQPASKKIDQNKLKPEMDEKGNLTTAGFACSQCGQPLFVYKLEQVSEKGKAYTNYFGRCNVAEHEKLILLAQLKPEKDSDEAVTYSLGKFGQRALDFYSIHVTKESTHPVKPLAQIAGNRYASVPVGKALSDACMGTIASFLSKYQDIIIEHQKVVKGNQKRLESLRELAGKENLEYPSVTLPPQPHTKEGVDAYNEVIARVRMWVNLNLWQKLKLSRDDAKPLLRLKGFPSFPLVERQANEVDWWDMVCNVKKLINEKKEDGKVFWQNLAGYKRQEALRPYLSSEEDRKKGKKFARYQLGDLLLHLEKKHGEDWGKVYDEAWERIDKKVEGLSKHIKLEEERRSEDAQSKAALTDWLRAKASFVIEGLKEADKDEFCRCELKLQKWYGDLRGKPFAIEAENSILDISGFSKQYNCAFIWQKDGVKKLNLYLIINYFKGGKLRFKKIKPEAFEANRFYTVINKKSGEIVPMEVNFNFDDPNLIILPLAFGKRQGREFIWNDLLSLETGSLKLANGRVIEKTLYNRRTRQDEPALFVALTFERREVLDSSNIKPMNLIGVDRGENIPAVIALTDPEGCPLSRFKDSLGNPTHILRIGESYKEKQRTIQAKKEVEQRRAGGYSRKYASKAKNLADDMVRNTARDLLYYAVTQDAMLIFENLSRGFGRQGKRTFMAERQYTRMEDWLTAKLAYEGLPSKTYLSKTLAQYTSKTCSNCGFTITSADYDRVLEKLKKTATGWMTTINGKELKVEGQITYYNRYKRQNVVKDLSVELDRLSEESVNNDISSWTKGRSGEALSLLKKRFSHRPVQEKFVCLNCGFETHADEQAALNIARSWLFLRSQEYKKYQTNKTTGNTDKRAFVETWQSFYRKKLKEVWKPAV

SEQ ID NO: 30129 - protein, 979 aa, synthetic construct
  REGION 1..979: note = engineered CasX variant
QEIKRISKIRRRLVKDSNTKKAGKTRGPMKTLLVRVMTPDLRERLENLRKKPENIPQPISNTSRANLNKLLTDYTEMKKAILHVYWEEFQKDPVGLMSRVAQPASKKIDQNKLKPEMDEKGNLTTAGFACSQCGQPLFVYKLEQVSEKGKAYTNYFGRCNVAEHEKLIKLAQLKPEKDSDEAVTYSLGKFGQRALDFYSIHVTKESTHPVKPLAQIAGNRYASGPVGKALSDACMGTIASFLSKYQDIIIEHQKVVKGNQKRLESLRELAGKENLEYPSVTLPPQPHTKEGVDAYNEVIARVRMWVNLNLWQKLKLSRDDAKPLLRLKGFPSFPLVERQANEVDWWDMVCNVKKLINEKKEDGKVFWQNLAGYKRQEALRPYLSSEEDRKKGKKFARYQLGDLLLHLEKKHGEDWGKVYDEAWERIDKKVEGLSKHIKLEEERRSEDAQSKAALTDWLRAKASFVIEGLKEADKDEFCRCELKLQKWYGDLRGKPFAIEAENSILDISGFSKQYNCAFIWQKDGVKKLNLYLIINYFKGGKLRFKKIKPEAFEANRFYTVINKKSGEIVPMEVNFNFDDPNLIILPLAFGKRQGREFIWNDLLSLETGSLKLANGRVIEKTLYNRRTRQDEPALFVALTFERREVLDSSNIKPMNLIGVDRGENIPAVIALTDPEGCPLSRFKDSLGNPTHILRIGESYKEKQRTIQAKKEVEQRRAGGYSRKYASKAKNLADDMVRNTARDLLYYAVTQDAMLIFENLSRGFGRQGKRTFMAERQYTRMEDWLTAKLAYEGLPSKTYLSKTLAQYTSKTCSNCGFTITSADYDRVLEKLKKTATGWMTTINGKELKVEGQITYYNRYKRQNVVKDLSVELDRLSEESVNNDISSWTKGRSGEALSLLKKRFSHRPVQEKFVCLNCGFETHADEQAALNIARSWLFLRSQEYKKYQTNKTTGNTDKRAFVETWQSFYRKKLKEVWKPAV

SEQ ID NO: 30130 - protein, 978 aa, synthetic construct
  REGION 1..978: note = engineered CasX variant
QEIKRISKIRRRLVKDSNTKKAGKTRGPMKTLLVRVMTPDLRERLENLRKKPENIPQPISNTSRANLNKLLTDYTEMKKAILHVYWEEFQKDPVGLMSRVAQPASKKIDQNKLKPEMDEKGNLTTAGFACSQCGQPLFVYKLEQVSEKGKAYTNYFGRCNVAEHEKLILLAQLKPEKDSDEAVTYSLGKFGQRALDFYSIHVTKESTHPVKPLAQIAGNRYASPVGKALSDACMGTIASFLSKYQDIIIEHQKVVKGNQKRLESLRELAGKENLEYPSVTLPPQPHTKEGVDAYNEVIARVRMWVNLNLWQKLKLSRDDAKPLLRLKGFPSFPLVERQANEVDWWDMVCNVKKLINEKKEDGKVFWQNLAGYKRQEALRPYLSSEEDRKKGKKFARYQLGDLLLHLEKKHGEDWGKVYDEAWERIDKKVEGLSKHIKLEEERRSEDAQSKAALTDWLRAKASFVIEGLKEADKDEFCRCELKLQKWYGDLRGKPFAIEAENSILDISGFSKQYNCAFIWQKDGVKKLNLYLIINYFKGGKLRFKKIKPEAFEANRFYTVINKKSGEIVPMEVNFNFDDPNLIILPLAFGKRQGREFIWNDLLSLETGSLKLANGRVIEKTLYNRRTRQDEPALFVALTFERREVLDSSNIKPMNLIGVDRGENIPAVIALTDPEGCPLSRFKDSLGNPTHILRIGESYKEKQRTIQAKKEVEQRRAGGYSRKYASKAKNLADDMVRNTARDLLYYAVTQDAMLIFENLSRGFGRQGKRTFMAERQYTRMEDWLTAKLAYEGLPSKTYLSKTLAQYTSKTCSNCGFTITSADYDRVLEKLKKTATGWMTTINGKELKVEGQITYYNRYKRQNVVKDLSVELDRLSEESVNNDISSWTKGRSGEALSLLKKRFSHRPVQEKFVCLNCGFETHADEQAALNIARSWLFLRSQEYKKYQTNKTTGNTDKRAFVETWQSFYRKKLKEVWKPAV

SEQ ID NO: 30131 - protein, 979 aa, synthetic construct
  REGION 1..979: note = engineered CasX variant
QEIKRINGIRRRLVKDSNTKKAGKTRGPMKTLLVRVMTPDLRERLENLRKKPENIPQPISNTSRANLNKLLTDYTEMKKAILHVYWEEFQKDPVGLMSRVAQPASKKIDQNKLKPEMDEKGNLTTAGFACSQCGQPLFVYKLEQVSEKGKAYTNYFGRCNVAEHEKLILLAQLKPEKDSDEAVTYSLGKFGQRALDFYSIHVTKESTHPVKPLAQIAGNRYASYPVGKALSDACMGTIASFLSKYQDIIIEHQKVVKGNQKRLESLRELAGKENLEYPSVTLPPQPHTKEGVDAYNEVIARVRMWVNLNLWQKLKLSRDDAKPLLRLKGFPSFPLVERQANEVDWWDMVCNVKKLINEKKEDGKVFWQNLAGYKRQEALRPYLSSEEDRKKGKKFARYQLGDLLLHLEKKHGEDWGKVYDEAWERIDKKVEGLSKHIKLEEERRSEDAQSKAALTDWLRAKASFVIEGLKEADKDEFCRCELKLQKWYGDLRGKPFAIEAENSILDISGFSKQYNCAFIWQKDGVKKLNLYLIINYFKGGKLRFKKIKPEAFEANRFYTVINKKSGEIVPMEVNFNFDDPNLIILPLAFGKRQGREFIWNDLLSLETGSLKLANGRVIEKTLYNRRTRQDEPALFVALTFERREVLDSSNIKPMNLIGVDRGENIPAVIALTDPEGCPLSRFKDSLGNPTHILRIGESYKEKQRTIQAKKEVEQRRAGGYSRKYASKAKNLADDMVRNTARDLLYYAVTQDAMLIFENLSRGFGRQGKRTFMAERQYTRMEDWLTAKLAYEGLPSKTYLSKTLAQYTSKTCSNCGFTITSADYDRVLEKLKKTATGWMTTINGKELKVEGQITYYNRYKRQNVVKDLSVELDRLSEESVNNDISSWTKGRSGEALSLLKKRFSHRPVQEKFVCLNCGFETHADEQAALNIARSWLFLRSQEYKKYQTNKTTGNTDKRAFVETWQSFYRKKLKEVWKPAV

SEQ ID NO: 30132 - protein, 979 aa, synthetic construct
  REGION 1..979: note = engineered CasX variant
QEIKRINGIRRRLVKDSNTKKAGKTRGPMKTLLVRVMTPDLRERLENLRKKPENIPQPISNTSRANLNKLLTDYTEMKKAILHVYWEEFQKDPVGLMSRVAQPASKKIDQNKLKPEMDEKGNLTTAGFACSQCGQPLFVYKLEQVSEKGKAYTNYFGRCNVAEHEKLILLAQLKPEKDSDEAVTYSLGKFGQRALDFYSIHVTKESTHPVKPLAQIAGNRYASHPVGKALSDACMGTIASFLSKYQDIIIEHQKVVKGNQKRLESLRELAGKENLEYPSVTLPPQPHTKEGVDAYNEVIARVRMWVNLNLWQKLKLSRDDAKPLLRLKGFPSFPLVERQANEVDWWDMVCNVKKLINEKKEDGKVFWQNLAGYKRQEALRPYLSSEEDRKKGKKFARYQLGDLLLHLEKKHGEDWGKVYDEAWERIDKKVEGLSKHIKLEEERRSEDAQSKAALTDWLRAKASFVIEGLKEADKDEFCRCELKLQKWYGDLRGKPFAIEAENSILDISGFSKQYNCAFIWQKDGVKKLNLYLIINYFKGGKLRFKKIKPEAFEANRFYTVINKKSGEIVPMEVNFNFDDPNLIILPLAFGKRQGREFIWNDLLSLETGSLKLANGRVIEKTLYNRRTRQDEPALFVALTFERREVLDSSNIKPMNLIGVDRGENIPAVIALTDPEGCPLSRFKDSLGNPTHILRIGESYKEKQRTIQAKKEVEQRRAGGYSRKYASKAKNLADDMVRNTARDLLYYAVTQDAMLIFENLSRGFGRQGKRTFMAERQYTRMEDWLTAKLAYEGLPSKTYLSKTLAQYTSKTCSNCGFTITSADYDRVLEKLKKTATGWMTTINGKELKVEGQITYYNRYKRQNVVKDLSVELDRLSEESVNNDISSWTKGRSGEALSLLKKRFSHRPVQEKFVCLNCGFETHADEQAALNIARSWLFLRSQEYKKYQTNKTTGNTDKRAFVETWQSFYRKKLKEVWKPAV

SEQ ID NO: 30133 - protein, 979 aa, synthetic construct
  REGION 1..979: note = engineered CasX variant
QEIKRINGIRRRLVKDSNTKKAGKTRGPMKTLLVRVMTPDLRERLENLRKKPENIPQPISNTSRANLNKLLTDYTEMKKAILHVYWEEFQKDPVGLMSRVAQPASKKIDQNKLKPEMDEKGNLTTAGFACSQCGQPLFVYKLEQVSEKGKAYTNYFGRCNVAEHEKLILLAQLKPEKDSDEAVTYSLGKFGQRALDFYSIHVTKESTHPVKPLAQIAGNRYASSPVGKALSDACMGTIASFLSKYQDIIIEHQKVVKGNQKRLESLRELAGKENLEYPSVTLPPQPHTKEGVDAYNEVIARVRMWVNLNLWQKLKLSRDDAKPLLRLKGFPSFPLVERQANEVDWWDMVCNVKKLINEKKEDGKVFWQNLAGYKRQEALRPYLSSEEDRKKGKKFARYQLGDLLLHLEKKHGEDWGKVYDEAWERIDKKVEGLSKHIKLEEERRSEDAQSKAALTDWLRAKASFVIEGLKEADKDEFCRCELKLQKWYGDLRGKPFAIEAENSILDISGFSKQYNCAFIWQKDGVKKLNLYLIINYFKGGKLRFKKIKPEAFEANRFYTVINKKSGEIVPMEVNFNFDDPNLIILPLAFGKRQGREFIWNDLLSLETGSLKLANGRVIEKTLYNRRTRQDEPALFVALTFERREVLDSSNIKPMNLIGVDRGENIPAVIALTDPEGCPLSRFKDSLGNPTHILRIGESYKEKQRTIQAKKEVEQRRAGGYSRKYASKAKNLADDMVRNTARDLLYYAVTQDAMLIFENLSRGFGRQGKRTFMAERQYTRMEDWLTAKLAYEGLPSKTYLSKTLAQYTSKTCSNCGFTITSADYDRVLEKLKKTATGWMTTINGKELKVEGQITYYNRYKRQNVVKDLSVELDRLSEESVNNDISSWTKGRSGEALSLLKKRFSHRPVQEKFVCLNCGFETHADEQAALNIARSWLFLRSQEYKKYQTNKTTGNTDKRAFVETWQSFYRKKLKEVWKPAV

SEQ ID NO: 30134 - protein, 979 aa, synthetic construct
  REGION 1..979: note = engineered CasX variant
QEIKRINGIRRRLVKDSNTKKAGKTRGPMKTLLVRVMTPDLRERLENLRKKPENIPQPISNTSRANLNKLLTDYTEMKKAILHVYWEEFQKDPVGLMSRVAQPASKKIDQNKLKPEMDEKGNLTTAGFACSQCGQPLFVYKLEQVSEKGKAYTNYFGRCNVAEHEKLILLAQLKPEKDSDEAVTYSLGKFGQRALDFYSIHVTKESTHPVKPLAQIAGNRYASTPVGKALSDACMGTIASFLSKYQDIIIEHQKVVKGNQKRLESLRELAGKENLEYPSVTLPPQPHTKEGVDAYNEVIARVRMWVNLNLWQKLKLSRDDAKPLLRLKGFPSFPLVERQANEVDWWDMVCNVKKLINEKKEDGKVFWQNLAGYKRQEALRPYLSSEEDRKKGKKFARYQLGDLLLHLEKKHGEDWGKVYDEAWERIDKKVEGLSKHIKLEEERRSEDAQSKAALTDWLRAKASFVIEGLKEADKDEFCRCELKLQKWYGDLRGKPFAIEAENSILDISGFSKQYNCAFIWQKDGVKKLNLYLIINYFKGGKLRFKKIKPEAFEANRFYTVINKKSGEIVPMEVNFNFDDPNLIILPLAFGKRQGREFIWNDLLSLETGSLKLANGRVIEKTLYNRRTRQDEPALFVALTFERREVLDSSNIKPMNLIGVDRGENIPAVIALTDPEGCPLSRFKDSLGNPTHILRIGESYKEKQRTIQAKKEVEQRRAGGYSRKYASKAKNLADDMVRNTARDLLYYAVTQDAMLIFENLSRGFGRQGKRTFMAERQYTRMEDWLTAKLAYEGLPSKTYLSKTLAQYTSKTCSNCGFTITSADYDRVLEKLKKTATGWMTTINGKELKVEGQITYYNRYKRQNVVKDLSVELDRLSEESVNNDISSWTKGRSGEALSLLKKRFSHRPVQEKFVCLNCGFETHADEQAALNIARSWLFLRSQEYKKYQTNKTTGNTDKRAFVETWQSFYRKKLKEVWKPAV

SEQ ID NO: 30135 - protein, 979 aa, synthetic construct
  REGION 1..979: note = engineered CasX variant
QEIKRINGIRRRLVKDSNTKKAGKTRGPMKTLLVRVMTPDLRERLENLRKKPENIPQPISNTSRANLNKLLTDYTEMKKAILHVYWEEFQKDPVGLMSRVAQPASKKIDQNKLKPEMDEKGNLTTAGFACSQCGQPLFVYKLEQVSEKGKAYTNYFGRCNVAEHEKLILLAQLKPEKDSDEAVTYSLGKFGQRALDFYSIHVTKESTHPVKPLAQIAGNRYASAPVGKALSDACMGTIASFLSKYQDIIIEHQKVVKGNQKRLESLRELAGKENLEYPSVTLPPQPHTKEGVDAYNEVIARVRMWVNLNLWQKLKLSRDDAKPLLRLKGFPSFPLVERQANEVDWWDMVCNVKKLINEKKEDGKVFWQNLAGYKRQEALRPYLSSEEDRKKGKKFARYQLGDLLLHLEKKHGEDWGKVYDEAWERIDKKVEGLSKHIKLEEERRSEDAQSKAALTDWLRAKASFVIEGLKEADKDEFCRCELKLQKWYGDLRGKPFAIEAENSILDISGFSKQYNCAFIWQKDGVKKLNLYLIINYFKGGKLRFKKIKPEAFEANRFYTVINKKSGEIVPMEVNFNFDDPNLIILPLAFGKRQGREFIWNDLLSLETGSLKLANGRVIEKTLYNRRTRQDEPALFVALTFERREVLDSSNIKPMNLIGVDRGENIPAVIALTDPEGCPLSRFKDSLGNPTHILRIGESYKEKQRTIQAKKEVEQRRAGGYSRKYASKAKNLADDMVRNTARDLLYYAVTQDAMLIFENLSRGFGRQGKRTFMAERQYTRMEDWLTAKLAYEGLPSKTYLSKTLAQYTSKTCSNCGFTITSADYDRVLEKLKKTATGWMTTINGKELKVEGQITYYNRYKRQNVVKDLSVELDRLSEESVNNDISSWTKGRSGEALSLLKKRFSHRPVQEKFVCLNCGFETHADEQAALNIARSWLFLRSQEYKKYQTNKTTGNTDKRAFVETWQSFYRKKLKEVWKPAV

SEQ ID NO: 30136 - protein, 979 aa, synthetic construct
  REGION 1..979: note = engineered CasX variant
QEIKRINGIRRRLVKDSNTKKAGKTRGPMKTLLVRVMTPDLRERLENLRKKPENIPQPISNTSRANLNKLLTDYTEMKKAILHVYWEEFQKDPVGLMSRVAQPASKKIDQNKLKPEMDEKGNLTTAGFACSQCGQPLFVYKLEQVSEKGKAYTNYFGRCNVAEHEKLILLAQLKPEKDSDEAVTYSLGKFGQRALDFYSIHVTKESTHPVKPLAQIAGNRYASVPVGKALSDACMGTIASFLSKYQDIIIEHQKVVKGNQKRLESLRELAGKENLEYPSVTLPPQPHTKEGVDAYNEVIARVRMWVNLNLWQKLKLSRDDAKPLLRLKGFPSFPLVERQANEVDWWDMVCNVKKLINEKKEDGKVFWQNLAGYKRQEALRPYLSSEEDRKKGKKFARYQLGDLLLHLEKKHGEDWGKVYDEAWERIDKKVEGLSKHIKLEEERRSEDAQSKAALTDWLRAKASFVIEGLKEADKDEFCRCELKLQKWYGDLRGKPFAIEAENSILDISGFSKQYNCAFIWQKDGVKKLNLYLIINYFKGGKLRFKKIKPEAFEANRFYTVINKKSGEIVPMEVNFNFDDPNLIILPLAFGKRQGREFIWNDLLSLETGSLKLANGRVIEKTLYNRRTRQDEPALFVALTFERREVLDSSNIKPMNLIGVDRGENIPAVIALTDPEGCPLSRFKDSLGNPTHILRIGESYKEKQRTIQAKKEVEQRRAGGYSRKYASKAKNLADDMVRNTARDLLYYAVTQDAMLIFENLSRGFGRQGKRTFMAERQYTRMEDWLTAKLAYEGLPSKTYLSKTLAQYTSKTCSNCGFTITSADYDRVLEKLKKTATGWMTTINGKELKVEGQITYYNRYKRQNVVKDLSVELDRLSEESVNNDISSWTKGRSGEALSLLKKRFSHRPVQEKFVCLNCGFETHADEQAALNIARSWLFLRSQEYKKYQTNKTTGNTDKRAFVETWQSFYRKKLKEVWKPAV

SEQ ID NO: 30137 - protein, 979 aa, synthetic construct
  REGION 1..979: note = engineered CasX variant
QEIKRINGIRRRLVKDSNTKKAGKTRGPMKTLLVRVMTPDLRERLENLRKKPENIPQPISNTSRANLNKLLTDYTEMKKAILHVYWEEFQKDPVGLMSRVAQPASKKIDQNKLKPEMDEKGNLTTAGFACSQCGQPLFVYKLEQVSEKGKAYTNYFGRCNVAEHEKLIKLAQLKPEKDSDEAVTYSLGKFGQRALDFYSIHVTKESTHPVKPLAQIAGNRYASGPVGKALSDACMGTIASFLSKYQDIIIEHQKVVKGNQKRLESLRELAGKENLEYPSVTLPPQPHTKEGVDAYNEVIARVRMWVNLNLWQKLKLSRDDAKPLLRLKGFPSFPLVERQANEVDWWDMVCNVKKLINEKKEDGKVFWQNLAGYKRQEALRPYLSSEEDRKKGKKFARYQLGDLLLHLEKKHGEDWGKVYDEAWERIDKKVEGLSKHIKLEEERRSEDAQSKAALTDWLRAKASFVIEGLKEADKDEFCRCELKLQKWYGDLRGKPFAIEAENSILDISGFSKQYNCAFIWQKDGVKKLNLYLIINYFKGGKLRFKKIKPEAFEANRFYTVINKKSGEIVPMEVNFNFDDPNLIILPLAFGKRQGREFIWNDLLSLETGSLKLANGRVIEKTLYNRRTRQDEPALFVALTFERREVLDSSNIKPMNLIGVDRGENIPAVIALTDPEGCPLSRFKDSLGNPTHILRIGESYKEKQRTIQAKKEVEQRRAGGYSRKYASKAKNLADDMVRNTARDLLYYAVTQDAMLIFENLSRGFGRQGKRTFMAERQYTRMEDWLTAKLAYEGLPSKTYLSKTLAQYTSKTCSNCGFTITSADYDRVLEKLKKTATGWMTTINGKELKVEGQITYYNRYKRQNVVKDLSVELDRLSEESVNNDISSWTKGRSGEALSLLKKRFSHRPVQEKFVCLNCGFETHADEQAALNIARSWLFLRSQEYKKYQTNKTTGNTDKRAFVETWQSFYRKKLKEVWKPAV

SEQ ID NO: 30138 - protein, 978 aa, synthetic construct
  REGION 1..978: note = engineered CasX variant
QEIKRINGIRRRLVKDSNTKKAGKTRGPMKTLLVRVMTPDLRERLENLRKKPENIPQPISNTSRANLNKLLTDYTEMKKAILHVYWEEFQKDPVGLMSRVAQPASKKIDQNKLKPEMDEKGNLTTAGFACSQCGQPLFVYKLEQVSEKGKAYTNYFGRCNVAEHEKLILLAQLKPEKDSDEAVTYSLGKFGQRALDFYSIHVTKESTHPVKPLAQIAGNRYASPVGKALSDACMGTIASFLSKYQDIIIEHQKVVKGNQKRLESLRELAGKENLEYPSVTLPPQPHTKEGVDAYNEVIARVRMWVNLNLWQKLKLSRDDAKPLLRLKGFPSFPLVERQANEVDWWDMVCNVKKLINEKKEDGKVFWQNLAGYKRQEALRPYLSSEEDRKKGKKFARYQLGDLLLHLEKKHGEDWGKVYDEAWERIDKKVEGLSKHIKLEEERRSEDAQSKAALTDWLRAKASFVIEGLKEADKDEFCRCELKLQKWYGDLRGKPFAIEAENSILDISGFSKQYNCAFIWQKDGVKKLNLYLIINYFKGGKLRFKKIKPEAFEANRFYTVINKKSGEIVPMEVNFNFDDPNLIILPLAFGKRQGREFIWNDLLSLETGSLKLANGRVIEKTLYNRRTRQDEPALFVALTFERREVLDSSNIKPMNLIGVDRGENIPAVIALTDPEGCPLSRFKDSLGNPTHILRIGESYKEKQRTIQAKKEVEQRRAGGYSRKYASKAKNLADDMVRNTARDLLYYAVTQDAMLIFENLSRGFGRQGKRTFMAERQYTRMEDWLTAKLAYEGLPSKTYLSKTLAQYTSKTCSNCGFTITSADYDRVLEKLKKTATGWMTTINGKELKVEGQITYYNRYKRQNVVKDLSVELDRLSEESVNNDISSWTKGRSGEALSLLKKRFSHRPVQEKFVCLNCGFETHADEQAALNIARSWLFLRSQEYKKYQTNKTTGNTDKRAFVETWQSFYRKKLKEVWKPAV

SEQ ID NO: 30139 - protein, 979 aa, synthetic construct
  REGION 1..979: note = engineered CasX variant
QEIKRINKIRRRLVKDSNTKKAGKTRGPMKTLLVPVMTPDLRERLENLRKKPENIPQPISNTSRANLNKLLTDYTEMKKAILHVYWEEFQKDPVGLMSRVAQPASKKIDQNKLKPEMDEKGNLTTAGFACSQCGQPLFVYKLEQVSEKGKAYTNYFGRCNVAEHEKLILLAQLKPEKDSDEAVTYSLGKFGQRALDFYSIHVTKESTHPVKPLAQIAGNRYASYPVGKALSDACMGTIASFLSKYQDIIIEHQKVVKGNQKRLESLRELAGKENLEYPSVTLPPQPHTKEGVDAYNEVIARVRMWVNLNLWQKLKLSRDDAKPLLRLKGFPSFPLVERQANEVDWWDMVCNVKKLINEKKEDGKVFWQNLAGYKRQEALRPYLSSEEDRKKGKKFARYQLGDLLLHLEKKHGEDWGKVYDEAWERIDKKVEGLSKHIKLEEERRSEDAQSKAALTDWLRAKASFVIEGLKEADKDEFCRCELKLQKWYGDLRGKPFAIEAENSILDISGFSKQYNCAFIWQKDGVKKLNLYLIINYFKGGKLRFKKIKPEAFEANRFYTVINKKSGEIVPMEVNFNFDDPNLIILPLAFGKRQGREFIWNDLLSLETGSLKLANGRVIEKTLYNRRTRQDEPALFVALTFERREVLDSSNIKPMNLIGVDRGENIPAVIALTDPEGCPLSRFKDSLGNPTHILRIGESYKEKQRTIQAKKEVEQRRAGGYSRKYASKAKNLADDMVRNTARDLLYYAVTQDAMLIFENLSRGFGRQGKRTFMAERQYTRMEDWLTAKLAYEGLPSKTYLSKTLAQYTSKTCSNCGFTITSADYDRVLEKLKKTATGWMTTINGKELKVEGQITYYNRYKRQNVVKDLSVELDRLSEESVNNDISSWTKGRSGEALSLLKKRFSHRPVQEKFVCLNCGFETHADEQAALNIARSWLFLRSQEYKKYQTNKTTGNTDKRAFVETWQSFYRKKLKEVWKPAV

SEQ ID NO: 30140 - protein, 979 aa, synthetic construct
  REGION 1..979: note = engineered CasX variant
QEIKRINKIRRRLVKDSNTKKAGKTRGPMKTLLVPVMTPDLRERLENLRKKPENIPQPISNTSRANLNKLLTDYTEMKKAILHVYWEEFQKDPVGLMSRVAQPASKKIDQNKLKPEMDEKGNLTTAGFACSQCGQPLFVYKLEQVSEKGKAYTNYFGRCNVAEHEKLILLAQLKPEKDSDEAVTYSLGKFGQRALDFYSIHVTKESTHPVKPLAQIAGNRYASHPVGKALSDACMGTIASFLSKYQDIIIEHQKVVKGNQKRLESLRELAGKENLEYPSVTLPPQPHTKEGVDAYNEVIARVRMWVNLNLWQKLKLSRDDAKPLLRLKGFPSFPLVERQANEVDWWDMVCNVKKLINEKKEDGKVFWQNLAGYKRQEALRPYLSSEEDRKKGKKFARYQLGDLLLHLEKKHGEDWGKVYDEAWERIDKKVEGLSKHIKLEEERRSEDAQSKAALTDWLRAKASFVIEGLKEADKDEFCRCELKLQKWYGDLRGKPFAIEAENSILDISGFSKQYNCAFIWQKDGVKKLNLYLIINYFKGGKLRFKKIKPEAFEANRFYTVINKKSGEIVPMEVNFNFDDPNLIILPLAFGKRQGREFIWNDLLSLETGSLKLANGRVIEKTLYNRRTRQDEPALFVALTFERREVLDSSNIKPMNLIGVDRGENIPAVIALTDPEGCPLSRFKDSLGNPTHILRIGESYKEKQRTIQAKKEVEQRRAGGYSRKYASKAKNLADDMVRNTARDLLYYAVTQDAMLIFENLSRGFGRQGKRTFMAERQYTRMEDWLTAKLAYEGLPSKTYLSKTLAQYTSKTCSNCGFTITSADYDRVLEKLKKTATGWMTTINGKELKVEGQITYYNRYKRQNVVKDLSVELDRLSEESVNNDISSWTKGRSGEALSLLKKRFSHRPVQEKFVCLNCGFETHADEQAALNIARSWLFLRSQEYKKYQTNKTTGNTDKRAFVETWQSFYRKKLKEVWKPAV

SEQ ID NO: 30141 - protein, 979 aa, synthetic construct
  REGION 1..979: note = engineered CasX variant
QEIKRINKIRRRLVKDSNTKKAGKTRGPMKTLLVPVMTPDLRERLENLRKKPENIPQPISNTSRANLNKLLTDYTEMKKAILHVYWEEFQKDPVGLMSRVAQPASKKIDQNKLKPEMDEKGNLTTAGFACSQCGQPLFVYKLEQVSEKGKAYTNYFGRCNVAEHEKLILLAQLKPEKDSDEAVTYSLGKFGQRALDFYSIHVTKESTHPVKPLAQIAGNRYASSPVGKALSDACMGTIASFLSKYQDIIIEHQKVVKGNQKRLESLRELAGKENLEYPSVTLPPQPHTKEGVDAYNEVIARVRMWVNLNLWQKLKLSRDDAKPLLRLKGFPSFPLVERQANEVDWWDMVCNVKKLINEKKEDGKVFWQNLAGYKRQEALRPYLSSEEDRKKGKKFARYQLGDLLLHLEKKHGEDWGKVYDEAWERIDKKVEGLSKHIKLEEERRSEDAQSKAALTDWLRAKASFVIEGLKEADKDEFCRCELKLQKWYGDLRGKPFAIEAENSILDISGFSKQYNCAFIWQKDGVKKLNLYLIINYFKGGKLRFKKIKPEAFEANRFYTVINKKSGEIVPMEVNFNFDDPNLIILPLAFGKRQGREFIWNDLLSLETGSLKLANGRVIEKTLYNRRTRQDEPALFVALTFERREVLDSSNIKPMNLIGVDRGENIPAVIALTDPEGCPLSRFKDSLGNPTHILRIGESYKEKQRTIQAKKEVEQRRAGGYSRKYASKAKNLADDMVRNTARDLLYYAVTQDAMLIFENLSRGFGRQGKRTFMAERQYTRMEDWLTAKLAYEGLPSKTYLSKTLAQYTSKTCSNCGFTITSADYDRVLEKLKKTATGWMTTINGKELKVEGQITYYNRYKRQNVVKDLSVELDRLSEESVNNDISSWTKGRSGEALSLLKKRFSHRPVQEKFVCLNCGFETHADEQAALNIARSWLFLRSQEYKKYQTNKTTGNTDKRAFVETWQSFYRKKLKEVWKPAV

SEQ ID NO: 30142 - protein, 979 aa, synthetic construct
  REGION 1..979: note = engineered CasX variant
QEIKRINKIRRRLVKDSNTKKAGKTRGPMKTLLVPVMTPDLRERLENLRKKPENIPQPISNTSRANLNKLLTDYTEMKKAILHVYWEEFQKDPVGLMSRVAQPASKKIDQNKLKPEMDEKGNLTTAGFACSQCGQPLFVYKLEQVSEKGKAYTNYFGRCNVAEHEKLILLAQLKPEKDSDEAVTYSLGKFGQRALDFYSIHVTKESTHPVKPLAQIAGNRYASTPVGKALSDACMGTIASFLSKYQDIIIEHQKVVKGNQKRLESLRELAGKENLEYPSVTLPPQPHTKEGVDAYNEVIARVRMWVNLNLWQKLKLSRDDAKPLLRLKGFPSFPLVERQANEVDWWDMVCNVKKLINEKKEDGKVFWQNLAGYKRQEALRPYLSSEEDRKKGKKFARYQLGDLLLHLEKKHGEDWGKVYDEAWERIDKKVEGLSKHIKLEEERRSEDAQSKAALTDWLRAKASFVIEGLKEADKDEFCRCELKLQKWYGDLRGKPFAIEAENSILDISGFSKQYNCAFIWQKDGVKKLNLYLIINYFKGGKLRFKKIKPEAFEANRFYTVINKKSGEIVPMEVNFNFDDPNLIILPLAFGKRQGREFIWNDLLSLETGSLKLANGRVIEKTLYNRRTRQDEPALFVALTFERREVLDSSNIKPMNLIGVDRGENIPAVIALTDPEGCPLSRFKDSLGNPTHILRIGESYKEKQRTIQAKKEVEQRRAGGYSRKYASKAKNLADDMVRNTARDLLYYAVTQDAMLIFENLSRGFGRQGKRTFMAERQYTRMEDWLTAKLAYEGLPSKTYLSKTLAQYTSKTCSNCGFTITSADYDRVLEKLKKTATGWMTTINGKELKVEGQITYYNRYKRQNVVKDLSVELDRLSEESVNNDISSWTKGRSGEALSLLKKRFSHRPVQEKFVCLNCGFETHADEQAALNIARSWLFLRSQEYKKYQTNKTTGNTDKRAFVETWQSFYRKKLKEVWKPAV

SEQ ID NO: 30143 - protein, 979 aa, synthetic construct
  REGION 1..979: note = engineered CasX variant
QEIKRINKIRRRLVKDSNTKKAGKTRGPMKTLLVPVMTPDLRERLENLRKKPENIPQPISNTSRANLNKLLTDYTEMKKAILHVYWEEFQKDPVGLMSRVAQPASKKIDQNKLKPEMDEKGNLTTAGFACSQCGQPLFVYKLEQVSEKGKAYTNYFGRCNVAEHEKLILLAQLKPEKDSDEAVTYSLGKFGQRALDFYSIHVTKESTHPVKPLAQIAGNRYASAPVGKALSDACMGTIASFLSKYQDIIIEHQKVVKGNQKRLESLRELAGKENLEYPSVTLPPQPHTKEGVDAYNEVIARVRMWVNLNLWQKLKLSRDDAKPLLRLKGFPSFPLVERQANEVDWWDMVCNVKKLINEKKEDGKVFWQNLAGYKRQEALRPYLSSEEDRKKGKKFARYQLGDLLLHLEKKHGEDWGKVYDEAWERIDKKVEGLSKHIKLEEERRSEDAQSKAALTDWLRAKASFVIEGLKEADKDEFCRCELKLQKWYGDLRGKPFAIEAENSILDISGFSKQYNCAFIWQKDGVKKLNLYLIINYFKGGKLRFKKIKPEAFEANRFYTVINKKSGEIVPMEVNFNFDDPNLIILPLAFGKRQGREFIWNDLLSLETGSLKLANGRVIEKTLYNRRTRQDEPALFVALTFERREVLDSSNIKPMNLIGVDRGENIPAVIALTDPEGCPLSRFKDSLGNPTHILRIGESYKEKQRTIQAKKEVEQRRAGGYSRKYASKAKNLADDMVRNTARDLLYYAVTQDAMLIFENLSRGFGRQGKRTFMAERQYTRMEDWLTAKLAYEGLPSKTYLSKTLAQYTSKTCSNCGFTITSADYDRVLEKLKKTATGWMTTINGKELKVEGQITYYNRYKRQNVVKDLSVELDRLSEESVNNDISSWTKGRSGEALSLLKKRFSHRPVQEKFVCLNCGFETHADEQAALNIARSWLFLRSQEYKKYQTNKTTGNTDKRAFVETWQSFYRKKLKEVWKPAV

SEQ ID NO: 30144 - protein, 979 aa, synthetic construct
  REGION 1..979: note = engineered CasX variant
QEIKRINKIRRRLVKDSNTKKAGKTRGPMKTLLVPVMTPDLRERLENLRKKPENIPQPISNTSRANLNKLLTDYTEMKKAILHVYWEEFQKDPVGLMSRVAQPASKKIDQNKLKPEMDEKGNLTTAGFACSQCGQPLFVYKLEQVSEKGKAYTNYFGRCNVAEHEKLILLAQLKPEKDSDEAVTYSLGKFGQRALDFYSIHVTKESTHPVKPLAQIAGNRYASVPVGKALSDACMGTIASFLSKYQDIIIEHQKVVKGNQKRLESLRELAGKENLEYPSVTLPPQPHTKEGVDAYNEVIARVRMWVNLNLWQKLKLSRDDAKPLLRLKGFPSFPLVERQANEVDWWDMVCNVKKLINEKKEDGKVFWQNLAGYKRQEALRPYLSSEEDRKKGKKFARYQLGDLLLHLEKKHGEDWGKVYDEAWERIDKKVEGLSKHIKLEEERRSEDAQSKAALTDWLRAKASFVIEGLKEADKDEFCRCELKLQKWYGDLRGKPFAIEAENSILDISGFSKQYNCAFIWQKDGVKKLNLYLIINYFKGGKLRFKKIKPEAFEANRFYTVINKKSGEIVPMEVNFNFDDPNLIILPLAFGKRQGREFIWNDLLSLETGSLKLANGRVIEKTLYNRRTRQDEPALFVALTFERREVLDSSNIKPMNLIGVDRGENIPAVIALTDPEGCPLSRFKDSLGNPTHILRIGESYKEKQRTIQAKKEVEQRRAGGYSRKYASKAKNLADDMVRNTARDLLYYAVTQDAMLIFENLSRGFGRQGKRTFMAERQYTRMEDWLTAKLAYEGLPSKTYLSKTLAQYTSKTCSNCGFTITSADYDRVLEKLKKTATGWMTTINGKELKVEGQITYYNRYKRQNVVKDLSVELDRLSEESVNNDISSWTKGRSGEALSLLKKRFSHRPVQEKFVCLNCGFETHADEQAALNIARSWLFLRSQEYKKYQTNKTTGNTDKRAFVETWQSFYRKKLKEVWKPAV

SEQ ID NO: 30145 - protein, 979 aa, synthetic construct
  REGION 1..979: note = engineered CasX variant
QEIKRINKIRRRLVKDSNTKKAGKTRGPMKTLLVPVMTPDLRERLENLRKKPENIPQPISNTSRANLNKLLTDYTEMKKAILHVYWEEFQKDPVGLMSRVAQPASKKIDQNKLKPEMDEKGNLTTAGFACSQCGQPLFVYKLEQVSEKGKAYTNYFGRCNVAEHEKLIKLAQLKPEKDSDEAVTYSLGKFGQRALDFYSIHVTKESTHPVKPLAQIAGNRYASGPVGKALSDACMGTIASFLSKYQDIIIEHQKVVKGNQKRLESLRELAGKENLEYPSVTLPPQPHTKEGVDAYNEVIARVRMWVNLNLWQKLKLSRDDAKPLLRLKGFPSFPLVERQANEVDWWDMVCNVKKLINEKKEDGKVFWQNLAGYKRQEALRPYLSSEEDRKKGKKFARYQLGDLLLHLEKKHGEDWGKVYDEAWERIDKKVEGLSKHIKLEEERRSEDAQSKAALTDWLRAKASFVIEGLKEADKDEFCRCELKLQKWYGDLRGKPFAIEAENSILDISGFSKQYNCAFIWQKDGVKKLNLYLIINYFKGGKLRFKKIKPEAFEANRFYTVINKKSGEIVPMEVNFNFDDPNLIILPLAFGKRQGREFIWNDLLSLETGSLKLANGRVIEKTLYNRRTRQDEPALFVALTFERREVLDSSNIKPMNLIGVDRGENIPAVIALTDPEGCPLSRFKDSLGNPTHILRIGESYKEKQRTIQAKKEVEQRRAGGYSRKYASKAKNLADDMVRNTARDLLYYAVTQDAMLIFENLSRGFGRQGKRTFMAERQYTRMEDWLTAKLAYEGLPSKTYLSKTLAQYTSKTCSNCGFTITSADYDRVLEKLKKTATGWMTTINGKELKVEGQITYYNRYKRQNVVKDLSVELDRLSEESVNNDISSWTKGRSGEALSLLKKRFSHRPVQEKFVCLNCGFETHADEQAALNIARSWLFLRSQEYKKYQTNKTTGNTDKRAFVETWQSFYRKKLKEVWKPAV

SEQ ID NO: 30146 - protein, 978 aa, synthetic construct
  REGION 1..978: note = engineered CasX variant
QEIKRINKIRRRLVKDSNTKKAGKTRGPMKTLLVPVMTPDLRERLENLRKKPENIPQPISNTSRANLNKLLTDYTEMKKAILHVYWEEFQKDPVGLMSRVAQPASKKIDQNKLKPEMDEKGNLTTAGFACSQCGQPLFVYKLEQVSEKGKAYTNYFGRCNVAEHEKLILLAQLKPEKDSDEAVTYSLGKFGQRALDFYSIHVTKESTHPVKPLAQIAGNRYASPVGKALSDACMGTIASFLSKYQDIIIEHQKVVKGNQKRLESLRELAGKENLEYPSVTLPPQPHTKEGVDAYNEVIARVRMWVNLNLWQKLKLSRDDAKPLLRLKGFPSFPLVERQANEVDWWDMVCNVKKLINEKKEDGKVFWQNLAGYKRQEALRPYLSSEEDRKKGKKFARYQLGDLLLHLEKKHGEDWGKVYDEAWERIDKKVEGLSKHIKLEEERRSEDAQSKAALTDWLRAKASFVIEGLKEADKDEFCRCELKLQKWYGDLRGKPFAIEAENSILDISGFSKQYNCAFIWQKDGVKKLNLYLIINYFKGGKLRFKKIKPEAFEANRFYTVINKKSGEIVPMEVNFNFDDPNLIILPLAFGKRQGREFIWNDLLSLETGSLKLANGRVIEKTLYNRRTRQDEPALFVALTFERREVLDSSNIKPMNLIGVDRGENIPAVIALTDPEGCPLSRFKDSLGNPTHILRIGESYKEKQRTIQAKKEVEQRRAGGYSRKYASKAKNLADDMVRNTARDLLYYAVTQDAMLIFENLSRGFGRQGKRTFMAERQYTRMEDWLTAKLAYEGLPSKTYLSKTLAQYTSKTCSNCGFTITSADYDRVLEKLKKTATGWMTTINGKELKVEGQITYYNRYKRQNVVKDLSVELDRLSEESVNNDISSWTKGRSGEALSLLKKRFSHRPVQEKFVCLNCGFETHADEQAALNIARSWLFLRSQEYKKYQTNKTTGNTDKRAFVETWQSFYRKKLKEVWKPAV

SEQ ID NO: 30147 - protein, 979 aa, synthetic construct
  REGION 1..979: note = engineered CasX variant
QEIKRINKIRRRLVKDSNTKKAGKTRGPMKTLLVRVMTPDLRERLENLRKKPPNIPQPISNTSRANLNKLLTDYTEMKKAILHVYWEEFQKDPVGLMSRVAQPASKKIDQNKLKPEMDEKGNLTTAGFACSQCGQPLFVYKLEQVSEKGKAYTNYFGRCNVAEHEKLILLAQLKPEKDSDEAVTYSLGKFGQRALDFYSIHVTKESTHPVKPLAQIAGNRYASYPVGKALSDACMGTIASFLSKYQDIIIEHQKVVKGNQKRLESLRELAGKENLEYPSVTLPPQPHTKEGVDAYNEVIARVRMWVNLNLWQKLKLSRDDAKPLLRLKGFPSFPLVERQANEVDWWDMVCNVKKLINEKKEDGKVFWQNLAGYKRQEALRPYLSSEEDRKKGKKFARYQLGDLLLHLEKKHGEDWGKVYDEAWERIDKKVEGLSKHIKLEEERRSEDAQSKAALTDWLRAKASFVIEGLKEADKDEFCRCELKLQKWYGDLRGKPFAIEAENSILDISGFSKQYNCAFIWQKDGVKKLNLYLIINYFKGGKLRFKKIKPEAFEANRFYTVINKKSGEIVPMEVNFNFDDPNLIILPLAFGKRQGREFIWNDLLSLETGSLKLANGRVIEKTLYNRRTRQDEPALFVALTFERREVLDSSNIKPMNLIGVDRGENIPAVIALTDPEGCPLSRFKDSLGNPTHILRIGESYKEKQRTIQAKKEVEQRRAGGYSRKYASKAKNLADDMVRNTARDLLYYAVTQDAMLIFENLSRGFGRQGKRTFMAERQYTRMEDWLTAKLAYEGLPSKTYLSKTLAQYTSKTCSNCGFTITSADYDRVLEKLKKTATGWMTTINGKELKVEGQITYYNRYKRQNVVKDLSVELDRLSEESVNNDISSWTKGRSGEALSLLKKRFSHRPVQEKFVCLNCGFETHADEQAALNIARSWLFLRSQEYKKYQTNKTTGNTDKRAFVETWQSFYRKKLKEVWKPAV

SEQ ID NO: 30148 - protein, 979 aa, synthetic construct
  REGION 1..979: note = engineered CasX variant
QEIKRINKIRRRLVKDSNTKKAGKTRGPMKTLLVRVMTPDLRERLENLRKKPPNIPQPISNTSRANLNKLLTDYTEMKKAILHVYWEEFQKDPVGLMSRVAQPASKKIDQNKLKPEMDEKGNLTTAGFACSQCGQPLFVYKLEQVSEKGKAYTNYFGRCNVAEHEKLILLAQLKPEKDSDEAVTYSLGKFGQRALDFYSIHVTKESTHPVKPLAQIAGNRYASHPVGKALSDACMGTIASFLSKYQDIIIEHQKVVKGNQKRLESLRELAGKENLEYPSVTLPPQPHTKEGVDAYNEVIARVRMWVNLNLWQKLKLSRDDAKPLLRLKGFPSFPLVERQANEVDWWDMVCNVKKLINEKKEDGKVFWQNLAGYKRQEALRPYLSSEEDRKKGKKFARYQLGDLLLHLEKKHGEDWGKVYDEAWERIDKKVEGLSKHIKLEEERRSEDAQSKAALTDWLRAKASFVIEGLKEADKDEFCRCELKLQKWYGDLRGKPFAIEAENSILDISGFSKQYNCAFIWQKDGVKKLNLYLIINYFKGGKLRFKKIKPEAFEANRFYTVINKKSGEIVPMEVNFNFDDPNLIILPLAFGKRQGREFIWNDLLSLETGSLKLANGRVIEKTLYNRRTRQDEPALFVALTFERREVLDSSNIKPMNLIGVDRGENIPAVIALTDPEGCPLSRFKDSLGNPTHILRIGESYKEKQRTIQAKKEVEQRRAGGYSRKYASKAKNLADDMVRNTARDLLYYAVTQDAMLIFENLSRGFGRQGKRTFMAERQYTRMEDWLTAKLAYEGLPSKTYLSKTLAQYTSKTCSNCGFTITSADYDRVLEKLKKTATGWMTTINGKELKVEGQITYYNRYKRQNVVKDLSVELDRLSEESVNNDISSWTKGRSGEALSLLKKRFSHRPVQEKFVCLNCGFETHADEQAALNIARSWLFLRSQEYKKYQTNKTTGNTDKRAFVETWQSFYRKKLKEVWKPAV

SEQ ID NO: 30149 - protein, 979 aa, synthetic construct
  REGION 1..979: note = engineered CasX variant
QEIKRINKIRRRLVKDSNTKKAGKTRGPMKTLLVRVMTPDLRERLENLRKKPPNIPQPISNTSRANLNKLLTDYTEMKKAILHVYWEEFQKDPVGLMSRVAQPASKKIDQNKLKPEMDEKGNLTTAGFACSQCGQPLFVYKLEQVSEKGKAYTNYFGRCNVAEHEKLILLAQLKPEKDSDEAVTYSLGKFGQRALDFYSIHVTKESTHPVKPLAQIAGNRYASSPVGKALSDACMGTIASFLSKYQDIIIEHQKVVKGNQKRLESLRELAGKENLEYPSVTLPPQPHTKEGVDAYNEVIARVRMWVNLNLWQKLKLSRDDAKPLLRLKGFPSFPLVERQANEVDWWDMVCNVKKLINEKKEDGKVFWQNLAGYKRQEALRPYLSSEEDRKKGKKFARYQLGDLLLHLEKKHGEDWGKVYDEAWERIDKKVEGLSKHIKLEEERRSEDAQSKAALTDWLRAKASFVIEGLKEADKDEFCRCELKLQKWYGDLRGKPFAIEAENSILDISGFSKQYNCAFIWQKDGVKKLNLYLIINYFKGGKLRFKKIKPEAFEANRFYTVINKKSGEIVPMEVNFNFDDPNLIILPLAFGKRQGREFIWNDLLSLETGSLKLANGRVIEKTLYNRRTRQDEPALFVALTFERREVLDSSNIKPMNLIGVDRGENIPAVIALTDPEGCPLSRFKDSLGNPTHILRIGESYKEKQRTIQAKKEVEQRRAGGYSRKYASKAKNLADDMVRNTARDLLYYAVTQDAMLIFENLSRGFGRQGKRTFMAERQYTRMEDWLTAKLAYEGLPSKTYLSKTLAQYTSKTCSNCGFTITSADYDRVLEKLKKTATGWMTTINGKELKVEGQITYYNRYKRQNVVKDLSVELDRLSEESVNNDISSWTKGRSGEALSLLKKRFSHRPVQEKFVCLNCGFETHADEQAALNIARSWLFLRSQEYKKYQTNKTTGNTDKRAFVETWQSFYRKKLKEVWKPAV

SEQ ID NO: 30150 - protein, 979 aa, synthetic construct
  REGION 1..979: note = engineered CasX variant
QEIKRINKIRRRLVKDSNTKKAGKTRGPMKTLLVRVMTPDLRERLENLRKKPPNIPQPISNTSRANLNKLLTDYTEMKKAILHVYWEEFQKDPVGLMSRVAQPASKKIDQNKLKPEMDEKGNLTTAGFACSQCGQPLFVYKLEQVSEKGKAYTNYFGRCNVAEHEKLILLAQLKPEKDSDEAVTYSLGKFGQRALDFYSIHVTKESTHPVKPLAQIAGNRYASTPVGKALSDACMGTIASFLSKYQDIIIEHQKVVKGNQKRLESLRELAGKENLEYPSVTLPPQPHTKEGVDAYNEVIARVRMWVNLNLWQKLKLSRDDAKPLLRLKGFPSFPLVERQANEVDWWDMVCNVKKLINEKKEDGKVFWQNLAGYKRQEALRPYLSSEEDRKKGKKFARYQLGDLLLHLEKKHGEDWGKVYDEAWERIDKKVEGLSKHIKLEEERRSEDAQSKAALTDWLRAKASFVIEGLKEADKDEFCRCELKLQKWYGDLRGKPFAIEAENSILDISGFSKQYNCAFIWQKDGVKKLNLYLIINYFKGGKLRFKKIKPEAFEANRFYTVINKKSGEIVPMEVNFNFDDPNLIILPLAFGKRQGREFIWNDLLSLETGSLKLANGRVIEKTLYNRRTRQDEPALFVALTFERREVLDSSNIKPMNLIGVDRGENIPAVIALTDPEGCPLSRFKDSLGNPTHILRIGESYKEKQRTIQAKKEVEQRRAGGYSRKYASKAKNLADDMVRNTARDLLYYAVTQDAMLIFENLSRGFGRQGKRTFMAERQYTRMEDWLTAKLAYEGLPSKTYLSKTLAQYTSKTCSNCGFTITSADYDRVLEKLKKTATGWMTTINGKELKVEGQITYYNRYKRQNVVKDLSVELDRLSEESVNNDISSWTKGRSGEALSLLKKRFSHRPVQEKFVCLNCGFETHADEQAALNIARSWLFLRSQEYKKYQTNKTTGNTDKRAFVETWQSFYRKKLKEVWKPAV

SEQ ID NO: 30151 - protein, 979 aa, synthetic construct
  REGION 1..979: note = engineered CasX variant
QEIKRINKIRRRLVKDSNTKKAGKTRGPMKTLLVRVMTPDLRERLENLRKKPPNIPQPISNTSRANLNKLLTDYTEMKKAILHVYWEEFQKDPVGLMSRVAQPASKKIDQNKLKPEMDEKGNLTTAGFACSQCGQPLFVYKLEQVSEKGKAYTNYFGRCNVAEHEKLILLAQLKPEKDSDEAVTYSLGKFGQRALDFYSIHVTKESTHPVKPLAQIAGNRYASAPVGKALSDACMGTIASFLSKYQDIIIEHQKVVKGNQKRLESLRELAGKENLEYPSVTLPPQPHTKEGVDAYNEVIARVRMWVNLNLWQKLKLSRDDAKPLLRLKGFPSFPLVERQANEVDWWDMVCNVKKLINEKKEDGKVFWQNLAGYKRQEALRPYLSSEEDRKKGKKFARYQLGDLLLHLEKKHGEDWGKVYDEAWERIDKKVEGLSKHIKLEEERRSEDAQSKAALTDWLRAKASFVIEGLKEADKDEFCRCELKLQKWYGDLRGKPFAIEAENSILDISGFSKQYNCAFIWQKDGVKKLNLYLIINYFKGGKLRFKKIKPEAFEANRFYTVINKKSGEIVPMEVNFNFDDPNLIILPLAFGKRQGREFIWNDLLSLETGSLKLANGRVIEKTLYNRRTRQDEPALFVALTFERREVLDSSNIKPMNLIGVDRGENIPAVIALTDPEGCPLSRFKDSLGNPTHILRIGESYKEKQRTIQAKKEVEQRRAGGYSRKYASKAKNLADDMVRNTARDLLYYAVTQDAMLIFENLSRGFGRQGKRTFMAERQYTRMEDWLTAKLAYEGLPSKTYLSKTLAQYTSKTCSNCGFTITSADYDRVLEKLKKTATGWMTTINGKELKVEGQITYYNRYKRQNVVKDLSVELDRLSEESVNNDISSWTKGRSGEALSLLKKRFSHRPVQEKFVCLNCGFETHADEQAALNIARSWLFLRSQEYKKYQTNKTTGNTDKRAFVETWQSFYRKKLKEVWKPAV

SEQ ID NO: 30152 - protein, 979 aa, synthetic construct
  REGION 1..979: note = engineered CasX variant
QEIKRINKIRRRLVKDSNTKKAGKTRGPMKTLLVRVMTPDLRERLENLRKKPPNIPQPISNTSRANLNKLLTDYTEMKKAILHVYWEEFQKDPVGLMSRVAQPASKKIDQNKLKPEMDEKGNLTTAGFACSQCGQPLFVYKLEQVSEKGKAYTNYFGRCNVAEHEKLILLAQLKPEKDSDEAVTYSLGKFGQRALDFYSIHVTKESTHPVKPLAQIAGNRYASVPVGKALSDACMGTIASFLSKYQDIIIEHQKVVKGNQKRLESLRELAGKENLEYPSVTLPPQPHTKEGVDAYNEVIARVRMWVNLNLWQKLKLSRDDAKPLLRLKGFPSFPLVERQANEVDWWDMVCNVKKLINEKKEDGKVFWQNLAGYKRQEALRPYLSSEEDRKKGKKFARYQLGDLLLHLEKKHGEDWGKVYDEAWERIDKKVEGLSKHIKLEEERRSEDAQSKAALTDWLRAKASFVIEGLKEADKDEFCRCELKLQKWYGDLRGKPFAIEAENSILDISGFSKQYNCAFIWQKDGVKKLNLYLIINYFKGGKLRFKKIKPEAFEANRFYTVINKKSGEIVPMEVNFNFDDPNLIILPLAFGKRQGREFIWNDLLSLETGSLKLANGRVIEKTLYNRRTRQDEPALFVALTFERREVLDSSNIKPMNLIGVDRGENIPAVIALTDPEGCPLSRFKDSLGNPTHILRIGESYKEKQRTIQAKKEVEQRRAGGYSRKYASKAKNLADDMVRNTARDLLYYAVTQDAMLIFENLSRGFGRQGKRTFMAERQYTRMEDWLTAKLAYEGLPSKTYLSKTLAQYTSKTCSNCGFTITSADYDRVLEKLKKTATGWMTTINGKELKVEGQITYYNRYKRQNVVKDLSVELDRLSEESVNNDISSWTKGRSGEALSLLKKRFSHRPVQEKFVCLNCGFETHADEQAALNIARSWLFLRSQEYKKYQTNKTTGNTDKRAFVETWQSFYRKKLKEVWKPAV

SEQ ID NO: 30153 - protein, 979 aa, synthetic construct
  REGION 1..979: note = engineered CasX variant
QEIKRINKIRRRLVKDSNTKKAGKTRGPMKTLLVRVMTPDLRERLENLRKKPPNIPQPISNTSRANLNKLLTDYTEMKKAILHVYWEEFQKDPVGLMSRVAQPASKKIDQNKLKPEMDEKGNLTTAGFACSQCGQPLFVYKLEQVSEKGKAYTNYFGRCNVAEHEKLIKLAQLKPEKDSDEAVTYSLGKFGQRALDFYSIHVTKESTHPVKPLAQIAGNRYASGPVGKALSDACMGTIASFLSKYQDIIIEHQKVVKGNQKRLESLRELAGKENLEYPSVTLPPQPHTKEGVDAYNEVIARVRMWVNLNLWQKLKLSRDDAKPLLRLKGFPSFPLVERQANEVDWWDMVCNVKKLINEKKEDGKVFWQNLAGYKRQEALRPYLSSEEDRKKGKKFARYQLGDLLLHLEKKHGEDWGKVYDEAWERIDKKVEGLSKHIKLEEERRSEDAQSKAALTDWLRAKASFVIEGLKEADKDEFCRCELKLQKWYGDLRGKPFAIEAENSILDISGFSKQYNCAFIWQKDGVKKLNLYLIINYFKGGKLRFKKIKPEAFEANRFYTVINKKSGEIVPMEVNFNFDDPNLIILPLAFGKRQGREFIWNDLLSLETGSLKLANGRVIEKTLYNRRTRQDEPALFVALTFERREVLDSSNIKPMNLIGVDRGENIPAVIALTDPEGCPLSRFKDSLGNPTHILRIGESYKEKQRTIQAKKEVEQRRAGGYSRKYASKAKNLADDMVRNTARDLLYYAVTQDAMLIFENLSRGFGRQGKRTFMAERQYTRMEDWLTAKLAYEGLPSKTYLSKTLAQYTSKTCSNCGFTITSADYDRVLEKLKKTATGWMTTINGKELKVEGQITYYNRYKRQNVVKDLSVELDRLSEESVNNDISSWTKGRSGEALSLLKKRFSHRPVQEKFVCLNCGFETHADEQAALNIARSWLFLRSQEYKKYQTNKTTGNTDKRAFVETWQSFYRKKLKEVWKPAV

SEQ ID NO: 30154 - protein, 978 aa, synthetic construct
  REGION 1..978: note = engineered CasX variant
QEIKRINKIRRRLVKDSNTKKAGKTRGPMKTLLVRVMTPDLRERLENLRKKPPNIPQPISNTSRANLNKLLTDYTEMKKAILHVYWEEFQKDPVGLMSRVAQPASKKIDQNKLKPEMDEKGNLTTAGFACSQCGQPLFVYKLEQVSEKGKAYTNYFGRCNVAEHEKLILLAQLKPEKDSDEAVTYSLGKFGQRALDFYSIHVTKESTHPVKPLAQIAGNRYASPVGKALSDACMGTIASFLSKYQDIIIEHQKVVKGNQKRLESLRELAGKENLEYPSVTLPPQPHTKEGVDAYNEVIARVRMWVNLNLWQKLKLSRDDAKPLLRLKGFPSFPLVERQANEVDWWDMVCNVKKLINEKKEDGKVFWQNLAGYKRQEALRPYLSSEEDRKKGKKFARYQLGDLLLHLEKKHGEDWGKVYDEAWERIDKKVEGLSKHIKLEEERRSEDAQSKAALTDWLRAKASFVIEGLKEADKDEFCRCELKLQKWYGDLRGKPFAIEAENSILDISGFSKQYNCAFIWQKDGVKKLNLYLIINYFKGGKLRFKKIKPEAFEANRFYTVINKKSGEIVPMEVNFNFDDPNLIILPLAFGKRQGREFIWNDLLSLETGSLKLANGRVIEKTLYNRRTRQDEPALFVALTFERREVLDSSNIKPMNLIGVDRGENIPAVIALTDPEGCPLSRFKDSLGNPTHILRIGESYKEKQRTIQAKKEVEQRRAGGYSRKYASKAKNLADDMVRNTARDLLYYAVTQDAMLIFENLSRGFGRQGKRTFMAERQYTRMEDWLTAKLAYEGLPSKTYLSKTLAQYTSKTCSNCGFTITSADYDRVLEKLKKTATGWMTTINGKELKVEGQITYYNRYKRQNVVKDLSVELDRLSEESVNNDISSWTKGRSGEALSLLKKRFSHRPVQEKFVCLNCGFETHADEQAALNIARSWLFLRSQEYKKYQTNKTTGNTDKRAFVETWQSFYRKKLKEVWKPAV

SEQ ID NO: 30155 - protein, 979 aa, synthetic construct
  REGION 1..979: note = engineered CasX variant
QEIKRINKIRRRLVKDSNTKKAGKTRGPMKTLLVRVMTPDLRERLENLRKKPENIPQPISNTSQANLNKLLTDYTEMKKAILHVYWEEFQKDPVGLMSRVAQPASKKIDQNKLKPEMDEKGNLTTAGFACSQCGQPLFVYKLEQVSEKGKAYTNYFGRCNVAEHEKLILLAQLKPEKDSDEAVTYSLGKFGQRALDFYSIHVTKESTHPVKPLAQIAGNRYASYPVGKALSDACMGTIASFLSKYQDIIIEHQKVVKGNQKRLESLRELAGKENLEYPSVTLPPQPHTKEGVDAYNEVIARVRMWVNLNLWQKLKLSRDDAKPLLRLKGFPSFPLVERQANEVDWWDMVCNVKKLINEKKEDGKVFWQNLAGYKRQEALRPYLSSEEDRKKGKKFARYQLGDLLLHLEKKHGEDWGKVYDEAWERIDKKVEGLSKHIKLEEERRSEDAQSKAALTDWLRAKASFVIEGLKEADKDEFCRCELKLQKWYGDLRGKPFAIEAENSILDISGFSKQYNCAFIWQKDGVKKLNLYLIINYFKGGKLRFKKIKPEAFEANRFYTVINKKSGEIVPMEVNFNFDDPNLIILPLAFGKRQGREFIWNDLLSLETGSLKLANGRVIEKTLYNRRTRQDEPALFVALTFERREVLDSSNIKPMNLIGVDRGENIPAVIALTDPEGCPLSRFKDSLGNPTHILRIGESYKEKQRTIQAKKEVEQRRAGGYSRKYASKAKNLADDMVRNTARDLLYYAVTQDAMLIFENLSRGFGRQGKRTFMAERQYTRMEDWLTAKLAYEGLPSKTYLSKTLAQYTSKTCSNCGFTITSADYDRVLEKLKKTATGWMTTINGKELKVEGQITYYNRYKRQNVVKDLSVELDRLSEESVNNDISSWTKGRSGEALSLLKKRFSHRPVQEKFVCLNCGFETHADEQAALNIARSWLFLRSQEYKKYQTNKTTGNTDKRAFVETWQSFYRKKLKEVWKPAV

SEQ ID NO: 30156 - protein, 979 aa, synthetic construct
  REGION 1..979: note = engineered CasX variant
QEIKRINKIRRRLVKDSNTKKAGKTRGPMKTLLVRVMTPDLRERLENLRKKPENIPQPISNTSQANLNKLLTDYTEMKKAILHVYWEEFQKDPVGLMSRVAQPASKKIDQNKLKPEMDEKGNLTTAGFACSQCGQPLFVYKLEQVSEKGKAYTNYFGRCNVAEHEKLILLAQLKPEKDSDEAVTYSLGKFGQRALDFYSIHVTKESTHPVKPLAQIAGNRYASHPVGKALSDACMGTIASFLSKYQDIIIEHQKVVKGNQKRLESLRELAGKENLEYPSVTLPPQPHTKEGVDAYNEVIARVRMWVNLNLWQKLKLSRDDAKPLLRLKGFPSFPLVERQANEVDWWDMVCNVKKLINEKKEDGKVFWQNLAGYKRQEALRPYLSSEEDRKKGKKFARYQLGDLLLHLEKKHGEDWGKVYDEAWERIDKKVEGLSKHIKLEEERRSEDAQSKAALTDWLRAKASFVIEGLKEADKDEFCRCELKLQKWYGDLRGKPFAIEAENSILDISGFSKQYNCAFIWQKDGVKKLNLYLIINYFKGGKLRFKKIKPEAFEANRFYTVINKKSGEIVPMEVNFNFDDPNLIILPLAFGKRQGREFIWNDLLSLETGSLKLANGRVIEKTLYNRRTRQDEPALFVALTFERREVLDSSNIKPMNLIGVDRGENIPAVIALTDPEGCPLSRFKDSLGNPTHILRIGESYKEKQRTIQAKKEVEQRRAGGYSRKYASKAKNLADDMVRNTARDLLYYAVTQDAMLIFENLSRGFGRQGKRTFMAERQYTRMEDWLTAKLAYEGLPSKTYLSKTLAQYTSKTCSNCGFTITSADYDRVLEKLKKTATGWMTTINGKELKVEGQITYYNRYKRQNVVKDLSVELDRLSEESVNNDISSWTKGRSGEALSLLKKRFSHRPVQEKFVCLNCGFETHADEQAALNIARSWLFLRSQEYKKYQTNKTTGNTDKRAFVETWQSFYRKKLKEVWKPAV

SEQ ID NO: 30157 - protein, 979 aa, synthetic construct
  REGION 1..979: note = engineered CasX variant
QEIKRINKIRRRLVKDSNTKKAGKTRGPMKTLLVRVMTPDLRERLENLRKKPENIPQPISNTSQANLNKLLTDYTEMKKAILHVYWEEFQKDPVGLMSRVAQPASKKIDQNKLKPEMDEKGNLTTAGFACSQCGQPLFVYKLEQVSEKGKAYTNYFGRCNVAEHEKLILLAQLKPEKDSDEAVTYSLGKFGQRALDFYSIHVTKESTHPVKPLAQIAGNRYASSPVGKALSDACMGTIASFLSKYQDIIIEHQKVVKGNQKRLESLRELAGKENLEYPSVTLPPQPHTKEGVDAYNEVIARVRMWVNLNLWQKLKLSRDDAKPLLRLKGFPSFPLVERQANEVDWWDMVCNVKKLINEKKEDGKVFWQNLAGYKRQEALRPYLSSEEDRKKGKKFARYQLGDLLLHLEKKHGEDWGKVYDEAWERIDKKVEGLSKHIKLEEERRSEDAQSKAALTDWLRAKASFVIEGLKEADKDEFCRCELKLQKWYGDLRGKPFAIEAENSILDISGFSKQYNCAFIWQKDGVKKLNLYLIINYFKGGKLRFKKIKPEAFEANRFYTVINKKSGEIVPMEVNFNFDDPNLIILPLAFGKRQGREFIWNDLLSLETGSLKLANGRVIEKTLYNRRTRQDEPALFVALTFERREVLDSSNIKPMNLIGVDRGENIPAVIALTDPEGCPLSRFKDSLGNPTHILRIGESYKEKQRTIQAKKEVEQRRAGGYSRKYASKAKNLADDMVRNTARDLLYYAVTQDAMLIFENLSRGFGRQGKRTFMAERQYTRMEDWLTAKLAYEGLPSKTYLSKTLAQYTSKTCSNCGFTITSADYDRVLEKLKKTATGWMTTINGKELKVEGQITYYNRYKRQNVVKDLSVELDRLSEESVNNDISSWTKGRSGEALSLLKKRFSHRPVQEKFVCLNCGFETHADEQAALNIARSWLFLRSQEYKKYQTNKTTGNTDKRAFVETWQSFYRKKLKEVWKPAV

SEQ ID NO: 30158 - protein, 979 aa, synthetic construct
  REGION 1..979: note = engineered CasX variant
QEIKRINKIRRRLVKDSNTKKAGKTRGPMKTLLVRVMTPDLRERLENLRKKPENIPQPISNTSQANLNKLLTDYTEMKKAILHVYWEEFQKDPVGLMSRVAQPASKKIDQNKLKPEMDEKGNLTTAGFACSQCGQPLFVYKLEQVSEKGKAYTNYFGRCNVAEHEKLILLAQLKPEKDSDEAVTYSLGKFGQRALDFYSIHVTKESTHPVKPLAQIAGNRYASTPVGKALSDACMGTIASFLSKYQDIIIEHQKVVKGNQKRLESLRELAGKENLEYPSVTLPPQPHTKEGVDAYNEVIARVRMWVNLNLWQKLKLSRDDAKPLLRLKGFPSFPLVERQANEVDWWDMVCNVKKLINEKKEDGKVFWQNLAGYKRQEALRPYLSSEEDRKKGKKFARYQLGDLLLHLEKKHGEDWGKVYDEAWERIDKKVEGLSKHIKLEEERRSEDAQSKAALTDWLRAKASFVIEGLKEADKDEFCRCELKLQKWYGDLRGKPFAIEAENSILDISGFSKQYNCAFIWQKDGVKKLNLYLIINYFKGGKLRFKKIKPEAFEANRFYTVINKKSGEIVPMEVNFNFDDPNLIILPLAFGKRQGREFIWNDLLSLETGSLKLANGRVIEKTLYNRRTRQDEPALFVALTFERREVLDSSNIKPMNLIGVDRGENIPAVIALTDPEGCPLSRFKDSLGNPTHILRIGESYKEKQRTIQAKKEVEQRRAGGYSRKYASKAKNLADDMVRNTARDLLYYAVTQDAMLIFENLSRGFGRQGKRTFMAERQYTRMEDWLTAKLAYEGLPSKTYLSKTLAQYTSKTCSNCGFTITSADYDRVLEKLKKTATGWMTTINGKELKVEGQITYYNRYKRQNVVKDLSVELDRLSEESVNNDISSWTKGRSGEALSLLKKRFSHRPVQEKFVCLNCGFETHADEQAALNIARSWLFLRSQEYKKYQTNKTTGNTDKRAFVETWQSFYRKKLKEVWKPAV

SEQ ID NO: 30159 - protein, 979 aa, synthetic construct
  REGION 1..979: note = engineered CasX variant
QEIKRINKIRRRLVKDSNTKKAGKTRGPMKTLLVRVMTPDLRERLENLRKKPENIPQPISNTSQANLNKLLTDYTEMKKAILHVYWEEFQKDPVGLMSRVAQPASKKIDQNKLKPEMDEKGNLTTAGFACSQCGQPLFVYKLEQVSEKGKAYTNYFGRCNVAEHEKLILLAQLKPEKDSDEAVTYSLGKFGQRALDFYSIHVTKESTHPVKPLAQIAGNRYASAPVGKALSDACMGTIASFLSKYQDIIIEHQKVVKGNQKRLESLRELAGKENLEYPSVTLPPQPHTKEGVDAYNEVIARVRMWVNLNLWQKLKLSRDDAKPLLRLKGFPSFPLVERQANEVDWWDMVCNVKKLINEKKEDGKVFWQNLAGYKRQEALRPYLSSEEDRKKGKKFARYQLGDLLLHLEKKHGEDWGKVYDEAWERIDKKVEGLSKHIKLEEERRSEDAQSKAALTDWLRAKASFVIEGLKEADKDEFCRCELKLQKWYGDLRGKPFAIEAENSILDISGFSKQYNCAFIWQKDGVKKLNLYLIINYFKGGKLRFKKIKPEAFEANRFYTVINKKSGEIVPMEVNFNFDDPNLIILPLAFGKRQGREFIWNDLLSLETGSLKLANGRVIEKTLYNRRTRQDEPALFVALTFERREVLDSSNIKPMNLIGVDRGENIPAVIALTDPEGCPLSRFKDSLGNPTHILRIGESYKEKQRTIQAKKEVEQRRAGGYSRKYASKAKNLADDMVRNTARDLLYYAVTQDAMLIFENLSRGFGRQGKRTFMAERQYTRMEDWLTAKLAYEGLPSKTYLSKTLAQYTSKTCSNCGFTITSADYDRVLEKLKKTATGWMTTINGKELKVEGQITYYNRYKRQNVVKDLSVELDRLSEESVNNDISSWTKGRSGEALSLLKKRFSHRPVQEKFVCLNCGFETHADEQAALNIARSWLFLRSQEYKKYQTNKTTGNTDKRAFVETWQSFYRKKLKEVWKPAV

SEQ ID NO: 30160 - protein, 979 aa, synthetic construct
  REGION 1..979: note = engineered CasX variant
QEIKRINKIRRRLVKDSNTKKAGKTRGPMKTLLVRVMTPDLRERLENLRKKPENIPQPISNTSQANLNKLLTDYTEMKKAILHVYWEEFQKDPVGLMSRVAQPASKKIDQNKLKPEMDEKGNLTTAGFACSQCGQPLFVYKLEQVSEKGKAYTNYFGRCNVAEHEKLILLAQLKPEKDSDEAVTYSLGKFGQRALDFYSIHVTKESTHPVKPLAQIAGNRYASVPVGKALSDACMGTIASFLSKYQDIIIEHQKVVKGNQKRLESLRELAGKENLEYPSVTLPPQPHTKEGVDAYNEVIARVRMWVNLNLWQKLKLSRDDAKPLLRLKGFPSFPLVERQANEVDWWDMVCNVKKLINEKKEDGKVFWQNLAGYKRQEALRPYLSSEEDRKKGKKFARYQLGDLLLHLEKKHGEDWGKVYDEAWERIDKKVEGLSKHIKLEEERRSEDAQSKAALTDWLRAKASFVIEGLKEADKDEFCRCELKLQKWYGDLRGKPFAIEAENSILDISGFSKQYNCAFIWQKDGVKKLNLYLIINYFKGGKLRFKKIKPEAFEANRFYTVINKKSGEIVPMEVNFNFDDPNLIILPLAFGKRQGREFIWNDLLSLETGSLKLANGRVIEKTLYNRRTRQDEPALFVALTFERREVLDSSNIKPMNLIGVDRGENIPAVIALTDPEGCPLSRFKDSLGNPTHILRIGESYKEKQRTIQAKKEVEQRRAGGYSRKYASKAKNLADDMVRNTARDLLYYAVTQDAMLIFENLSRGFGRQGKRTFMAERQYTRMEDWLTAKLAYEGLPSKTYLSKTLAQYTSKTCSNCGFTITSADYDRVLEKLKKTATGWMTTINGKELKVEGQITYYNRYKRQNVVKDLSVELDRLSEESVNNDISSWTKGRSGEALSLLKKRFSHRPVQEKFVCLNCGFETHADEQAALNIARSWLFLRSQEYKKYQTNKTTGNTDKRAFVETWQSFYRKKLKEVWKPAV

SEQ ID NO: 30161 - protein, 979 aa, synthetic construct
  REGION 1..979: note = engineered CasX variant
QEIKRINKIRRRLVKDSNTKKAGKTRGPMKTLLVRVMTPDLRERLENLRKKPENIPQPISNTSQANLNKLLTDYTEMKKAILHVYWEEFQKDPVGLMSRVAQPASKKIDQNKLKPEMDEKGNLTTAGFACSQCGQPLFVYKLEQVSEKGKAYTNYFGRCNVAEHEKLIKLAQLKPEKDSDEAVTYSLGKFGQRALDFYSIHVTKESTHPVKPLAQIAGNRYASGPVGKALSDACMGTIASFLSKYQDIIIEHQKVVKGNQKRLESLRELAGKENLEYPSVTLPPQPHTKEGVDAYNEVIARVRMWVNLNLWQKLKLSRDDAKPLLRLKGFPSFPLVERQANEVDWWDMVCNVKKLINEKKEDGKVFWQNLAGYKRQEALRPYLSSEEDRKKGKKFARYQLGDLLLHLEKKHGEDWGKVYDEAWERIDKKVEGLSKHIKLEEERRSEDAQSKAALTDWLRAKASFVIEGLKEADKDEFCRCELKLQKWYGDLRGKPFAIEAENSILDISGFSKQYNCAFIWQKDGVKKLNLYLIINYFKGGKLRFKKIKPEAFEANRFYTVINKKSGEIVPMEVNFNFDDPNLIILPLAFGKRQGREFIWNDLLSLETGSLKLANGRVIEKTLYNRRTRQDEPALFVALTFERREVLDSSNIKPMNLIGVDRGENIPAVIALTDPEGCPLSRFKDSLGNPTHILRIGESYKEKQRTIQAKKEVEQRRAGGYSRKYASKAKNLADDMVRNTARDLLYYAVTQDAMLIFENLSRGFGRQGKRTFMAERQYTRMEDWLTAKLAYEGLPSKTYLSKTLAQYTSKTCSNCGFTITSADYDRVLEKLKKTATGWMTTINGKELKVEGQITYYNRYKRQNVVKDLSVELDRLSEESVNNDISSWTKGRSGEALSLLKKRFSHRPVQEKFVCLNCGFETHADEQAALNIARSWLFLRSQEYKKYQTNKTTGNTDKRAFVETWQSFYRKKLKEVWKPAV

SEQ ID NO: 30162 - protein, 978 aa, synthetic construct
  REGION 1..978: note = engineered CasX variant
QEIKRINKIRRRLVKDSNTKKAGKTRGPMKTLLVRVMTPDLRERLENLRKKPENIPQPISNTSQANLNKLLTDYTEMKKAILHVYWEEFQKDPVGLMSRVAQPASKKIDQNKLKPEMDEKGNLTTAGFACSQCGQPLFVYKLEQVSEKGKAYTNYFGRCNVAEHEKLILLAQLKPEKDSDEAVTYSLGKFGQRALDFYSIHVTKESTHPVKPLAQIAGNRYASPVGKALSDACMGTIASFLSKYQDIIIEHQKVVKGNQKRLESLRELAGKENLEYPSVTLPPQPHTKEGVDAYNEVIARVRMWVNLNLWQKLKLSRDDAKPLLRLKGFPSFPLVERQANEVDWWDMVCNVKKLINEKKEDGKVFWQNLAGYKRQEALRPYLSSEEDRKKGKKFARYQLGDLLLHLEKKHGEDWGKVYDEAWERIDKKVEGLSKHIKLEEERRSEDAQSKAALTDWLRAKASFVIEGLKEADKDEFCRCELKLQKWYGDLRGKPFAIEAENSILDISGFSKQYNCAFIWQKDGVKKLNLYLIINYFKGGKLRFKKIKPEAFEANRFYTVINKKSGEIVPMEVNFNFDDPNLIILPLAFGKRQGREFIWNDLLSLETGSLKLANGRVIEKTLYNRRTRQDEPALFVALTFERREVLDSSNIKPMNLIGVDRGENIPAVIALTDPEGCPLSRFKDSLGNPTHILRIGESYKEKQRTIQAKKEVEQRRAGGYSRKYASKAKNLADDMVRNTARDLLYYAVTQDAMLIFENLSRGFGRQGKRTFMAERQYTRMEDWLTAKLAYEGLPSKTYLSKTLAQYTSKTCSNCGFTITSADYDRVLEKLKKTATGWMTTINGKELKVEGQITYYNRYKRQNVVKDLSVELDRLSEESVNNDISSWTKGRSGEALSLLKKRFSHRPVQEKFVCLNCGFETHADEQAALNIARSWLFLRSQEYKKYQTNKTTGNTDKRAFVETWQSFYRKKLKEVWKPAV

SEQ ID NO: 30163 - protein, 979 aa, synthetic construct
  REGION 1..979: note = engineered CasX variant
QEIKRINKIRRRLVKDSNTKKAGKTRGPMKTLLVRVMTPDLRERLENLRKKPENIPQPISNTSRANLNKLLTDYTEMKKAILHVYDEEFQKDPVGLMSRVAQPASKKIDQNKLKPEMDEKGNLTTAGFACSQCGQPLFVYKLEQVSEKGKAYTNYFGRCNVAEHEKLILLAQLKPEKDSDEAVTYSLGKFGQRALDFYSIHVTKESTHPVKPLAQIAGNRYASYPVGKALSDACMGTIASFLSKYQDIIIEHQKVVKGNQKRLESLRELAGKENLEYPSVTLPPQPHTKEGVDAYNEVIARVRMWVNLNLWQKLKLSRDDAKPLLRLKGFPSFPLVERQANEVDWWDMVCNVKKLINEKKEDGKVFWQNLAGYKRQEALRPYLSSEEDRKKGKKFARYQLGDLLLHLEKKHGEDWGKVYDEAWERIDKKVEGLSKHIKLEEERRSEDAQSKAALTDWLRAKASFVIEGLKEADKDEFCRCELKLQKWYGDLRGKPFAIEAENSILDISGFSKQYNCAFIWQKDGVKKLNLYLIINYFKGGKLRFKKIKPEAFEANRFYTVINKKSGEIVPMEVNFNFDDPNLIILPLAFGKRQGREFIWNDLLSLETGSLKLANGRVIEKTLYNRRTRQDEPALFVALTFERREVLDSSNIKPMNLIGVDRGENIPAVIALTDPEGCPLSRFKDSLGNPTHILRIGESYKEKQRTIQAKKEVEQRRAGGYSRKYASKAKNLADDMVRNTARDLLYYAVTQDAMLIFENLSRGFGRQGKRTFMAERQYTRMEDWLTAKLAYEGLPSKTYLSKTLAQYTSKTCSNCGFTITSADYDRVLEKLKKTATGWMTTINGKELKVEGQITYYNRYKRQNVVKDLSVELDRLSEESVNNDISSWTKGRSGEALSLLKKRFSHRPVQEKFVCLNCGFETHADEQAALNIARSWLFLRSQEYKKYQTNKTTGNTDKRAFVETWQSFYRKKLKEVWKPAV

SEQ ID NO: 30164 - protein, 979 aa, synthetic construct
  REGION 1..979: note = engineered CasX variant
QEIKRINKIRRRLVKDSNTKKAGKTRGPMKTLLVRVMTPDLRERLENLRKKPENIPQPISNTSRANLNKLLTDYTEMKKAILHVYDEEFQKDPVGLMSRVAQPASKKIDQNKLKPEMDEKGNLTTAGFACSQCGQPLFVYKLEQVSEKGKAYTNYFGRCNVAEHEKLILLAQLKPEKDSDEAVTYSLGKFGQRALDFYSIHVTKESTHPVKPLAQIAGNRYASHPVGKALSDACMGTIASFLSKYQDIIIEHQKVVKGNQKRLESLRELAGKENLEYPSVTLPPQPHTKEGVDAYNEVIARVRMWVNLNLWQKLKLSRDDAKPLLRLKGFPSFPLVERQANEVDWWDMVCNVKKLINEKKEDGKVFWQNLAGYKRQEALRPYLSSEEDRKKGKKFARYQLGDLLLHLEKKHGEDWGKVYDEAWERIDKKVEGLSKHIKLEEERRSEDAQSKAALTDWLRAKASFVIEGLKEADKDEFCRCELKLQKWYGDLRGKPFAIEAENSILDISGFSKQYNCAFIWQKDGVKKLNLYLIINYFKGGKLRFKKIKPEAFEANRFYTVINKKSGEIVPMEVNFNFDDPNLIILPLAFGKRQGREFIWNDLLSLETGSLKLANGRVIEKTLYNRRTRQDEPALFVALTFERREVLDSSNIKPMNLIGVDRGENIPAVIALTDPEGCPLSRFKDSLGNPTHILRIGESYKEKQRTIQAKKEVEQRRAGGYSRKYASKAKNLADDMVRNTARDLLYYAVTQDAMLIFENLSRGFGRQGKRTFMAERQYTRMEDWLTAKLAYEGLPSKTYLSKTLAQYTSKTCSNCGFTITSADYDRVLEKLKKTATGWMTTINGKELKVEGQITYYNRYKRQNVVKDLSVELDRLSEESVNNDISSWTKGRSGEALSLLKKRFSHRPVQEKFVCLNCGFETHADEQAALNIARSWLFLRSQEYKKYQTNKTTGNTDKRAFVETWQSFYRKKLKEVWKPAV

SEQ ID NO: 30165 - protein, 979 aa, synthetic construct
  REGION 1..979: note = engineered CasX variant
QEIKRINKIRRRLVKDSNTKKAGKTRGPMKTLLVRVMTPDLRERLENLRKKPENIPQPISNTSRANLNKLLTDYTEMKKAILHVYDEEFQKDPVGLMSRVAQPASKKIDQNKLKPEMDEKGNLTTAGFACSQCGQPLFVYKLEQVSEKGKAYTNYFGRCNVAEHEKLILLAQLKPEKDSDEAVTYSLGKFGQRALDFYSIHVTKESTHPVKPLAQIAGNRYASSPVGKALSDACMGTIASFLSKYQDIIIEHQKVVKGNQKRLESLRELAGKENLEYPSVTLPPQPHTKEGVDAYNEVIARVRMWVNLNLWQKLKLSRDDAKPLLRLKGFPSFPLVERQANEVDWWDMVCNVKKLINEKKEDGKVFWQNLAGYKRQEALRPYLSSEEDRKKGKKFARYQLGDLLLHLEKKHGEDWGKVYDEAWERIDKKVEGLSKHIKLEEERRSEDAQSKAALTDWLRAKASFVIEGLKEADKDEFCRCELKLQKWYGDLRGKPFAIEAENSILDISGFSKQYNCAFIWQKDGVKKLNLYLIINYFKGGKLRFKKIKPEAFEANRFYTVINKKSGEIVPMEVNFNFDDPNLIILPLAFGKRQGREFIWNDLLSLETGSLKLANGRVIEKTLYNRRTRQDEPALFVALTFERREVLDSSNIKPMNLIGVDRGENIPAVIALTDPEGCPLSRFKDSLGNPTHILRIGESYKEKQRTIQAKKEVEQRRAGGYSRKYASKAKNLADDMVRNTARDLLYYAVTQDAMLIFENLSRGFGRQGKRTFMAERQYTRMEDWLTAKLAYEGLPSKTYLSKTLAQYTSKTCSNCGFTITSADYDRVLEKLKKTATGWMTTINGKELKVEGQITYYNRYKRQNVVKDLSVELDRLSEESVNNDISSWTKGRSGEALSLLKKRFSHRPVQEKFVCLNCGFETHADEQAALNIARSWLFLRSQEYKKYQTNKTTGNTDKRAFVETWQSFYRKKLKEVWKPAV

SEQ ID NO: 30166 - protein, 979 aa, synthetic construct
  REGION 1..979: note = engineered CasX variant
QEIKRINKIRRRLVKDSNTKKAGKTRGPMKTLLVRVMTPDLRERLENLRKKPENIPQPISNTSRANLNKLLTDYTEMKKAILHVYDEEFQKDPVGLMSRVAQPASKKIDQNKLKPEMDEKGNLTTAGFACSQCGQPLFVYKLEQVSEKGKAYTNYFGRCNVAEHEKLILLAQLKPEKDSDEAVTYSLGKFGQRALDFYSIHVTKESTHPVKPLAQIAGNRYASTPVGKALSDACMGTIASFLSKYQDIIIEHQKVVKGNQKRLESLRELAGKENLEYPSVTLPPQPHTKEGVDAYNEVIARVRMWVNLNLWQKLKLSRDDAKPLLRLKGFPSFPLVERQANEVDWWDMVCNVKKLINEKKEDGKVFWQNLAGYKRQEALRPYLSSEEDRKKGKKFARYQLGDLLLHLEKKHGEDWGKVYDEAWERIDKKVEGLSKHIKLEEERRSEDAQSKAALTDWLRAKASFVIEGLKEADKDEFCRCELKLQKWYGDLRGKPFAIEAENSILDISGFSKQYNCAFIWQKDGVKKLNLYLIINYFKGGKLRFKKIKPEAFEANRFYTVINKKSGEIVPMEVNFNFDDPNLIILPLAFGKRQGREFIWNDLLSLETGSLKLANGRVIEKTLYNRRTRQDEPALFVALTFERREVLDSSNIKPMNLIGVDRGENIPAVIALTDPEGCPLSRFKDSLGNPTHILRIGESYKEKQRTIQAKKEVEQRRAGGYSRKYASKAKNLADDMVRNTARDLLYYAVTQDAMLIFENLSRGFGRQGKRTFMAERQYTRMEDWLTAKLAYEGLPSKTYLSKTLAQYTSKTCSNCGFTITSADYDRVLEKLKKTATGWMTTINGKELKVEGQITYYNRYKRQNVVKDLSVELDRLSEESVNNDISSWTKGRSGEALSLLKKRFSHRPVQEKFVCLNCGFETHADEQAALNIARSWLFLRSQEYKKYQTNKTTGNTDKRAFVETWQSFYRKKLKEVWKPAV

SEQ ID NO: 30167 - protein, 979 aa, synthetic construct
  REGION 1..979: note = engineered CasX variant
QEIKRINKIRRRLVKDSNTKKAGKTRGPMKTLLVRVMTPDLRERLENLRKKPENIPQPISNTSRANLNKLLTDYTEMKKAILHVYDEEFQKDPVGLMSRVAQPASKKIDQNKLKPEMDEKGNLTTAGFACSQCGQPLFVYKLEQVSEKGKAYTNYFGRCNVAEHEKLILLAQLKPEKDSDEAVTYSLGKFGQRALDFYSIHVTKESTHPVKPLAQIAGNRYASAPVGKALSDACMGTIASFLSKYQDIIIEHQKVVKGNQKRLESLRELAGKENLEYPSVTLPPQPHTKEGVDAYNEVIARVRMWVNLNLWQKLKLSRDDAKPLLRLKGFPSFPLVERQANEVDWWDMVCNVKKLINEKKEDGKVFWQNLAGYKRQEALRPYLSSEEDRKKGKKFARYQLGDLLLHLEKKHGEDWGKVYDEAWERIDKKVEGLSKHIKLEEERRSEDAQSKAALTDWLRAKASFVIEGLKEADKDEFCRCELKLQKWYGDLRGKPFAIEAENSILDISGFSKQYNCAFIWQKDGVKKLNLYLIINYFKGGKLRFKKIKPEAFEANRFYTVINKKSGEIVPMEVNFNFDDPNLIILPLAFGKRQGREFIWNDLLSLETGSLKLANGRVIEKTLYNRRTRQDEPALFVALTFERREVLDSSNIKPMNLIGVDRGENIPAVIALTDPEGCPLSRFKDSLGNPTHILRIGESYKEKQRTIQAKKEVEQRRAGGYSRKYASKAKNLADDMVRNTARDLLYYAVTQDAMLIFENLSRGFGRQGKRTFMAERQYTRMEDWLTAKLAYEGLPSKTYLSKTLAQYTSKTCSNCGFTITSADYDRVLEKLKKTATGWMTTINGKELKVEGQITYYNRYKRQNVVKDLSVELDRLSEESVNNDISSWTKGRSGEALSLLKKRFSHRPVQEKFVCLNCGFETHADEQAALNIARSWLFLRSQEYKKYQTNKTTGNTDKRAFVETWQSFYRKKLKEVWKPAV

SEQ ID NO: 30168 - protein, 979 aa, synthetic construct
  REGION 1..979: note = engineered CasX variant
QEIKRINKIRRRLVKDSNTKKAGKTRGPMKTLLVRVMTPDLRERLENLRKKPENIPQPISNTSRANLNKLLTDYTEMKKAILHVYDEEFQKDPVGLMSRVAQPASKKIDQNKLKPEMDEKGNLTTAGFACSQCGQPLFVYKLEQVSEKGKAYTNYFGRCNVAEHEKLILLAQLKPEKDSDEAVTYSLGKFGQRALDFYSIHVTKESTHPVKPLAQIAGNRYASVPVGKALSDACMGTIASFLSKYQDIIIEHQKVVKGNQKRLESLRELAGKENLEYPSVTLPPQPHTKEGVDAYNEVIARVRMWVNLNLWQKLKLSRDDAKPLLRLKGFPSFPLVERQANEVDWWDMVCNVKKLINEKKEDGKVFWQNLAGYKRQEALRPYLSSEEDRKKGKKFARYQLGDLLLHLEKKHGEDWGKVYDEAWERIDKKVEGLSKHIKLEEERRSEDAQSKAALTDWLRAKASFVIEGLKEADKDEFCRCELKLQKWYGDLRGKPFAIEAENSILDISGFSKQYNCAFIWQKDGVKKLNLYLIINYFKGGKLRFKKIKPEAFEANRFYTVINKKSGEIVPMEVNFNFDDPNLIILPLAFGKRQGREFIWNDLLSLETGSLKLANGRVIEKTLYNRRTRQDEPALFVALTFERREVLDSSNIKPMNLIGVDRGENIPAVIALTDPEGCPLSRFKDSLGNPTHILRIGESYKEKQRTIQAKKEVEQRRAGGYSRKYASKAKNLADDMVRNTARDLLYYAVTQDAMLIFENLSRGFGRQGKRTFMAERQYTRMEDWLTAKLAYEGLPSKTYLSKTLAQYTSKTCSNCGFTITSADYDRVLEKLKKTATGWMTTINGKELKVEGQITYYNRYKRQNVVKDLSVELDRLSEESVNNDISSWTKGRSGEALSLLKKRFSHRPVQEKFVCLNCGFETHADEQAALNIARSWLFLRSQEYKKYQTNKTTGNTDKRAFVETWQSFYRKKLKEVWKPAV

SEQ ID NO: 30169 - protein, 979 aa, synthetic construct
  REGION 1..979: note = engineered CasX variant
QEIKRINKIRRRLVKDSNTKKAGKTRGPMKTLLVRVMTPDLRERLENLRKKPENIPQPISNTSRANLNKLLTDYTEMKKAILHVYDEEFQKDPVGLMSRVAQPASKKIDQNKLKPEMDEKGNLTTAGFACSQCGQPLFVYKLEQVSEKGKAYTNYFGRCNVAEHEKLIKLAQLKPEKDSDEAVTYSLGKFGQRALDFYSIHVTKESTHPVKPLAQIAGNRYASGPVGKALSDACMGTIASFLSKYQDIIIEHQKVVKGNQKRLESLRELAGKENLEYPSVTLPPQPHTKEGVDAYNEVIARVRMWVNLNLWQKLKLSRDDAKPLLRLKGFPSFPLVERQANEVDWWDMVCNVKKLINEKKEDGKVFWQNLAGYKRQEALRPYLSSEEDRKKGKKFARYQLGDLLLHLEKKHGEDWGKVYDEAWERIDKKVEGLSKHIKLEEERRSEDAQSKAALTDWLRAKASFVIEGLKEADKDEFCRCELKLQKWYGDLRGKPFAIEAENSILDISGFSKQYNCAFIWQKDGVKKLNLYLIINYFKGGKLRFKKIKPEAFEANRFYTVINKKSGEIVPMEVNFNFDDPNLIILPLAFGKRQGREFIWNDLLSLETGSLKLANGRVIEKTLYNRRTRQDEPALFVALTFERREVLDSSNIKPMNLIGVDRGENIPAVIALTDPEGCPLSRFKDSLGNPTHILRIGESYKEKQRTIQAKKEVEQRRAGGYSRKYASKAKNLADDMVRNTARDLLYYAVTQDAMLIFENLSRGFGRQGKRTFMAERQYTRMEDWLTAKLAYEGLPSKTYLSKTLAQYTSKTCSNCGFTITSADYDRVLEKLKKTATGWMTTINGKELKVEGQITYYNRYKRQNVVKDLSVELDRLSEESVNNDISSWTKGRSGEALSLLKKRFSHRPVQEKFVCLNCGFETHADEQAALNIARSWLFLRSQEYKKYQTNKTTGNTDKRAFVETWQSFYRKKLKEVWKPAV

SEQ ID NO: 30170 - protein, 978 aa, synthetic construct
  REGION 1..978: note = engineered CasX variant
QEIKRINKIRRRLVKDSNTKKAGKTRGPMKTLLVRVMTPDLRERLENLRKKPENIPQPISNTSRANLNKLLTDYTEMKKAILHVYDEEFQKDPVGLMSRVAQPASKKIDQNKLKPEMDEKGNLTTAGFACSQCGQPLFVYKLEQVSEKGKAYTNYFGRCNVAEHEKLILLAQLKPEKDSDEAVTYSLGKFGQRALDFYSIHVTKESTHPVKPLAQIAGNRYASPVGKALSDACMGTIASFLSKYQDIIIEHQKVVKGNQKRLESLRELAGKENLEYPSVTLPPQPHTKEGVDAYNEVIARVRMWVNLNLWQKLKLSRDDAKPLLRLKGFPSFPLVERQANEVDWWDMVCNVKKLINEKKEDGKVFWQNLAGYKRQEALRPYLSSEEDRKKGKKFARYQLGDLLLHLEKKHGEDWGKVYDEAWERIDKKVEGLSKHIKLEEERRSEDAQSKAALTDWLRAKASFVIEGLKEADKDEFCRCELKLQKWYGDLRGKPFAIEAENSILDISGFSKQYNCAFIWQKDGVKKLNLYLIINYFKGGKLRFKKIKPEAFEANRFYTVINKKSGEIVPMEVNFNFDDPNLIILPLAFGKRQGREFIWNDLLSLETGSLKLANGRVIEKTLYNRRTRQDEPALFVALTFERREVLDSSNIKPMNLIGVDRGENIPAVIALTDPEGCPLSRFKDSLGNPTHILRIGESYKEKQRTIQAKKEVEQRRAGGYSRKYASKAKNLADDMVRNTARDLLYYAVTQDAMLIFENLSRGFGRQGKRTFMAERQYTRMEDWLTAKLAYEGLPSKTYLSKTLAQYTSKTCSNCGFTITSADYDRVLEKLKKTATGWMTTINGKELKVEGQITYYNRYKRQNVVKDLSVELDRLSEESVNNDISSWTKGRSGEALSLLKKRFSHRPVQEKFVCLNCGFETHADEQAALNIARSWLFLRSQEYKKYQTNKTTGNTDKRAFVETWQSFYRKKLKEVWKPAV

SEQ ID NO: 30171 - protein, 979 aa, synthetic construct
  REGION 1..979: note = engineered CasX variant
QEIKRINKIRRRLVKDSNTKKAGKTRGPMKTLLVRVMTPDLRERLENLRKKPENIPQPISNTSRANLNKLLTDYTEMKKAILHVYWEEFQKDPVGLMSRVAQPASKKIDQNKLKPEMDEKGNLTTAGFACSQCGQPLFVYKLEQVSEKGKAYTNYFGRCNVAEHEKLIKLAQLKPEKDSDEAVTYSLGKFGQRALDFYSIHVTKESTHPVKPLAQIAGNRYASYPVGKALSDACMGTIASFLSKYQDIIIEHQKVVKGNQKRLESLRELAGKENLEYPSVTLPPQPHTKEGVDAYNEVIARVRMWVNLNLWQKLKLSRDDAKPLLRLKGFPSFPLVERQANEVDWWDMVCNVKKLINEKKEDGKVFWQNLAGYKRQEALRPYLSSEEDRKKGKKFARYQLGDLLLHLEKKHGEDWGKVYDEAWERIDKKVEGLSKHIKLEEERRSEDAQSKAALTDWLRAKASFVIEGLKEADKDEFCRCELKLQKWYGDLRGKPFAIEAENSILDISGFSKQYNCAFIWQKDGVKKLNLYLIINYFKGGKLRFKKIKPEAFEANRFYTVINKKSGEIVPMEVNFNFDDPNLIILPLAFGKRQGREFIWNDLLSLETGSLKLANGRVIEKTLYNRRTRQDEPALFVALTFERREVLDSSNIKPMNLIGVDRGENIPAVIALTDPEGCPLSRFKDSLGNPTHILRIGESYKEKQRTIQAKKEVEQRRAGGYSRKYASKAKNLADDMVRNTARDLLYYAVTQDAMLIFENLSRGFGRQGKRTFMAERQYTRMEDWLTAKLAYEGLPSKTYLSKTLAQYTSKTCSNCGFTITSADYDRVLEKLKKTATGWMTTINGKELKVEGQITYYNRYKRQNVVKDLSVELDRLSEESVNNDISSWTKGRSGEALSLLKKRFSHRPVQEKFVCLNCGFETHADEQAALNIARSWLFLRSQEYKKYQTNKTTGNTDKRAFVETWQSFYRKKLKEVWKPAV

SEQ ID NO: 30172 - protein, 979 aa, synthetic construct
  REGION 1..979: note = engineered CasX variant
QEIKRINKIRRRLVKDSNTKKAGKTRGPMKTLLVRVMTPDLRERLENLRKKPENIPQPISNTSRANLNKLLTDYTEMKKAILHVYWEEFQKDPVGLMSRVAQPASKKIDQNKLKPEMDEKGNLTTAGFACSQCGQPLFVYKLEQVSEKGKAYTNYFGRCNVAEHEKLIKLAQLKPEKDSDEAVTYSLGKFGQRALDFYSIHVTKESTHPVKPLAQIAGNRYASHPVGKALSDACMGTIASFLSKYQDIIIEHQKVVKGNQKRLESLRELAGKENLEYPSVTLPPQPHTKEGVDAYNEVIARVRMWVNLNLWQKLKLSRDDAKPLLRLKGFPSFPLVERQANEVDWWDMVCNVKKLINEKKEDGKVFWQNLAGYKRQEALRPYLSSEEDRKKGKKFARYQLGDLLLHLEKKHGEDWGKVYDEAWERIDKKVEGLSKHIKLEEERRSEDAQSKAALTDWLRAKASFVIEGLKEADKDEFCRCELKLQKWYGDLRGKPFAIEAENSILDISGFSKQYNCAFIWQKDGVKKLNLYLIINYFKGGKLRFKKIKPEAFEANRFYTVINKKSGEIVPMEVNFNFDDPNLIILPLAFGKRQGREFIWNDLLSLETGSLKLANGRVIEKTLYNRRTRQDEPALFVALTFERREVLDSSNIKPMNLIGVDRGENIPAVIALTDPEGCPLSRFKDSLGNPTHILRIGESYKEKQRTIQAKKEVEQRRAGGYSRKYASKAKNLADDMVRNTARDLLYYAVTQDAMLIFENLSRGFGRQGKRTFMAERQYTRMEDWLTAKLAYEGLPSKTYLSKTLAQYTSKTCSNCGFTITSADYDRVLEKLKKTATGWMTTINGKELKVEGQITYYNRYKRQNVVKDLSVELDRLSEESVNNDISSWTKGRSGEALSLLKKRFSHRPVQEKFVCLNCGFETHADEQAALNIARSWLFLRSQEYKKYQTNKTTGNTDKRAFVETWQSFYRKKLKEVWKPAV

SEQ ID NO: 30173 - protein, 979 aa, synthetic construct
  REGION 1..979: note = engineered CasX variant
QEIKRINKIRRRLVKDSNTKKAGKTRGPMKTLLVRVMTPDLRERLENLRKKPENIPQPISNTSRANLNKLLTDYTEMKKAILHVYWEEFQKDPVGLMSRVAQPASKKIDQNKLKPEMDEKGNLTTAGFACSQCGQPLFVYKLEQVSEKGKAYTNYFGRCNVAEHEKLIKLAQLKPEKDSDEAVTYSLGKFGQRALDFYSIHVTKESTHPVKPLAQIAGNRYASTPVGKALSDACMGTIASFLSKYQDIIIEHQKVVKGNQKRLESLRELAGKENLEYPSVTLPPQPHTKEGVDAYNEVIARVRMWVNLNLWQKLKLSRDDAKPLLRLKGFPSFPLVERQANEVDWWDMVCNVKKLINEKKEDGKVFWQNLAGYKRQEALRPYLSSEEDRKKGKKFARYQLGDLLLHLEKKHGEDWGKVYDEAWERIDKKVEGLSKHIKLEEERRSEDAQSKAALTDWLRAKASFVIEGLKEADKDEFCRCELKLQKWYGDLRGKPFAIEAENSILDISGFSKQYNCAFIWQKDGVKKLNLYLIINYFKGGKLRFKKIKPEAFEANRFYTVINKKSGEIVPMEVNFNFDDPNLIILPLAFGKRQGREFIWNDLLSLETGSLKLANGRVIEKTLYNRRTRQDEPALFVALTFERREVLDSSNIKPMNLIGVDRGENIPAVIALTDPEGCPLSRFKDSLGNPTHILRIGESYKEKQRTIQAKKEVEQRRAGGYSRKYASKAKNLADDMVRNTARDLLYYAVTQDAMLIFENLSRGFGRQGKRTFMAERQYTRMEDWLTAKLAYEGLPSKTYLSKTLAQYTSKTCSNCGFTITSADYDRVLEKLKKTATGWMTTINGKELKVEGQITYYNRYKRQNVVKDLSVELDRLSEESVNNDISSWTKGRSGEALSLLKKRFSHRPVQEKFVCLNCGFETHADEQAALNIARSWLFLRSQEYKKYQTNKTTGNTDKRAFVETWQSFYRKKLKEVWKPAV

SEQ ID NO: 30174 - protein, 979 aa, synthetic construct
  REGION 1..979: note = engineered CasX variant
QEIKRINKIRRRLVKDSNTKKAGKTRGPMKTLLVRVMTPDLRERLENLRKKPENIPQPISNTSRANLNKLLTDYTEMKKAILHVYWEEFQKDPVGLMSRVAQPASKKIDQNKLKPEMDEKGNLTTAGFACSQCGQPLFVYKLEQVSEKGKAYTNYFGRCNVAEHEKLIKLAQLKPEKDSDEAVTYSLGKFGQRALDFYSIHVTKESTHPVKPLAQIAGNRYASAPVGKALSDACMGTIASFLSKYQDIIIEHQKVVKGNQKRLESLRELAGKENLEYPSVTLPPQPHTKEGVDAYNEVIARVRMWVNLNLWQKLKLSRDDAKPLLRLKGFPSFPLVERQANEVDWWDMVCNVKKLINEKKEDGKVFWQNLAGYKRQEALRPYLSSEEDRKKGKKFARYQLGDLLLHLEKKHGEDWGKVYDEAWERIDKKVEGLSKHIKLEEERRSEDAQSKAALTDWLRAKASFVIEGLKEADKDEFCRCELKLQKWYGDLRGKPFAIEAENSILDISGFSKQYNCAFIWQKDGVKKLNLYLIINYFKGGKLRFKKIKPEAFEANRFYTVINKKSGEIVPMEVNFNFDDPNLIILPLAFGKRQGREFIWNDLLSLETGSLKLANGRVIEKTLYNRRTRQDEPALFVALTFERREVLDSSNIKPMNLIGVDRGENIPAVIALTDPEGCPLSRFKDSLGNPTHILRIGESYKEKQRTIQAKKEVEQRRAGGYSRKYASKAKNLADDMVRNTARDLLYYAVTQDAMLIFENLSRGFGRQGKRTFMAERQYTRMEDWLTAKLAYEGLPSKTYLSKTLAQYTSKTCSNCGFTITSADYDRVLEKLKKTATGWMTTINGKELKVEGQITYYNRYKRQNVVKDLSVELDRLSEESVNNDISSWTKGRSGEALSLLKKRFSHRPVQEKFVCLNCGFETHADEQAALNIARSWLFLRSQEYKKYQTNKTTGNTDKRAFVETWQSFYRKKLKEVWKPAV

SEQ ID NO: 30175 - protein, 979 aa, synthetic construct
  REGION 1..979: note = engineered CasX variant
QEIKRINKIRRRLVKDSNTKKAGKTRGPMKTLLVRVMTPDLRERLENLRKKPENIPQPISNTSRANLNKLLTDYTEMKKAILHVYWEEFQKDPVGLMSRVAQPASKKIDQNKLKPEMDEKGNLTTAGFACSQCGQPLFVYKLEQVSEKGKAYTNYFGRCNVAEHEKLIKLAQLKPEKDSDEAVTYSLGKFGQRALDFYSIHVTKESTHPVKPLAQIAGNRYASVPVGKALSDACMGTIASFLSKYQDIIIEHQKVVKGNQKRLESLRELAGKENLEYPSVTLPPQPHTKEGVDAYNEVIARVRMWVNLNLWQKLKLSRDDAKPLLRLKGFPSFPLVERQANEVDWWDMVCNVKKLINEKKEDGKVFWQNLAGYKRQEALRPYLSSEEDRKKGKKFARYQLGDLLLHLEKKHGEDWGKVYDEAWERIDKKVEGLSKHIKLEEERRSEDAQSKAALTDWLRAKASFVIEGLKEADKDEFCRCELKLQKWYGDLRGKPFAIEAENSILDISGFSKQYNCAFIWQKDGVKKLNLYLIINYFKGGKLRFKKIKPEAFEANRFYTVINKKSGEIVPMEVNFNFDDPNLIILPLAFGKRQGREFIWNDLLSLETGSLKLANGRVIEKTLYNRRTRQDEPALFVALTFERREVLDSSNIKPMNLIGVDRGENIPAVIALTDPEGCPLSRFKDSLGNPTHILRIGESYKEKQRTIQAKKEVEQRRAGGYSRKYASKAKNLADDMVRNTARDLLYYAVTQDAMLIFENLSRGFGRQGKRTFMAERQYTRMEDWLTAKLAYEGLPSKTYLSKTLAQYTSKTCSNCGFTITSADYDRVLEKLKKTATGWMTTINGKELKVEGQITYYNRYKRQNVVKDLSVELDRLSEESVNNDISSWTKGRSGEALSLLKKRFSHRPVQEKFVCLNCGFETHADEQAALNIARSWLFLRSQEYKKYQTNKTTGNTDKRAFVETWQSFYRKKLKEVWKPAV

SEQ ID NO: 30176 - protein, 980 aa, synthetic construct
  REGION 1..980: note = engineered CasX variant
QEIKRINKIRRRLVKDSNTKKAGKTRGPMKTLLVRVMTPDLRERLENLRKKPENIPQPISNTSRANLNKLLTDYTEMKKAILHVYWEEFQKDPVGLMSRVAQPASKKIDQNKLKPEMDEKGNLTTAGFACSQCGQPLFVYKLEQVSEKGKAYTNYFGRCNVAEHEKLIKKLAQLKPEKDSDEAVTYSLGKFGQRALDFYSIHVTKESTHPVKPLAQIAGNRYASGPVGKALSDACMGTIASFLSKYQDIIIEHQKVVKGNQKRLESLRELAGKENLEYPSVTLPPQPHTKEGVDAYNEVIARVRMWVNLNLWQKLKLSRDDAKPLLRLKGFPSFPLVERQANEVDWWDMVCNVKKLINEKKEDGKVFWQNLAGYKRQEALRPYLSSEEDRKKGKKFARYQLGDLLLHLEKKHGEDWGKVYDEAWERIDKKVEGLSKHIKLEEERRSEDAQSKAALTDWLRAKASFVIEGLKEADKDEFCRCELKLQKWYGDLRGKPFAIEAENSILDISGFSKQYNCAFIWQKDGVKKLNLYLIINYFKGGKLRFKKIKPEAFEANRFYTVINKKSGEIVPMEVNFNFDDPNLIILPLAFGKRQGREFIWNDLLSLETGSLKLANGRVIEKTLYNRRTRQDEPALFVALTFERREVLDSSNIKPMNLIGVDRGENIPAVIALTDPEGCPLSRFKDSLGNPTHILRIGESYKEKQRTIQAKKEVEQRRAGGYSRKYASKAKNLADDMVRNTARDLLYYAVTQDAMLIFENLSRGFGRQGKRTFMAERQYTRMEDWLTAKLAYEGLPSKTYLSKTLAQYTSKTCSNCGFTITSADYDRVLEKLKKTATGWMTTINGKELKVEGQITYYNRYKRQNVVKDLSVELDRLSEESVNNDISSWTKGRSGEALSLLKKRFSHRPVQEKFVCLNCGFETHADEQAALNIARSWLFLRSQEYKKYQTNKTTGNTDKRAFVETWQSFYRKKLKEVWKPAV

SEQ ID NO: 30177 - protein, 978 aa, synthetic construct
  REGION 1..978: note = engineered CasX variant
QEIKRINKIRRRLVKDSNTKKAGKTRGPMKTLLVRVMTPDLRERLENLRKKPENIPQPISNTSRANLNKLLTDYTEMKKAILHVYWEEFQKDPVGLMSRVAQPASKKIDQNKLKPEMDEKGNLTTAGFACSQCGQPLFVYKLEQVSEKGKAYTNYFGRCNVAEHEKLIKLAQLKPEKDSDEAVTYSLGKFGQRALDFYSIHVTKESTHPVKPLAQIAGNRYASPVGKALSDACMGTIASFLSKYQDIIIEHQKVVKGNQKRLESLRELAGKENLEYPSVTLPPQPHTKEGVDAYNEVIARVRMWVNLNLWQKLKLSRDDAKPLLRLKGFPSFPLVERQANEVDWWDMVCNVKKLINEKKEDGKVFWQNLAGYKRQEALRPYLSSEEDRKKGKKFARYQLGDLLLHLEKKHGEDWGKVYDEAWERIDKKVEGLSKHIKLEEERRSEDAQSKAALTDWLRAKASFVIEGLKEADKDEFCRCELKLQKWYGDLRGKPFAIEAENSILDISGFSKQYNCAFIWQKDGVKKLNLYLIINYFKGGKLRFKKIKPEAFEANRFYTVINKKSGEIVPMEVNFNFDDPNLIILPLAFGKRQGREFIWNDLLSLETGSLKLANGRVIEKTLYNRRTRQDEPALFVALTFERREVLDSSNIKPMNLIGVDRGENIPAVIALTDPEGCPLSRFKDSLGNPTHILRIGESYKEKQRTIQAKKEVEQRRAGGYSRKYASKAKNLADDMVRNTARDLLYYAVTQDAMLIFENLSRGFGRQGKRTFMAERQYTRMEDWLTAKLAYEGLPSKTYLSKTLAQYTSKTCSNCGFTITSADYDRVLEKLKKTATGWMTTINGKELKVEGQITYYNRYKRQNVVKDLSVELDRLSEESVNNDISSWTKGRSGEALSLLKKRFSHRPVQEKFVCLNCGFETHADEQAALNIARSWLFLRSQEYKKYQTNKTTGNTDKRAFVETWQSFYRKKLKEVWKPAV

SEQ ID NO: 30178 - protein, 979 aa, synthetic construct
  REGION 1..979: note = engineered CasX variant
QEIKRINKIRRRLVKDSNTKKAGKTRGPMKTLLVRVMTPDLRERLENLRKKPENIPQPISNTSRANLNKLLTDYTEMKKAILHVYWEEFQKDPVGLMSRVAQPASKKIDQNKLKPEMDEKGNLTTAGFACSQCGQPLFVYKLEQVSEKGKAYTNYFGRCNVAEHEKLILLYQLKPEKDSDEAVTYSLGKFGQRALDFYSIHVTKESTHPVKPLAQIAGNRYASYPVGKALSDACMGTIASFLSKYQDIIIEHQKVVKGNQKRLESLRELAGKENLEYPSVTLPPQPHTKEGVDAYNEVIARVRMWVNLNLWQKLKLSRDDAKPLLRLKGFPSFPLVERQANEVDWWDMVCNVKKLINEKKEDGKVFWQNLAGYKRQEALRPYLSSEEDRKKGKKFARYQLGDLLLHLEKKHGEDWGKVYDEAWERIDKKVEGLSKHIKLEEERRSEDAQSKAALTDWLRAKASFVIEGLKEADKDEFCRCELKLQKWYGDLRGKPFAIEAENSILDISGFSKQYNCAFIWQKDGVKKLNLYLIINYFKGGKLRFKKIKPEAFEANRFYTVINKKSGEIVPMEVNFNFDDPNLIILPLAFGKRQGREFIWNDLLSLETGSLKLANGRVIEKTLYNRRTRQDEPALFVALTFERREVLDSSNIKPMNLIGVDRGENIPAVIALTDPEGCPLSRFKDSLGNPTHILRIGESYKEKQRTIQAKKEVEQRRAGGYSRKYASKAKNLADDMVRNTARDLLYYAVTQDAMLIFENLSRGFGRQGKRTFMAERQYTRMEDWLTAKLAYEGLPSKTYLSKTLAQYTSKTCSNCGFTITSADYDRVLEKLKKTATGWMTTINGKELKVEGQITYYNRYKRQNVVKDLSVELDRLSEESVNNDISSWTKGRSGEALSLLKKRFSHRPVQEKFVCLNCGFETHADEQAALNIARSWLFLRSQEYKKYQTNKTTGNTDKRAFVETWQSFYRKKLKEVWKPAV

SEQ ID NO: 30179 - protein, 979 aa, synthetic construct
  REGION 1..979: note = engineered CasX variant
QEIKRINKIRRRLVKDSNTKKAGKTRGPMKTLLVRVMTPDLRERLENLRKKPENIPQPISNTSRANLNKLLTDYTEMKKAILHVYWEEFQKDPVGLMSRVAQPASKKIDQNKLKPEMDEKGNLTTAGFACSQCGQPLFVYKLEQVSEKGKAYTNYFGRCNVAEHEKLILLYQLKPEKDSDEAVTYSLGKFGQRALDFYSIHVTKESTHPVKPLAQIAGNRYASHPVGKALSDACMGTIASFLSKYQDIIIEHQKVVKGNQKRLESLRELAGKENLEYPSVTLPPQPHTKEGVDAYNEVIARVRMWVNLNLWQKLKLSRDDAKPLLRLKGFPSFPLVERQANEVDWWDMVCNVKKLINEKKEDGKVFWQNLAGYKRQEALRPYLSSEEDRKKGKKFARYQLGDLLLHLEKKHGEDWGKVYDEAWERIDKKVEGLSKHIKLEEERRSEDAQSKAALTDWLRAKASFVIEGLKEADKDEFCRCELKLQKWYGDLRGKPFAIEAENSILDISGFSKQYNCAFIWQKDGVKKLNLYLIINYFKGGKLRFKKIKPEAFEANRFYTVINKKSGEIVPMEVNFNFDDPNLIILPLAFGKRQGREFIWNDLLSLETGSLKLANGRVIEKTLYNRRTRQDEPALFVALTFERREVLDSSNIKPMNLIGVDRGENIPAVIALTDPEGCPLSRFKDSLGNPTHILRIGESYKEKQRTIQAKKEVEQRRAGGYSRKYASKAKNLADDMVRNTARDLLYYAVTQDAMLIFENLSRGFGRQGKRTFMAERQYTRMEDWLTAKLAYEGLPSKTYLSKTLAQYTSKTCSNCGFTITSADYDRVLEKLKKTATGWMTTINGKELKVEGQITYYNRYKRQNVVKDLSVELDRLSEESVNNDISSWTKGRSGEALSLLKKRFSHRPVQEKFVCLNCGFETHADEQAALNIARSWLFLRSQEYKKYQTNKTTGNTDKRAFVETWQSFYRKKLKEVWKPAV

SEQ ID NO: 30180 - protein, 979 aa, synthetic construct
  REGION 1..979: note = engineered CasX variant
QEIKRINKIRRRLVKDSNTKKAGKTRGPMKTLLVRVMTPDLRERLENLRKKPENIPQPISNTSRANLNKLLTDYTEMKKAILHVYWEEFQKDPVGLMSRVAQPASKKIDQNKLKPEMDEKGNLTTAGFACSQCGQPLFVYKLEQVSEKGKAYTNYFGRCNVAEHEKLILLYQLKPEKDSDEAVTYSLGKFGQRALDFYSIHVTKESTHPVKPLAQIAGNRYASSPVGKALSDACMGTIASFLSKYQDIIIEHQKVVKGNQKRLESLRELAGKENLEYPSVTLPPQPHTKEGVDAYNEVIARVRMWVNLNLWQKLKLSRDDAKPLLRLKGFPSFPLVERQANEVDWWDMVCNVKKLINEKKEDGKVFWQNLAGYKRQEALRPYLSSEEDRKKGKKFARYQLGDLLLHLEKKHGEDWGKVYDEAWERIDKKVEGLSKHIKLEEERRSEDAQSKAALTDWLRAKASFVIEGLKEADKDEFCRCELKLQKWYGDLRGKPFAIEAENSILDISGFSKQYNCAFIWQKDGVKKLNLYLIINYFKGGKLRFKKIKPEAFEANRFYTVINKKSGEIVPMEVNFNFDDPNLIILPLAFGKRQGREFIWNDLLSLETGSLKLANGRVIEKTLYNRRTRQDEPALFVALTFERREVLDSSNIKPMNLIGVDRGENIPAVIALTDPEGCPLSRFKDSLGNPTHILRIGESYKEKQRTIQAKKEVEQRRAGGYSRKYASKAKNLADDMVRNTARDLLYYAVTQDAMLIFENLSRGFGRQGKRTFMAERQYTRMEDWLTAKLAYEGLPSKTYLSKTLAQYTSKTCSNCGFTITSADYDRVLEKLKKTATGWMTTINGKELKVEGQITYYNRYKRQNVVKDLSVELDRLSEESVNNDISSWTKGRSGEALSLLKKRFSHRPVQEKFVCLNCGFETHADEQAALNIARSWLFLRSQEYKKYQTNKTTGNTDKRAFVETWQSFYRKKLKEVWKPAV

SEQ ID NO: 30181 - protein, 979 aa, synthetic construct
  REGION 1..979: note = engineered CasX variant
QEIKRINKIRRRLVKDSNTKKAGKTRGPMKTLLVRVMTPDLRERLENLRKKPENIPQPISNTSRANLNKLLTDYTEMKKAILHVYWEEFQKDPVGLMSRVAQPASKKIDQNKLKPEMDEKGNLTTAGFACSQCGQPLFVYKLEQVSEKGKAYTNYFGRCNVAEHEKLILLYQLKPEKDSDEAVTYSLGKFGQRALDFYSIHVTKESTHPVKPLAQIAGNRYASTPVGKALSDACMGTIASFLSKYQDIIIEHQKVVKGNQKRLESLRELAGKENLEYPSVTLPPQPHTKEGVDAYNEVIARVRMWVNLNLWQKLKLSRDDAKPLLRLKGFPSFPLVERQANEVDWWDMVCNVKKLINEKKEDGKVFWQNLAGYKRQEALRPYLSSEEDRKKGKKFARYQLGDLLLHLEKKHGEDWGKVYDEAWERIDKKVEGLSKHIKLEEERRSEDAQSKAALTDWLRAKASFVIEGLKEADKDEFCRCELKLQKWYGDLRGKPFAIEAENSILDISGFSKQYNCAFIWQKDGVKKLNLYLIINYFKGGKLRFKKIKPEAFEANRFYTVINKKSGEIVPMEVNFNFDDPNLIILPLAFGKRQGREFIWNDLLSLETGSLKLANGRVIEKTLYNRRTRQDEPALFVALTFERREVLDSSNIKPMNLIGVDRGENIPAVIALTDPEGCPLSRFKDSLGNPTHILRIGESYKEKQRTIQAKKEVEQRRAGGYSRKYASKAKNLADDMVRNTARDLLYYAVTQDAMLIFENLSRGFGRQGKRTFMAERQYTRMEDWLTAKLAYEGLPSKTYLSKTLAQYTSKTCSNCGFTITSADYDRVLEKLKKTATGWMTTINGKELKVEGQITYYNRYKRQNVVKDLSVELDRLSEESVNNDISSWTKGRSGEALSLLKKRFSHRPVQEKFVCLNCGFETHADEQAALNIARSWLFLRSQEYKKYQTNKTTGNTDKRAFVETWQSFYRKKLKEVWKPAV

SEQ ID NO: 30182 - protein, 979 aa, synthetic construct
  REGION 1..979: note = engineered CasX variant
QEIKRINKIRRRLVKDSNTKKAGKTRGPMKTLLVRVMTPDLRERLENLRKKPENIPQPISNTSRANLNKLLTDYTEMKKAILHVYWEEFQKDPVGLMSRVAQPASKKIDQNKLKPEMDEKGNLTTAGFACSQCGQPLFVYKLEQVSEKGKAYTNYFGRCNVAEHEKLILLYQLKPEKDSDEAVTYSLGKFGQRALDFYSIHVTKESTHPVKPLAQIAGNRYASAPVGKALSDACMGTIASFLSKYQDIIIEHQKVVKGNQKRLESLRELAGKENLEYPSVTLPPQPHTKEGVDAYNEVIARVRMWVNLNLWQKLKLSRDDAKPLLRLKGFPSFPLVERQANEVDWWDMVCNVKKLINEKKEDGKVFWQNLAGYKRQEALRPYLSSEEDRKKGKKFARYQLGDLLLHLEKKHGEDWGKVYDEAWERIDKKVEGLSKHIKLEEERRSEDAQSKAALTDWLRAKASFVIEGLKEADKDEFCRCELKLQKWYGDLRGKPFAIEAENSILDISGFSKQYNCAFIWQKDGVKKLNLYLIINYFKGGKLRFKKIKPEAFEANRFYTVINKKSGEIVPMEVNFNFDDPNLIILPLAFGKRQGREFIWNDLLSLETGSLKLANGRVIEKTLYNRRTRQDEPALFVALTFERREVLDSSNIKPMNLIGVDRGENIPAVIALTDPEGCPLSRFKDSLGNPTHILRIGESYKEKQRTIQAKKEVEQRRAGGYSRKYASKAKNLADDMVRNTARDLLYYAVTQDAMLIFENLSRGFGRQGKRTFMAERQYTRMEDWLTAKLAYEGLPSKTYLSKTLAQYTSKTCSNCGFTITSADYDRVLEKLKKTATGWMTTINGKELKVEGQITYYNRYKRQNVVKDLSVELDRLSEESVNNDISSWTKGRSGEALSLLKKRFSHRPVQEKFVCLNCGFETHADEQAALNIARSWLFLRSQEYKKYQTNKTTGNTDKRAFVETWQSFYRKKLKEVWKPAV

SEQ ID NO: 30183 - protein, 979 aa, synthetic construct
  REGION 1..979: note = engineered CasX variant
QEIKRINKIRRRLVKDSNTKKAGKTRGPMKTLLVRVMTPDLRERLENLRKKPENIPQPISNTSRANLNKLLTDYTEMKKAILHVYWEEFQKDPVGLMSRVAQPASKKIDQNKLKPEMDEKGNLTTAGFACSQCGQPLFVYKLEQVSEKGKAYTNYFGRCNVAEHEKLILLYQLKPEKDSDEAVTYSLGKFGQRALDFYSIHVTKESTHPVKPLAQIAGNRYASVPVGKALSDACMGTIASFLSKYQDIIIEHQKVVKGNQKRLESLRELAGKENLEYPSVTLPPQPHTKEGVDAYNEVIARVRMWVNLNLWQKLKLSRDDAKPLLRLKGFPSFPLVERQANEVDWWDMVCNVKKLINEKKEDGKVFWQNLAGYKRQEALRPYLSSEEDRKKGKKFARYQLGDLLLHLEKKHGEDWGKVYDEAWERIDKKVEGLSKHIKLEEERRSEDAQSKAALTDWLRAKASFVIEGLKEADKDEFCRCELKLQKWYGDLRGKPFAIEAENSILDISGFSKQYNCAFIWQKDGVKKLNLYLIINYFKGGKLRFKKIKPEAFEANRFYTVINKKSGEIVPMEVNFNFDDPNLIILPLAFGKRQGREFIWNDLLSLETGSLKLANGRVIEKTLYNRRTRQDEPALFVALTFERREVLDSSNIKPMNLIGVDRGENIPAVIALTDPEGCPLSRFKDSLGNPTHILRIGESYKEKQRTIQAKKEVEQRRAGGYSRKYASKAKNLADDMVRNTARDLLYYAVTQDAMLIFENLSRGFGRQGKRTFMAERQYTRMEDWLTAKLAYEGLPSKTYLSKTLAQYTSKTCSNCGFTITSADYDRVLEKLKKTATGWMTTINGKELKVEGQITYYNRYKRQNVVKDLSVELDRLSEESVNNDISSWTKGRSGEALSLLKKRFSHRPVQEKFVCLNCGFETHADEQAALNIARSWLFLRSQEYKKYQTNKTTGNTDKRAFVETWQSFYRKKLKEVWKPAV

SEQ ID NO: 30184 - protein, 979 aa, synthetic construct
  REGION 1..979: note = engineered CasX variant
QEIKRINKIRRRLVKDSNTKKAGKTRGPMKTLLVRVMTPDLRERLENLRKKPENIPQPISNTSRANLNKLLTDYTEMKKAILHVYWEEFQKDPVGLMSRVAQPASKKIDQNKLKPEMDEKGNLTTAGFACSQCGQPLFVYKLEQVSEKGKAYTNYFGRCNVAEHEKLIKLYQLKPEKDSDEAVTYSLGKFGQRALDFYSIHVTKESTHPVKPLAQIAGNRYASGPVGKALSDACMGTIASFLSKYQDIIIEHQKVVKGNQKRLESLRELAGKENLEYPSVTLPPQPHTKEGVDAYNEVIARVRMWVNLNLWQKLKLSRDDAKPLLRLKGFPSFPLVERQANEVDWWDMVCNVKKLINEKKEDGKVFWQNLAGYKRQEALRPYLSSEEDRKKGKKFARYQLGDLLLHLEKKHGEDWGKVYDEAWERIDKKVEGLSKHIKLEEERRSEDAQSKAALTDWLRAKASFVIEGLKEADKDEFCRCELKLQKWYGDLRGKPFAIEAENSILDISGFSKQYNCAFIWQKDGVKKLNLYLIINYFKGGKLRFKKIKPEAFEANRFYTVINKKSGEIVPMEVNFNFDDPNLIILPLAFGKRQGREFIWNDLLSLETGSLKLANGRVIEKTLYNRRTRQDEPALFVALTFERREVLDSSNIKPMNLIGVDRGENIPAVIALTDPEGCPLSRFKDSLGNPTHILRIGESYKEKQRTIQAKKEVEQRRAGGYSRKYASKAKNLADDMVRNTARDLLYYAVTQDAMLIFENLSRGFGRQGKRTFMAERQYTRMEDWLTAKLAYEGLPSKTYLSKTLAQYTSKTCSNCGFTITSADYDRVLEKLKKTATGWMTTINGKELKVEGQITYYNRYKRQNVVKDLSVELDRLSEESVNNDISSWTKGRSGEALSLLKKRFSHRPVQEKFVCLNCGFETHADEQAALNIARSWLFLRSQEYKKYQTNKTTGNTDKRAFVETWQSFYRKKLKEVWKPAV

SEQ ID NO: 30185 - protein, 978 aa, synthetic construct
  REGION 1..978: note = engineered CasX variant
QEIKRINKIRRRLVKDSNTKKAGKTRGPMKTLLVRVMTPDLRERLENLRKKPENIPQPISNTSRANLNKLLTDYTEMKKAILHVYWEEFQKDPVGLMSRVAQPASKKIDQNKLKPEMDEKGNLTTAGFACSQCGQPLFVYKLEQVSEKGKAYTNYFGRCNVAEHEKLILLYQLKPEKDSDEAVTYSLGKFGQRALDFYSIHVTKESTHPVKPLAQIAGNRYASPVGKALSDACMGTIASFLSKYQDIIIEHQKVVKGNQKRLESLRELAGKENLEYPSVTLPPQPHTKEGVDAYNEVIARVRMWVNLNLWQKLKLSRDDAKPLLRLKGFPSFPLVERQANEVDWWDMVCNVKKLINEKKEDGKVFWQNLAGYKRQEALRPYLSSEEDRKKGKKFARYQLGDLLLHLEKKHGEDWGKVYDEAWERIDKKVEGLSKHIKLEEERRSEDAQSKAALTDWLRAKASFVIEGLKEADKDEFCRCELKLQKWYGDLRGKPFAIEAENSILDISGFSKQYNCAFIWQKDGVKKLNLYLIINYFKGGKLRFKKIKPEAFEANRFYTVINKKSGEIVPMEVNFNFDDPNLIILPLAFGKRQGREFIWNDLLSLETGSLKLANGRVIEKTLYNRRTRQDEPALFVALTFERREVLDSSNIKPMNLIGVDRGENIPAVIALTDPEGCPLSRFKDSLGNPTHILRIGESYKEKQRTIQAKKEVEQRRAGGYSRKYASKAKNLADDMVRNTARDLLYYAVTQDAMLIFENLSRGFGRQGKRTFMAERQYTRMEDWLTAKLAYEGLPSKTYLSKTLAQYTSKTCSNCGFTITSADYDRVLEKLKKTATGWMTTINGKELKVEGQITYYNRYKRQNVVKDLSVELDRLSEESVNNDISSWTKGRSGEALSLLKKRFSHRPVQEKFVCLNCGFETHADEQAALNIARSWLFLRSQEYKKYQTNKTTGNTDKRAFVETWQSFYRKKLKEVWKPAV

SEQ ID NO: 30186 - protein, 979 aa, synthetic construct
  REGION 1..979: note = engineered CasX variant
QEIKRINKIRRRLVKDSNTKKAGKTRGPMKTLLVRVMTPDLRERLENLRKKPENIPQPISNTSRANLNKLLTDYTEMKKAILHVYWEEFQKDPVGLMSRVAQPASKKIDQNKLKPEMDEKGNLTTAGFACSQCGQPLFVYKLEQVSEKGKAYTNYFGRCNVAEHEKLILLSQLKPEKDSDEAVTYSLGKFGQRALDFYSIHVTKESTHPVKPLAQIAGNRYASYPVGKALSDACMGTIASFLSKYQDIIIEHQKVVKGNQKRLESLRELAGKENLEYPSVTLPPQPHTKEGVDAYNEVIARVRMWVNLNLWQKLKLSRDDAKPLLRLKGFPSFPLVERQANEVDWWDMVCNVKKLINEKKEDGKVFWQNLAGYKRQEALRPYLSSEEDRKKGKKFARYQLGDLLLHLEKKHGEDWGKVYDEAWERIDKKVEGLSKHIKLEEERRSEDAQSKAALTDWLRAKASFVIEGLKEADKDEFCRCELKLQKWYGDLRGKPFAIEAENSILDISGFSKQYNCAFIWQKDGVKKLNLYLIINYFKGGKLRFKKIKPEAFEANRFYTVINKKSGEIVPMEVNFNFDDPNLIILPLAFGKRQGREFIWNDLLSLETGSLKLANGRVIEKTLYNRRTRQDEPALFVALTFERREVLDSSNIKPMNLIGVDRGENIPAVIALTDPEGCPLSRFKDSLGNPTHILRIGESYKEKQRTIQAKKEVEQRRAGGYSRKYASKAKNLADDMVRNTARDLLYYAVTQDAMLIFENLSRGFGRQGKRTFMAERQYTRMEDWLTAKLAYEGLPSKTYLSKTLAQYTSKTCSNCGFTITSADYDRVLEKLKKTATGWMTTINGKELKVEGQITYYNRYKRQNVVKDLSVELDRLSEESVNNDISSWTKGRSGEALSLLKKRFSHRPVQEKFVCLNCGFETHADEQAALNIARSWLFLRSQEYKKYQTNKTTGNTDKRAFVETWQSFYRKKLKEVWKPAV

SEQ ID NO: 30187 - protein, 979 aa, synthetic construct
  REGION 1..979: note = engineered CasX variant
QEIKRINKIRRRLVKDSNTKKAGKTRGPMKTLLVRVMTPDLRERLENLRKKPENIPQPISNTSRANLNKLLTDYTEMKKAILHVYWEEFQKDPVGLMSRVAQPASKKIDQNKLKPEMDEKGNLTTAGFACSQCGQPLFVYKLEQVSEKGKAYTNYFGRCNVAEHEKLILLSQLKPEKDSDEAVTYSLGKFGQRALDFYSIHVTKESTHPVKPLAQIAGNRYASHPVGKALSDACMGTIASFLSKYQDIIIEHQKVVKGNQKRLESLRELAGKENLEYPSVTLPPQPHTKEGVDAYNEVIARVRMWVNLNLWQKLKLSRDDAKPLLRLKGFPSFPLVERQANEVDWWDMVCNVKKLINEKKEDGKVFWQNLAGYKRQEALRPYLSSEEDRKKGKKFARYQLGDLLLHLEKKHGEDWGKVYDEAWERIDKKVEGLSKHIKLEEERRSEDAQSKAALTDWLRAKASFVIEGLKEADKDEFCRCELKLQKWYGDLRGKPFAIEAENSILDISGFSKQYNCAFIWQKDGVKKLNLYLIINYFKGGKLRFKKIKPEAFEANRFYTVINKKSGEIVPMEVNFNFDDPNLIILPLAFGKRQGREFIWNDLLSLETGSLKLANGRVIEKTLYNRRTRQDEPALFVALTFERREVLDSSNIKPMNLIGVDRGENIPAVIALTDPEGCPLSRFKDSLGNPTHILRIGESYKEKQRTIQAKKEVEQRRAGGYSRKYASKAKNLADDMVRNTARDLLYYAVTQDAMLIFENLSRGFGRQGKRTFMAERQYTRMEDWLTAKLAYEGLPSKTYLSKTLAQYTSKTCSNCGFTITSADYDRVLEKLKKTATGWMTTINGKELKVEGQITYYNRYKRQNVVKDLSVELDRLSEESVNNDISSWTKGRSGEALSLLKKRFSHRPVQEKFVCLNCGFETHADEQAALNIARSWLFLRSQEYKKYQTNKTTGNTDKRAFVETWQSFYRKKLKEVWKPAV

SEQ ID NO: 30188 - protein, 979 aa, synthetic construct
  REGION 1..979: note = engineered CasX variant
QEIKRINKIRRRLVKDSNTKKAGKTRGPMKTLLVRVMTPDLRERLENLRKKPENIPQPISNTSRANLNKLLTDYTEMKKAILHVYWEEFQKDPVGLMSRVAQPASKKIDQNKLKPEMDEKGNLTTAGFACSQCGQPLFVYKLEQVSEKGKAYTNYFGRCNVAEHEKLILLSQLKPEKDSDEAVTYSLGKFGQRALDFYSIHVTKESTHPVKPLAQIAGNRYASSPVGKALSDACMGTIASFLSKYQDIIIEHQKVVKGNQKRLESLRELAGKENLEYPSVTLPPQPHTKEGVDAYNEVIARVRMWVNLNLWQKLKLSRDDAKPLLRLKGFPSFPLVERQANEVDWWDMVCNVKKLINEKKEDGKVFWQNLAGYKRQEALRPYLSSEEDRKKGKKFARYQLGDLLLHLEKKHGEDWGKVYDEAWERIDKKVEGLSKHIKLEEERRSEDAQSKAALTDWLRAKASFVIEGLKEADKDEFCRCELKLQKWYGDLRGKPFAIEAENSILDISGFSKQYNCAFIWQKDGVKKLNLYLIINYFKGGKLRFKKIKPEAFEANRFYTVINKKSGEIVPMEVNFNFDDPNLIILPLAFGKRQGREFIWNDLLSLETGSLKLANGRVIEKTLYNRRTRQDEPALFVALTFERREVLDSSNIKPMNLIGVDRGENIPAVIALTDPEGCPLSRFKDSLGNPTHILRIGESYKEKQRTIQAKKEVEQRRAGGYSRKYASKAKNLADDMVRNTARDLLYYAVTQDAMLIFENLSRGFGRQGKRTFMAERQYTRMEDWLTAKLAYEGLPSKTYLSKTLAQYTSKTCSNCGFTITSADYDRVLEKLKKTATGWMTTINGKELKVEGQITYYNRYKRQNVVKDLSVELDRLSEESVNNDISSWTKGRSGEALSLLKKRFSHRPVQEKFVCLNCGFETHADEQAALNIARSWLFLRSQEYKKYQTNKTTGNTDKRAFVETWQSFYRKKLKEVWKPAV

SEQ ID NO: 30189 - protein, 979 aa, synthetic construct
  REGION 1..979: note = engineered CasX variant
QEIKRINKIRRRLVKDSNTKKAGKTRGPMKTLLVRVMTPDLRERLENLRKKPENIPQPISNTSRANLNKLLTDYTEMKKAILHVYWEEFQKDPVGLMSRVAQPASKKIDQNKLKPEMDEKGNLTTAGFACSQCGQPLFVYKLEQVSEKGKAYTNYFGRCNVAEHEKLILLSQLKPEKDSDEAVTYSLGKFGQRALDFYSIHVTKESTHPVKPLAQIAGNRYASTPVGKALSDACMGTIASFLSKYQDIIIEHQKVVKGNQKRLESLRELAGKENLEYPSVTLPPQPHTKEGVDAYNEVIARVRMWVNLNLWQKLKLSRDDAKPLLRLKGFPSFPLVERQANEVDWWDMVCNVKKLINEKKEDGKVFWQNLAGYKRQEALRPYLSSEEDRKKGKKFARYQLGDLLLHLEKKHGEDWGKVYDEAWERIDKKVEGLSKHIKLEEERRSEDAQSKAALTDWLRAKASFVIEGLKEADKDEFCRCELKLQKWYGDLRGKPFAIEAENSILDISGFSKQYNCAFIWQKDGVKKLNLYLIINYFKGGKLRFKKIKPEAFEANRFYTVINKKSGEIVPMEVNFNFDDPNLIILPLAFGKRQGREFIWNDLLSLETGSLKLANGRVIEKTLYNRRTRQDEPALFVALTFERREVLDSSNIKPMNLIGVDRGENIPAVIALTDPEGCPLSRFKDSLGNPTHILRIGESYKEKQRTIQAKKEVEQRRAGGYSRKYASKAKNLADDMVRNTARDLLYYAVTQDAMLIFENLSRGFGRQGKRTFMAERQYTRMEDWLTAKLAYEGLPSKTYLSKTLAQYTSKTCSNCGFTITSADYDRVLEKLKKTATGWMTTINGKELKVEGQITYYNRYKRQNVVKDLSVELDRLSEESVNNDISSWTKGRSGEALSLLKKRFSHRPVQEKFVCLNCGFETHADEQAALNIARSWLFLRSQEYKKYQTNKTTGNTDKRAFVETWQSFYRKKLKEVWKPAV

SEQ ID NO: 30190 - protein, 979 aa, synthetic construct
  REGION 1..979: note = engineered CasX variant
QEIKRINKIRRRLVKDSNTKKAGKTRGPMKTLLVRVMTPDLRERLENLRKKPENIPQPISNTSRANLNKLLTDYTEMKKAILHVYWEEFQKDPVGLMSRVAQPASKKIDQNKLKPEMDEKGNLTTAGFACSQCGQPLFVYKLEQVSEKGKAYTNYFGRCNVAEHEKLILLSQLKPEKDSDEAVTYSLGKFGQRALDFYSIHVTKESTHPVKPLAQIAGNRYASAPVGKALSDACMGTIASFLSKYQDIIIEHQKVVKGNQKRLESLRELAGKENLEYPSVTLPPQPHTKEGVDAYNEVIARVRMWVNLNLWQKLKLSRDDAKPLLRLKGFPSFPLVERQANEVDWWDMVCNVKKLINEKKEDGKVFWQNLAGYKRQEALRPYLSSEEDRKKGKKFARYQLGDLLLHLEKKHGEDWGKVYDEAWERIDKKVEGLSKHIKLEEERRSEDAQSKAALTDWLRAKASFVIEGLKEADKDEFCRCELKLQKWYGDLRGKPFAIEAENSILDISGFSKQYNCAFIWQKDGVKKLNLYLIINYFKGGKLRFKKIKPEAFEANRFYTVINKKSGEIVPMEVNFNFDDPNLIILPLAFGKRQGREFIWNDLLSLETGSLKLANGRVIEKTLYNRRTRQDEPALFVALTFERREVLDSSNIKPMNLIGVDRGENIPAVIALTDPEGCPLSRFKDSLGNPTHILRIGESYKEKQRTIQAKKEVEQRRAGGYSRKYASKAKNLADDMVRNTARDLLYYAVTQDAMLIFENLSRGFGRQGKRTFMAERQYTRMEDWLTAKLAYEGLPSKTYLSKTLAQYTSKTCSNCGFTITSADYDRVLEKLKKTATGWMTTINGKELKVEGQITYYNRYKRQNVVKDLSVELDRLSEESVNNDISSWTKGRSGEALSLLKKRFSHRPVQEKFVCLNCGFETHADEQAALNIARSWLFLRSQEYKKYQTNKTTGNTDKRAFVETWQSFYRKKLKEVWKPAV

SEQ ID NO: 30191 - protein, 979 aa, synthetic construct
  REGION 1..979: note = engineered CasX variant
QEIKRINKIRRRLVKDSNTKKAGKTRGPMKTLLVRVMTPDLRERLENLRKKPENIPQPISNTSRANLNKLLTDYTEMKKAILHVYWEEFQKDPVGLMSRVAQPASKKIDQNKLKPEMDEKGNLTTAGFACSQCGQPLFVYKLEQVSEKGKAYTNYFGRCNVAEHEKLILLSQLKPEKDSDEAVTYSLGKFGQRALDFYSIHVTKESTHPVKPLAQIAGNRYASVPVGKALSDACMGTIASFLSKYQDIIIEHQKVVKGNQKRLESLRELAGKENLEYPSVTLPPQPHTKEGVDAYNEVIARVRMWVNLNLWQKLKLSRDDAKPLLRLKGFPSFPLVERQANEVDWWDMVCNVKKLINEKKEDGKVFWQNLAGYKRQEALRPYLSSEEDRKKGKKFARYQLGDLLLHLEKKHGEDWGKVYDEAWERIDKKVEGLSKHIKLEEERRSEDAQSKAALTDWLRAKASFVIEGLKEADKDEFCRCELKLQKWYGDLRGKPFAIEAENSILDISGFSKQYNCAFIWQKDGVKKLNLYLIINYFKGGKLRFKKIKPEAFEANRFYTVINKKSGEIVPMEVNFNFDDPNLIILPLAFGKRQGREFIWNDLLSLETGSLKLANGRVIEKTLYNRRTRQDEPALFVALTFERREVLDSSNIKPMNLIGVDRGENIPAVIALTDPEGCPLSRFKDSLGNPTHILRIGESYKEKQRTIQAKKEVEQRRAGGYSRKYASKAKNLADDMVRNTARDLLYYAVTQDAMLIFENLSRGFGRQGKRTFMAERQYTRMEDWLTAKLAYEGLPSKTYLSKTLAQYTSKTCSNCGFTITSADYDRVLEKLKKTATGWMTTINGKELKVEGQITYYNRYKRQNVVKDLSVELDRLSEESVNNDISSWTKGRSGEALSLLKKRFSHRPVQEKFVCLNCGFETHADEQAALNIARSWLFLRSQEYKKYQTNKTTGNTDKRAFVETWQSFYRKKLKEVWKPAV

SEQ ID NO: 30192 - protein, 979 aa, synthetic construct
  REGION 1..979: note = engineered CasX variant
QEIKRINKIRRRLVKDSNTKKAGKTRGPMKTLLVRVMTPDLRERLENLRKKPENIPQPISNTSRANLNKLLTDYTEMKKAILHVYWEEFQKDPVGLMSRVAQPASKKIDQNKLKPEMDEKGNLTTAGFACSQCGQPLFVYKLEQVSEKGKAYTNYFGRCNVAEHEKLIKLSQLKPEKDSDEAVTYSLGKFGQRALDFYSIHVTKESTHPVKPLAQIAGNRYASGPVGKALSDACMGTIASFLSKYQDIIIEHQKVVKGNQKRLESLRELAGKENLEYPSVTLPPQPHTKEGVDAYNEVIARVRMWVNLNLWQKLKLSRDDAKPLLRLKGFPSFPLVERQANEVDWWDMVCNVKKLINEKKEDGKVFWQNLAGYKRQEALRPYLSSEEDRKKGKKFARYQLGDLLLHLEKKHGEDWGKVYDEAWERIDKKVEGLSKHIKLEEERRSEDAQSKAALTDWLRAKASFVIEGLKEADKDEFCRCELKLQKWYGDLRGKPFAIEAENSILDISGFSKQYNCAFIWQKDGVKKLNLYLIINYFKGGKLRFKKIKPEAFEANRFYTVINKKSGEIVPMEVNFNFDDPNLIILPLAFGKRQGREFIWNDLLSLETGSLKLANGRVIEKTLYNRRTRQDEPALFVALTFERREVLDSSNIKPMNLIGVDRGENIPAVIALTDPEGCPLSRFKDSLGNPTHILRIGESYKEKQRTIQAKKEVEQRRAGGYSRKYASKAKNLADDMVRNTARDLLYYAVTQDAMLIFENLSRGFGRQGKRTFMAERQYTRMEDWLTAKLAYEGLPSKTYLSKTLAQYTSKTCSNCGFTITSADYDRVLEKLKKTATGWMTTINGKELKVEGQITYYNRYKRQNVVKDLSVELDRLSEESVNNDISSWTKGRSGEALSLLKKRFSHRPVQEKFVCLNCGFETHADEQAALNIARSWLFLRSQEYKKYQTNKTTGNTDKRAFVETWQSFYRKKLKEVWKPAV

SEQ ID NO: 30193 - protein, 978 aa, synthetic construct
  REGION 1..978: note = engineered CasX variant
QEIKRINKIRRRLVKDSNTKKAGKTRGPMKTLLVRVMTPDLRERLENLRKKPENIPQPISNTSRANLNKLLTDYTEMKKAILHVYWEEFQKDPVGLMSRVAQPASKKIDQNKLKPEMDEKGNLTTAGFACSQCGQPLFVYKLEQVSEKGKAYTNYFGRCNVAEHEKLILLSQLKPEKDSDEAVTYSLGKFGQRALDFYSIHVTKESTHPVKPLAQIAGNRYASPVGKALSDACMGTIASFLSKYQDIIIEHQKVVKGNQKRLESLRELAGKENLEYPSVTLPPQPHTKEGVDAYNEVIARVRMWVNLNLWQKLKLSRDDAKPLLRLKGFPSFPLVERQANEVDWWDMVCNVKKLINEKKEDGKVFWQNLAGYKRQEALRPYLSSEEDRKKGKKFARYQLGDLLLHLEKKHGEDWGKVYDEAWERIDKKVEGLSKHIKLEEERRSEDAQSKAALTDWLRAKASFVIEGLKEADKDEFCRCELKLQKWYGDLRGKPFAIEAENSILDISGFSKQYNCAFIWQKDGVKKLNLYLIINYFKGGKLRFKKIKPEAFEANRFYTVINKKSGEIVPMEVNFNFDDPNLIILPLAFGKRQGREFIWNDLLSLETGSLKLANGRVIEKTLYNRRTRQDEPALFVALTFERREVLDSSNIKPMNLIGVDRGENIPAVIALTDPEGCPLSRFKDSLGNPTHILRIGESYKEKQRTIQAKKEVEQRRAGGYSRKYASKAKNLADDMVRNTARDLLYYAVTQDAMLIFENLSRGFGRQGKRTFMAERQYTRMEDWLTAKLAYEGLPSKTYLSKTLAQYTSKTCSNCGFTITSADYDRVLEKLKKTATGWMTTINGKELKVEGQITYYNRYKRQNVVKDLSVELDRLSEESVNNDISSWTKGRSGEALSLLKKRFSHRPVQEKFVCLNCGFETHADEQAALNIARSWLFLRSQEYKKYQTNKTTGNTDKRAFVETWQSFYRKKLKEVWKPAV

SEQ ID NO: 30194 - protein, 979 aa, synthetic construct
  REGION 1..979: note = engineered CasX variant
QEIKRINKIRRRLVKDSNTKKAGKTRGPMKTLLVRVMTPDLRERLENLRKKPENIPQPISNTSRANLNKLLTDYTEMKKAILHVYWEEFQKDPVGLMSRVAQPASKKIDQNKLKPEMDEKGNLTTAGFACSQCGQPLFVYKLEQVSEKGKAYTNYFGRCNVAEHEKLILLAQLKPEKDSDEAVTYSLGKFGQRALDFYSIHVTKESTHPVKPLAQIAGNRYASYPVGKALSDACMGTIASFLSKYQDIIIEHQKVVKGNQKRLESLRELAGKENLEYPSVTLPPQPHTKEGVDAYNEVIARVRMWVNLNLWQKLKLSRDDAKPLLRLKGFPSFPLVERQANEVDWWDMVCNVKKLINEKKEDGKVFWQNLAGYKRQEALRPYLSSEEDRKKGKKFARYQLGDLLLHLEKKHGEDWGKVYDEAWERIDKKVEGLSKHIKLEEERRSEDAQSKAALTDWLRAKASFVIEGLKEADKDEFCRCELKLQKWYGDLRGKPFAIEAENSILDISGFSKQYNCAFIWQKDGVKKLNLYLIINYFKGGKLRFKKIKPEAFEANRFYTVINKKSGEIVPMEVNFNFDDPNLIILPLAFGKRQGREFIWNDLLSLETGSLKLANGRVIEKTLYNRRTRQDEPALFVALTFERREVLDSSNIKPMNLIGVDRGENIPAVIALTDPEGCPLSRFKDSLGNPTHILRIGESYKEKQRTIQAKKEVEQRRAGGYSRKYASKAKNLADDMVRNTARDLLYYAVTQDAMLIFENLSRGFGRQGKRTFMAERQYTRMEDWLTAKLAYEGLPSKTYLSKTLAQYTSKTCSNCGFTITSADYDRVLEKLKKTATGWMTTINGKELKVEGQITYYNRYKRQNVVKDLSVELDRLSEESVNNDISSWTKGRSGEALSLLKKRFSHRPVQEKFVCLNCGFETHADEQAALNIARSWLFLRSQEYKKYQTNKTTGNTDKRAFVETWQSFYRKKLKEVWKPAV

SEQ ID NO: 30195 - protein, 979 aa, synthetic construct
  REGION 1..979: note = engineered CasX variant
QEIKRINKIRRRLVKDSNTKKAGKTRGPMKTLLVRVMTPDLRERLENLRKKPENIPQPISNTSRANLNKLLTDYTEMKKAILHVYWEEFQKDPVGLMSRVAQPASKKIDQNKLKPEMDEKGNLTTAGFACSQCGQPLFVYKLEQVSEKGKAYTNYFGRCNVAEHEKLILLAQLKPEKDSDEAVTYSLGKFGQRALDFYSIHVTKESTHPVKPLAQIAGNRYASHPVGKALSDACMGTIASFLSKYQDIIIEHQKVVKGNQKRLESLRELAGKENLEYPSVTLPPQPHTKEGVDAYNEVIARVRMWVNLNLWQKLKLSRDDAKPLLRLKGFPSFPLVERQANEVDWWDMVCNVKKLINEKKEDGKVFWQNLAGYKRQEALRPYLSSEEDRKKGKKFARYQLGDLLLHLEKKHGEDWGKVYDEAWERIDKKVEGLSKHIKLEEERRSEDAQSKAALTDWLRAKASFVIEGLKEADKDEFCRCELKLQKWYGDLRGKPFAIEAENSILDISGFSKQYNCAFIWQKDGVKKLNLYLIINYFKGGKLRFKKIKPEAFEANRFYTVINKKSGEIVPMEVNFNFDDPNLIILPLAFGKRQGREFIWNDLLSLETGSLKLANGRVIEKTLYNRRTRQDEPALFVALTFERREVLDSSNIKPMNLIGVDRGENIPAVIALTDPEGCPLSRFKDSLGNPTHILRIGESYKEKQRTIQAKKEVEQRRAGGYSRKYASKAKNLADDMVRNTARDLLYYAVTQDAMLIFENLSRGFGRQGKRTFMAERQYTRMEDWLTAKLAYEGLPSKTYLSKTLAQYTSKTCSNCGFTITSADYDRVLEKLKKTATGWMTTINGKELKVEGQITYYNRYKRQNVVKDLSVELDRLSEESVNNDISSWTKGRSGEALSLLKKRFSHRPVQEKFVCLNCGFETHADEQAALNIARSWLFLRSQEYKKYQTNKTTGNTDKRAFVETWQSFYRKKLKEVWKPAV

SEQ ID NO: 30196 - protein, 979 aa, synthetic construct
  REGION 1..979: note = engineered CasX variant
QEIKRINKIRRRLVKDSNTKKAGKTRGPMKTLLVRVMTPDLRERLENLRKKPENIPQPISNTSRANLNKLLTDYTEMKKAILHVYWEEFQKDPVGLMSRVAQPASKKIDQNKLKPEMDEKGNLTTAGFACSQCGQPLFVYKLEQVSEKGKAYTNYFGRCNVAEHEKLILLAQLKPEKDSDEAVTYSLGKFGQRALDFYSIHVTKESTHPVKPLAQIAGNRYASTPVGKALSDACMGTIASFLSKYQDIIIEHQKVVKGNQKRLESLRELAGKENLEYPSVTLPPQPHTKEGVDAYNEVIARVRMWVNLNLWQKLKLSRDDAKPLLRLKGFPSFPLVERQANEVDWWDMVCNVKKLINEKKEDGKVFWQNLAGYKRQEALRPYLSSEEDRKKGKKFARYQLGDLLLHLEKKHGEDWGKVYDEAWERIDKKVEGLSKHIKLEEERRSEDAQSKAALTDWLRAKASFVIEGLKEADKDEFCRCELKLQKWYGDLRGKPFAIEAENSILDISGFSKQYNCAFIWQKDGVKKLNLYLIINYFKGGKLRFKKIKPEAFEANRFYTVINKKSGEIVPMEVNFNFDDPNLIILPLAFGKRQGREFIWNDLLSLETGSLKLANGRVIEKTLYNRRTRQDEPALFVALTFERREVLDSSNIKPMNLIGVDRGENIPAVIALTDPEGCPLSRFKDSLGNPTHILRIGESYKEKQRTIQAKKEVEQRRAGGYSRKYASKAKNLADDMVRNTARDLLYYAVTQDAMLIFENLSRGFGRQGKRTFMAERQYTRMEDWLTAKLAYEGLPSKTYLSKTLAQYTSKTCSNCGFTITSADYDRVLEKLKKTATGWMTTINGKELKVEGQITYYNRYKRQNVVKDLSVELDRLSEESVNNDISSWTKGRSGEALSLLKKRFSHRPVQEKFVCLNCGFETHADEQAALNIARSWLFLRSQEYKKYQTNKTTGNTDKRAFVETWQSFYRKKLKEVWKPAV

SEQ ID NO: 30197 - protein, 979 aa, synthetic construct
  REGION 1..979: note = engineered CasX variant
QEIKRINKIRRRLVKDSNTKKAGKTRGPMKTLLVRVMTPDLRERLENLRKKPENIPQPISNTSRANLNKLLTDYTEMKKAILHVYWEEFQKDPVGLMSRVAQPASKKIDQNKLKPEMDEKGNLTTAGFACSQCGQPLFVYKLEQVSEKGKAYTNYFGRCNVAEHEKLILLAQLKPEKDSDEAVTYSLGKFGQRALDFYSIHVTKESTHPVKPLAQIAGNRYASAPVGKALSDACMGTIASFLSKYQDIIIEHQKVVKGNQKRLESLRELAGKENLEYPSVTLPPQPHTKEGVDAYNEVIARVRMWVNLNLWQKLKLSRDDAKPLLRLKGFPSFPLVERQANEVDWWDMVCNVKKLINEKKEDGKVFWQNLAGYKRQEALRPYLSSEEDRKKGKKFARYQLGDLLLHLEKKHGEDWGKVYDEAWERIDKKVEGLSKHIKLEEERRSEDAQSKAALTDWLRAKASFVIEGLKEADKDEFCRCELKLQKWYGDLRGKPFAIEAENSILDISGFSKQYNCAFIWQKDGVKKLNLYLIINYFKGGKLRFKKIKPEAFEANRFYTVINKKSGEIVPMEVNFNFDDPNLIILPLAFGKRQGREFIWNDLLSLETGSLKLANGRVIEKTLYNRRTRQDEPALFVALTFERREVLDSSNIKPMNLIGVDRGENIPAVIALTDPEGCPLSRFKDSLGNPTHILRIGESYKEKQRTIQAKKEVEQRRAGGYSRKYASKAKNLADDMVRNTARDLLYYAVTQDAMLIFENLSRGFGRQGKRTFMAERQYTRMEDWLTAKLAYEGLPSKTYLSKTLAQYTSKTCSNCGFTITSADYDRVLEKLKKTATGWMTTINGKELKVEGQITYYNRYKRQNVVKDLSVELDRLSEESVNNDISSWTKGRSGEALSLLKKRFSHRPVQEKFVCLNCGFETHADEQAALNIARSWLFLRSQEYKKYQTNKTTGNTDKRAFVETWQSFYRKKLKEVWKPAV

SEQ ID NO: 30198 - protein, 979 aa, synthetic construct
  REGION 1..979: note = engineered CasX variant
QEIKRINKIRRRLVKDSNTKKAGKTRGPMKTLLVRVMTPDLRERLENLRKKPENIPQPISNTSRANLNKLLTDYTEMKKAILHVYWEEFQKDPVGLMSRVAQPASKKIDQNKLKPEMDEKGNLTTAGFACSQCGQPLFVYKLEQVSEKGKAYTNYFGRCNVAEHEKLILLAQLKPEKDSDEAVTYSLGKFGQRALDFYSIHVTKESTHPVKPLAQIAGNRYASVPVGKALSDACMGTIASFLSKYQDIIIEHQKVVKGNQKRLESLRELAGKENLEYPSVTLPPQPHTKEGVDAYNEVIARVRMWVNLNLWQKLKLSRDDAKPLLRLKGFPSFPLVERQANEVDWWDMVCNVKKLINEKKEDGKVFWQNLAGYKRQEALRPYLSSEEDRKKGKKFARYQLGDLLLHLEKKHGEDWGKVYDEAWERIDKKVEGLSKHIKLEEERRSEDAQSKAALTDWLRAKASFVIEGLKEADKDEFCRCELKLQKWYGDLRGKPFAIEAENSILDISGFSKQYNCAFIWQKDGVKKLNLYLIINYFKGGKLRFKKIKPEAFEANRFYTVINKKSGEIVPMEVNFNFDDPNLIILPLAFGKRQGREFIWNDLLSLETGSLKLANGRVIEKTLYNRRTRQDEPALFVALTFERREVLDSSNIKPMNLIGVDRGENIPAVIALTDPEGCPLSRFKDSLGNPTHILRIGESYKEKQRTIQAKKEVEQRRAGGYSRKYASKAKNLADDMVRNTARDLLYYAVTQDAMLIFENLSRGFGRQGKRTFMAERQYTRMEDWLTAKLAYEGLPSKTYLSKTLAQYTSKTCSNCGFTITSADYDRVLEKLKKTATGWMTTINGKELKVEGQITYYNRYKRQNVVKDLSVELDRLSEESVNNDISSWTKGRSGEALSLLKKRFSHRPVQEKFVCLNCGFETHADEQAALNIARSWLFLRSQEYKKYQTNKTTGNTDKRAFVETWQSFYRKKLKEVWKPAV

SEQ ID NO: 30199 - protein, 979 aa, synthetic construct
  REGION 1..979: note = engineered CasX variant
QEIKRINKIRRRLVKDSNTKKAGKTRGPMKTLLVRVMTPDLRERLENLRKKPENIPQPISNTSRANLNKLLTDYTEMKKAILHVYWEEFQKDPVGLMSRVAQPASKKIDQNKLKPEMDEKGNLTTAGFACSQCGQPLFVYKLEQVSEKGKAYTNYFGRCNVAEHEKLILLAQLKPEKDSDEAVTYSLGKFGQRALDFYSIHVTKESTHPVKPLAQIAGNRYASYPVGKALSDACMGTIASFLSKYQDIIIEHQKVVKGNQKRLESLRELAGKENLEYPSVTLPPQPHTSEGVDAYNEVIARVRMWVNLNLWQKLKLSRDDAKPLLRLKGFPSFPLVERQANEVDWWDMVCNVKKLINEKKEDGKVFWQNLAGYKRQEALRPYLSSEEDRKKGKKFARYQLGDLLLHLEKKHGEDWGKVYDEAWERIDKKVEGLSKHIKLEEERRSEDAQSKAALTDWLRAKASFVIEGLKEADKDEFCRCELKLQKWYGDLRGKPFAIEAENSILDISGFSKQYNCAFIWQKDGVKKLNLYLIINYFKGGKLRFKKIKPEAFEANRFYTVINKKSGEIVPMEVNFNFDDPNLIILPLAFGKRQGREFIWNDLLSLETGSLKLANGRVIEKTLYNRRTRQDEPALFVALTFERREVLDSSNIKPMNLIGVDRGENIPAVIALTDPEGCPLSRFKDSLGNPTHILRIGESYKEKQRTIQAKKEVEQRRAGGYSRKYASKAKNLADDMVRNTARDLLYYAVTQDAMLIFENLSRGFGRQGKRTFMAERQYTRMEDWLTAKLAYEGLPSKTYLSKTLAQYTSKTCSNCGFTITSADYDRVLEKLKKTATGWMTTINGKELKVEGQITYYNRYKRQNVVKDLSVELDRLSEESVNNDISSWTKGRSGEALSLLKKRFSHRPVQEKFVCLNCGFETHADEQAALNIARSWLFLRSQEYKKYQTNKTTGNTDKRAFVETWQSFYRKKLKEVWKPAV

SEQ ID NO: 30200 - protein, 979 aa, synthetic construct
  REGION 1..979: note = engineered CasX variant
QEIKRINKIRRRLVKDSNTKKAGKTRGPMKTLLVRVMTPDLRERLENLRKKPENIPQPISNTSRANLNKLLTDYTEMKKAILHVYWEEFQKDPVGLMSRVAQPASKKIDQNKLKPEMDEKGNLTTAGFACSQCGQPLFVYKLEQVSEKGKAYTNYFGRCNVAEHEKLILLAQLKPEKDSDEAVTYSLGKFGQRALDFYSIHVTKESTHPVKPLAQIAGNRYASHPVGKALSDACMGTIASFLSKYQDIIIEHQKVVKGNQKRLESLRELAGKENLEYPSVTLPPQPHTSEGVDAYNEVIARVRMWVNLNLWQKLKLSRDDAKPLLRLKGFPSFPLVERQANEVDWWDMVCNVKKLINEKKEDGKVFWQNLAGYKRQEALRPYLSSEEDRKKGKKFARYQLGDLLLHLEKKHGEDWGKVYDEAWERIDKKVEGLSKHIKLEEERRSEDAQSKAALTDWLRAKASFVIEGLKEADKDEFCRCELKLQKWYGDLRGKPFAIEAENSILDISGFSKQYNCAFIWQKDGVKKLNLYLIINYFKGGKLRFKKIKPEAFEANRFYTVINKKSGEIVPMEVNFNFDDPNLIILPLAFGKRQGREFIWNDLLSLETGSLKLANGRVIEKTLYNRRTRQDEPALFVALTFERREVLDSSNIKPMNLIGVDRGENIPAVIALTDPEGCPLSRFKDSLGNPTHILRIGESYKEKQRTIQAKKEVEQRRAGGYSRKYASKAKNLADDMVRNTARDLLYYAVTQDAMLIFENLSRGFGRQGKRTFMAERQYTRMEDWLTAKLAYEGLPSKTYLSKTLAQYTSKTCSNCGFTITSADYDRVLEKLKKTATGWMTTINGKELKVEGQITYYNRYKRQNVVKDLSVELDRLSEESVNNDISSWTKGRSGEALSLLKKRFSHRPVQEKFVCLNCGFETHADEQAALNIARSWLFLRSQEYKKYQTNKTTGNTDKRAFVETWQSFYRKKLKEVWKPAV

SEQ ID NO: 30201 - protein, 979 aa, synthetic construct
  REGION 1..979: note = engineered CasX variant
QEIKRINKIRRRLVKDSNTKKAGKTRGPMKTLLVRVMTPDLRERLENLRKKPENIPQPISNTSRANLNKLLTDYTEMKKAILHVYWEEFQKDPVGLMSRVAQPASKKIDQNKLKPEMDEKGNLTTAGFACSQCGQPLFVYKLEQVSEKGKAYTNYFGRCNVAEHEKLILLAQLKPEKDSDEAVTYSLGKFGQRALDFYSIHVTKESTHPVKPLAQIAGNRYASSPVGKALSDACMGTIASFLSKYQDIIIEHQKVVKGNQKRLESLRELAGKENLEYPSVTLPPQPHTSEGVDAYNEVIARVRMWVNLNLWQKLKLSRDDAKPLLRLKGFPSFPLVERQANEVDWWDMVCNVKKLINEKKEDGKVFWQNLAGYKRQEALRPYLSSEEDRKKGKKFARYQLGDLLLHLEKKHGEDWGKVYDEAWERIDKKVEGLSKHIKLEEERRSEDAQSKAALTDWLRAKASFVIEGLKEADKDEFCRCELKLQKWYGDLRGKPFAIEAENSILDISGFSKQYNCAFIWQKDGVKKLNLYLIINYFKGGKLRFKKIKPEAFEANRFYTVINKKSGEIVPMEVNFNFDDPNLIILPLAFGKRQGREFIWNDLLSLETGSLKLANGRVIEKTLYNRRTRQDEPALFVALTFERREVLDSSNIKPMNLIGVDRGENIPAVIALTDPEGCPLSRFKDSLGNPTHILRIGESYKEKQRTIQAKKEVEQRRAGGYSRKYASKAKNLADDMVRNTARDLLYYAVTQDAMLIFENLSRGFGRQGKRTFMAERQYTRMEDWLTAKLAYEGLPSKTYLSKTLAQYTSKTCSNCGFTITSADYDRVLEKLKKTATGWMTTINGKELKVEGQITYYNRYKRQNVVKDLSVELDRLSEESVNNDISSWTKGRSGEALSLLKKRFSHRPVQEKFVCLNCGFETHADEQAALNIARSWLFLRSQEYKKYQTNKTTGNTDKRAFVETWQSFYRKKLKEVWKPAV

SEQ ID NO: 30202 - protein, 979 aa, synthetic construct
  REGION 1..979: note = engineered CasX variant
QEIKRINKIRRRLVKDSNTKKAGKTRGPMKTLLVRVMTPDLRERLENLRKKPENIPQPISNTSRANLNKLLTDYTEMKKAILHVYWEEFQKDPVGLMSRVAQPASKKIDQNKLKPEMDEKGNLTTAGFACSQCGQPLFVYKLEQVSEKGKAYTNYFGRCNVAEHEKLILLAQLKPEKDSDEAVTYSLGKFGQRALDFYSIHVTKESTHPVKPLAQIAGNRYASTPVGKALSDACMGTIASFLSKYQDIIIEHQKVVKGNQKRLESLRELAGKENLEYPSVTLPPQPHTSEGVDAYNEVIARVRMWVNLNLWQKLKLSRDDAKPLLRLKGFPSFPLVERQANEVDWWDMVCNVKKLINEKKEDGKVFWQNLAGYKRQEALRPYLSSEEDRKKGKKFARYQLGDLLLHLEKKHGEDWGKVYDEAWERIDKKVEGLSKHIKLEEERRSEDAQSKAALTDWLRAKASFVIEGLKEADKDEFCRCELKLQKWYGDLRGKPFAIEAENSILDISGFSKQYNCAFIWQKDGVKKLNLYLIINYFKGGKLRFKKIKPEAFEANRFYTVINKKSGEIVPMEVNFNFDDPNLIILPLAFGKRQGREFIWNDLLSLETGSLKLANGRVIEKTLYNRRTRQDEPALFVALTFERREVLDSSNIKPMNLIGVDRGENIPAVIALTDPEGCPLSRFKDSLGNPTHILRIGESYKEKQRTIQAKKEVEQRRAGGYSRKYASKAKNLADDMVRNTARDLLYYAVTQDAMLIFENLSRGFGRQGKRTFMAERQYTRMEDWLTAKLAYEGLPSKTYLSKTLAQYTSKTCSNCGFTITSADYDRVLEKLKKTATGWMTTINGKELKVEGQITYYNRYKRQNVVKDLSVELDRLSEESVNNDISSWTKGRSGEALSLLKKRFSHRPVQEKFVCLNCGFETHADEQAALNIARSWLFLRSQEYKKYQTNKTTGNTDKRAFVETWQSFYRKKLKEVWKPAV

SEQ ID NO: 30203 - protein, 979 aa, synthetic construct
  REGION 1..979: note = engineered CasX variant
QEIKRINKIRRRLVKDSNTKKAGKTRGPMKTLLVRVMTPDLRERLENLRKKPENIPQPISNTSRANLNKLLTDYTEMKKAILHVYWEEFQKDPVGLMSRVAQPASKKIDQNKLKPEMDEKGNLTTAGFACSQCGQPLFVYKLEQVSEKGKAYTNYFGRCNVAEHEKLILLAQLKPEKDSDEAVTYSLGKFGQRALDFYSIHVTKESTHPVKPLAQIAGNRYASAPVGKALSDACMGTIASFLSKYQDIIIEHQKVVKGNQKRLESLRELAGKENLEYPSVTLPPQPHTSEGVDAYNEVIARVRMWVNLNLWQKLKLSRDDAKPLLRLKGFPSFPLVERQANEVDWWDMVCNVKKLINEKKEDGKVFWQNLAGYKRQEALRPYLSSEEDRKKGKKFARYQLGDLLLHLEKKHGEDWGKVYDEAWERIDKKVEGLSKHIKLEEERRSEDAQSKAALTDWLRAKASFVIEGLKEADKDEFCRCELKLQKWYGDLRGKPFAIEAENSILDISGFSKQYNCAFIWQKDGVKKLNLYLIINYFKGGKLRFKKIKPEAFEANRFYTVINKKSGEIVPMEVNFNFDDPNLIILPLAFGKRQGREFIWNDLLSLETGSLKLANGRVIEKTLYNRRTRQDEPALFVALTFERREVLDSSNIKPMNLIGVDRGENIPAVIALTDPEGCPLSRFKDSLGNPTHILRIGESYKEKQRTIQAKKEVEQRRAGGYSRKYASKAKNLADDMVRNTARDLLYYAVTQDAMLIFENLSRGFGRQGKRTFMAERQYTRMEDWLTAKLAYEGLPSKTYLSKTLAQYTSKTCSNCGFTITSADYDRVLEKLKKTATGWMTTINGKELKVEGQITYYNRYKRQNVVKDLSVELDRLSEESVNNDISSWTKGRSGEALSLLKKRFSHRPVQEKFVCLNCGFETHADEQAALNIARSWLFLRSQEYKKYQTNKTTGNTDKRAFVETWQSFYRKKLKEVWKPAV

SEQ ID NO: 30204 - protein, 979 aa, synthetic construct
  REGION 1..979: note = engineered CasX variant
QEIKRINKIRRRLVKDSNTKKAGKTRGPMKTLLVRVMTPDLRERLENLRKKPENIPQPISNTSRANLNKLLTDYTEMKKAILHVYWEEFQKDPVGLMSRVAQPASKKIDQNKLKPEMDEKGNLTTAGFACSQCGQPLFVYKLEQVSEKGKAYTNYFGRCNVAEHEKLILLAQLKPEKDSDEAVTYSLGKFGQRALDFYSIHVTKESTHPVKPLAQIAGNRYASVPVGKALSDACMGTIASFLSKYQDIIIEHQKVVKGNQKRLESLRELAGKENLEYPSVTLPPQPHTSEGVDAYNEVIARVRMWVNLNLWQKLKLSRDDAKPLLRLKGFPSFPLVERQANEVDWWDMVCNVKKLINEKKEDGKVFWQNLAGYKRQEALRPYLSSEEDRKKGKKFARYQLGDLLLHLEKKHGEDWGKVYDEAWERIDKKVEGLSKHIKLEEERRSEDAQSKAALTDWLRAKASFVIEGLKEADKDEFCRCELKLQKWYGDLRGKPFAIEAENSILDISGFSKQYNCAFIWQKDGVKKLNLYLIINYFKGGKLRFKKIKPEAFEANRFYTVINKKSGEIVPMEVNFNFDDPNLIILPLAFGKRQGREFIWNDLLSLETGSLKLANGRVIEKTLYNRRTRQDEPALFVALTFERREVLDSSNIKPMNLIGVDRGENIPAVIALTDPEGCPLSRFKDSLGNPTHILRIGESYKEKQRTIQAKKEVEQRRAGGYSRKYASKAKNLADDMVRNTARDLLYYAVTQDAMLIFENLSRGFGRQGKRTFMAERQYTRMEDWLTAKLAYEGLPSKTYLSKTLAQYTSKTCSNCGFTITSADYDRVLEKLKKTATGWMTTINGKELKVEGQITYYNRYKRQNVVKDLSVELDRLSEESVNNDISSWTKGRSGEALSLLKKRFSHRPVQEKFVCLNCGFETHADEQAALNIARSWLFLRSQEYKKYQTNKTTGNTDKRAFVETWQSFYRKKLKEVWKPAV

SEQ ID NO: 30205 - protein, 979 aa, synthetic construct
  REGION 1..979: note = engineered CasX variant
QEIKRINKIRRRLVKDSNTKKAGKTRGPMKTLLVRVMTPDLRERLENLRKKPENIPQPISNTSRANLNKLLTDYTEMKKAILHVYWEEFQKDPVGLMSRVAQPASKKIDQNKLKPEMDEKGNLTTAGFACSQCGQPLFVYKLEQVSEKGKAYTNYFGRCNVAEHEKLIKLAQLKPEKDSDEAVTYSLGKFGQRALDFYSIHVTKESTHPVKPLAQIAGNRYASGPVGKALSDACMGTIASFLSKYQDIIIEHQKVVKGNQKRLESLRELAGKENLEYPSVTLPPQPHTSEGVDAYNEVIARVRMWVNLNLWQKLKLSRDDAKPLLRLKGFPSFPLVERQANEVDWWDMVCNVKKLINEKKEDGKVFWQNLAGYKRQEALRPYLSSEEDRKKGKKFARYQLGDLLLHLEKKHGEDWGKVYDEAWERIDKKVEGLSKHIKLEEERRSEDAQSKAALTDWLRAKASFVIEGLKEADKDEFCRCELKLQKWYGDLRGKPFAIEAENSILDISGFSKQYNCAFIWQKDGVKKLNLYLIINYFKGGKLRFKKIKPEAFEANRFYTVINKKSGEIVPMEVNFNFDDPNLIILPLAFGKRQGREFIWNDLLSLETGSLKLANGRVIEKTLYNRRTRQDEPALFVALTFERREVLDSSNIKPMNLIGVDRGENIPAVIALTDPEGCPLSRFKDSLGNPTHILRIGESYKEKQRTIQAKKEVEQRRAGGYSRKYASKAKNLADDMVRNTARDLLYYAVTQDAMLIFENLSRGFGRQGKRTFMAERQYTRMEDWLTAKLAYEGLPSKTYLSKTLAQYTSKTCSNCGFTITSADYDRVLEKLKKTATGWMTTINGKELKVEGQITYYNRYKRQNVVKDLSVELDRLSEESVNNDISSWTKGRSGEALSLLKKRFSHRPVQEKFVCLNCGFETHADEQAALNIARSWLFLRSQEYKKYQTNKTTGNTDKRAFVETWQSFYRKKLKEVWKPAV

SEQ ID NO: 30206 - protein, 978 aa, synthetic construct
  REGION 1..978: note = engineered CasX variant
QEIKRINKIRRRLVKDSNTKKAGKTRGPMKTLLVRVMTPDLRERLENLRKKPENIPQPISNTSRANLNKLLTDYTEMKKAILHVYWEEFQKDPVGLMSRVAQPASKKIDQNKLKPEMDEKGNLTTAGFACSQCGQPLFVYKLEQVSEKGKAYTNYFGRCNVAEHEKLILLAQLKPEKDSDEAVTYSLGKFGQRALDFYSIHVTKESTHPVKPLAQIAGNRYASPVGKALSDACMGTIASFLSKYQDIIIEHQKVVKGNQKRLESLRELAGKENLEYPSVTLPPQPHTSEGVDAYNEVIARVRMWVNLNLWQKLKLSRDDAKPLLRLKGFPSFPLVERQANEVDWWDMVCNVKKLINEKKEDGKVFWQNLAGYKRQEALRPYLSSEEDRKKGKKFARYQLGDLLLHLEKKHGEDWGKVYDEAWERIDKKVEGLSKHIKLEEERRSEDAQSKAALTDWLRAKASFVIEGLKEADKDEFCRCELKLQKWYGDLRGKPFAIEAENSILDISGFSKQYNCAFIWQKDGVKKLNLYLIINYFKGGKLRFKKIKPEAFEANRFYTVINKKSGEIVPMEVNFNFDDPNLIILPLAFGKRQGREFIWNDLLSLETGSLKLANGRVIEKTLYNRRTRQDEPALFVALTFERREVLDSSNIKPMNLIGVDRGENIPAVIALTDPEGCPLSRFKDSLGNPTHILRIGESYKEKQRTIQAKKEVEQRRAGGYSRKYASKAKNLADDMVRNTARDLLYYAVTQDAMLIFENLSRGFGRQGKRTFMAERQYTRMEDWLTAKLAYEGLPSKTYLSKTLAQYTSKTCSNCGFTITSADYDRVLEKLKKTATGWMTTINGKELKVEGQITYYNRYKRQNVVKDLSVELDRLSEESVNNDISSWTKGRSGEALSLLKKRFSHRPVQEKFVCLNCGFETHADEQAALNIARSWLFLRSQEYKKYQTNKTTGNTDKRAFVETWQSFYRKKLKEVWKPAV

SEQ ID NO: 30207 - protein, 979 aa, synthetic construct
  REGION 1..979: note = engineered CasX variant
QEIKRINKIRRRLVKDSNTKKAGKTRGPMKTLLVRVMTPDLRERLENLRKKPENIPQPISNTSRANLNKLLTDYTEMKKAILHVYWEEFQKDPVGLMSRVAQPASKKIDQNKLKPEMDEKGNLTTAGFACSQCGQPLFVYKLEQVSEKGKAYTNYFGRCNVAEHEKLILLAQLKPEKDSDEAVTYSLGKFGQRALDFYSIHVTKESTHPVKPLAQIAGNRYASYPVGKALSDACMGTIASFLSKYQDIIIEHQKVVKGNQKRLESLRELAGKENLEYPSVTLPPQPHTKEGLDAYNEVIARVRMWVNLNLWQKLKLSRDDAKPLLRLKGFPSFPLVERQANEVDWWDMVCNVKKLINEKKEDGKVFWQNLAGYKRQEALRPYLSSEEDRKKGKKFARYQLGDLLLHLEKKHGEDWGKVYDEAWERIDKKVEGLSKHIKLEEERRSEDAQSKAALTDWLRAKASFVIEGLKEADKDEFCRCELKLQKWYGDLRGKPFAIEAENSILDISGFSKQYNCAFIWQKDGVKKLNLYLIINYFKGGKLRFKKIKPEAFEANRFYTVINKKSGEIVPMEVNFNFDDPNLIILPLAFGKRQGREFIWNDLLSLETGSLKLANGRVIEKTLYNRRTRQDEPALFVALTFERREVLDSSNIKPMNLIGVDRGENIPAVIALTDPEGCPLSRFKDSLGNPTHILRIGESYKEKQRTIQAKKEVEQRRAGGYSRKYASKAKNLADDMVRNTARDLLYYAVTQDAMLIFENLSRGFGRQGKRTFMAERQYTRMEDWLTAKLAYEGLPSKTYLSKTLAQYTSKTCSNCGFTITSADYDRVLEKLKKTATGWMTTINGKELKVEGQITYYNRYKRQNVVKDLSVELDRLSEESVNNDISSWTKGRSGEALSLLKKRFSHRPVQEKFVCLNCGFETHADEQAALNIARSWLFLRSQEYKKYQTNKTTGNTDKRAFVETWQSFYRKKLKEVWKPAV

SEQ ID NO: 30208 - protein, 979 aa, synthetic construct
  REGION 1..979: note = engineered CasX variant
QEIKRINKIRRRLVKDSNTKKAGKTRGPMKTLLVRVMTPDLRERLENLRKKPENIPQPISNTSRANLNKLLTDYTEMKKAILHVYWEEFQKDPVGLMSRVAQPASKKIDQNKLKPEMDEKGNLTTAGFACSQCGQPLFVYKLEQVSEKGKAYTNYFGRCNVAEHEKLILLAQLKPEKDSDEAVTYSLGKFGQRALDFYSIHVTKESTHPVKPLAQIAGNRYASHPVGKALSDACMGTIASFLSKYQDIIIEHQKVVKGNQKRLESLRELAGKENLEYPSVTLPPQPHTKEGLDAYNEVIARVRMWVNLNLWQKLKLSRDDAKPLLRLKGFPSFPLVERQANEVDWWDMVCNVKKLINEKKEDGKVFWQNLAGYKRQEALRPYLSSEEDRKKGKKFARYQLGDLLLHLEKKHGEDWGKVYDEAWERIDKKVEGLSKHIKLEEERRSEDAQSKAALTDWLRAKASFVIEGLKEADKDEFCRCELKLQKWYGDLRGKPFAIEAENSILDISGFSKQYNCAFIWQKDGVKKLNLYLIINYFKGGKLRFKKIKPEAFEANRFYTVINKKSGEIVPMEVNFNFDDPNLIILPLAFGKRQGREFIWNDLLSLETGSLKLANGRVIEKTLYNRRTRQDEPALFVALTFERREVLDSSNIKPMNLIGVDRGENIPAVIALTDPEGCPLSRFKDSLGNPTHILRIGESYKEKQRTIQAKKEVEQRRAGGYSRKYASKAKNLADDMVRNTARDLLYYAVTQDAMLIFENLSRGFGRQGKRTFMAERQYTRMEDWLTAKLAYEGLPSKTYLSKTLAQYTSKTCSNCGFTITSADYDRVLEKLKKTATGWMTTINGKELKVEGQITYYNRYKRQNVVKDLSVELDRLSEESVNNDISSWTKGRSGEALSLLKKRFSHRPVQEKFVCLNCGFETHADEQAALNIARSWLFLRSQEYKKYQTNKTTGNTDKRAFVETWQSFYRKKLKEVWKPAV

SEQ ID NO: 30209 - protein, 979 aa, synthetic construct
  REGION 1..979: note = engineered CasX variant
QEIKRINKIRRRLVKDSNTKKAGKTRGPMKTLLVRVMTPDLRERLENLRKKPENIPQPISNTSRANLNKLLTDYTEMKKAILHVYWEEFQKDPVGLMSRVAQPASKKIDQNKLKPEMDEKGNLTTAGFACSQCGQPLFVYKLEQVSEKGKAYTNYFGRCNVAEHEKLILLAQLKPEKDSDEAVTYSLGKFGQRALDFYSIHVTKESTHPVKPLAQIAGNRYASSPVGKALSDACMGTIASFLSKYQDIIIEHQKVVKGNQKRLESLRELAGKENLEYPSVTLPPQPHTKEGLDAYNEVIARVRMWVNLNLWQKLKLSRDDAKPLLRLKGFPSFPLVERQANEVDWWDMVCNVKKLINEKKEDGKVFWQNLAGYKRQEALRPYLSSEEDRKKGKKFARYQLGDLLLHLEKKHGEDWGKVYDEAWERIDKKVEGLSKHIKLEEERRSEDAQSKAALTDWLRAKASFVIEGLKEADKDEFCRCELKLQKWYGDLRGKPFAIEAENSILDISGFSKQYNCAFIWQKDGVKKLNLYLIINYFKGGKLRFKKIKPEAFEANRFYTVINKKSGEIVPMEVNFNFDDPNLIILPLAFGKRQGREFIWNDLLSLETGSLKLANGRVIEKTLYNRRTRQDEPALFVALTFERREVLDSSNIKPMNLIGVDRGENIPAVIALTDPEGCPLSRFKDSLGNPTHILRIGESYKEKQRTIQAKKEVEQRRAGGYSRKYASKAKNLADDMVRNTARDLLYYAVTQDAMLIFENLSRGFGRQGKRTFMAERQYTRMEDWLTAKLAYEGLPSKTYLSKTLAQYTSKTCSNCGFTITSADYDRVLEKLKKTATGWMTTINGKELKVEGQITYYNRYKRQNVVKDLSVELDRLSEESVNNDISSWTKGRSGEALSLLKKRFSHRPVQEKFVCLNCGFETHADEQAALNIARSWLFLRSQEYKKYQTNKTTGNTDKRAFVETWQSFYRKKLKEVWKPAV

SEQ ID NO: 30210 - protein, 979 aa, synthetic construct
  REGION 1..979: note = engineered CasX variant
QEIKRINKIRRRLVKDSNTKKAGKTRGPMKTLLVRVMTPDLRERLENLRKKPENIPQPISNTSRANLNKLLTDYTEMKKAILHVYWEEFQKDPVGLMSRVAQPASKKIDQNKLKPEMDEKGNLTTAGFACSQCGQPLFVYKLEQVSEKGKAYTNYFGRCNVAEHEKLILLAQLKPEKDSDEAVTYSLGKFGQRALDFYSIHVTKESTHPVKPLAQIAGNRYASTPVGKALSDACMGTIASFLSKYQDIIIEHQKVVKGNQKRLESLRELAGKENLEYPSVTLPPQPHTKEGLDAYNEVIARVRMWVNLNLWQKLKLSRDDAKPLLRLKGFPSFPLVERQANEVDWWDMVCNVKKLINEKKEDGKVFWQNLAGYKRQEALRPYLSSEEDRKKGKKFARYQLGDLLLHLEKKHGEDWGKVYDEAWERIDKKVEGLSKHIKLEEERRSEDAQSKAALTDWLRAKASFVIEGLKEADKDEFCRCELKLQKWYGDLRGKPFAIEAENSILDISGFSKQYNCAFIWQKDGVKKLNLYLIINYFKGGKLRFKKIKPEAFEANRFYTVINKKSGEIVPMEVNFNFDDPNLIILPLAFGKRQGREFIWNDLLSLETGSLKLANGRVIEKTLYNRRTRQDEPALFVALTFERREVLDSSNIKPMNLIGVDRGENIPAVIALTDPEGCPLSRFKDSLGNPTHILRIGESYKEKQRTIQAKKEVEQRRAGGYSRKYASKAKNLADDMVRNTARDLLYYAVTQDAMLIFENLSRGFGRQGKRTFMAERQYTRMEDWLTAKLAYEGLPSKTYLSKTLAQYTSKTCSNCGFTITSADYDRVLEKLKKTATGWMTTINGKELKVEGQITYYNRYKRQNVVKDLSVELDRLSEESVNNDISSWTKGRSGEALSLLKKRFSHRPVQEKFVCLNCGFETHADEQAALNIARSWLFLRSQEYKKYQTNKTTGNTDKRAFVETWQSFYRKKLKEVWKPAV

SEQ ID NO: 30211 - protein, 979 aa, synthetic construct
  REGION 1..979: note = engineered CasX variant
QEIKRINKIRRRLVKDSNTKKAGKTRGPMKTLLVRVMTPDLRERLENLRKKPENIPQPISNTSRANLNKLLTDYTEMKKAILHVYWEEFQKDPVGLMSRVAQPASKKIDQNKLKPEMDEKGNLTTAGFACSQCGQPLFVYKLEQVSEKGKAYTNYFGRCNVAEHEKLILLAQLKPEKDSDEAVTYSLGKFGQRALDFYSIHVTKESTHPVKPLAQIAGNRYASAPVGKALSDACMGTIASFLSKYQDIIIEHQKVVKGNQKRLESLRELAGKENLEYPSVTLPPQPHTKEGLDAYNEVIARVRMWVNLNLWQKLKLSRDDAKPLLRLKGFPSFPLVERQANEVDWWDMVCNVKKLINEKKEDGKVFWQNLAGYKRQEALRPYLSSEEDRKKGKKFARYQLGDLLLHLEKKHGEDWGKVYDEAWERIDKKVEGLSKHIKLEEERRSEDAQSKAALTDWLRAKASFVIEGLKEADKDEFCRCELKLQKWYGDLRGKPFAIEAENSILDISGFSKQYNCAFIWQKDGVKKLNLYLIINYFKGGKLRFKKIKPEAFEANRFYTVINKKSGEIVPMEVNFNFDDPNLIILPLAFGKRQGREFIWNDLLSLETGSLKLANGRVIEKTLYNRRTRQDEPALFVALTFERREVLDSSNIKPMNLIGVDRGENIPAVIALTDPEGCPLSRFKDSLGNPTHILRIGESYKEKQRTIQAKKEVEQRRAGGYSRKYASKAKNLADDMVRNTARDLLYYAVTQDAMLIFENLSRGFGRQGKRTFMAERQYTRMEDWLTAKLAYEGLPSKTYLSKTLAQYTSKTCSNCGFTITSADYDRVLEKLKKTATGWMTTINGKELKVEGQITYYNRYKRQNVVKDLSVELDRLSEESVNNDISSWTKGRSGEALSLLKKRFSHRPVQEKFVCLNCGFETHADEQAALNIARSWLFLRSQEYKKYQTNKTTGNTDKRAFVETWQSFYRKKLKEVWKPAV

SEQ ID NO: 30212 - protein, 979 aa, synthetic construct
  REGION 1..979: note = engineered CasX variant
QEIKRINKIRRRLVKDSNTKKAGKTRGPMKTLLVRVMTPDLRERLENLRKKPENIPQPISNTSRANLNKLLTDYTEMKKAILHVYWEEFQKDPVGLMSRVAQPASKKIDQNKLKPEMDEKGNLTTAGFACSQCGQPLFVYKLEQVSEKGKAYTNYFGRCNVAEHEKLILLAQLKPEKDSDEAVTYSLGKFGQRALDFYSIHVTKESTHPVKPLAQIAGNRYASVPVGKALSDACMGTIASFLSKYQDIIIEHQKVVKGNQKRLESLRELAGKENLEYPSVTLPPQPHTKEGLDAYNEVIARVRMWVNLNLWQKLKLSRDDAKPLLRLKGFPSFPLVERQANEVDWWDMVCNVKKLINEKKEDGKVFWQNLAGYKRQEALRPYLSSEEDRKKGKKFARYQLGDLLLHLEKKHGEDWGKVYDEAWERIDKKVEGLSKHIKLEEERRSEDAQSKAALTDWLRAKASFVIEGLKEADKDEFCRCELKLQKWYGDLRGKPFAIEAENSILDISGFSKQYNCAFIWQKDGVKKLNLYLIINYFKGGKLRFKKIKPEAFEANRFYTVINKKSGEIVPMEVNFNFDDPNLIILPLAFGKRQGREFIWNDLLSLETGSLKLANGRVIEKTLYNRRTRQDEPALFVALTFERREVLDSSNIKPMNLIGVDRGENIPAVIALTDPEGCPLSRFKDSLGNPTHILRIGESYKEKQRTIQAKKEVEQRRAGGYSRKYASKAKNLADDMVRNTARDLLYYAVTQDAMLIFENLSRGFGRQGKRTFMAERQYTRMEDWLTAKLAYEGLPSKTYLSKTLAQYTSKTCSNCGFTITSADYDRVLEKLKKTATGWMTTINGKELKVEGQITYYNRYKRQNVVKDLSVELDRLSEESVNNDISSWTKGRSGEALSLLKKRFSHRPVQEKFVCLNCGFETHADEQAALNIARSWLFLRSQEYKKYQTNKTTGNTDKRAFVETWQSFYRKKLKEVWKPAV

SEQ ID NO: 30213 - protein, 979 aa, synthetic construct
  REGION 1..979: note = engineered CasX variant
QEIKRINKIRRRLVKDSNTKKAGKTRGPMKTLLVRVMTPDLRERLENLRKKPENIPQPISNTSRANLNKLLTDYTEMKKAILHVYWEEFQKDPVGLMSRVAQPASKKIDQNKLKPEMDEKGNLTTAGFACSQCGQPLFVYKLEQVSEKGKAYTNYFGRCNVAEHEKLIKLAQLKPEKDSDEAVTYSLGKFGQRALDFYSIHVTKESTHPVKPLAQIAGNRYASGPVGKALSDACMGTIASFLSKYQDIIIEHQKVVKGNQKRLESLRELAGKENLEYPSVTLPPQPHTKEGLDAYNEVIARVRMWVNLNLWQKLKLSRDDAKPLLRLKGFPSFPLVERQANEVDWWDMVCNVKKLINEKKEDGKVFWQNLAGYKRQEALRPYLSSEEDRKKGKKFARYQLGDLLLHLEKKHGEDWGKVYDEAWERIDKKVEGLSKHIKLEEERRSEDAQSKAALTDWLRAKASFVIEGLKEADKDEFCRCELKLQKWYGDLRGKPFAIEAENSILDISGFSKQYNCAFIWQKDGVKKLNLYLIINYFKGGKLRFKKIKPEAFEANRFYTVINKKSGEIVPMEVNFNFDDPNLIILPLAFGKRQGREFIWNDLLSLETGSLKLANGRVIEKTLYNRRTRQDEPALFVALTFERREVLDSSNIKPMNLIGVDRGENIPAVIALTDPEGCPLSRFKDSLGNPTHILRIGESYKEKQRTIQAKKEVEQRRAGGYSRKYASKAKNLADDMVRNTARDLLYYAVTQDAMLIFENLSRGFGRQGKRTFMAERQYTRMEDWLTAKLAYEGLPSKTYLSKTLAQYTSKTCSNCGFTITSADYDRVLEKLKKTATGWMTTINGKELKVEGQITYYNRYKRQNVVKDLSVELDRLSEESVNNDISSWTKGRSGEALSLLKKRFSHRPVQEKFVCLNCGFETHADEQAALNIARSWLFLRSQEYKKYQTNKTTGNTDKRAFVETWQSFYRKKLKEVWKPAV

SEQ ID NO: 30214 - protein, 978 aa, synthetic construct
  REGION 1..978: note = engineered CasX variant
QEIKRINKIRRRLVKDSNTKKAGKTRGPMKTLLVRVMTPDLRERLENLRKKPENIPQPISNTSRANLNKLLTDYTEMKKAILHVYWEEFQKDPVGLMSRVAQPASKKIDQNKLKPEMDEKGNLTTAGFACSQCGQPLFVYKLEQVSEKGKAYTNYFGRCNVAEHEKLILLAQLKPEKDSDEAVTYSLGKFGQRALDFYSIHVTKESTHPVKPLAQIAGNRYASPVGKALSDACMGTIASFLSKYQDIIIEHQKVVKGNQKRLESLRELAGKENLEYPSVTLPPQPHTKEGLDAYNEVIARVRMWVNLNLWQKLKLSRDDAKPLLRLKGFPSFPLVERQANEVDWWDMVCNVKKLINEKKEDGKVFWQNLAGYKRQEALRPYLSSEEDRKKGKKFARYQLGDLLLHLEKKHGEDWGKVYDEAWERIDKKVEGLSKHIKLEEERRSEDAQSKAALTDWLRAKASFVIEGLKEADKDEFCRCELKLQKWYGDLRGKPFAIEAENSILDISGFSKQYNCAFIWQKDGVKKLNLYLIINYFKGGKLRFKKIKPEAFEANRFYTVINKKSGEIVPMEVNFNFDDPNLIILPLAFGKRQGREFIWNDLLSLETGSLKLANGRVIEKTLYNRRTRQDEPALFVALTFERREVLDSSNIKPMNLIGVDRGENIPAVIALTDPEGCPLSRFKDSLGNPTHILRIGESYKEKQRTIQAKKEVEQRRAGGYSRKYASKAKNLADDMVRNTARDLLYYAVTQDAMLIFENLSRGFGRQGKRTFMAERQYTRMEDWLTAKLAYEGLPSKTYLSKTLAQYTSKTCSNCGFTITSADYDRVLEKLKKTATGWMTTINGKELKVEGQITYYNRYKRQNVVKDLSVELDRLSEESVNNDISSWTKGRSGEALSLLKKRFSHRPVQEKFVCLNCGFETHADEQAALNIARSWLFLRSQEYKKYQTNKTTGNTDKRAFVETWQSFYRKKLKEVWKPAV

SEQ ID NO: 30215 - protein, 979 aa, synthetic construct
  REGION 1..979: note = engineered CasX variant
QEIKRINKIRRRLVKDSNTKKAGKTRGPMKTLLVRVMTPDLRERLENLRKKPENIPQPISNTSRANLNKLLTDYTEMKKAILHVYWEEFQKDPVGLMSRVAQPASKKIDQNKLKPEMDEKGNLTTAGFACSQCGQPLFVYKLEQVSEKGKAYTNYFGRCNVAEHEKLILLAQLKPEKDSDEAVTYSLGKFGQRALDFYSIHVTKESTHPVKPLAQIAGNRYASYPVGKALSDACMGTIASFLSKYQDIIIEHQKVVKGNQKRLESLRELAGKENLEYPSVTLPPQPHTKEGVDAYNEVIARVRTWVNLNLWQKLKLSRDDAKPLLRLKGFPSFPLVERQANEVDWWDMVCNVKKLINEKKEDGKVFWQNLAGYKRQEALRPYLSSEEDRKKGKKFARYQLGDLLLHLEKKHGEDWGKVYDEAWERIDKKVEGLSKHIKLEEERRSEDAQSKAALTDWLRAKASFVIEGLKEADKDEFCRCELKLQKWYGDLRGKPFAIEAENSILDISGFSKQYNCAFIWQKDGVKKLNLYLIINYFKGGKLRFKKIKPEAFEANRFYTVINKKSGEIVPMEVNFNFDDPNLIILPLAFGKRQGREFIWNDLLSLETGSLKLANGRVIEKTLYNRRTRQDEPALFVALTFERREVLDSSNIKPMNLIGVDRGENIPAVIALTDPEGCPLSRFKDSLGNPTHILRIGESYKEKQRTIQAKKEVEQRRAGGYSRKYASKAKNLADDMVRNTARDLLYYAVTQDAMLIFENLSRGFGRQGKRTFMAERQYTRMEDWLTAKLAYEGLPSKTYLSKTLAQYTSKTCSNCGFTITSADYDRVLEKLKKTATGWMTTINGKELKVEGQITYYNRYKRQNVVKDLSVELDRLSEESVNNDISSWTKGRSGEALSLLKKRFSHRPVQEKFVCLNCGFETHADEQAALNIARSWLFLRSQEYKKYQTNKTTGNTDKRAFVETWQSFYRKKLKEVWKPAV

SEQ ID NO: 30216 - protein, 979 aa, synthetic construct
  REGION 1..979: note = engineered CasX variant
QEIKRINKIRRRLVKDSNTKKAGKTRGPMKTLLVRVMTPDLRERLENLRKKPENIPQPISNTSRANLNKLLTDYTEMKKAILHVYWEEFQKDPVGLMSRVAQPASKKIDQNKLKPEMDEKGNLTTAGFACSQCGQPLFVYKLEQVSEKGKAYTNYFGRCNVAEHEKLILLAQLKPEKDSDEAVTYSLGKFGQRALDFYSIHVTKESTHPVKPLAQIAGNRYASHPVGKALSDACMGTIASFLSKYQDIIIEHQKVVKGNQKRLESLRELAGKENLEYPSVTLPPQPHTKEGVDAYNEVIARVRTWVNLNLWQKLKLSRDDAKPLLRLKGFPSFPLVERQANEVDWWDMVCNVKKLINEKKEDGKVFWQNLAGYKRQEALRPYLSSEEDRKKGKKFARYQLGDLLLHLEKKHGEDWGKVYDEAWERIDKKVEGLSKHIKLEEERRSEDAQSKAALTDWLRAKASFVIEGLKEADKDEFCRCELKLQKWYGDLRGKPFAIEAENSILDISGFSKQYNCAFIWQKDGVKKLNLYLIINYFKGGKLRFKKIKPEAFEANRFYTVINKKSGEIVPMEVNFNFDDPNLIILPLAFGKRQGREFIWNDLLSLETGSLKLANGRVIEKTLYNRRTRQDEPALFVALTFERREVLDSSNIKPMNLIGVDRGENIPAVIALTDPEGCPLSRFKDSLGNPTHILRIGESYKEKQRTIQAKKEVEQRRAGGYSRKYASKAKNLADDMVRNTARDLLYYAVTQDAMLIFENLSRGFGRQGKRTFMAERQYTRMEDWLTAKLAYEGLPSKTYLSKTLAQYTSKTCSNCGFTITSADYDRVLEKLKKTATGWMTTINGKELKVEGQITYYNRYKRQNVVKDLSVELDRLSEESVNNDISSWTKGRSGEALSLLKKRFSHRPVQEKFVCLNCGFETHADEQAALNIARSWLFLRSQEYKKYQTNKTTGNTDKRAFVETWQSFYRKKLKEVWKPAV

SEQ ID NO: 30217 - protein, 979 aa, synthetic construct
  REGION 1..979: note = engineered CasX variant
QEIKRINKIRRRLVKDSNTKKAGKTRGPMKTLLVRVMTPDLRERLENLRKKPENIPQPISNTSRANLNKLLTDYTEMKKAILHVYWEEFQKDPVGLMSRVAQPASKKIDQNKLKPEMDEKGNLTTAGFACSQCGQPLFVYKLEQVSEKGKAYTNYFGRCNVAEHEKLILLAQLKPEKDSDEAVTYSLGKFGQRALDFYSIHVTKESTHPVKPLAQIAGNRYASSPVGKALSDACMGTIASFLSKYQDIIIEHQKVVKGNQKRLESLRELAGKENLEYPSVTLPPQPHTKEGVDAYNEVIARVRTWVNLNLWQKLKLSRDDAKPLLRLKGFPSFPLVERQANEVDWWDMVCNVKKLINEKKEDGKVFWQNLAGYKRQEALRPYLSSEEDRKKGKKFARYQLGDLLLHLEKKHGEDWGKVYDEAWERIDKKVEGLSKHIKLEEERRSEDAQSKAALTDWLRAKASFVIEGLKEADKDEFCRCELKLQKWYGDLRGKPFAIEAENSILDISGFSKQYNCAFIWQKDGVKKLNLYLIINYFKGGKLRFKKIKPEAFEANRFYTVINKKSGEIVPMEVNFNFDDPNLIILPLAFGKRQGREFIWNDLLSLETGSLKLANGRVIEKTLYNRRTRQDEPALFVALTFERREVLDSSNIKPMNLIGVDRGENIPAVIALTDPEGCPLSRFKDSLGNPTHILRIGESYKEKQRTIQAKKEVEQRRAGGYSRKYASKAKNLADDMVRNTARDLLYYAVTQDAMLIFENLSRGFGRQGKRTFMAERQYTRMEDWLTAKLAYEGLPSKTYLSKTLAQYTSKTCSNCGFTITSADYDRVLEKLKKTATGWMTTINGKELKVEGQITYYNRYKRQNVVKDLSVELDRLSEESVNNDISSWTKGRSGEALSLLKKRFSHRPVQEKFVCLNCGFETHADEQAALNIARSWLFLRSQEYKKYQTNKTTGNTDKRAFVETWQSFYRKKLKEVWKPAV

SEQ ID NO: 30218 - protein, 979 aa, synthetic construct
  REGION 1..979: note = engineered CasX variant
QEIKRINKIRRRLVKDSNTKKAGKTRGPMKTLLVRVMTPDLRERLENLRKKPENIPQPISNTSRANLNKLLTDYTEMKKAILHVYWEEFQKDPVGLMSRVAQPASKKIDQNKLKPEMDEKGNLTTAGFACSQCGQPLFVYKLEQVSEKGKAYTNYFGRCNVAEHEKLILLAQLKPEKDSDEAVTYSLGKFGQRALDFYSIHVTKESTHPVKPLAQIAGNRYASTPVGKALSDACMGTIASFLSKYQDIIIEHQKVVKGNQKRLESLRELAGKENLEYPSVTLPPQPHTKEGVDAYNEVIARVRTWVNLNLWQKLKLSRDDAKPLLRLKGFPSFPLVERQANEVDWWDMVCNVKKLINEKKEDGKVFWQNLAGYKRQEALRPYLSSEEDRKKGKKFARYQLGDLLLHLEKKHGEDWGKVYDEAWERIDKKVEGLSKHIKLEEERRSEDAQSKAALTDWLRAKASFVIEGLKEADKDEFCRCELKLQKWYGDLRGKPFAIEAENSILDISGFSKQYNCAFIWQKDGVKKLNLYLIINYFKGGKLRFKKIKPEAFEANRFYTVINKKSGEIVPMEVNFNFDDPNLIILPLAFGKRQGREFIWNDLLSLETGSLKLANGRVIEKTLYNRRTRQDEPALFVALTFERREVLDSSNIKPMNLIGVDRGENIPAVIALTDPEGCPLSRFKDSLGNPTHILRIGESYKEKQRTIQAKKEVEQRRAGGYSRKYASKAKNLADDMVRNTARDLLYYAVTQDAMLIFENLSRGFGRQGKRTFMAERQYTRMEDWLTAKLAYEGLPSKTYLSKTLAQYTSKTCSNCGFTITSADYDRVLEKLKKTATGWMTTINGKELKVEGQITYYNRYKRQNVVKDLSVELDRLSEESVNNDISSWTKGRSGEALSLLKKRFSHRPVQEKFVCLNCGFETHADEQAALNIARSWLFLRSQEYKKYQTNKTTGNTDKRAFVETWQSFYRKKLKEVWKPAV

SEQ ID NO: 30219 - protein, 979 aa, synthetic construct
  REGION 1..979: note = engineered CasX variant
QEIKRINKIRRRLVKDSNTKKAGKTRGPMKTLLVRVMTPDLRERLENLRKKPENIPQPISNTSRANLNKLLTDYTEMKKAILHVYWEEFQKDPVGLMSRVAQPASKKIDQNKLKPEMDEKGNLTTAGFACSQCGQPLFVYKLEQVSEKGKAYTNYFGRCNVAEHEKLILLAQLKPEKDSDEAVTYSLGKFGQRALDFYSIHVTKESTHPVKPLAQIAGNRYASAPVGKALSDACMGTIASFLSKYQDIIIEHQKVVKGNQKRLESLRELAGKENLEYPSVTLPPQPHTKEGVDAYNEVIARVRTWVNLNLWQKLKLSRDDAKPLLRLKGFPSFPLVERQANEVDWWDMVCNVKKLINEKKEDGKVFWQNLAGYKRQEALRPYLSSEEDRKKGKKFARYQLGDLLLHLEKKHGEDWGKVYDEAWERIDKKVEGLSKHIKLEEERRSEDAQSKAALTDWLRAKASFVIEGLKEADKDEFCRCELKLQKWYGDLRGKPFAIEAENSILDISGFSKQYNCAFIWQKDGVKKLNLYLIINYFKGGKLRFKKIKPEAFEANRFYTVINKKSGEIVPMEVNFNFDDPNLIILPLAFGKRQGREFIWNDLLSLETGSLKLANGRVIEKTLYNRRTRQDEPALFVALTFERREVLDSSNIKPMNLIGVDRGENIPAVIALTDPEGCPLSRFKDSLGNPTHILRIGESYKEKQRTIQAKKEVEQRRAGGYSRKYASKAKNLADDMVRNTARDLLYYAVTQDAMLIFENLSRGFGRQGKRTFMAERQYTRMEDWLTAKLAYEGLPSKTYLSKTLAQYTSKTCSNCGFTITSADYDRVLEKLKKTATGWMTTINGKELKVEGQITYYNRYKRQNVVKDLSVELDRLSEESVNNDISSWTKGRSGEALSLLKKRFSHRPVQEKFVCLNCGFETHADEQAALNIARSWLFLRSQEYKKYQTNKTTGNTDKRAFVETWQSFYRKKLKEVWKPAV

SEQ ID NO: 30220 - protein, 979 aa, synthetic construct
  REGION 1..979: note = engineered CasX variant
QEIKRINKIRRRLVKDSNTKKAGKTRGPMKTLLVRVMTPDLRERLENLRKKPENIPQPISNTSRANLNKLLTDYTEMKKAILHVYWEEFQKDPVGLMSRVAQPASKKIDQNKLKPEMDEKGNLTTAGFACSQCGQPLFVYKLEQVSEKGKAYTNYFGRCNVAEHEKLILLAQLKPEKDSDEAVTYSLGKFGQRALDFYSIHVTKESTHPVKPLAQIAGNRYASVPVGKALSDACMGTIASFLSKYQDIIIEHQKVVKGNQKRLESLRELAGKENLEYPSVTLPPQPHTKEGVDAYNEVIARVRTWVNLNLWQKLKLSRDDAKPLLRLKGFPSFPLVERQANEVDWWDMVCNVKKLINEKKEDGKVFWQNLAGYKRQEALRPYLSSEEDRKKGKKFARYQLGDLLLHLEKKHGEDWGKVYDEAWERIDKKVEGLSKHIKLEEERRSEDAQSKAALTDWLRAKASFVIEGLKEADKDEFCRCELKLQKWYGDLRGKPFAIEAENSILDISGFSKQYNCAFIWQKDGVKKLNLYLIINYFKGGKLRFKKIKPEAFEANRFYTVINKKSGEIVPMEVNFNFDDPNLIILPLAFGKRQGREFIWNDLLSLETGSLKLANGRVIEKTLYNRRTRQDEPALFVALTFERREVLDSSNIKPMNLIGVDRGENIPAVIALTDPEGCPLSRFKDSLGNPTHILRIGESYKEKQRTIQAKKEVEQRRAGGYSRKYASKAKNLADDMVRNTARDLLYYAVTQDAMLIFENLSRGFGRQGKRTFMAERQYTRMEDWLTAKLAYEGLPSKTYLSKTLAQYTSKTCSNCGFTITSADYDRVLEKLKKTATGWMTTINGKELKVEGQITYYNRYKRQNVVKDLSVELDRLSEESVNNDISSWTKGRSGEALSLLKKRFSHRPVQEKFVCLNCGFETHADEQAALNIARSWLFLRSQEYKKYQTNKTTGNTDKRAFVETWQSFYRKKLKEVWKPAV

SEQ ID NO: 30221 - protein, 979 aa, synthetic construct
  REGION 1..979: note = engineered CasX variant
QEIKRINKIRRRLVKDSNTKKAGKTRGPMKTLLVRVMTPDLRERLENLRKKPENIPQPISNTSRANLNKLLTDYTEMKKAILHVYWEEFQKDPVGLMSRVAQPASKKIDQNKLKPEMDEKGNLTTAGFACSQCGQPLFVYKLEQVSEKGKAYTNYFGRCNVAEHEKLIKLAQLKPEKDSDEAVTYSLGKFGQRALDFYSIHVTKESTHPVKPLAQIAGNRYASGPVGKALSDACMGTIASFLSKYQDIIIEHQKVVKGNQKRLESLRELAGKENLEYPSVTLPPQPHTKEGVDAYNEVIARVRTWVNLNLWQKLKLSRDDAKPLLRLKGFPSFPLVERQANEVDWWDMVCNVKKLINEKKEDGKVFWQNLAGYKRQEALRPYLSSEEDRKKGKKFARYQLGDLLLHLEKKHGEDWGKVYDEAWERIDKKVEGLSKHIKLEEERRSEDAQSKAALTDWLRAKASFVIEGLKEADKDEFCRCELKLQKWYGDLRGKPFAIEAENSILDISGFSKQYNCAFIWQKDGVKKLNLYLIINYFKGGKLRFKKIKPEAFEANRFYTVINKKSGEIVPMEVNFNFDDPNLIILPLAFGKRQGREFIWNDLLSLETGSLKLANGRVIEKTLYNRRTRQDEPALFVALTFERREVLDSSNIKPMNLIGVDRGENIPAVIALTDPEGCPLSRFKDSLGNPTHILRIGESYKEKQRTIQAKKEVEQRRAGGYSRKYASKAKNLADDMVRNTARDLLYYAVTQDAMLIFENLSRGFGRQGKRTFMAERQYTRMEDWLTAKLAYEGLPSKTYLSKTLAQYTSKTCSNCGFTITSADYDRVLEKLKKTATGWMTTINGKELKVEGQITYYNRYKRQNVVKDLSVELDRLSEESVNNDISSWTKGRSGEALSLLKKRFSHRPVQEKFVCLNCGFETHADEQAALNIARSWLFLRSQEYKKYQTNKTTGNTDKRAFVETWQSFYRKKLKEVWKPAV

SEQ ID NO: 30222 - protein, 978 aa, synthetic construct
  REGION 1..978: note = engineered CasX variant
QEIKRINKIRRRLVKDSNTKKAGKTRGPMKTLLVRVMTPDLRERLENLRKKPENIPQPISNTSRANLNKLLTDYTEMKKAILHVYWEEFQKDPVGLMSRVAQPASKKIDQNKLKPEMDEKGNLTTAGFACSQCGQPLFVYKLEQVSEKGKAYTNYFGRCNVAEHEKLILLAQLKPEKDSDEAVTYSLGKFGQRALDFYSIHVTKESTHPVKPLAQIAGNRYASPVGKALSDACMGTIASFLSKYQDIIIEHQKVVKGNQKRLESLRELAGKENLEYPSVTLPPQPHTKEGVDAYNEVIARVRTWVNLNLWQKLKLSRDDAKPLLRLKGFPSFPLVERQANEVDWWDMVCNVKKLINEKKEDGKVFWQNLAGYKRQEALRPYLSSEEDRKKGKKFARYQLGDLLLHLEKKHGEDWGKVYDEAWERIDKKVEGLSKHIKLEEERRSEDAQSKAALTDWLRAKASFVIEGLKEADKDEFCRCELKLQKWYGDLRGKPFAIEAENSILDISGFSKQYNCAFIWQKDGVKKLNLYLIINYFKGGKLRFKKIKPEAFEANRFYTVINKKSGEIVPMEVNFNFDDPNLIILPLAFGKRQGREFIWNDLLSLETGSLKLANGRVIEKTLYNRRTRQDEPALFVALTFERREVLDSSNIKPMNLIGVDRGENIPAVIALTDPEGCPLSRFKDSLGNPTHILRIGESYKEKQRTIQAKKEVEQRRAGGYSRKYASKAKNLADDMVRNTARDLLYYAVTQDAMLIFENLSRGFGRQGKRTFMAERQYTRMEDWLTAKLAYEGLPSKTYLSKTLAQYTSKTCSNCGFTITSADYDRVLEKLKKTATGWMTTINGKELKVEGQITYYNRYKRQNVVKDLSVELDRLSEESVNNDISSWTKGRSGEALSLLKKRFSHRPVQEKFVCLNCGFETHADEQAALNIARSWLFLRSQEYKKYQTNKTTGNTDKRAFVETWQSFYRKKLKEVWKPAV

SEQ ID NO: 30223 - protein, 979 aa, synthetic construct
  REGION 1..979: note = engineered CasX variant
QEIKRINKIRRRLVKDSNTKKAGKTRGPMKTLLVRVMTPDLRERLENLRKKPENIPQPISNTSRANLNKLLTDYTEMKKAILHVYWEEFQKDPVGLMSRVAQPASKKIDQNKLKPEMDEKGNLTTAGFACSQCGQPLFVYKLEQVSEKGKAYTNYFGRCNVAEHEKLILLAQLKPEKDSDEAVTYSLGKFGQRALDFYSIHVTKESTHPVKPLAQIAGNRYASYPVGKALSDACMGTIASFLSKYQDIIIEHQKVVKGNQKRLESLRELAGKENLEYPSVTLPPQPHTKEGVDAYNEVIARVRWWVNLNLWQKLKLSRDDAKPLLRLKGFPSFPLVERQANEVDWWDMVCNVKKLINEKKEDGKVFWQNLAGYKRQEALRPYLSSEEDRKKGKKFARYQLGDLLLHLEKKHGEDWGKVYDEAWERIDKKVEGLSKHIKLEEERRSEDAQSKAALTDWLRAKASFVIEGLKEADKDEFCRCELKLQKWYGDLRGKPFAIEAENSILDISGFSKQYNCAFIWQKDGVKKLNLYLIINYFKGGKLRFKKIKPEAFEANRFYTVINKKSGEIVPMEVNFNFDDPNLIILPLAFGKRQGREFIWNDLLSLETGSLKLANGRVIEKTLYNRRTRQDEPALFVALTFERREVLDSSNIKPMNLIGVDRGENIPAVIALTDPEGCPLSRFKDSLGNPTHILRIGESYKEKQRTIQAKKEVEQRRAGGYSRKYASKAKNLADDMVRNTARDLLYYAVTQDAMLIFENLSRGFGRQGKRTFMAERQYTRMEDWLTAKLAYEGLPSKTYLSKTLAQYTSKTCSNCGFTITSADYDRVLEKLKKTATGWMTTINGKELKVEGQITYYNRYKRQNVVKDLSVELDRLSEESVNNDISSWTKGRSGEALSLLKKRFSHRPVQEKFVCLNCGFETHADEQAALNIARSWLFLRSQEYKKYQTNKTTGNTDKRAFVETWQSFYRKKLKEVWKPAV

SEQ ID NO: 30224 - protein, 979 aa, synthetic construct
  REGION 1..979: note = engineered CasX variant
QEIKRINKIRRRLVKDSNTKKAGKTRGPMKTLLVRVMTPDLRERLENLRKKPENIPQPISNTSRANLNKLLTDYTEMKKAILHVYWEEFQKDPVGLMSRVAQPASKKIDQNKLKPEMDEKGNLTTAGFACSQCGQPLFVYKLEQVSEKGKAYTNYFGRCNVAEHEKLILLAQLKPEKDSDEAVTYSLGKFGQRALDFYSIHVTKESTHPVKPLAQIAGNRYASHPVGKALSDACMGTIASFLSKYQDIIIEHQKVVKGNQKRLESLRELAGKENLEYPSVTLPPQPHTKEGVDAYNEVIARVRWWVNLNLWQKLKLSRDDAKPLLRLKGFPSFPLVERQANEVDWWDMVCNVKKLINEKKEDGKVFWQNLAGYKRQEALRPYLSSEEDRKKGKKFARYQLGDLLLHLEKKHGEDWGKVYDEAWERIDKKVEGLSKHIKLEEERRSEDAQSKAALTDWLRAKASFVIEGLKEADKDEFCRCELKLQKWYGDLRGKPFAIEAENSILDISGFSKQYNCAFIWQKDGVKKLNLYLIINYFKGGKLRFKKIKPEAFEANRFYTVINKKSGEIVPMEVNFNFDDPNLIILPLAFGKRQGREFIWNDLLSLETGSLKLANGRVIEKTLYNRRTRQDEPALFVALTFERREVLDSSNIKPMNLIGVDRGENIPAVIALTDPEGCPLSRFKDSLGNPTHILRIGESYKEKQRTIQAKKEVEQRRAGGYSRKYASKAKNLADDMVRNTARDLLYYAVTQDAMLIFENLSRGFGRQGKRTFMAERQYTRMEDWLTAKLAYEGLPSKTYLSKTLAQYTSKTCSNCGFTITSADYDRVLEKLKKTATGWMTTINGKELKVEGQITYYNRYKRQNVVKDLSVELDRLSEESVNNDISSWTKGRSGEALSLLKKRFSHRPVQEKFVCLNCGFETHADEQAALNIARSWLFLRSQEYKKYQTNKTTGNTDKRAFVETWQSFYRKKLKEVWKPAV

SEQ ID NO: 30225 - protein, 979 aa, synthetic construct
  REGION 1..979: note = engineered CasX variant
QEIKRINKIRRRLVKDSNTKKAGKTRGPMKTLLVRVMTPDLRERLENLRKKPENIPQPISNTSRANLNKLLTDYTEMKKAILHVYWEEFQKDPVGLMSRVAQPASKKIDQNKLKPEMDEKGNLTTAGFACSQCGQPLFVYKLEQVSEKGKAYTNYFGRCNVAEHEKLILLAQLKPEKDSDEAVTYSLGKFGQRALDFYSIHVTKESTHPVKPLAQIAGNRYASSPVGKALSDACMGTIASFLSKYQDIIIEHQKVVKGNQKRLESLRELAGKENLEYPSVTLPPQPHTKEGVDAYNEVIARVRWWVNLNLWQKLKLSRDDAKPLLRLKGFPSFPLVERQANEVDWWDMVCNVKKLINEKKEDGKVFWQNLAGYKRQEALRPYLSSEEDRKKGKKFARYQLGDLLLHLEKKHGEDWGKVYDEAWERIDKKVEGLSKHIKLEEERRSEDAQSKAALTDWLRAKASFVIEGLKEADKDEFCRCELKLQKWYGDLRGKPFAIEAENSILDISGFSKQYNCAFIWQKDGVKKLNLYLIINYFKGGKLRFKKIKPEAFEANRFYTVINKKSGEIVPMEVNFNFDDPNLIILPLAFGKRQGREFIWNDLLSLETGSLKLANGRVIEKTLYNRRTRQDEPALFVALTFERREVLDSSNIKPMNLIGVDRGENIPAVIALTDPEGCPLSRFKDSLGNPTHILRIGESYKEKQRTIQAKKEVEQRRAGGYSRKYASKAKNLADDMVRNTARDLLYYAVTQDAMLIFENLSRGFGRQGKRTFMAERQYTRMEDWLTAKLAYEGLPSKTYLSKTLAQYTSKTCSNCGFTITSADYDRVLEKLKKTATGWMTTINGKELKVEGQITYYNRYKRQNVVKDLSVELDRLSEESVNNDISSWTKGRSGEALSLLKKRFSHRPVQEKFVCLNCGFETHADEQAALNIARSWLFLRSQEYKKYQTNKTTGNTDKRAFVETWQSFYRKKLKEVWKPAV

SEQ ID NO: 30226 - protein, 979 aa, synthetic construct
  REGION 1..979: note = engineered CasX variant
QEIKRINKIRRRLVKDSNTKKAGKTRGPMKTLLVRVMTPDLRERLENLRKKPENIPQPISNTSRANLNKLLTDYTEMKKAILHVYWEEFQKDPVGLMSRVAQPASKKIDQNKLKPEMDEKGNLTTAGFACSQCGQPLFVYKLEQVSEKGKAYTNYFGRCNVAEHEKLILLAQLKPEKDSDEAVTYSLGKFGQRALDFYSIHVTKESTHPVKPLAQIAGNRYASTPVGKALSDACMGTIASFLSKYQDIIIEHQKVVKGNQKRLESLRELAGKENLEYPSVTLPPQPHTKEGVDAYNEVIARVRWWVNLNLWQKLKLSRDDAKPLLRLKGFPSFPLVERQANEVDWWDMVCNVKKLINEKKEDGKVFWQNLAGYKRQEALRPYLSSEEDRKKGKKFARYQLGDLLLHLEKKHGEDWGKVYDEAWERIDKKVEGLSKHIKLEEERRSEDAQSKAALTDWLRAKASFVIEGLKEADKDEFCRCELKLQKWYGDLRGKPFAIEAENSILDISGFSKQYNCAFIWQKDGVKKLNLYLIINYFKGGKLRFKKIKPEAFEANRFYTVINKKSGEIVPMEVNFNFDDPNLIILPLAFGKRQGREFIWNDLLSLETGSLKLANGRVIEKTLYNRRTRQDEPALFVALTFERREVLDSSNIKPMNLIGVDRGENIPAVIALTDPEGCPLSRFKDSLGNPTHILRIGESYKEKQRTIQAKKEVEQRRAGGYSRKYASKAKNLADDMVRNTARDLLYYAVTQDAMLIFENLSRGFGRQGKRTFMAERQYTRMEDWLTAKLAYEGLPSKTYLSKTLAQYTSKTCSNCGFTITSADYDRVLEKLKKTATGWMTTINGKELKVEGQITYYNRYKRQNVVKDLSVELDRLSEESVNNDISSWTKGRSGEALSLLKKRFSHRPVQEKFVCLNCGFETHADEQAALNIARSWLFLRSQEYKKYQTNKTTGNTDKRAFVETWQSFYRKKLKEVWKPAV

SEQ ID NO: 30227 - protein, 979 aa, synthetic construct
  REGION 1..979: note = engineered CasX variant
QEIKRINKIRRRLVKDSNTKKAGKTRGPMKTLLVRVMTPDLRERLENLRKKPENIPQPISNTSRANLNKLLTDYTEMKKAILHVYWEEFQKDPVGLMSRVAQPASKKIDQNKLKPEMDEKGNLTTAGFACSQCGQPLFVYKLEQVSEKGKAYTNYFGRCNVAEHEKLILLAQLKPEKDSDEAVTYSLGKFGQRALDFYSIHVTKESTHPVKPLAQIAGNRYASAPVGKALSDACMGTIASFLSKYQDIIIEHQKVVKGNQKRLESLRELAGKENLEYPSVTLPPQPHTKEGVDAYNEVIARVRWWVNLNLWQKLKLSRDDAKPLLRLKGFPSFPLVERQANEVDWWDMVCNVKKLINEKKEDGKVFWQNLAGYKRQEALRPYLSSEEDRKKGKKFARYQLGDLLLHLEKKHGEDWGKVYDEAWERIDKKVEGLSKHIKLEEERRSEDAQSKAALTDWLRAKASFVIEGLKEADKDEFCRCELKLQKWYGDLRGKPFAIEAENSILDISGFSKQYNCAFIWQKDGVKKLNLYLIINYFKGGKLRFKKIKPEAFEANRFYTVINKKSGEIVPMEVNFNFDDPNLIILPLAFGKRQGREFIWNDLLSLETGSLKLANGRVIEKTLYNRRTRQDEPALFVALTFERREVLDSSNIKPMNLIGVDRGENIPAVIALTDPEGCPLSRFKDSLGNPTHILRIGESYKEKQRTIQAKKEVEQRRAGGYSRKYASKAKNLADDMVRNTARDLLYYAVTQDAMLIFENLSRGFGRQGKRTFMAERQYTRMEDWLTAKLAYEGLPSKTYLSKTLAQYTSKTCSNCGFTITSADYDRVLEKLKKTATGWMTTINGKELKVEGQITYYNRYKRQNVVKDLSVELDRLSEESVNNDISSWTKGRSGEALSLLKKRFSHRPVQEKFVCLNCGFETHADEQAALNIARSWLFLRSQEYKKYQTNKTTGNTDKRAFVETWQSFYRKKLKEVWKPAV

SEQ ID NO: 30228 - protein, 979 aa, synthetic construct
  REGION 1..979: note = engineered CasX variant
QEIKRINKIRRRLVKDSNTKKAGKTRGPMKTLLVRVMTPDLRERLENLRKKPENIPQPISNTSRANLNKLLTDYTEMKKAILHVYWEEFQKDPVGLMSRVAQPASKKIDQNKLKPEMDEKGNLTTAGFACSQCGQPLFVYKLEQVSEKGKAYTNYFGRCNVAEHEKLILLAQLKPEKDSDEAVTYSLGKFGQRALDFYSIHVTKESTHPVKPLAQIAGNRYASVPVGKALSDACMGTIASFLSKYQDIIIEHQKVVKGNQKRLESLRELAGKENLEYPSVTLPPQPHTKEGVDAYNEVIARVRWWVNLNLWQKLKLSRDDAKPLLRLKGFPSFPLVERQANEVDWWDMVCNVKKLINEKKEDGKVFWQNLAGYKRQEALRPYLSSEEDRKKGKKFARYQLGDLLLHLEKKHGEDWGKVYDEAWERIDKKVEGLSKHIKLEEERRSEDAQSKAALTDWLRAKASFVIEGLKEADKDEFCRCELKLQKWYGDLRGKPFAIEAENSILDISGFSKQYNCAFIWQKDGVKKLNLYLIINYFKGGKLRFKKIKPEAFEANRFYTVINKKSGEIVPMEVNFNFDDPNLIILPLAFGKRQGREFIWNDLLSLETGSLKLANGRVIEKTLYNRRTRQDEPALFVALTFERREVLDSSNIKPMNLIGVDRGENIPAVIALTDPEGCPLSRFKDSLGNPTHILRIGESYKEKQRTIQAKKEVEQRRAGGYSRKYASKAKNLADDMVRNTARDLLYYAVTQDAMLIFENLSRGFGRQGKRTFMAERQYTRMEDWLTAKLAYEGLPSKTYLSKTLAQYTSKTCSNCGFTITSADYDRVLEKLKKTATGWMTTINGKELKVEGQITYYNRYKRQNVVKDLSVELDRLSEESVNNDISSWTKGRSGEALSLLKKRFSHRPVQEKFVCLNCGFETHADEQAALNIARSWLFLRSQEYKKYQTNKTTGNTDKRAFVETWQSFYRKKLKEVWKPAV

SEQ ID NO: 30229 - protein, 979 aa, synthetic construct
  REGION 1..979: note = engineered CasX variant
QEIKRINKIRRRLVKDSNTKKAGKTRGPMKTLLVRVMTPDLRERLENLRKKPENIPQPISNTSRANLNKLLTDYTEMKKAILHVYWEEFQKDPVGLMSRVAQPASKKIDQNKLKPEMDEKGNLTTAGFACSQCGQPLFVYKLEQVSEKGKAYTNYFGRCNVAEHEKLIKLAQLKPEKDSDEAVTYSLGKFGQRALDFYSIHVTKESTHPVKPLAQIAGNRYASGPVGKALSDACMGTIASFLSKYQDIIIEHQKVVKGNQKRLESLRELAGKENLEYPSVTLPPQPHTKEGVDAYNEVIARVRWWVNLNLWQKLKLSRDDAKPLLRLKGFPSFPLVERQANEVDWWDMVCNVKKLINEKKEDGKVFWQNLAGYKRQEALRPYLSSEEDRKKGKKFARYQLGDLLLHLEKKHGEDWGKVYDEAWERIDKKVEGLSKHIKLEEERRSEDAQSKAALTDWLRAKASFVIEGLKEADKDEFCRCELKLQKWYGDLRGKPFAIEAENSILDISGFSKQYNCAFIWQKDGVKKLNLYLIINYFKGGKLRFKKIKPEAFEANRFYTVINKKSGEIVPMEVNFNFDDPNLIILPLAFGKRQGREFIWNDLLSLETGSLKLANGRVIEKTLYNRRTRQDEPALFVALTFERREVLDSSNIKPMNLIGVDRGENIPAVIALTDPEGCPLSRFKDSLGNPTHILRIGESYKEKQRTIQAKKEVEQRRAGGYSRKYASKAKNLADDMVRNTARDLLYYAVTQDAMLIFENLSRGFGRQGKRTFMAERQYTRMEDWLTAKLAYEGLPSKTYLSKTLAQYTSKTCSNCGFTITSADYDRVLEKLKKTATGWMTTINGKELKVEGQITYYNRYKRQNVVKDLSVELDRLSEESVNNDISSWTKGRSGEALSLLKKRFSHRPVQEKFVCLNCGFETHADEQAALNIARSWLFLRSQEYKKYQTNKTTGNTDKRAFVETWQSFYRKKLKEVWKPAV

SEQ ID NO: 30230 - protein, 978 aa, synthetic construct
  REGION 1..978: note = engineered CasX variant
QEIKRINKIRRRLVKDSNTKKAGKTRGPMKTLLVRVMTPDLRERLENLRKKPENIPQPISNTSRANLNKLLTDYTEMKKAILHVYWEEFQKDPVGLMSRVAQPASKKIDQNKLKPEMDEKGNLTTAGFACSQCGQPLFVYKLEQVSEKGKAYTNYFGRCNVAEHEKLILLAQLKPEKDSDEAVTYSLGKFGQRALDFYSIHVTKESTHPVKPLAQIAGNRYASPVGKALSDACMGTIASFLSKYQDIIIEHQKVVKGNQKRLESLRELAGKENLEYPSVTLPPQPHTKEGVDAYNEVIARVRWWVNLNLWQKLKLSRDDAKPLLRLKGFPSFPLVERQANEVDWWDMVCNVKKLINEKKEDGKVFWQNLAGYKRQEALRPYLSSEEDRKKGKKFARYQLGDLLLHLEKKHGEDWGKVYDEAWERIDKKVEGLSKHIKLEEERRSEDAQSKAALTDWLRAKASFVIEGLKEADKDEFCRCELKLQKWYGDLRGKPFAIEAENSILDISGFSKQYNCAFIWQKDGVKKLNLYLIINYFKGGKLRFKKIKPEAFEANRFYTVINKKSGEIVPMEVNFNFDDPNLIILPLAFGKRQGREFIWNDLLSLETGSLKLANGRVIEKTLYNRRTRQDEPALFVALTFERREVLDSSNIKPMNLIGVDRGENIPAVIALTDPEGCPLSRFKDSLGNPTHILRIGESYKEKQRTIQAKKEVEQRRAGGYSRKYASKAKNLADDMVRNTARDLLYYAVTQDAMLIFENLSRGFGRQGKRTFMAERQYTRMEDWLTAKLAYEGLPSKTYLSKTLAQYTSKTCSNCGFTITSADYDRVLEKLKKTATGWMTTINGKELKVEGQITYYNRYKRQNVVKDLSVELDRLSEESVNNDISSWTKGRSGEALSLLKKRFSHRPVQEKFVCLNCGFETHADEQAALNIARSWLFLRSQEYKKYQTNKTTGNTDKRAFVETWQSFYRKKLKEVWKPAV

SEQ ID NO: 30231 - protein, 980 aa, synthetic construct
  REGION 1..980: note = engineered CasX variant
QEIKRINKIRRRLVKDSNTKKAGKTRGPMKTLLVRVMTPDLRERLENLRKKPENIPQPISNTSRANLNKLLTDYTEMKKAILHVYWEEFQKDPVGLMSRVAQPASKKIDQNKLKPEMDEKGNLTTAGFACSQCGQPLFVYKLEQVSEKGKAYTNYFGRCNVAEHEKLILLAQLKPEKDSDEAVTYSLGKFGQRALDFYSIHVTKESTHPVKPLAQIAGNRYASYPVGKALSDACMGTIASFLSKYQDIIIEHQKVVKGNQKRLESLRELAGKENLEYPSVTLPPQPHTKEGVDAYNEVIARVRMWVNLNLWQKLKLSRDDAKPLLRLKGFPSFPLVERQQANEVDWWDMVCNVKKLINEKKEDGKVFWQNLAGYKRQEALRPYLSSEEDRKKGKKFARYQLGDLLLHLEKKHGEDWGKVYDEAWERIDKKVEGLSKHIKLEEERRSEDAQSKAALTDWLRAKASFVIEGLKEADKDEFCRCELKLQKWYGDLRGKPFAIEAENSILDISGFSKQYNCAFIWQKDGVKKLNLYLIINYFKGGKLRFKKIKPEAFEANRFYTVINKKSGEIVPMEVNFNFDDPNLIILPLAFGKRQGREFIWNDLLSLETGSLKLANGRVIEKTLYNRRTRQDEPALFVALTFERREVLDSSNIKPMNLIGVDRGENIPAVIALTDPEGCPLSRFKDSLGNPTHILRIGESYKEKQRTIQAKKEVEQRRAGGYSRKYASKAKNLADDMVRNTARDLLYYAVTQDAMLIFENLSRGFGRQGKRTFMAERQYTRMEDWLTAKLAYEGLPSKTYLSKTLAQYTSKTCSNCGFTITSADYDRVLEKLKKTATGWMTTINGKELKVEGQITYYNRYKRQNVVKDLSVELDRLSEESVNNDISSWTKGRSGEALSLLKKRFSHRPVQEKFVCLNCGFETHADEQAALNIARSWLFLRSQEYKKYQTNKTTGNTDKRAFVETWQSFYRKKLKEVWKPAV

SEQ ID NO: 30232 - protein, 980 aa, synthetic construct
  REGION 1..980: note = engineered CasX variant
QEIKRINKIRRRLVKDSNTKKAGKTRGPMKTLLVRVMTPDLRERLENLRKKPENIPQPISNTSRANLNKLLTDYTEMKKAILHVYWEEFQKDPVGLMSRVAQPASKKIDQNKLKPEMDEKGNLTTAGFACSQCGQPLFVYKLEQVSEKGKAYTNYFGRCNVAEHEKLILLAQLKPEKDSDEAVTYSLGKFGQRALDFYSIHVTKESTHPVKPLAQIAGNRYASHPVGKALSDACMGTIASFLSKYQDIIIEHQKVVKGNQKRLESLRELAGKENLEYPSVTLPPQPHTKEGVDAYNEVIARVRMWVNLNLWQKLKLSRDDAKPLLRLKGFPSFPLVERQQANEVDWWDMVCNVKKLINEKKEDGKVFWQNLAGYKRQEALRPYLSSEEDRKKGKKFARYQLGDLLLHLEKKHGEDWGKVYDEAWERIDKKVEGLSKHIKLEEERRSEDAQSKAALTDWLRAKASFVIEGLKEADKDEFCRCELKLQKWYGDLRGKPFAIEAENSILDISGFSKQYNCAFIWQKDGVKKLNLYLIINYFKGGKLRFKKIKPEAFEANRFYTVINKKSGEIVPMEVNFNFDDPNLIILPLAFGKRQGREFIWNDLLSLETGSLKLANGRVIEKTLYNRRTRQDEPALFVALTFERREVLDSSNIKPMNLIGVDRGENIPAVIALTDPEGCPLSRFKDSLGNPTHILRIGESYKEKQRTIQAKKEVEQRRAGGYSRKYASKAKNLADDMVRNTARDLLYYAVTQDAMLIFENLSRGFGRQGKRTFMAERQYTRMEDWLTAKLAYEGLPSKTYLSKTLAQYTSKTCSNCGFTITSADYDRVLEKLKKTATGWMTTINGKELKVEGQITYYNRYKRQNVVKDLSVELDRLSEESVNNDISSWTKGRSGEALSLLKKRFSHRPVQEKFVCLNCGFETHADEQAALNIARSWLFLRSQEYKKYQTNKTTGNTDKRAFVETWQSFYRKKLKEVWKPAV

SEQ ID NO: 30233 - protein, 980 aa, synthetic construct
  REGION 1..980: note = engineered CasX variant
QEIKRINKIRRRLVKDSNTKKAGKTRGPMKTLLVRVMTPDLRERLENLRKKPENIPQPISNTSRANLNKLLTDYTEMKKAILHVYWEEFQKDPVGLMSRVAQPASKKIDQNKLKPEMDEKGNLTTAGFACSQCGQPLFVYKLEQVSEKGKAYTNYFGRCNVAEHEKLILLAQLKPEKDSDEAVTYSLGKFGQRALDFYSIHVTKESTHPVKPLAQIAGNRYASSPVGKALSDACMGTIASFLSKYQDIIIEHQKVVKGNQKRLESLRELAGKENLEYPSVTLPPQPHTKEGVDAYNEVIARVRMWVNLNLWQKLKLSRDDAKPLLRLKGFPSFPLVERQQANEVDWWDMVCNVKKLINEKKEDGKVFWQNLAGYKRQEALRPYLSSEEDRKKGKKFARYQLGDLLLHLEKKHGEDWGKVYDEAWERIDKKVEGLSKHIKLEEERRSEDAQSKAALTDWLRAKASFVIEGLKEADKDEFCRCELKLQKWYGDLRGKPFAIEAENSILDISGFSKQYNCAFIWQKDGVKKLNLYLIINYFKGGKLRFKKIKPEAFEANRFYTVINKKSGEIVPMEVNFNFDDPNLIILPLAFGKRQGREFIWNDLLSLETGSLKLANGRVIEKTLYNRRTRQDEPALFVALTFERREVLDSSNIKPMNLIGVDRGENIPAVIALTDPEGCPLSRFKDSLGNPTHILRIGESYKEKQRTIQAKKEVEQRRAGGYSRKYASKAKNLADDMVRNTARDLLYYAVTQDAMLIFENLSRGFGRQGKRTFMAERQYTRMEDWLTAKLAYEGLPSKTYLSKTLAQYTSKTCSNCGFTITSADYDRVLEKLKKTATGWMTTINGKELKVEGQITYYNRYKRQNVVKDLSVELDRLSEESVNNDISSWTKGRSGEALSLLKKRFSHRPVQEKFVCLNCGFETHADEQAALNIARSWLFLRSQEYKKYQTNKTTGNTDKRAFVETWQSFYRKKLKEVWKPAV

SEQ ID NO: 30234 - protein, 980 aa, synthetic construct
  REGION 1..980: note = engineered CasX variant
QEIKRINKIRRRLVKDSNTKKAGKTRGPMKTLLVRVMTPDLRERLENLRKKPENIPQPISNTSRANLNKLLTDYTEMKKAILHVYWEEFQKDPVGLMSRVAQPASKKIDQNKLKPEMDEKGNLTTAGFACSQCGQPLFVYKLEQVSEKGKAYTNYFGRCNVAEHEKLILLAQLKPEKDSDEAVTYSLGKFGQRALDFYSIHVTKESTHPVKPLAQIAGNRYASTPVGKALSDACMGTIASFLSKYQDIIIEHQKVVKGNQKRLESLRELAGKENLEYPSVTLPPQPHTKEGVDAYNEVIARVRMWVNLNLWQKLKLSRDDAKPLLRLKGFPSFPLVERQQANEVDWWDMVCNVKKLINEKKEDGKVFWQNLAGYKRQEALRPYLSSEEDRKKGKKFARYQLGDLLLHLEKKHGEDWGKVYDEAWERIDKKVEGLSKHIKLEEERRSEDAQSKAALTDWLRAKASFVIEGLKEADKDEFCRCELKLQKWYGDLRGKPFAIEAENSILDISGFSKQYNCAFIWQKDGVKKLNLYLIINYFKGGKLRFKKIKPEAFEANRFYTVINKKSGEIVPMEVNFNFDDPNLIILPLAFGKRQGREFIWNDLLSLETGSLKLANGRVIEKTLYNRRTRQDEPALFVALTFERREVLDSSNIKPMNLIGVDRGENIPAVIALTDPEGCPLSRFKDSLGNPTHILRIGESYKEKQRTIQAKKEVEQRRAGGYSRKYASKAKNLADDMVRNTARDLLYYAVTQDAMLIFENLSRGFGRQGKRTFMAERQYTRMEDWLTAKLAYEGLPSKTYLSKTLAQYTSKTCSNCGFTITSADYDRVLEKLKKTATGWMTTINGKELKVEGQITYYNRYKRQNVVKDLSVELDRLSEESVNNDISSWTKGRSGEALSLLKKRFSHRPVQEKFVCLNCGFETHADEQAALNIARSWLFLRSQEYKKYQTNKTTGNTDKRAFVETWQSFYRKKLKEVWKPAV

SEQ ID NO: 30235 - protein, 980 aa, synthetic construct
  REGION 1..980: note = engineered CasX variant
QEIKRINKIRRRLVKDSNTKKAGKTRGPMKTLLVRVMTPDLRERLENLRKKPENIPQPISNTSRANLNKLLTDYTEMKKAILHVYWEEFQKDPVGLMSRVAQPASKKIDQNKLKPEMDEKGNLTTAGFACSQCGQPLFVYKLEQVSEKGKAYTNYFGRCNVAEHEKLILLAQLKPEKDSDEAVTYSLGKFGQRALDFYSIHVTKESTHPVKPLAQIAGNRYASAPVGKALSDACMGTIASFLSKYQDIIIEHQKVVKGNQKRLESLRELAGKENLEYPSVTLPPQPHTKEGVDAYNEVIARVRMWVNLNLWQKLKLSRDDAKPLLRLKGFPSFPLVERQQANEVDWWDMVCNVKKLINEKKEDGKVFWQNLAGYKRQEALRPYLSSEEDRKKGKKFARYQLGDLLLHLEKKHGEDWGKVYDEAWERIDKKVEGLSKHIKLEEERRSEDAQSKAALTDWLRAKASFVIEGLKEADKDEFCRCELKLQKWYGDLRGKPFAIEAENSILDISGFSKQYNCAFIWQKDGVKKLNLYLIINYFKGGKLRFKKIKPEAFEANRFYTVINKKSGEIVPMEVNFNFDDPNLIILPLAFGKRQGREFIWNDLLSLETGSLKLANGRVIEKTLYNRRTRQDEPALFVALTFERREVLDSSNIKPMNLIGVDRGENIPAVIALTDPEGCPLSRFKDSLGNPTHILRIGESYKEKQRTIQAKKEVEQRRAGGYSRKYASKAKNLADDMVRNTARDLLYYAVTQDAMLIFENLSRGFGRQGKRTFMAERQYTRMEDWLTAKLAYEGLPSKTYLSKTLAQYTSKTCSNCGFTITSADYDRVLEKLKKTATGWMTTINGKELKVEGQITYYNRYKRQNVVKDLSVELDRLSEESVNNDISSWTKGRSGEALSLLKKRFSHRPVQEKFVCLNCGFETHADEQAALNIARSWLFLRSQEYKKYQTNKTTGNTDKRAFVETWQSFYRKKLKEVWKPAV

SEQ ID NO: 30236 - protein, 980 aa, synthetic construct
  REGION 1..980: note = engineered CasX variant
QEIKRINKIRRRLVKDSNTKKAGKTRGPMKTLLVRVMTPDLRERLENLRKKPENIPQPISNTSRANLNKLLTDYTEMKKAILHVYWEEFQKDPVGLMSRVAQPASKKIDQNKLKPEMDEKGNLTTAGFACSQCGQPLFVYKLEQVSEKGKAYTNYFGRCNVAEHEKLILLAQLKPEKDSDEAVTYSLGKFGQRALDFYSIHVTKESTHPVKPLAQIAGNRYASVPVGKALSDACMGTIASFLSKYQDIIIEHQKVVKGNQKRLESLRELAGKENLEYPSVTLPPQPHTKEGVDAYNEVIARVRMWVNLNLWQKLKLSRDDAKPLLRLKGFPSFPLVERQQANEVDWWDMVCNVKKLINEKKEDGKVFWQNLAGYKRQEALRPYLSSEEDRKKGKKFARYQLGDLLLHLEKKHGEDWGKVYDEAWERIDKKVEGLSKHIKLEEERRSEDAQSKAALTDWLRAKASFVIEGLKEADKDEFCRCELKLQKWYGDLRGKPFAIEAENSILDISGFSKQYNCAFIWQKDGVKKLNLYLIINYFKGGKLRFKKIKPEAFEANRFYTVINKKSGEIVPMEVNFNFDDPNLIILPLAFGKRQGREFIWNDLLSLETGSLKLANGRVIEKTLYNRRTRQDEPALFVALTFERREVLDSSNIKPMNLIGVDRGENIPAVIALTDPEGCPLSRFKDSLGNPTHILRIGESYKEKQRTIQAKKEVEQRRAGGYSRKYASKAKNLADDMVRNTARDLLYYAVTQDAMLIFENLSRGFGRQGKRTFMAERQYTRMEDWLTAKLAYEGLPSKTYLSKTLAQYTSKTCSNCGFTITSADYDRVLEKLKKTATGWMTTINGKELKVEGQITYYNRYKRQNVVKDLSVELDRLSEESVNNDISSWTKGRSGEALSLLKKRFSHRPVQEKFVCLNCGFETHADEQAALNIARSWLFLRSQEYKKYQTNKTTGNTDKRAFVETWQSFYRKKLKEVWKPAV

SEQ ID NO: 30237 - protein, 980 aa, synthetic construct
  REGION 1..980: note = engineered CasX variant
QEIKRINKIRRRLVKDSNTKKAGKTRGPMKTLLVRVMTPDLRERLENLRKKPENIPQPISNTSRANLNKLLTDYTEMKKAILHVYWEEFQKDPVGLMSRVAQPASKKIDQNKLKPEMDEKGNLTTAGFACSQCGQPLFVYKLEQVSEKGKAYTNYFGRCNVAEHEKLIKLAQLKPEKDSDEAVTYSLGKFGQRALDFYSIHVTKESTHPVKPLAQIAGNRYASGPVGKALSDACMGTIASFLSKYQDIIIEHQKVVKGNQKRLESLRELAGKENLEYPSVTLPPQPHTKEGVDAYNEVIARVRMWVNLNLWQKLKLSRDDAKPLLRLKGFPSFPLVERQQANEVDWWDMVCNVKKLINEKKEDGKVFWQNLAGYKRQEALRPYLSSEEDRKKGKKFARYQLGDLLLHLEKKHGEDWGKVYDEAWERIDKKVEGLSKHIKLEEERRSEDAQSKAALTDWLRAKASFVIEGLKEADKDEFCRCELKLQKWYGDLRGKPFAIEAENSILDISGFSKQYNCAFIWQKDGVKKLNLYLIINYFKGGKLRFKKIKPEAFEANRFYTVINKKSGEIVPMEVNFNFDDPNLIILPLAFGKRQGREFIWNDLLSLETGSLKLANGRVIEKTLYNRRTRQDEPALFVALTFERREVLDSSNIKPMNLIGVDRGENIPAVIALTDPEGCPLSRFKDSLGNPTHILRIGESYKEKQRTIQAKKEVEQRRAGGYSRKYASKAKNLADDMVRNTARDLLYYAVTQDAMLIFENLSRGFGRQGKRTFMAERQYTRMEDWLTAKLAYEGLPSKTYLSKTLAQYTSKTCSNCGFTITSADYDRVLEKLKKTATGWMTTINGKELKVEGQITYYNRYKRQNVVKDLSVELDRLSEESVNNDISSWTKGRSGEALSLLKKRFSHRPVQEKFVCLNCGFETHADEQAALNIARSWLFLRSQEYKKYQTNKTTGNTDKRAFVETWQSFYRKKLKEVWKPAV

SEQ ID NO: 30238 - protein, 979 aa, synthetic construct
  REGION 1..979: note = engineered CasX variant
QEIKRINKIRRRLVKDSNTKKAGKTRGPMKTLLVRVMTPDLRERLENLRKKPENIPQPISNTSRANLNKLLTDYTEMKKAILHVYWEEFQKDPVGLMSRVAQPASKKIDQNKLKPEMDEKGNLTTAGFACSQCGQPLFVYKLEQVSEKGKAYTNYFGRCNVAEHEKLILLAQLKPEKDSDEAVTYSLGKFGQRALDFYSIHVTKESTHPVKPLAQIAGNRYASPVGKALSDACMGTIASFLSKYQDIIIEHQKVVKGNQKRLESLRELAGKENLEYPSVTLPPQPHTKEGVDAYNEVIARVRMWVNLNLWQKLKLSRDDAKPLLRLKGFPSFPLVERQQANEVDWWDMVCNVKKLINEKKEDGKVFWQNLAGYKRQEALRPYLSSEEDRKKGKKFARYQLGDLLLHLEKKHGEDWGKVYDEAWERIDKKVEGLSKHIKLEEERRSEDAQSKAALTDWLRAKASFVIEGLKEADKDEFCRCELKLQKWYGDLRGKPFAIEAENSILDISGFSKQYNCAFIWQKDGVKKLNLYLIINYFKGGKLRFKKIKPEAFEANRFYTVINKKSGEIVPMEVNFNFDDPNLIILPLAFGKRQGREFIWNDLLSLETGSLKLANGRVIEKTLYNRRTRQDEPALFVALTFERREVLDSSNIKPMNLIGVDRGENIPAVIALTDPEGCPLSRFKDSLGNPTHILRIGESYKEKQRTIQAKKEVEQRRAGGYSRKYASKAKNLADDMVRNTARDLLYYAVTQDAMLIFENLSRGFGRQGKRTFMAERQYTRMEDWLTAKLAYEGLPSKTYLSKTLAQYTSKTCSNCGFTITSADYDRVLEKLKKTATGWMTTINGKELKVEGQITYYNRYKRQNVVKDLSVELDRLSEESVNNDISSWTKGRSGEALSLLKKRFSHRPVQEKFVCLNCGFETHADEQAALNIARSWLFLRSQEYKKYQTNKTTGNTDKRAFVETWQSFYRKKLKEVWKPAV

SEQ ID NO: 30239 - protein, 980 aa, synthetic construct
  REGION 1..980: note = engineered CasX variant
QEIKRINKIRRRLVKDSNTKKAGKTRGPMKTLLVRVMTPDLRERLENLRKKPENIPQPISNTSRANLNKLLTDYTEMKKAILHVYWEEFQKDPVGLMSRVAQPASKKIDQNKLKPEMDEKGNLTTAGFACSQCGQPLFVYKLEQVSEKGKAYTNYFGRCNVAEHEKLILLAQLKPEKDSDEAVTYSLGKFGQRALDFYSIHVTKESTHPVKPLAQIAGNRYASYPVGKALSDACMGTIASFLSKYQDIIIEHQKVVKGNQKRLESLRELAGKENLEYPSVTLPPQPHTKEGVDAYNEVIARVRMWVNLNLWQKLKLSRDDAKPLLRLKGFPSFPLVERQANAEVDWWDMVCNVKKLINEKKEDGKVFWQNLAGYKRQEALRPYLSSEEDRKKGKKFARYQLGDLLLHLEKKHGEDWGKVYDEAWERIDKKVEGLSKHIKLEEERRSEDAQSKAALTDWLRAKASFVIEGLKEADKDEFCRCELKLQKWYGDLRGKPFAIEAENSILDISGFSKQYNCAFIWQKDGVKKLNLYLIINYFKGGKLRFKKIKPEAFEANRFYTVINKKSGEIVPMEVNFNFDDPNLIILPLAFGKRQGREFIWNDLLSLETGSLKLANGRVIEKTLYNRRTRQDEPALFVALTFERREVLDSSNIKPMNLIGVDRGENIPAVIALTDPEGCPLSRFKDSLGNPTHILRIGESYKEKQRTIQAKKEVEQRRAGGYSRKYASKAKNLADDMVRNTARDLLYYAVTQDAMLIFENLSRGFGRQGKRTFMAERQYTRMEDWLTAKLAYEGLPSKTYLSKTLAQYTSKTCSNCGFTITSADYDRVLEKLKKTATGWMTTINGKELKVEGQITYYNRYKRQNVVKDLSVELDRLSEESVNNDISSWTKGRSGEALSLLKKRFSHRPVQEKFVCLNCGFETHADEQAALNIARSWLFLRSQEYKKYQTNKTTGNTDKRAFVETWQSFYRKKLKEVWKPAV

SEQ ID NO: 30240 - protein, 980 aa, synthetic construct
  REGION 1..980: note = engineered CasX variant
QEIKRINKIRRRLVKDSNTKKAGKTRGPMKTLLVRVMTPDLRERLENLRKKPENIPQPISNTSRANLNKLLTDYTEMKKAILHVYWEEFQKDPVGLMSRVAQPASKKIDQNKLKPEMDEKGNLTTAGFACSQCGQPLFVYKLEQVSEKGKAYTNYFGRCNVAEHEKLILLAQLKPEKDSDEAVTYSLGKFGQRALDFYSIHVTKESTHPVKPLAQIAGNRYASHPVGKALSDACMGTIASFLSKYQDIIIEHQKVVKGNQKRLESLRELAGKENLEYPSVTLPPQPHTKEGVDAYNEVIARVRMWVNLNLWQKLKLSRDDAKPLLRLKGFPSFPLVERQANAEVDWWDMVCNVKKLINEKKEDGKVFWQNLAGYKRQEALRPYLSSEEDRKKGKKFARYQLGDLLLHLEKKHGEDWGKVYDEAWERIDKKVEGLSKHIKLEEERRSEDAQSKAALTDWLRAKASFVIEGLKEADKDEFCRCELKLQKWYGDLRGKPFAIEAENSILDISGFSKQYNCAFIWQKDGVKKLNLYLIINYFKGGKLRFKKIKPEAFEANRFYTVINKKSGEIVPMEVNFNFDDPNLIILPLAFGKRQGREFIWNDLLSLETGSLKLANGRVIEKTLYNRRTRQDEPALFVALTFERREVLDSSNIKPMNLIGVDRGENIPAVIALTDPEGCPLSRFKDSLGNPTHILRIGESYKEKQRTIQAKKEVEQRRAGGYSRKYASKAKNLADDMVRNTARDLLYYAVTQDAMLIFENLSRGFGRQGKRTFMAERQYTRMEDWLTAKLAYEGLPSKTYLSKTLAQYTSKTCSNCGFTITSADYDRVLEKLKKTATGWMTTINGKELKVEGQITYYNRYKRQNVVKDLSVELDRLSEESVNNDISSWTKGRSGEALSLLKKRFSHRPVQEKFVCLNCGFETHADEQAALNIARSWLFLRSQEYKKYQTNKTTGNTDKRAFVETWQSFYRKKLKEVWKPAV

SEQ ID NO: 30241 - protein, 980 aa, synthetic construct
  REGION 1..980: note = engineered CasX variant
QEIKRINKIRRRLVKDSNTKKAGKTRGPMKTLLVRVMTPDLRERLENLRKKPENIPQPISNTSRANLNKLLTDYTEMKKAILHVYWEEFQKDPVGLMSRVAQPASKKIDQNKLKPEMDEKGNLTTAGFACSQCGQPLFVYKLEQVSEKGKAYTNYFGRCNVAEHEKLILLAQLKPEKDSDEAVTYSLGKFGQRALDFYSIHVTKESTHPVKPLAQIAGNRYASSPVGKALSDACMGTIASFLSKYQDIIIEHQKVVKGNQKRLESLRELAGKENLEYPSVTLPPQPHTKEGVDAYNEVIARVRMWVNLNLWQKLKLSRDDAKPLLRLKGFPSFPLVERQANAEVDWWDMVCNVKKLINEKKEDGKVFWQNLAGYKRQEALRPYLSSEEDRKKGKKFARYQLGDLLLHLEKKHGEDWGKVYDEAWERIDKKVEGLSKHIKLEEERRSEDAQSKAALTDWLRAKASFVIEGLKEADKDEFCRCELKLQKWYGDLRGKPFAIEAENSILDISGFSKQYNCAFIWQKDGVKKLNLYLIINYFKGGKLRFKKIKPEAFEANRFYTVINKKSGEIVPMEVNFNFDDPNLIILPLAFGKRQGREFIWNDLLSLETGSLKLANGRVIEKTLYNRRTRQDEPALFVALTFERREVLDSSNIKPMNLIGVDRGENIPAVIALTDPEGCPLSRFKDSLGNPTHILRIGESYKEKQRTIQAKKEVEQRRAGGYSRKYASKAKNLADDMVRNTARDLLYYAVTQDAMLIFENLSRGFGRQGKRTFMAERQYTRMEDWLTAKLAYEGLPSKTYLSKTLAQYTSKTCSNCGFTITSADYDRVLEKLKKTATGWMTTINGKELKVEGQITYYNRYKRQNVVKDLSVELDRLSEESVNNDISSWTKGRSGEALSLLKKRFSHRPVQEKFVCLNCGFETHADEQAALNIARSWLFLRSQEYKKYQTNKTTGNTDKRAFVETWQSFYRKKLKEVWKPAV

SEQ ID NO: 30242 - protein, 980 aa, synthetic construct
  REGION 1..980: note = engineered CasX variant
QEIKRINKIRRRLVKDSNTKKAGKTRGPMKTLLVRVMTPDLRERLENLRKKPENIPQPISNTSRANLNKLLTDYTEMKKAILHVYWEEFQKDPVGLMSRVAQPASKKIDQNKLKPEMDEKGNLTTAGFACSQCGQPLFVYKLEQVSEKGKAYTNYFGRCNVAEHEKLILLAQLKPEKDSDEAVTYSLGKFGQRALDFYSIHVTKESTHPVKPLAQIAGNRYASTPVGKALSDACMGTIASFLSKYQDIIIEHQKVVKGNQKRLESLRELAGKENLEYPSVTLPPQPHTKEGVDAYNEVIARVRMWVNLNLWQKLKLSRDDAKPLLRLKGFPSFPLVERQANAEVDWWDMVCNVKKLINEKKEDGKVFWQNLAGYKRQEALRPYLSSEEDRKKGKKFARYQLGDLLLHLEKKHGEDWGKVYDEAWERIDKKVEGLSKHIKLEEERRSEDAQSKAALTDWLRAKASFVIEGLKEADKDEFCRCELKLQKWYGDLRGKPFAIEAENSILDISGFSKQYNCAFIWQKDGVKKLNLYLIINYFKGGKLRFKKIKPEAFEANRFYTVINKKSGEIVPMEVNFNFDDPNLIILPLAFGKRQGREFIWNDLLSLETGSLKLANGRVIEKTLYNRRTRQDEPALFVALTFERREVLDSSNIKPMNLIGVDRGENIPAVIALTDPEGCPLSRFKDSLGNPTHILRIGESYKEKQRTIQAKKEVEQRRAGGYSRKYASKAKNLADDMVRNTARDLLYYAVTQDAMLIFENLSRGFGRQGKRTFMAERQYTRMEDWLTAKLAYEGLPSKTYLSKTLAQYTSKTCSNCGFTITSADYDRVLEKLKKTATGWMTTINGKELKVEGQITYYNRYKRQNVVKDLSVELDRLSEESVNNDISSWTKGRSGEALSLLKKRFSHRPVQEKFVCLNCGFETHADEQAALNIARSWLFLRSQEYKKYQTNKTTGNTDKRAFVETWQSFYRKKLKEVWKPAV

SEQ ID NO: 30243 - protein, 980 aa, synthetic construct
  REGION 1..980: note = engineered CasX variant
QEIKRINKIRRRLVKDSNTKKAGKTRGPMKTLLVRVMTPDLRERLENLRKKPENIPQPISNTSRANLNKLLTDYTEMKKAILHVYWEEFQKDPVGLMSRVAQPASKKIDQNKLKPEMDEKGNLTTAGFACSQCGQPLFVYKLEQVSEKGKAYTNYFGRCNVAEHEKLILLAQLKPEKDSDEAVTYSLGKFGQRALDFYSIHVTKESTHPVKPLAQIAGNRYASAPVGKALSDACMGTIASFLSKYQDIIIEHQKVVKGNQKRLESLRELAGKENLEYPSVTLPPQPHTKEGVDAYNEVIARVRMWVNLNLWQKLKLSRDDAKPLLRLKGFPSFPLVERQANAEVDWWDMVCNVKKLINEKKEDGKVFWQNLAGYKRQEALRPYLSSEEDRKKGKKFARYQLGDLLLHLEKKHGEDWGKVYDEAWERIDKKVEGLSKHIKLEEERRSEDAQSKAALTDWLRAKASFVIEGLKEADKDEFCRCELKLQKWYGDLRGKPFAIEAENSILDISGFSKQYNCAFIWQKDGVKKLNLYLIINYFKGGKLRFKKIKPEAFEANRFYTVINKKSGEIVPMEVNFNFDDPNLIILPLAFGKRQGREFIWNDLLSLETGSLKLANGRVIEKTLYNRRTRQDEPALFVALTFERREVLDSSNIKPMNLIGVDRGENIPAVIALTDPEGCPLSRFKDSLGNPTHILRIGESYKEKQRTIQAKKEVEQRRAGGYSRKYASKAKNLADDMVRNTARDLLYYAVTQDAMLIFENLSRGFGRQGKRTFMAERQYTRMEDWLTAKLAYEGLPSKTYLSKTLAQYTSKTCSNCGFTITSADYDRVLEKLKKTATGWMTTINGKELKVEGQITYYNRYKRQNVVKDLSVELDRLSEESVNNDISSWTKGRSGEALSLLKKRFSHRPVQEKFVCLNCGFETHADEQAALNIARSWLFLRSQEYKKYQTNKTTGNTDKRAFVETWQSFYRKKLKEVWKPAV

SEQ ID NO: 30244 - protein, 980 aa, synthetic construct
  REGION 1..980: note = engineered CasX variant
QEIKRINKIRRRLVKDSNTKKAGKTRGPMKTLLVRVMTPDLRERLENLRKKPENIPQPISNTSRANLNKLLTDYTEMKKAILHVYWEEFQKDPVGLMSRVAQPASKKIDQNKLKPEMDEKGNLTTAGFACSQCGQPLFVYKLEQVSEKGKAYTNYFGRCNVAEHEKLILLAQLKPEKDSDEAVTYSLGKFGQRALDFYSIHVTKESTHPVKPLAQIAGNRYASVPVGKALSDACMGTIASFLSKYQDIIIEHQKVVKGNQKRLESLRELAGKENLEYPSVTLPPQPHTKEGVDAYNEVIARVRMWVNLNLWQKLKLSRDDAKPLLRLKGFPSFPLVERQANAEVDWWDMVCNVKKLINEKKEDGKVFWQNLAGYKRQEALRPYLSSEEDRKKGKKFARYQLGDLLLHLEKKHGEDWGKVYDEAWERIDKKVEGLSKHIKLEEERRSEDAQSKAALTDWLRAKASFVIEGLKEADKDEFCRCELKLQKWYGDLRGKPFAIEAENSILDISGFSKQYNCAFIWQKDGVKKLNLYLIINYFKGGKLRFKKIKPEAFEANRFYTVINKKSGEIVPMEVNFNFDDPNLIILPLAFGKRQGREFIWNDLLSLETGSLKLANGRVIEKTLYNRRTRQDEPALFVALTFERREVLDSSNIKPMNLIGVDRGENIPAVIALTDPEGCPLSRFKDSLGNPTHILRIGESYKEKQRTIQAKKEVEQRRAGGYSRKYASKAKNLADDMVRNTARDLLYYAVTQDAMLIFENLSRGFGRQGKRTFMAERQYTRMEDWLTAKLAYEGLPSKTYLSKTLAQYTSKTCSNCGFTITSADYDRVLEKLKKTATGWMTTINGKELKVEGQITYYNRYKRQNVVKDLSVELDRLSEESVNNDISSWTKGRSGEALSLLKKRFSHRPVQEKFVCLNCGFETHADEQAALNIARSWLFLRSQEYKKYQTNKTTGNTDKRAFVETWQSFYRKKLKEVWKPAV

SEQ ID NO: 30245 - protein, 980 aa, synthetic construct
  REGION 1..980: note = engineered CasX variant
QEIKRINKIRRRLVKDSNTKKAGKTRGPMKTLLVRVMTPDLRERLENLRKKPENIPQPISNTSRANLNKLLTDYTEMKKAILHVYWEEFQKDPVGLMSRVAQPASKKIDQNKLKPEMDEKGNLTTAGFACSQCGQPLFVYKLEQVSEKGKAYTNYFGRCNVAEHEKLIKLAQLKPEKDSDEAVTYSLGKFGQRALDFYSIHVTKESTHPVKPLAQIAGNRYASGPVGKALSDACMGTIASFLSKYQDIIIEHQKVVKGNQKRLESLRELAGKENLEYPSVTLPPQPHTKEGVDAYNEVIARVRMWVNLNLWQKLKLSRDDAKPLLRLKGFPSFPLVERQANAEVDWWDMVCNVKKLINEKKEDGKVFWQNLAGYKRQEALRPYLSSEEDRKKGKKFARYQLGDLLLHLEKKHGEDWGKVYDEAWERIDKKVEGLSKHIKLEEERRSEDAQSKAALTDWLRAKASFVIEGLKEADKDEFCRCELKLQKWYGDLRGKPFAIEAENSILDISGFSKQYNCAFIWQKDGVKKLNLYLIINYFKGGKLRFKKIKPEAFEANRFYTVINKKSGEIVPMEVNFNFDDPNLIILPLAFGKRQGREFIWNDLLSLETGSLKLANGRVIEKTLYNRRTRQDEPALFVALTFERREVLDSSNIKPMNLIGVDRGENIPAVIALTDPEGCPLSRFKDSLGNPTHILRIGESYKEKQRTIQAKKEVEQRRAGGYSRKYASKAKNLADDMVRNTARDLLYYAVTQDAMLIFENLSRGFGRQGKRTFMAERQYTRMEDWLTAKLAYEGLPSKTYLSKTLAQYTSKTCSNCGFTITSADYDRVLEKLKKTATGWMTTINGKELKVEGQITYYNRYKRQNVVKDLSVELDRLSEESVNNDISSWTKGRSGEALSLLKKRFSHRPVQEKFVCLNCGFETHADEQAALNIARSWLFLRSQEYKKYQTNKTTGNTDKRAFVETWQSFYRKKLKEVWKPAV

SEQ ID NO: 30246 - protein, 979 aa, synthetic construct
  REGION 1..979: note = engineered CasX variant
QEIKRINKIRRRLVKDSNTKKAGKTRGPMKTLLVRVMTPDLRERLENLRKKPENIPQPISNTSRANLNKLLTDYTEMKKAILHVYWEEFQKDPVGLMSRVAQPASKKIDQNKLKPEMDEKGNLTTAGFACSQCGQPLFVYKLEQVSEKGKAYTNYFGRCNVAEHEKLILLAQLKPEKDSDEAVTYSLGKFGQRALDFYSIHVTKESTHPVKPLAQIAGNRYASPVGKALSDACMGTIASFLSKYQDIIIEHQKVVKGNQKRLESLRELAGKENLEYPSVTLPPQPHTKEGVDAYNEVIARVRMWVNLNLWQKLKLSRDDAKPLLRLKGFPSFPLVERQANAEVDWWDMVCNVKKLINEKKEDGKVFWQNLAGYKRQEALRPYLSSEEDRKKGKKFARYQLGDLLLHLEKKHGEDWGKVYDEAWERIDKKVEGLSKHIKLEEERRSEDAQSKAALTDWLRAKASFVIEGLKEADKDEFCRCELKLQKWYGDLRGKPFAIEAENSILDISGFSKQYNCAFIWQKDGVKKLNLYLIINYFKGGKLRFKKIKPEAFEANRFYTVINKKSGEIVPMEVNFNFDDPNLIILPLAFGKRQGREFIWNDLLSLETGSLKLANGRVIEKTLYNRRTRQDEPALFVALTFERREVLDSSNIKPMNLIGVDRGENIPAVIALTDPEGCPLSRFKDSLGNPTHILRIGESYKEKQRTIQAKKEVEQRRAGGYSRKYASKAKNLADDMVRNTARDLLYYAVTQDAMLIFENLSRGFGRQGKRTFMAERQYTRMEDWLTAKLAYEGLPSKTYLSKTLAQYTSKTCSNCGFTITSADYDRVLEKLKKTATGWMTTINGKELKVEGQITYYNRYKRQNVVKDLSVELDRLSEESVNNDISSWTKGRSGEALSLLKKRFSHRPVQEKFVCLNCGFETHADEQAALNIARSWLFLRSQEYKKYQTNKTTGNTDKRAFVETWQSFYRKKLKEVWKPAV

SEQ ID NO: 30247 - protein, 979 aa, synthetic construct
  REGION 1..979: note = engineered CasX variant
QEIKRINKIRRRLVKDSNTKKAGKTRGPMKTLLVRVMTPDLRERLENLRKKPENIPQPISNTSRANLNKLLTDYTEMKKAILHVYWEEFQKDPVGLMSRVAQPASKKIDQNKLKPEMDEKGNLTTAGFACSQCGQPLFVYKLEQVSEKGKAYTNYFGRCNVAEHEKLILLAQLKPEKDSDEAVTYSLGKFGQRALDFYSIHVTKESTHPVKPLAQIAGNRYASYPVGKALSDACMGTIASFLSKYQDIIIEHQKVVKGNQKRLESLRELAGKENLEYPSVTLPPQPHTKEGVDAYNEVIARVRMWVNLNLWQKLKLSRDDAKPLLRLKGFPSFPLVERQANEVDWWDMVCNVKKLINEKKEDGKVFWQNLAGYKRQEALRPYLSSEEDRKKGKKFARTQLGDLLLHLEKKHGEDWGKVYDEAWERIDKKVEGLSKHIKLEEERRSEDAQSKAALTDWLRAKASFVIEGLKEADKDEFCRCELKLQKWYGDLRGKPFAIEAENSILDISGFSKQYNCAFIWQKDGVKKLNLYLIINYFKGGKLRFKKIKPEAFEANRFYTVINKKSGEIVPMEVNFNFDDPNLIILPLAFGKRQGREFIWNDLLSLETGSLKLANGRVIEKTLYNRRTRQDEPALFVALTFERREVLDSSNIKPMNLIGVDRGENIPAVIALTDPEGCPLSRFKDSLGNPTHILRIGESYKEKQRTIQAKKEVEQRRAGGYSRKYASKAKNLADDMVRNTARDLLYYAVTQDAMLIFENLSRGFGRQGKRTFMAERQYTRMEDWLTAKLAYEGLPSKTYLSKTLAQYTSKTCSNCGFTITSADYDRVLEKLKKTATGWMTTINGKELKVEGQITYYNRYKRQNVVKDLSVELDRLSEESVNNDISSWTKGRSGEALSLLKKRFSHRPVQEKFVCLNCGFETHADEQAALNIARSWLFLRSQEYKKYQTNKTTGNTDKRAFVETWQSFYRKKLKEVWKPAV

SEQ ID NO: 30248 - protein, 979 aa, synthetic construct
  REGION 1..979: note = engineered CasX variant
QEIKRINKIRRRLVKDSNTKKAGKTRGPMKTLLVRVMTPDLRERLENLRKKPENIPQPISNTSRANLNKLLTDYTEMKKAILHVYWEEFQKDPVGLMSRVAQPASKKIDQNKLKPEMDEKGNLTTAGFACSQCGQPLFVYKLEQVSEKGKAYTNYFGRCNVAEHEKLILLAQLKPEKDSDEAVTYSLGKFGQRALDFYSIHVTKESTHPVKPLAQIAGNRYASHPVGKALSDACMGTIASFLSKYQDIIIEHQKVVKGNQKRLESLRELAGKENLEYPSVTLPPQPHTKEGVDAYNEVIARVRMWVNLNLWQKLKLSRDDAKPLLRLKGFPSFPLVERQANEVDWWDMVCNVKKLINEKKEDGKVFWQNLAGYKRQEALRPYLSSEEDRKKGKKFARTQLGDLLLHLEKKHGEDWGKVYDEAWERIDKKVEGLSKHIKLEEERRSEDAQSKAALTDWLRAKASFVIEGLKEADKDEFCRCELKLQKWYGDLRGKPFAIEAENSILDISGFSKQYNCAFIWQKDGVKKLNLYLIINYFKGGKLRFKKIKPEAFEANRFYTVINKKSGEIVPMEVNFNFDDPNLIILPLAFGKRQGREFIWNDLLSLETGSLKLANGRVIEKTLYNRRTRQDEPALFVALTFERREVLDSSNIKPMNLIGVDRGENIPAVIALTDPEGCPLSRFKDSLGNPTHILRIGESYKEKQRTIQAKKEVEQRRAGGYSRKYASKAKNLADDMVRNTARDLLYYAVTQDAMLIFENLSRGFGRQGKRTFMAERQYTRMEDWLTAKLAYEGLPSKTYLSKTLAQYTSKTCSNCGFTITSADYDRVLEKLKKTATGWMTTINGKELKVEGQITYYNRYKRQNVVKDLSVELDRLSEESVNNDISSWTKGRSGEALSLLKKRFSHRPVQEKFVCLNCGFETHADEQAALNIARSWLFLRSQEYKKYQTNKTTGNTDKRAFVETWQSFYRKKLKEVWKPAV

SEQ ID NO: 30249 - protein, 979 aa, synthetic construct
  REGION 1..979: note = engineered CasX variant
QEIKRINKIRRRLVKDSNTKKAGKTRGPMKTLLVRVMTPDLRERLENLRKKPENIPQPISNTSRANLNKLLTDYTEMKKAILHVYWEEFQKDPVGLMSRVAQPASKKIDQNKLKPEMDEKGNLTTAGFACSQCGQPLFVYKLEQVSEKGKAYTNYFGRCNVAEHEKLILLAQLKPEKDSDEAVTYSLGKFGQRALDFYSIHVTKESTHPVKPLAQIAGNRYASSPVGKALSDACMGTIASFLSKYQDIIIEHQKVVKGNQKRLESLRELAGKENLEYPSVTLPPQPHTKEGVDAYNEVIARVRMWVNLNLWQKLKLSRDDAKPLLRLKGFPSFPLVERQANEVDWWDMVCNVKKLINEKKEDGKVFWQNLAGYKRQEALRPYLSSEEDRKKGKKFARTQLGDLLLHLEKKHGEDWGKVYDEAWERIDKKVEGLSKHIKLEEERRSEDAQSKAALTDWLRAKASFVIEGLKEADKDEFCRCELKLQKWYGDLRGKPFAIEAENSILDISGFSKQYNCAFIWQKDGVKKLNLYLIINYFKGGKLRFKKIKPEAFEANRFYTVINKKSGEIVPMEVNFNFDDPNLIILPLAFGKRQGREFIWNDLLSLETGSLKLANGRVIEKTLYNRRTRQDEPALFVALTFERREVLDSSNIKPMNLIGVDRGENIPAVIALTDPEGCPLSRFKDSLGNPTHILRIGESYKEKQRTIQAKKEVEQRRAGGYSRKYASKAKNLADDMVRNTARDLLYYAVTQDAMLIFENLSRGFGRQGKRTFMAERQYTRMEDWLTAKLAYEGLPSKTYLSKTLAQYTSKTCSNCGFTITSADYDRVLEKLKKTATGWMTTINGKELKVEGQITYYNRYKRQNVVKDLSVELDRLSEESVNNDISSWTKGRSGEALSLLKKRFSHRPVQEKFVCLNCGFETHADEQAALNIARSWLFLRSQEYKKYQTNKTTGNTDKRAFVETWQSFYRKKLKEVWKPAV

SEQ ID NO: 30250 - protein, 979 aa, synthetic construct
  REGION 1..979: note = engineered CasX variant
QEIKRINKIRRRLVKDSNTKKAGKTRGPMKTLLVRVMTPDLRERLENLRKKPENIPQPISNTSRANLNKLLTDYTEMKKAILHVYWEEFQKDPVGLMSRVAQPASKKIDQNKLKPEMDEKGNLTTAGFACSQCGQPLFVYKLEQVSEKGKAYTNYFGRCNVAEHEKLILLAQLKPEKDSDEAVTYSLGKFGQRALDFYSIHVTKESTHPVKPLAQIAGNRYASTPVGKALSDACMGTIASFLSKYQDIIIEHQKVVKGNQKRLESLRELAGKENLEYPSVTLPPQPHTKEGVDAYNEVIARVRMWVNLNLWQKLKLSRDDAKPLLRLKGFPSFPLVERQANEVDWWDMVCNVKKLINEKKEDGKVFWQNLAGYKRQEALRPYLSSEEDRKKGKKFARTQLGDLLLHLEKKHGEDWGKVYDEAWERIDKKVEGLSKHIKLEEERRSEDAQSKAALTDWLRAKASFVIEGLKEADKDEFCRCELKLQKWYGDLRGKPFAIEAENSILDISGFSKQYNCAFIWQKDGVKKLNLYLIINYFKGGKLRFKKIKPEAFEANRFYTVINKKSGEIVPMEVNFNFDDPNLIILPLAFGKRQGREFIWNDLLSLETGSLKLANGRVIEKTLYNRRTRQDEPALFVALTFERREVLDSSNIKPMNLIGVDRGENIPAVIALTDPEGCPLSRFKDSLGNPTHILRIGESYKEKQRTIQAKKEVEQRRAGGYSRKYASKAKNLADDMVRNTARDLLYYAVTQDAMLIFENLSRGFGRQGKRTFMAERQYTRMEDWLTAKLAYEGLPSKTYLSKTLAQYTSKTCSNCGFTITSADYDRVLEKLKKTATGWMTTINGKELKVEGQITYYNRYKRQNVVKDLSVELDRLSEESVNNDISSWTKGRSGEALSLLKKRFSHRPVQEKFVCLNCGFETHADEQAALNIARSWLFLRSQEYKKYQTNKTTGNTDKRAFVETWQSFYRKKLKEVWKPAV

SEQ ID NO: 30251 - protein, 979 aa, synthetic construct
  REGION 1..979: note = engineered CasX variant
QEIKRINKIRRRLVKDSNTKKAGKTRGPMKTLLVRVMTPDLRERLENLRKKPENIPQPISNTSRANLNKLLTDYTEMKKAILHVYWEEFQKDPVGLMSRVAQPASKKIDQNKLKPEMDEKGNLTTAGFACSQCGQPLFVYKLEQVSEKGKAYTNYFGRCNVAEHEKLILLAQLKPEKDSDEAVTYSLGKFGQRALDFYSIHVTKESTHPVKPLAQIAGNRYASAPVGKALSDACMGTIASFLSKYQDIIIEHQKVVKGNQKRLESLRELAGKENLEYPSVTLPPQPHTKEGVDAYNEVIARVRMWVNLNLWQKLKLSRDDAKPLLRLKGFPSFPLVERQANEVDWWDMVCNVKKLINEKKEDGKVFWQNLAGYKRQEALRPYLSSEEDRKKGKKFARTQLGDLLLHLEKKHGEDWGKVYDEAWERIDKKVEGLSKHIKLEEERRSEDAQSKAALTDWLRAKASFVIEGLKEADKDEFCRCELKLQKWYGDLRGKPFAIEAENSILDISGFSKQYNCAFIWQKDGVKKLNLYLIINYFKGGKLRFKKIKPEAFEANRFYTVINKKSGEIVPMEVNFNFDDPNLIILPLAFGKRQGREFIWNDLLSLETGSLKLANGRVIEKTLYNRRTRQDEPALFVALTFERREVLDSSNIKPMNLIGVDRGENIPAVIALTDPEGCPLSRFKDSLGNPTHILRIGESYKEKQRTIQAKKEVEQRRAGGYSRKYASKAKNLADDMVRNTARDLLYYAVTQDAMLIFENLSRGFGRQGKRTFMAERQYTRMEDWLTAKLAYEGLPSKTYLSKTLAQYTSKTCSNCGFTITSADYDRVLEKLKKTATGWMTTINGKELKVEGQITYYNRYKRQNVVKDLSVELDRLSEESVNNDISSWTKGRSGEALSLLKKRFSHRPVQEKFVCLNCGFETHADEQAALNIARSWLFLRSQEYKKYQTNKTTGNTDKRAFVETWQSFYRKKLKEVWKPAV

SEQ ID NO: 30252 - protein, 979 aa, synthetic construct
  REGION 1..979: note = engineered CasX variant
QEIKRINKIRRRLVKDSNTKKAGKTRGPMKTLLVRVMTPDLRERLENLRKKPENIPQPISNTSRANLNKLLTDYTEMKKAILHVYWEEFQKDPVGLMSRVAQPASKKIDQNKLKPEMDEKGNLTTAGFACSQCGQPLFVYKLEQVSEKGKAYTNYFGRCNVAEHEKLILLAQLKPEKDSDEAVTYSLGKFGQRALDFYSIHVTKESTHPVKPLAQIAGNRYASVPVGKALSDACMGTIASFLSKYQDIIIEHQKVVKGNQKRLESLRELAGKENLEYPSVTLPPQPHTKEGVDAYNEVIARVRMWVNLNLWQKLKLSRDDAKPLLRLKGFPSFPLVERQANEVDWWDMVCNVKKLINEKKEDGKVFWQNLAGYKRQEALRPYLSSEEDRKKGKKFARTQLGDLLLHLEKKHGEDWGKVYDEAWERIDKKVEGLSKHIKLEEERRSEDAQSKAALTDWLRAKASFVIEGLKEADKDEFCRCELKLQKWYGDLRGKPFAIEAENSILDISGFSKQYNCAFIWQKDGVKKLNLYLIINYFKGGKLRFKKIKPEAFEANRFYTVINKKSGEIVPMEVNFNFDDPNLIILPLAFGKRQGREFIWNDLLSLETGSLKLANGRVIEKTLYNRRTRQDEPALFVALTFERREVLDSSNIKPMNLIGVDRGENIPAVIALTDPEGCPLSRFKDSLGNPTHILRIGESYKEKQRTIQAKKEVEQRRAGGYSRKYASKAKNLADDMVRNTARDLLYYAVTQDAMLIFENLSRGFGRQGKRTFMAERQYTRMEDWLTAKLAYEGLPSKTYLSKTLAQYTSKTCSNCGFTITSADYDRVLEKLKKTATGWMTTINGKELKVEGQITYYNRYKRQNVVKDLSVELDRLSEESVNNDISSWTKGRSGEALSLLKKRFSHRPVQEKFVCLNCGFETHADEQAALNIARSWLFLRSQEYKKYQTNKTTGNTDKRAFVETWQSFYRKKLKEVWKPAV

SEQ ID NO: 30253 - protein, 979 aa, synthetic construct
  REGION 1..979: note = engineered CasX variant
QEIKRINKIRRRLVKDSNTKKAGKTRGPMKTLLVRVMTPDLRERLENLRKKPENIPQPISNTSRANLNKLLTDYTEMKKAILHVYWEEFQKDPVGLMSRVAQPASKKIDQNKLKPEMDEKGNLTTAGFACSQCGQPLFVYKLEQVSEKGKAYTNYFGRCNVAEHEKLIKLAQLKPEKDSDEAVTYSLGKFGQRALDFYSIHVTKESTHPVKPLAQIAGNRYASGPVGKALSDACMGTIASFLSKYQDIIIEHQKVVKGNQKRLESLRELAGKENLEYPSVTLPPQPHTKEGVDAYNEVIARVRMWVNLNLWQKLKLSRDDAKPLLRLKGFPSFPLVERQANEVDWWDMVCNVKKLINEKKEDGKVFWQNLAGYKRQEALRPYLSSEEDRKKGKKFARTQLGDLLLHLEKKHGEDWGKVYDEAWERIDKKVEGLSKHIKLEEERRSEDAQSKAALTDWLRAKASFVIEGLKEADKDEFCRCELKLQKWYGDLRGKPFAIEAENSILDISGFSKQYNCAFIWQKDGVKKLNLYLIINYFKGGKLRFKKIKPEAFEANRFYTVINKKSGEIVPMEVNFNFDDPNLIILPLAFGKRQGREFIWNDLLSLETGSLKLANGRVIEKTLYNRRTRQDEPALFVALTFERREVLDSSNIKPMNLIGVDRGENIPAVIALTDPEGCPLSRFKDSLGNPTHILRIGESYKEKQRTIQAKKEVEQRRAGGYSRKYASKAKNLADDMVRNTARDLLYYAVTQDAMLIFENLSRGFGRQGKRTFMAERQYTRMEDWLTAKLAYEGLPSKTYLSKTLAQYTSKTCSNCGFTITSADYDRVLEKLKKTATGWMTTINGKELKVEGQITYYNRYKRQNVVKDLSVELDRLSEESVNNDISSWTKGRSGEALSLLKKRFSHRPVQEKFVCLNCGFETHADEQAALNIARSWLFLRSQEYKKYQTNKTTGNTDKRAFVETWQSFYRKKLKEVWKPAV

SEQ ID NO: 30254 - protein, 978 aa, synthetic construct
  REGION 1..978: note = engineered CasX variant
QEIKRINKIRRRLVKDSNTKKAGKTRGPMKTLLVRVMTPDLRERLENLRKKPENIPQPISNTSRANLNKLLTDYTEMKKAILHVYWEEFQKDPVGLMSRVAQPASKKIDQNKLKPEMDEKGNLTTAGFACSQCGQPLFVYKLEQVSEKGKAYTNYFGRCNVAEHEKLILLAQLKPEKDSDEAVTYSLGKFGQRALDFYSIHVTKESTHPVKPLAQIAGNRYASPVGKALSDACMGTIASFLSKYQDIIIEHQKVVKGNQKRLESLRELAGKENLEYPSVTLPPQPHTKEGVDAYNEVIARVRMWVNLNLWQKLKLSRDDAKPLLRLKGFPSFPLVERQANEVDWWDMVCNVKKLINEKKEDGKVFWQNLAGYKRQEALRPYLSSEEDRKKGKKFARTQLGDLLLHLEKKHGEDWGKVYDEAWERIDKKVEGLSKHIKLEEERRSEDAQSKAALTDWLRAKASFVIEGLKEADKDEFCRCELKLQKWYGDLRGKPFAIEAENSILDISGFSKQYNCAFIWQKDGVKKLNLYLIINYFKGGKLRFKKIKPEAFEANRFYTVINKKSGEIVPMEVNFNFDDPNLIILPLAFGKRQGREFIWNDLLSLETGSLKLANGRVIEKTLYNRRTRQDEPALFVALTFERREVLDSSNIKPMNLIGVDRGENIPAVIALTDPEGCPLSRFKDSLGNPTHILRIGESYKEKQRTIQAKKEVEQRRAGGYSRKYASKAKNLADDMVRNTARDLLYYAVTQDAMLIFENLSRGFGRQGKRTFMAERQYTRMEDWLTAKLAYEGLPSKTYLSKTLAQYTSKTCSNCGFTITSADYDRVLEKLKKTATGWMTTINGKELKVEGQITYYNRYKRQNVVKDLSVELDRLSEESVNNDISSWTKGRSGEALSLLKKRFSHRPVQEKFVCLNCGFETHADEQAALNIARSWLFLRSQEYKKYQTNKTTGNTDKRAFVETWQSFYRKKLKEVWKPAV

SEQ ID NO: 30255 - protein, 980 aa, synthetic construct
  REGION 1..980: note = engineered CasX variant
QEIKRINKIRRRLVKDSNTKKAGKTRGPMKTLLVRVMTPDLRERLENLRKKPENIPQPISNTSRANLNKLLTDYTEMKKAILHVYWEEFQKDPVGLMSRVAQPASKKIDQNKLKPEMDEKGNLTTAGFACSQCGQPLFVYKLEQVSEKGKAYTNYFGRCNVAEHEKLILLAQLKPEKDSDEAVTYSLGKFGQRALDFYSIHVTKESTHPVKPLAQIAGNRYASYPVGKALSDACMGTIASFLSKYQDIIIEHQKVVKGNQKRLESLRELAGKENLEYPSVTLPPQPHTKEGVDAYNEVIARVRMWVNLNLWQKLKLSRDDAKPLLRLKGFPSFPLVERQANEVDWWDMVCNVKKLINEKKEDGKVFWQNLAGYKRQEALRPYLSSEEDRKKGKKFARYQLGDLLLHLEKKHEGEDWGKVYDEAWERIDKKVEGLSKHIKLEEERRSEDAQSKAALTDWLRAKASFVIEGLKEADKDEFCRCELKLQKWYGDLRGKPFAIEAENSILDISGFSKQYNCAFIWQKDGVKKLNLYLIINYFKGGKLRFKKIKPEAFEANRFYTVINKKSGEIVPMEVNFNFDDPNLIILPLAFGKRQGREFIWNDLLSLETGSLKLANGRVIEKTLYNRRTRQDEPALFVALTFERREVLDSSNIKPMNLIGVDRGENIPAVIALTDPEGCPLSRFKDSLGNPTHILRIGESYKEKQRTIQAKKEVEQRRAGGYSRKYASKAKNLADDMVRNTARDLLYYAVTQDAMLIFENLSRGFGRQGKRTFMAERQYTRMEDWLTAKLAYEGLPSKTYLSKTLAQYTSKTCSNCGFTITSADYDRVLEKLKKTATGWMTTINGKELKVEGQITYYNRYKRQNVVKDLSVELDRLSEESVNNDISSWTKGRSGEALSLLKKRFSHRPVQEKFVCLNCGFETHADEQAALNIARSWLFLRSQEYKKYQTNKTTGNTDKRAFVETWQSFYRKKLKEVWKPAV

SEQ ID NO: 30256 - protein, 980 aa, synthetic construct
  REGION 1..980: note = engineered CasX variant
QEIKRINKIRRRLVKDSNTKKAGKTRGPMKTLLVRVMTPDLRERLENLRKKPENIPQPISNTSRANLNKLLTDYTEMKKAILHVYWEEFQKDPVGLMSRVAQPASKKIDQNKLKPEMDEKGNLTTAGFACSQCGQPLFVYKLEQVSEKGKAYTNYFGRCNVAEHEKLILLAQLKPEKDSDEAVTYSLGKFGQRALDFYSIHVTKESTHPVKPLAQIAGNRYASHPVGKALSDACMGTIASFLSKYQDIIIEHQKVVKGNQKRLESLRELAGKENLEYPSVTLPPQPHTKEGVDAYNEVIARVRMWVNLNLWQKLKLSRDDAKPLLRLKGFPSFPLVERQANEVDWWDMVCNVKKLINEKKEDGKVFWQNLAGYKRQEALRPYLSSEEDRKKGKKFARYQLGDLLLHLEKKHEGEDWGKVYDEAWERIDKKVEGLSKHIKLEEERRSEDAQSKAALTDWLRAKASFVIEGLKEADKDEFCRCELKLQKWYGDLRGKPFAIEAENSILDISGFSKQYNCAFIWQKDGVKKLNLYLIINYFKGGKLRFKKIKPEAFEANRFYTVINKKSGEIVPMEVNFNFDDPNLIILPLAFGKRQGREFIWNDLLSLETGSLKLANGRVIEKTLYNRRTRQDEPALFVALTFERREVLDSSNIKPMNLIGVDRGENIPAVIALTDPEGCPLSRFKDSLGNPTHILRIGESYKEKQRTIQAKKEVEQRRAGGYSRKYASKAKNLADDMVRNTARDLLYYAVTQDAMLIFENLSRGFGRQGKRTFMAERQYTRMEDWLTAKLAYEGLPSKTYLSKTLAQYTSKTCSNCGFTITSADYDRVLEKLKKTATGWMTTINGKELKVEGQITYYNRYKRQNVVKDLSVELDRLSEESVNNDISSWTKGRSGEALSLLKKRFSHRPVQEKFVCLNCGFETHADEQAALNIARSWLFLRSQEYKKYQTNKTTGNTDKRAFVETWQSFYRKKLKEVWKPAV

SEQ ID NO: 30257 - protein, 980 aa, synthetic construct
  REGION 1..980: note = engineered CasX variant
QEIKRINKIRRRLVKDSNTKKAGKTRGPMKTLLVRVMTPDLRERLENLRKKPENIPQPISNTSRANLNKLLTDYTEMKKAILHVYWEEFQKDPVGLMSRVAQPASKKIDQNKLKPEMDEKGNLTTAGFACSQCGQPLFVYKLEQVSEKGKAYTNYFGRCNVAEHEKLILLAQLKPEKDSDEAVTYSLGKFGQRALDFYSIHVTKESTHPVKPLAQIAGNRYASSPVGKALSDACMGTIASFLSKYQDIIIEHQKVVKGNQKRLESLRELAGKENLEYPSVTLPPQPHTKEGVDAYNEVIARVRMWVNLNLWQKLKLSRDDAKPLLRLKGFPSFPLVERQANEVDWWDMVCNVKKLINEKKEDGKVFWQNLAGYKRQEALRPYLSSEEDRKKGKKFARYQLGDLLLHLEKKHEGEDWGKVYDEAWERIDKKVEGLSKHIKLEEERRSEDAQSKAALTDWLRAKASFVIEGLKEADKDEFCRCELKLQKWYGDLRGKPFAIEAENSILDISGFSKQYNCAFIWQKDGVKKLNLYLIINYFKGGKLRFKKIKPEAFEANRFYTVINKKSGEIVPMEVNFNFDDPNLIILPLAFGKRQGREFIWNDLLSLETGSLKLANGRVIEKTLYNRRTRQDEPALFVALTFERREVLDSSNIKPMNLIGVDRGENIPAVIALTDPEGCPLSRFKDSLGNPTHILRIGESYKEKQRTIQAKKEVEQRRAGGYSRKYASKAKNLADDMVRNTARDLLYYAVTQDAMLIFENLSRGFGRQGKRTFMAERQYTRMEDWLTAKLAYEGLPSKTYLSKTLAQYTSKTCSNCGFTITSADYDRVLEKLKKTATGWMTTINGKELKVEGQITYYNRYKRQNVVKDLSVELDRLSEESVNNDISSWTKGRSGEALSLLKKRFSHRPVQEKFVCLNCGFETHADEQAALNIARSWLFLRSQEYKKYQTNKTTGNTDKRAFVETWQSFYRKKLKEVWKPAV

SEQ ID NO: 30258 - protein, 980 aa, synthetic construct
  REGION 1..980: note = engineered CasX variant
QEIKRINKIRRRLVKDSNTKKAGKTRGPMKTLLVRVMTPDLRERLENLRKKPENIPQPISNTSRANLNKLLTDYTEMKKAILHVYWEEFQKDPVGLMSRVAQPASKKIDQNKLKPEMDEKGNLTTAGFACSQCGQPLFVYKLEQVSEKGKAYTNYFGRCNVAEHEKLILLAQLKPEKDSDEAVTYSLGKFGQRALDFYSIHVTKESTHPVKPLAQIAGNRYASTPVGKALSDACMGTIASFLSKYQDIIIEHQKVVKGNQKRLESLRELAGKENLEYPSVTLPPQPHTKEGVDAYNEVIARVRMWVNLNLWQKLKLSRDDAKPLLRLKGFPSFPLVERQANEVDWWDMVCNVKKLINEKKEDGKVFWQNLAGYKRQEALRPYLSSEEDRKKGKKFARYQLGDLLLHLEKKHEGEDWGKVYDEAWERIDKKVEGLSKHIKLEEERRSEDAQSKAALTDWLRAKASFVIEGLKEADKDEFCRCELKLQKWYGDLRGKPFAIEAENSILDISGFSKQYNCAFIWQKDGVKKLNLYLIINYFKGGKLRFKKIKPEAFEANRFYTVINKKSGEIVPMEVNFNFDDPNLIILPLAFGKRQGREFIWNDLLSLETGSLKLANGRVIEKTLYNRRTRQDEPALFVALTFERREVLDSSNIKPMNLIGVDRGENIPAVIALTDPEGCPLSRFKDSLGNPTHILRIGESYKEKQRTIQAKKEVEQRRAGGYSRKYASKAKNLADDMVRNTARDLLYYAVTQDAMLIFENLSRGFGRQGKRTFMAERQYTRMEDWLTAKLAYEGLPSKTYLSKTLAQYTSKTCSNCGFTITSADYDRVLEKLKKTATGWMTTINGKELKVEGQITYYNRYKRQNVVKDLSVELDRLSEESVNNDISSWTKGRSGEALSLLKKRFSHRPVQEKFVCLNCGFETHADEQAALNIARSWLFLRSQEYKKYQTNKTTGNTDKRAFVETWQSFYRKKLKEVWKPAV

SEQ ID NO: 30259 - protein, 980 aa, synthetic construct
  REGION 1..980: note = engineered CasX variant
QEIKRINKIRRRLVKDSNTKKAGKTRGPMKTLLVRVMTPDLRERLENLRKKPENIPQPISNTSRANLNKLLTDYTEMKKAILHVYWEEFQKDPVGLMSRVAQPASKKIDQNKLKPEMDEKGNLTTAGFACSQCGQPLFVYKLEQVSEKGKAYTNYFGRCNVAEHEKLILLAQLKPEKDSDEAVTYSLGKFGQRALDFYSIHVTKESTHPVKPLAQIAGNRYASAPVGKALSDACMGTIASFLSKYQDIIIEHQKVVKGNQKRLESLRELAGKENLEYPSVTLPPQPHTKEGVDAYNEVIARVRMWVNLNLWQKLKLSRDDAKPLLRLKGFPSFPLVERQANEVDWWDMVCNVKKLINEKKEDGKVFWQNLAGYKRQEALRPYLSSEEDRKKGKKFARYQLGDLLLHLEKKHEGEDWGKVYDEAWERIDKKVEGLSKHIKLEEERRSEDAQSKAALTDWLRAKASFVIEGLKEADKDEFCRCELKLQKWYGDLRGKPFAIEAENSILDISGFSKQYNCAFIWQKDGVKKLNLYLIINYFKGGKLRFKKIKPEAFEANRFYTVINKKSGEIVPMEVNFNFDDPNLIILPLAFGKRQGREFIWNDLLSLETGSLKLANGRVIEKTLYNRRTRQDEPALFVALTFERREVLDSSNIKPMNLIGVDRGENIPAVIALTDPEGCPLSRFKDSLGNPTHILRIGESYKEKQRTIQAKKEVEQRRAGGYSRKYASKAKNLADDMVRNTARDLLYYAVTQDAMLIFENLSRGFGRQGKRTFMAERQYTRMEDWLTAKLAYEGLPSKTYLSKTLAQYTSKTCSNCGFTITSADYDRVLEKLKKTATGWMTTINGKELKVEGQITYYNRYKRQNVVKDLSVELDRLSEESVNNDISSWTKGRSGEALSLLKKRFSHRPVQEKFVCLNCGFETHADEQAALNIARSWLFLRSQEYKKYQTNKTTGNTDKRAFVETWQSFYRKKLKEVWKPAV

SEQ ID NO: 30260 - protein, 980 aa, synthetic construct
  REGION 1..980: note = engineered CasX variant
QEIKRINKIRRRLVKDSNTKKAGKTRGPMKTLLVRVMTPDLRERLENLRKKPENIPQPISNTSRANLNKLLTDYTEMKKAILHVYWEEFQKDPVGLMSRVAQPASKKIDQNKLKPEMDEKGNLTTAGFACSQCGQPLFVYKLEQVSEKGKAYTNYFGRCNVAEHEKLILLAQLKPEKDSDEAVTYSLGKFGQRALDFYSIHVTKESTHPVKPLAQIAGNRYASVPVGKALSDACMGTIASFLSKYQDIIIEHQKVVKGNQKRLESLRELAGKENLEYPSVTLPPQPHTKEGVDAYNEVIARVRMWVNLNLWQKLKLSRDDAKPLLRLKGFPSFPLVERQANEVDWWDMVCNVKKLINEKKEDGKVFWQNLAGYKRQEALRPYLSSEEDRKKGKKFARYQLGDLLLHLEKKHEGEDWGKVYDEAWERIDKKVEGLSKHIKLEEERRSEDAQSKAALTDWLRAKASFVIEGLKEADKDEFCRCELKLQKWYGDLRGKPFAIEAENSILDISGFSKQYNCAFIWQKDGVKKLNLYLIINYFKGGKLRFKKIKPEAFEANRFYTVINKKSGEIVPMEVNFNFDDPNLIILPLAFGKRQGREFIWNDLLSLETGSLKLANGRVIEKTLYNRRTRQDEPALFVALTFERREVLDSSNIKPMNLIGVDRGENIPAVIALTDPEGCPLSRFKDSLGNPTHILRIGESYKEKQRTIQAKKEVEQRRAGGYSRKYASKAKNLADDMVRNTARDLLYYAVTQDAMLIFENLSRGFGRQGKRTFMAERQYTRMEDWLTAKLAYEGLPSKTYLSKTLAQYTSKTCSNCGFTITSADYDRVLEKLKKTATGWMTTINGKELKVEGQITYYNRYKRQNVVKDLSVELDRLSEESVNNDISSWTKGRSGEALSLLKKRFSHRPVQEKFVCLNCGFETHADEQAALNIARSWLFLRSQEYKKYQTNKTTGNTDKRAFVETWQSFYRKKLKEVWKPAV

SEQ ID NO: 30261 - protein, 980 aa, synthetic construct
  REGION 1..980: note = engineered CasX variant
QEIKRINKIRRRLVKDSNTKKAGKTRGPMKTLLVRVMTPDLRERLENLRKKPENIPQPISNTSRANLNKLLTDYTEMKKAILHVYWEEFQKDPVGLMSRVAQPASKKIDQNKLKPEMDEKGNLTTAGFACSQCGQPLFVYKLEQVSEKGKAYTNYFGRCNVAEHEKLIKLAQLKPEKDSDEAVTYSLGKFGQRALDFYSIHVTKESTHPVKPLAQIAGNRYASGPVGKALSDACMGTIASFLSKYQDIIIEHQKVVKGNQKRLESLRELAGKENLEYPSVTLPPQPHTKEGVDAYNEVIARVRMWVNLNLWQKLKLSRDDAKPLLRLKGFPSFPLVERQANEVDWWDMVCNVKKLINEKKEDGKVFWQNLAGYKRQEALRPYLSSEEDRKKGKKFARYQLGDLLLHLEKKHEGEDWGKVYDEAWERIDKKVEGLSKHIKLEEERRSEDAQSKAALTDWLRAKASFVIEGLKEADKDEFCRCELKLQKWYGDLRGKPFAIEAENSILDISGFSKQYNCAFIWQKDGVKKLNLYLIINYFKGGKLRFKKIKPEAFEANRFYTVINKKSGEIVPMEVNFNFDDPNLIILPLAFGKRQGREFIWNDLLSLETGSLKLANGRVIEKTLYNRRTRQDEPALFVALTFERREVLDSSNIKPMNLIGVDRGENIPAVIALTDPEGCPLSRFKDSLGNPTHILRIGESYKEKQRTIQAKKEVEQRRAGGYSRKYASKAKNLADDMVRNTARDLLYYAVTQDAMLIFENLSRGFGRQGKRTFMAERQYTRMEDWLTAKLAYEGLPSKTYLSKTLAQYTSKTCSNCGFTITSADYDRVLEKLKKTATGWMTTINGKELKVEGQITYYNRYKRQNVVKDLSVELDRLSEESVNNDISSWTKGRSGEALSLLKKRFSHRPVQEKFVCLNCGFETHADEQAALNIARSWLFLRSQEYKKYQTNKTTGNTDKRAFVETWQSFYRKKLKEVWKPAV

SEQ ID NO: 30262 - protein, 979 aa, synthetic construct
  REGION 1..979: note = engineered CasX variant
QEIKRINKIRRRLVKDSNTKKAGKTRGPMKTLLVRVMTPDLRERLENLRKKPENIPQPISNTSRANLNKLLTDYTEMKKAILHVYWEEFQKDPVGLMSRVAQPASKKIDQNKLKPEMDEKGNLTTAGFACSQCGQPLFVYKLEQVSEKGKAYTNYFGRCNVAEHEKLILLAQLKPEKDSDEAVTYSLGKFGQRALDFYSIHVTKESTHPVKPLAQIAGNRYASPVGKALSDACMGTIASFLSKYQDIIIEHQKVVKGNQKRLESLRELAGKENLEYPSVTLPPQPHTKEGVDAYNEVIARVRMWVNLNLWQKLKLSRDDAKPLLRLKGFPSFPLVERQANEVDWWDMVCNVKKLINEKKEDGKVFWQNLAGYKRQEALRPYLSSEEDRKKGKKFARYQLGDLLLHLEKKHEGEDWGKVYDEAWERIDKKVEGLSKHIKLEEERRSEDAQSKAALTDWLRAKASFVIEGLKEADKDEFCRCELKLQKWYGDLRGKPFAIEAENSILDISGFSKQYNCAFIWQKDGVKKLNLYLIINYFKGGKLRFKKIKPEAFEANRFYTVINKKSGEIVPMEVNFNFDDPNLIILPLAFGKRQGREFIWNDLLSLETGSLKLANGRVIEKTLYNRRTRQDEPALFVALTFERREVLDSSNIKPMNLIGVDRGENIPAVIALTDPEGCPLSRFKDSLGNPTHILRIGESYKEKQRTIQAKKEVEQRRAGGYSRKYASKAKNLADDMVRNTARDLLYYAVTQDAMLIFENLSRGFGRQGKRTFMAERQYTRMEDWLTAKLAYEGLPSKTYLSKTLAQYTSKTCSNCGFTITSADYDRVLEKLKKTATGWMTTINGKELKVEGQITYYNRYKRQNVVKDLSVELDRLSEESVNNDISSWTKGRSGEALSLLKKRFSHRPVQEKFVCLNCGFETHADEQAALNIARSWLFLRSQEYKKYQTNKTTGNTDKRAFVETWQSFYRKKLKEVWKPAV

SEQ ID NO: 30263 - protein, 979 aa, synthetic construct
  REGION 1..979: note = engineered CasX variant
QEIKRINKIRRRLVKDSNTKKAGKTRGPMKTLLVRVMTPDLRERLENLRKKPENIPQPISNTSRANLNKLLTDYTEMKKAILHVYWEEFQKDPVGLMSRVAQPASKKIDQNKLKPEMDEKGNLTTAGFACSQCGQPLFVYKLEQVSEKGKAYTNYFGRCNVAEHEKLILLAQLKPEKDSDEAVTYSLGKFGQRALDFYSIHVTKESTHPVKPLAQIAGNRYASYPVGKALSDACMGTIASFLSKYQDIIIEHQKVVKGNQKRLESLRELAGKENLEYPSVTLPPQPHTKEGVDAYNEVIARVRMWVNLNLWQKLKLSRDDAKPLLRLKGFPSFPLVERQANEVDWWDMVCNVKKLINEKKEDGKVFWQNLAGYKRQEALRPYLSSEEDRKKGKKFARYQLGDLLLHLEKKHGEDWGKVYDEAWERIDKKVEGLSKHIKLEEERRSEDAQSKAALTDWLRAKASFVIEGLKEADKDEFCRCDLKLQKWYGDLRGKPFAIEAENSILDISGFSKQYNCAFIWQKDGVKKLNLYLIINYFKGGKLRFKKIKPEAFEANRFYTVINKKSGEIVPMEVNFNFDDPNLIILPLAFGKRQGREFIWNDLLSLETGSLKLANGRVIEKTLYNRRTRQDEPALFVALTFERREVLDSSNIKPMNLIGVDRGENIPAVIALTDPEGCPLSRFKDSLGNPTHILRIGESYKEKQRTIQAKKEVEQRRAGGYSRKYASKAKNLADDMVRNTARDLLYYAVTQDAMLIFENLSRGFGRQGKRTFMAERQYTRMEDWLTAKLAYEGLPSKTYLSKTLAQYTSKTCSNCGFTITSADYDRVLEKLKKTATGWMTTINGKELKVEGQITYYNRYKRQNVVKDLSVELDRLSEESVNNDISSWTKGRSGEALSLLKKRFSHRPVQEKFVCLNCGFETHADEQAALNIARSWLFLRSQEYKKYQTNKTTGNTDKRAFVETWQSFYRKKLKEVWKPAV

SEQ ID NO: 30264 - protein, 979 aa, synthetic construct
  REGION 1..979: note = engineered CasX variant
QEIKRINKIRRRLVKDSNTKKAGKTRGPMKTLLVRVMTPDLRERLENLRKKPENIPQPISNTSRANLNKLLTDYTEMKKAILHVYWEEFQKDPVGLMSRVAQPASKKIDQNKLKPEMDEKGNLTTAGFACSQCGQPLFVYKLEQVSEKGKAYTNYFGRCNVAEHEKLILLAQLKPEKDSDEAVTYSLGKFGQRALDFYSIHVTKESTHPVKPLAQIAGNRYASHPVGKALSDACMGTIASFLSKYQDIIIEHQKVVKGNQKRLESLRELAGKENLEYPSVTLPPQPHTKEGVDAYNEVIARVRMWVNLNLWQKLKLSRDDAKPLLRLKGFPSFPLVERQANEVDWWDMVCNVKKLINEKKEDGKVFWQNLAGYKRQEALRPYLSSEEDRKKGKKFARYQLGDLLLHLEKKHGEDWGKVYDEAWERIDKKVEGLSKHIKLEEERRSEDAQSKAALTDWLRAKASFVIEGLKEADKDEFCRCDLKLQKWYGDLRGKPFAIEAENSILDISGFSKQYNCAFIWQKDGVKKLNLYLIINYFKGGKLRFKKIKPEAFEANRFYTVINKKSGEIVPMEVNFNFDDPNLIILPLAFGKRQGREFIWNDLLSLETGSLKLANGRVIEKTLYNRRTRQDEPALFVALTFERREVLDSSNIKPMNLIGVDRGENIPAVIALTDPEGCPLSRFKDSLGNPTHILRIGESYKEKQRTIQAKKEVEQRRAGGYSRKYASKAKNLADDMVRNTARDLLYYAVTQDAMLIFENLSRGFGRQGKRTFMAERQYTRMEDWLTAKLAYEGLPSKTYLSKTLAQYTSKTCSNCGFTITSADYDRVLEKLKKTATGWMTTINGKELKVEGQITYYNRYKRQNVVKDLSVELDRLSEESVNNDISSWTKGRSGEALSLLKKRFSHRPVQEKFVCLNCGFETHADEQAALNIARSWLFLRSQEYKKYQTNKTTGNTDKRAFVETWQSFYRKKLKEVWKPAV

SEQ ID NO: 30265 - protein, 979 aa, synthetic construct
  REGION 1..979: note = engineered CasX variant
QEIKRINKIRRRLVKDSNTKKAGKTRGPMKTLLVRVMTPDLRERLENLRKKPENIPQPISNTSRANLNKLLTDYTEMKKAILHVYWEEFQKDPVGLMSRVAQPASKKIDQNKLKPEMDEKGNLTTAGFACSQCGQPLFVYKLEQVSEKGKAYTNYFGRCNVAEHEKLILLAQLKPEKDSDEAVTYSLGKFGQRALDFYSIHVTKESTHPVKPLAQIAGNRYASSPVGKALSDACMGTIASFLSKYQDIIIEHQKVVKGNQKRLESLRELAGKENLEYPSVTLPPQPHTKEGVDAYNEVIARVRMWVNLNLWQKLKLSRDDAKPLLRLKGFPSFPLVERQANEVDWWDMVCNVKKLINEKKEDGKVFWQNLAGYKRQEALRPYLSSEEDRKKGKKFARYQLGDLLLHLEKKHGEDWGKVYDEAWERIDKKVEGLSKHIKLEEERRSEDAQSKAALTDWLRAKASFVIEGLKEADKDEFCRCDLKLQKWYGDLRGKPFAIEAENSILDISGFSKQYNCAFIWQKDGVKKLNLYLIINYFKGGKLRFKKIKPEAFEANRFYTVINKKSGEIVPMEVNFNFDDPNLIILPLAFGKRQGREFIWNDLLSLETGSLKLANGRVIEKTLYNRRTRQDEPALFVALTFERREVLDSSNIKPMNLIGVDRGENIPAVIALTDPEGCPLSRFKDSLGNPTHILRIGESYKEKQRTIQAKKEVEQRRAGGYSRKYASKAKNLADDMVRNTARDLLYYAVTQDAMLIFENLSRGFGRQGKRTFMAERQYTRMEDWLTAKLAYEGLPSKTYLSKTLAQYTSKTCSNCGFTITSADYDRVLEKLKKTATGWMTTINGKELKVEGQITYYNRYKRQNVVKDLSVELDRLSEESVNNDISSWTKGRSGEALSLLKKRFSHRPVQEKFVCLNCGFETHADEQAALNIARSWLFLRSQEYKKYQTNKTTGNTDKRAFVETWQSFYRKKLKEVWKPAV

SEQ ID NO: 30266 - protein, 979 aa, synthetic construct
  REGION 1..979: note = engineered CasX variant
QEIKRINKIRRRLVKDSNTKKAGKTRGPMKTLLVRVMTPDLRERLENLRKKPENIPQPISNTSRANLNKLLTDYTEMKKAILHVYWEEFQKDPVGLMSRVAQPASKKIDQNKLKPEMDEKGNLTTAGFACSQCGQPLFVYKLEQVSEKGKAYTNYFGRCNVAEHEKLILLAQLKPEKDSDEAVTYSLGKFGQRALDFYSIHVTKESTHPVKPLAQIAGNRYASTPVGKALSDACMGTIASFLSKYQDIIIEHQKVVKGNQKRLESLRELAGKENLEYPSVTLPPQPHTKEGVDAYNEVIARVRMWVNLNLWQKLKLSRDDAKPLLRLKGFPSFPLVERQANEVDWWDMVCNVKKLINEKKEDGKVFWQNLAGYKRQEALRPYLSSEEDRKKGKKFARYQLGDLLLHLEKKHGEDWGKVYDEAWERIDKKVEGLSKHIKLEEERRSEDAQSKAALTDWLRAKASFVIEGLKEADKDEFCRCDLKLQKWYGDLRGKPFAIEAENSILDISGFSKQYNCAFIWQKDGVKKLNLYLIINYFKGGKLRFKKIKPEAFEANRFYTVINKKSGEIVPMEVNFNFDDPNLIILPLAFGKRQGREFIWNDLLSLETGSLKLANGRVIEKTLYNRRTRQDEPALFVALTFERREVLDSSNIKPMNLIGVDRGENIPAVIALTDPEGCPLSRFKDSLGNPTHILRIGESYKEKQRTIQAKKEVEQRRAGGYSRKYASKAKNLADDMVRNTARDLLYYAVTQDAMLIFENLSRGFGRQGKRTFMAERQYTRMEDWLTAKLAYEGLPSKTYLSKTLAQYTSKTCSNCGFTITSADYDRVLEKLKKTATGWMTTINGKELKVEGQITYYNRYKRQNVVKDLSVELDRLSEESVNNDISSWTKGRSGEALSLLKKRFSHRPVQEKFVCLNCGFETHADEQAALNIARSWLFLRSQEYKKYQTNKTTGNTDKRAFVETWQSFYRKKLKEVWKPAV

SEQ ID NO: 30267 - protein, 979 aa, synthetic construct
  REGION 1..979: note = engineered CasX variant
QEIKRINKIRRRLVKDSNTKKAGKTRGPMKTLLVRVMTPDLRERLENLRKKPENIPQPISNTSRANLNKLLTDYTEMKKAILHVYWEEFQKDPVGLMSRVAQPASKKIDQNKLKPEMDEKGNLTTAGFACSQCGQPLFVYKLEQVSEKGKAYTNYFGRCNVAEHEKLILLAQLKPEKDSDEAVTYSLGKFGQRALDFYSIHVTKESTHPVKPLAQIAGNRYASAPVGKALSDACMGTIASFLSKYQDIIIEHQKVVKGNQKRLESLRELAGKENLEYPSVTLPPQPHTKEGVDAYNEVIARVRMWVNLNLWQKLKLSRDDAKPLLRLKGFPSFPLVERQANEVDWWDMVCNVKKLINEKKEDGKVFWQNLAGYKRQEALRPYLSSEEDRKKGKKFARYQLGDLLLHLEKKHGEDWGKVYDEAWERIDKKVEGLSKHIKLEEERRSEDAQSKAALTDWLRAKASFVIEGLKEADKDEFCRCDLKLQKWYGDLRGKPFAIEAENSILDISGFSKQYNCAFIWQKDGVKKLNLYLIINYFKGGKLRFKKIKPEAFEANRFYTVINKKSGEIVPMEVNFNFDDPNLIILPLAFGKRQGREFIWNDLLSLETGSLKLANGRVIEKTLYNRRTRQDEPALFVALTFERREVLDSSNIKPMNLIGVDRGENIPAVIALTDPEGCPLSRFKDSLGNPTHILRIGESYKEKQRTIQAKKEVEQRRAGGYSRKYASKAKNLADDMVRNTARDLLYYAVTQDAMLIFENLSRGFGRQGKRTFMAERQYTRMEDWLTAKLAYEGLPSKTYLSKTLAQYTSKTCSNCGFTITSADYDRVLEKLKKTATGWMTTINGKELKVEGQITYYNRYKRQNVVKDLSVELDRLSEESVNNDISSWTKGRSGEALSLLKKRFSHRPVQEKFVCLNCGFETHADEQAALNIARSWLFLRSQEYKKYQTNKTTGNTDKRAFVETWQSFYRKKLKEVWKPAV

SEQ ID NO: 30268 - protein, 979 aa, synthetic construct
  REGION 1..979: note = engineered CasX variant
QEIKRINKIRRRLVKDSNTKKAGKTRGPMKTLLVRVMTPDLRERLENLRKKPENIPQPISNTSRANLNKLLTDYTEMKKAILHVYWEEFQKDPVGLMSRVAQPASKKIDQNKLKPEMDEKGNLTTAGFACSQCGQPLFVYKLEQVSEKGKAYTNYFGRCNVAEHEKLILLAQLKPEKDSDEAVTYSLGKFGQRALDFYSIHVTKESTHPVKPLAQIAGNRYASVPVGKALSDACMGTIASFLSKYQDIIIEHQKVVKGNQKRLESLRELAGKENLEYPSVTLPPQPHTKEGVDAYNEVIARVRMWVNLNLWQKLKLSRDDAKPLLRLKGFPSFPLVERQANEVDWWDMVCNVKKLINEKKEDGKVFWQNLAGYKRQEALRPYLSSEEDRKKGKKFARYQLGDLLLHLEKKHGEDWGKVYDEAWERIDKKVEGLSKHIKLEEERRSEDAQSKAALTDWLRAKASFVIEGLKEADKDEFCRCDLKLQKWYGDLRGKPFAIEAENSILDISGFSKQYNCAFIWQKDGVKKLNLYLIINYFKGGKLRFKKIKPEAFEANRFYTVINKKSGEIVPMEVNFNFDDPNLIILPLAFGKRQGREFIWNDLLSLETGSLKLANGRVIEKTLYNRRTRQDEPALFVALTFERREVLDSSNIKPMNLIGVDRGENIPAVIALTDPEGCPLSRFKDSLGNPTHILRIGESYKEKQRTIQAKKEVEQRRAGGYSRKYASKAKNLADDMVRNTARDLLYYAVTQDAMLIFENLSRGFGRQGKRTFMAERQYTRMEDWLTAKLAYEGLPSKTYLSKTLAQYTSKTCSNCGFTITSADYDRVLEKLKKTATGWMTTINGKELKVEGQITYYNRYKRQNVVKDLSVELDRLSEESVNNDISSWTKGRSGEALSLLKKRFSHRPVQEKFVCLNCGFETHADEQAALNIARSWLFLRSQEYKKYQTNKTTGNTDKRAFVETWQSFYRKKLKEVWKPAV

SEQ ID NO: 30269 - protein, 979 aa, synthetic construct
  REGION 1..979: note = engineered CasX variant
QEIKRINKIRRRLVKDSNTKKAGKTRGPMKTLLVRVMTPDLRERLENLRKKPENIPQPISNTSRANLNKLLTDYTEMKKAILHVYWEEFQKDPVGLMSRVAQPASKKIDQNKLKPEMDEKGNLTTAGFACSQCGQPLFVYKLEQVSEKGKAYTNYFGRCNVAEHEKLIKLAQLKPEKDSDEAVTYSLGKFGQRALDFYSIHVTKESTHPVKPLAQIAGNRYASGPVGKALSDACMGTIASFLSKYQDIIIEHQKVVKGNQKRLESLRELAGKENLEYPSVTLPPQPHTKEGVDAYNEVIARVRMWVNLNLWQKLKLSRDDAKPLLRLKGFPSFPLVERQANEVDWWDMVCNVKKLINEKKEDGKVFWQNLAGYKRQEALRPYLSSEEDRKKGKKFARYQLGDLLLHLEKKHGEDWGKVYDEAWERIDKKVEGLSKHIKLEEERRSEDAQSKAALTDWLRAKASFVIEGLKEADKDEFCRCDLKLQKWYGDLRGKPFAIEAENSILDISGFSKQYNCAFIWQKDGVKKLNLYLIINYFKGGKLRFKKIKPEAFEANRFYTVINKKSGEIVPMEVNFNFDDPNLIILPLAFGKRQGREFIWNDLLSLETGSLKLANGRVIEKTLYNRRTRQDEPALFVALTFERREVLDSSNIKPMNLIGVDRGENIPAVIALTDPEGCPLSRFKDSLGNPTHILRIGESYKEKQRTIQAKKEVEQRRAGGYSRKYASKAKNLADDMVRNTARDLLYYAVTQDAMLIFENLSRGFGRQGKRTFMAERQYTRMEDWLTAKLAYEGLPSKTYLSKTLAQYTSKTCSNCGFTITSADYDRVLEKLKKTATGWMTTINGKELKVEGQITYYNRYKRQNVVKDLSVELDRLSEESVNNDISSWTKGRSGEALSLLKKRFSHRPVQEKFVCLNCGFETHADEQAALNIARSWLFLRSQEYKKYQTNKTTGNTDKRAFVETWQSFYRKKLKEVWKPAV

SEQ ID NO: 30270 - protein, 978 aa, synthetic construct
  REGION 1..978: note = engineered CasX variant
QEIKRINKIRRRLVKDSNTKKAGKTRGPMKTLLVRVMTPDLRERLENLRKKPENIPQPISNTSRANLNKLLTDYTEMKKAILHVYWEEFQKDPVGLMSRVAQPASKKIDQNKLKPEMDEKGNLTTAGFACSQCGQPLFVYKLEQVSEKGKAYTNYFGRCNVAEHEKLILLAQLKPEKDSDEAVTYSLGKFGQRALDFYSIHVTKESTHPVKPLAQIAGNRYASPVGKALSDACMGTIASFLSKYQDIIIEHQKVVKGNQKRLESLRELAGKENLEYPSVTLPPQPHTKEGVDAYNEVIARVRMWVNLNLWQKLKLSRDDAKPLLRLKGFPSFPLVERQANEVDWWDMVCNVKKLINEKKEDGKVFWQNLAGYKRQEALRPYLSSEEDRKKGKKFARYQLGDLLLHLEKKHGEDWGKVYDEAWERIDKKVEGLSKHIKLEEERRSEDAQSKAALTDWLRAKASFVIEGLKEADKDEFCRCDLKLQKWYGDLRGKPFAIEAENSILDISGFSKQYNCAFIWQKDGVKKLNLYLIINYFKGGKLRFKKIKPEAFEANRFYTVINKKSGEIVPMEVNFNFDDPNLIILPLAFGKRQGREFIWNDLLSLETGSLKLANGRVIEKTLYNRRTRQDEPALFVALTFERREVLDSSNIKPMNLIGVDRGENIPAVIALTDPEGCPLSRFKDSLGNPTHILRIGESYKEKQRTIQAKKEVEQRRAGGYSRKYASKAKNLADDMVRNTARDLLYYAVTQDAMLIFENLSRGFGRQGKRTFMAERQYTRMEDWLTAKLAYEGLPSKTYLSKTLAQYTSKTCSNCGFTITSADYDRVLEKLKKTATGWMTTINGKELKVEGQITYYNRYKRQNVVKDLSVELDRLSEESVNNDISSWTKGRSGEALSLLKKRFSHRPVQEKFVCLNCGFETHADEQAALNIARSWLFLRSQEYKKYQTNKTTGNTDKRAFVETWQSFYRKKLKEVWKPAV

SEQ ID NO: 30271 - protein, 979 aa, synthetic construct
  REGION 1..979: note = engineered CasX variant
QEIKRINKIRRRLVKDSNTKKAGKTRGPMKTLLVRVMTPDLRERLENLRKKPENIPQPISNTSRANLNKLLTDYTEMKKAILHVYWEEFQKDPVGLMSRVAQPASKKIDQNKLKPEMDEKGNLTTAGFACSQCGQPLFVYKLEQVSEKGKAYTNYFGRCNVAEHEKLILLAQLKPEKDSDEAVTYSLGKFGQRALDFYSIHVTKESTHPVKPLAQIAGNRYASYPVGKALSDACMGTIASFLSKYQDIIIEHQKVVKGNQKRLESLRELAGKENLEYPSVTLPPQPHTKEGVDAYNEVIARVRMWVNLNLWQKLKLSRDDAKPLLRLKGFPSFPLVERQANEVDWWDMVCNVKKLINEKKEDGKVFWQNLAGYKRQEALRPYLSSEEDRKKGKKFARYQLGDLLLHLEKKHGEDWGKVYDEAWERIDKKVEGLSKHIKLEEERRSEDAQSKAALTDWLRAKASFVIEGLKEADKDEFCRCELKLQKWYGDLRGKPFAIEAENSILDISGFSKQYNCAFIWQKDGVKKLNLYLIINYFKGGKLRFKKIKPEAFEANRFYTVINKKSGEIVPMEVNFNFDDPNLIILPLAFGKRFGREFIWNDLLSLETGSLKLANGRVIEKTLYNRRTRQDEPALFVALTFERREVLDSSNIKPMNLIGVDRGENIPAVIALTDPEGCPLSRFKDSLGNPTHILRIGESYKEKQRTIQAKKEVEQRRAGGYSRKYASKAKNLADDMVRNTARDLLYYAVTQDAMLIFENLSRGFGRQGKRTFMAERQYTRMEDWLTAKLAYEGLPSKTYLSKTLAQYTSKTCSNCGFTITSADYDRVLEKLKKTATGWMTTINGKELKVEGQITYYNRYKRQNVVKDLSVELDRLSEESVNNDISSWTKGRSGEALSLLKKRFSHRPVQEKFVCLNCGFETHADEQAALNIARSWLFLRSQEYKKYQTNKTTGNTDKRAFVETWQSFYRKKLKEVWKPAV

SEQ ID NO: 30272 - protein, 979 aa, synthetic construct
  REGION 1..979: note = engineered CasX variant
QEIKRINKIRRRLVKDSNTKKAGKTRGPMKTLLVRVMTPDLRERLENLRKKPENIPQPISNTSRANLNKLLTDYTEMKKAILHVYWEEFQKDPVGLMSRVAQPASKKIDQNKLKPEMDEKGNLTTAGFACSQCGQPLFVYKLEQVSEKGKAYTNYFGRCNVAEHEKLILLAQLKPEKDSDEAVTYSLGKFGQRALDFYSIHVTKESTHPVKPLAQIAGNRYASHPVGKALSDACMGTIASFLSKYQDIIIEHQKVVKGNQKRLESLRELAGKENLEYPSVTLPPQPHTKEGVDAYNEVIARVRMWVNLNLWQKLKLSRDDAKPLLRLKGFPSFPLVERQANEVDWWDMVCNVKKLINEKKEDGKVFWQNLAGYKRQEALRPYLSSEEDRKKGKKFARYQLGDLLLHLEKKHGEDWGKVYDEAWERIDKKVEGLSKHIKLEEERRSEDAQSKAALTDWLRAKASFVIEGLKEADKDEFCRCELKLQKWYGDLRGKPFAIEAENSILDISGFSKQYNCAFIWQKDGVKKLNLYLIINYFKGGKLRFKKIKPEAFEANRFYTVINKKSGEIVPMEVNFNFDDPNLIILPLAFGKRFGREFIWNDLLSLETGSLKLANGRVIEKTLYNRRTRQDEPALFVALTFERREVLDSSNIKPMNLIGVDRGENIPAVIALTDPEGCPLSRFKDSLGNPTHILRIGESYKEKQRTIQAKKEVEQRRAGGYSRKYASKAKNLADDMVRNTARDLLYYAVTQDAMLIFENLSRGFGRQGKRTFMAERQYTRMEDWLTAKLAYEGLPSKTYLSKTLAQYTSKTCSNCGFTITSADYDRVLEKLKKTATGWMTTINGKELKVEGQITYYNRYKRQNVVKDLSVELDRLSEESVNNDISSWTKGRSGEALSLLKKRFSHRPVQEKFVCLNCGFETHADEQAALNIARSWLFLRSQEYKKYQTNKTTGNTDKRAFVETWQSFYRKKLKEVWKPAV

SEQ ID NO: 30273 - protein, 979 aa, synthetic construct
  REGION 1..979: note = engineered CasX variant
QEIKRINKIRRRLVKDSNTKKAGKTRGPMKTLLVRVMTPDLRERLENLRKKPENIPQPISNTSRANLNKLLTDYTEMKKAILHVYWEEFQKDPVGLMSRVAQPASKKIDQNKLKPEMDEKGNLTTAGFACSQCGQPLFVYKLEQVSEKGKAYTNYFGRCNVAEHEKLILLAQLKPEKDSDEAVTYSLGKFGQRALDFYSIHVTKESTHPVKPLAQIAGNRYASSPVGKALSDACMGTIASFLSKYQDIIIEHQKVVKGNQKRLESLRELAGKENLEYPSVTLPPQPHTKEGVDAYNEVIARVRMWVNLNLWQKLKLSRDDAKPLLRLKGFPSFPLVERQANEVDWWDMVCNVKKLINEKKEDGKVFWQNLAGYKRQEALRPYLSSEEDRKKGKKFARYQLGDLLLHLEKKHGEDWGKVYDEAWERIDKKVEGLSKHIKLEEERRSEDAQSKAALTDWLRAKASFVIEGLKEADKDEFCRCELKLQKWYGDLRGKPFAIEAENSILDISGFSKQYNCAFIWQKDGVKKLNLYLIINYFKGGKLRFKKIKPEAFEANRFYTVINKKSGEIVPMEVNFNFDDPNLIILPLAFGKRFGREFIWNDLLSLETGSLKLANGRVIEKTLYNRRTRQDEPALFVALTFERREVLDSSNIKPMNLIGVDRGENIPAVIALTDPEGCPLSRFKDSLGNPTHILRIGESYKEKQRTIQAKKEVEQRRAGGYSRKYASKAKNLADDMVRNTARDLLYYAVTQDAMLIFENLSRGFGRQGKRTFMAERQYTRMEDWLTAKLAYEGLPSKTYLSKTLAQYTSKTCSNCGFTITSADYDRVLEKLKKTATGWMTTINGKELKVEGQITYYNRYKRQNVVKDLSVELDRLSEESVNNDISSWTKGRSGEALSLLKKRFSHRPVQEKFVCLNCGFETHADEQAALNIARSWLFLRSQEYKKYQTNKTTGNTDKRAFVETWQSFYRKKLKEVWKPAV

SEQ ID NO: 30274 - protein, 979 aa, synthetic construct
  REGION 1..979: note = engineered CasX variant
QEIKRINKIRRRLVKDSNTKKAGKTRGPMKTLLVRVMTPDLRERLENLRKKPENIPQPISNTSRANLNKLLTDYTEMKKAILHVYWEEFQKDPVGLMSRVAQPASKKIDQNKLKPEMDEKGNLTTAGFACSQCGQPLFVYKLEQVSEKGKAYTNYFGRCNVAEHEKLILLAQLKPEKDSDEAVTYSLGKFGQRALDFYSIHVTKESTHPVKPLAQIAGNRYASTPVGKALSDACMGTIASFLSKYQDIIIEHQKVVKGNQKRLESLRELAGKENLEYPSVTLPPQPHTKEGVDAYNEVIARVRMWVNLNLWQKLKLSRDDAKPLLRLKGFPSFPLVERQANEVDWWDMVCNVKKLINEKKEDGKVFWQNLAGYKRQEALRPYLSSEEDRKKGKKFARYQLGDLLLHLEKKHGEDWGKVYDEAWERIDKKVEGLSKHIKLEEERRSEDAQSKAALTDWLRAKASFVIEGLKEADKDEFCRCELKLQKWYGDLRGKPFAIEAENSILDISGFSKQYNCAFIWQKDGVKKLNLYLIINYFKGGKLRFKKIKPEAFEANRFYTVINKKSGEIVPMEVNFNFDDPNLIILPLAFGKRFGREFIWNDLLSLETGSLKLANGRVIEKTLYNRRTRQDEPALFVALTFERREVLDSSNIKPMNLIGVDRGENIPAVIALTDPEGCPLSRFKDSLGNPTHILRIGESYKEKQRTIQAKKEVEQRRAGGYSRKYASKAKNLADDMVRNTARDLLYYAVTQDAMLIFENLSRGFGRQGKRTFMAERQYTRMEDWLTAKLAYEGLPSKTYLSKTLAQYTSKTCSNCGFTITSADYDRVLEKLKKTATGWMTTINGKELKVEGQITYYNRYKRQNVVKDLSVELDRLSEESVNNDISSWTKGRSGEALSLLKKRFSHRPVQEKFVCLNCGFETHADEQAALNIARSWLFLRSQEYKKYQTNKTTGNTDKRAFVETWQSFYRKKLKEVWKPAV

SEQ ID NO: 30275 - protein, 979 aa, synthetic construct
  REGION 1..979: note = engineered CasX variant
QEIKRINKIRRRLVKDSNTKKAGKTRGPMKTLLVRVMTPDLRERLENLRKKPENIPQPISNTSRANLNKLLTDYTEMKKAILHVYWEEFQKDPVGLMSRVAQPASKKIDQNKLKPEMDEKGNLTTAGFACSQCGQPLFVYKLEQVSEKGKAYTNYFGRCNVAEHEKLILLAQLKPEKDSDEAVTYSLGKFGQRALDFYSIHVTKESTHPVKPLAQIAGNRYASAPVGKALSDACMGTIASFLSKYQDIIIEHQKVVKGNQKRLESLRELAGKENLEYPSVTLPPQPHTKEGVDAYNEVIARVRMWVNLNLWQKLKLSRDDAKPLLRLKGFPSFPLVERQANEVDWWDMVCNVKKLINEKKEDGKVFWQNLAGYKRQEALRPYLSSEEDRKKGKKFARYQLGDLLLHLEKKHGEDWGKVYDEAWERIDKKVEGLSKHIKLEEERRSEDAQSKAALTDWLRAKASFVIEGLKEADKDEFCRCELKLQKWYGDLRGKPFAIEAENSILDISGFSKQYNCAFIWQKDGVKKLNLYLIINYFKGGKLRFKKIKPEAFEANRFYTVINKKSGEIVPMEVNFNFDDPNLIILPLAFGKRFGREFIWNDLLSLETGSLKLANGRVIEKTLYNRRTRQDEPALFVALTFERREVLDSSNIKPMNLIGVDRGENIPAVIALTDPEGCPLSRFKDSLGNPTHILRIGESYKEKQRTIQAKKEVEQRRAGGYSRKYASKAKNLADDMVRNTARDLLYYAVTQDAMLIFENLSRGFGRQGKRTFMAERQYTRMEDWLTAKLAYEGLPSKTYLSKTLAQYTSKTCSNCGFTITSADYDRVLEKLKKTATGWMTTINGKELKVEGQITYYNRYKRQNVVKDLSVELDRLSEESVNNDISSWTKGRSGEALSLLKKRFSHRPVQEKFVCLNCGFETHADEQAALNIARSWLFLRSQEYKKYQTNKTTGNTDKRAFVETWQSFYRKKLKEVWKPAV

SEQ ID NO: 30276 - protein, 979 aa, synthetic construct
  REGION 1..979: note = engineered CasX variant
QEIKRINKIRRRLVKDSNTKKAGKTRGPMKTLLVRVMTPDLRERLENLRKKPENIPQPISNTSRANLNKLLTDYTEMKKAILHVYWEEFQKDPVGLMSRVAQPASKKIDQNKLKPEMDEKGNLTTAGFACSQCGQPLFVYKLEQVSEKGKAYTNYFGRCNVAEHEKLILLAQLKPEKDSDEAVTYSLGKFGQRALDFYSIHVTKESTHPVKPLAQIAGNRYASVPVGKALSDACMGTIASFLSKYQDIIIEHQKVVKGNQKRLESLRELAGKENLEYPSVTLPPQPHTKEGVDAYNEVIARVRMWVNLNLWQKLKLSRDDAKPLLRLKGFPSFPLVERQANEVDWWDMVCNVKKLINEKKEDGKVFWQNLAGYKRQEALRPYLSSEEDRKKGKKFARYQLGDLLLHLEKKHGEDWGKVYDEAWERIDKKVEGLSKHIKLEEERRSEDAQSKAALTDWLRAKASFVIEGLKEADKDEFCRCELKLQKWYGDLRGKPFAIEAENSILDISGFSKQYNCAFIWQKDGVKKLNLYLIINYFKGGKLRFKKIKPEAFEANRFYTVINKKSGEIVPMEVNFNFDDPNLIILPLAFGKRFGREFIWNDLLSLETGSLKLANGRVIEKTLYNRRTRQDEPALFVALTFERREVLDSSNIKPMNLIGVDRGENIPAVIALTDPEGCPLSRFKDSLGNPTHILRIGESYKEKQRTIQAKKEVEQRRAGGYSRKYASKAKNLADDMVRNTARDLLYYAVTQDAMLIFENLSRGFGRQGKRTFMAERQYTRMEDWLTAKLAYEGLPSKTYLSKTLAQYTSKTCSNCGFTITSADYDRVLEKLKKTATGWMTTINGKELKVEGQITYYNRYKRQNVVKDLSVELDRLSEESVNNDISSWTKGRSGEALSLLKKRFSHRPVQEKFVCLNCGFETHADEQAALNIARSWLFLRSQEYKKYQTNKTTGNTDKRAFVETWQSFYRKKLKEVWKPAV

SEQ ID NO: 30277 - protein, 979 aa, synthetic construct
  REGION 1..979: note = engineered CasX variant
QEIKRINKIRRRLVKDSNTKKAGKTRGPMKTLLVRVMTPDLRERLENLRKKPENIPQPISNTSRANLNKLLTDYTEMKKAILHVYWEEFQKDPVGLMSRVAQPASKKIDQNKLKPEMDEKGNLTTAGFACSQCGQPLFVYKLEQVSEKGKAYTNYFGRCNVAEHEKLIKLAQLKPEKDSDEAVTYSLGKFGQRALDFYSIHVTKESTHPVKPLAQIAGNRYASGPVGKALSDACMGTIASFLSKYQDIIIEHQKVVKGNQKRLESLRELAGKENLEYPSVTLPPQPHTKEGVDAYNEVIARVRMWVNLNLWQKLKLSRDDAKPLLRLKGFPSFPLVERQANEVDWWDMVCNVKKLINEKKEDGKVFWQNLAGYKRQEALRPYLSSEEDRKKGKKFARYQLGDLLLHLEKKHGEDWGKVYDEAWERIDKKVEGLSKHIKLEEERRSEDAQSKAALTDWLRAKASFVIEGLKEADKDEFCRCELKLQKWYGDLRGKPFAIEAENSILDISGFSKQYNCAFIWQKDGVKKLNLYLIINYFKGGKLRFKKIKPEAFEANRFYTVINKKSGEIVPMEVNFNFDDPNLIILPLAFGKRFGREFIWNDLLSLETGSLKLANGRVIEKTLYNRRTRQDEPALFVALTFERREVLDSSNIKPMNLIGVDRGENIPAVIALTDPEGCPLSRFKDSLGNPTHILRIGESYKEKQRTIQAKKEVEQRRAGGYSRKYASKAKNLADDMVRNTARDLLYYAVTQDAMLIFENLSRGFGRQGKRTFMAERQYTRMEDWLTAKLAYEGLPSKTYLSKTLAQYTSKTCSNCGFTITSADYDRVLEKLKKTATGWMTTINGKELKVEGQITYYNRYKRQNVVKDLSVELDRLSEESVNNDISSWTKGRSGEALSLLKKRFSHRPVQEKFVCLNCGFETHADEQAALNIARSWLFLRSQEYKKYQTNKTTGNTDKRAFVETWQSFYRKKLKEVWKPAV

SEQ ID NO: 30278 - protein, 978 aa, synthetic construct
  REGION 1..978: note = engineered CasX variant
QEIKRINKIRRRLVKDSNTKKAGKTRGPMKTLLVRVMTPDLRERLENLRKKPENIPQPISNTSRANLNKLLTDYTEMKKAILHVYWEEFQKDPVGLMSRVAQPASKKIDQNKLKPEMDEKGNLTTAGFACSQCGQPLFVYKLEQVSEKGKAYTNYFGRCNVAEHEKLILLAQLKPEKDSDEAVTYSLGKFGQRALDFYSIHVTKESTHPVKPLAQIAGNRYASPVGKALSDACMGTIASFLSKYQDIIIEHQKVVKGNQKRLESLRELAGKENLEYPSVTLPPQPHTKEGVDAYNEVIARVRMWVNLNLWQKLKLSRDDAKPLLRLKGFPSFPLVERQANEVDWWDMVCNVKKLINEKKEDGKVFWQNLAGYKRQEALRPYLSSEEDRKKGKKFARYQLGDLLLHLEKKHGEDWGKVYDEAWERIDKKVEGLSKHIKLEEERRSEDAQSKAALTDWLRAKASFVIEGLKEADKDEFCRCELKLQKWYGDLRGKPFAIEAENSILDISGFSKQYNCAFIWQKDGVKKLNLYLIINYFKGGKLRFKKIKPEAFEANRFYTVINKKSGEIVPMEVNFNFDDPNLIILPLAFGKRFGREFIWNDLLSLETGSLKLANGRVIEKTLYNRRTRQDEPALFVALTFERREVLDSSNIKPMNLIGVDRGENIPAVIALTDPEGCPLSRFKDSLGNPTHILRIGESYKEKQRTIQAKKEVEQRRAGGYSRKYASKAKNLADDMVRNTARDLLYYAVTQDAMLIFENLSRGFGRQGKRTFMAERQYTRMEDWLTAKLAYEGLPSKTYLSKTLAQYTSKTCSNCGFTITSADYDRVLEKLKKTATGWMTTINGKELKVEGQITYYNRYKRQNVVKDLSVELDRLSEESVNNDISSWTKGRSGEALSLLKKRFSHRPVQEKFVCLNCGFETHADEQAALNIARSWLFLRSQEYKKYQTNKTTGNTDKRAFVETWQSFYRKKLKEVWKPAV

SEQ ID NO: 30279 - protein, 979 aa, synthetic construct
  REGION 1..979: note = engineered CasX variant
QEIKRINKIRRRLVKDSNTKKAGKTRGPMKTLLVRVMTPDLRERLENLRKKPENIPQPISNTSRANLNKLLTDYTEMKKAILHVYWEEFQKDPVGLMSRVAQPASKKIDQNKLKPEMDEKGNLTTAGFACSQCGQPLFVYKLEQVSEKGKAYTNYFGRCNVAEHEKLILLAQLKPEKDSDEAVTYSLGKFGQRALDFYSIHVTKESTHPVKPLAQIAGNRYASYPVGKALSDACMGTIASFLSKYQDIIIEHQKVVKGNQKRLESLRELAGKENLEYPSVTLPPQPHTKEGVDAYNEVIARVRMWVNLNLWQKLKLSRDDAKPLLRLKGFPSFPLVERQANEVDWWDMVCNVKKLINEKKEDGKVFWQNLAGYKRQEALRPYLSSEEDRKKGKKFARYQLGDLLLHLEKKHGEDWGKVYDEAWERIDKKVEGLSKHIKLEEERRSEDAQSKAALTDWLRAKASFVIEGLKEADKDEFCRCELKLQKWYGDLRGKPFAIEAENSILDISGFSKQYNCAFIWQKDGVKKLNLYLIINYFKGGKLRFKKIKPEAFEANRFYTVINKKSGEIVPMEVNFNFDDPNLIILPLAFGKRVGREFIWNDLLSLETGSLKLANGRVIEKTLYNRRTRQDEPALFVALTFERREVLDSSNIKPMNLIGVDRGENIPAVIALTDPEGCPLSRFKDSLGNPTHILRIGESYKEKQRTIQAKKEVEQRRAGGYSRKYASKAKNLADDMVRNTARDLLYYAVTQDAMLIFENLSRGFGRQGKRTFMAERQYTRMEDWLTAKLAYEGLPSKTYLSKTLAQYTSKTCSNCGFTITSADYDRVLEKLKKTATGWMTTINGKELKVEGQITYYNRYKRQNVVKDLSVELDRLSEESVNNDISSWTKGRSGEALSLLKKRFSHRPVQEKFVCLNCGFETHADEQAALNIARSWLFLRSQEYKKYQTNKTTGNTDKRAFVETWQSFYRKKLKEVWKPAV

SEQ ID NO: 30280 - protein, 979 aa, synthetic construct
  REGION 1..979: note = engineered CasX variant
QEIKRINKIRRRLVKDSNTKKAGKTRGPMKTLLVRVMTPDLRERLENLRKKPENIPQPISNTSRANLNKLLTDYTEMKKAILHVYWEEFQKDPVGLMSRVAQPASKKIDQNKLKPEMDEKGNLTTAGFACSQCGQPLFVYKLEQVSEKGKAYTNYFGRCNVAEHEKLILLAQLKPEKDSDEAVTYSLGKFGQRALDFYSIHVTKESTHPVKPLAQIAGNRYASHPVGKALSDACMGTIASFLSKYQDIIIEHQKVVKGNQKRLESLRELAGKENLEYPSVTLPPQPHTKEGVDAYNEVIARVRMWVNLNLWQKLKLSRDDAKPLLRLKGFPSFPLVERQANEVDWWDMVCNVKKLINEKKEDGKVFWQNLAGYKRQEALRPYLSSEEDRKKGKKFARYQLGDLLLHLEKKHGEDWGKVYDEAWERIDKKVEGLSKHIKLEEERRSEDAQSKAALTDWLRAKASFVIEGLKEADKDEFCRCELKLQKWYGDLRGKPFAIEAENSILDISGFSKQYNCAFIWQKDGVKKLNLYLIINYFKGGKLRFKKIKPEAFEANRFYTVINKKSGEIVPMEVNFNFDDPNLIILPLAFGKRVGREFIWNDLLSLETGSLKLANGRVIEKTLYNRRTRQDEPALFVALTFERREVLDSSNIKPMNLIGVDRGENIPAVIALTDPEGCPLSRFKDSLGNPTHILRIGESYKEKQRTIQAKKEVEQRRAGGYSRKYASKAKNLADDMVRNTARDLLYYAVTQDAMLIFENLSRGFGRQGKRTFMAERQYTRMEDWLTAKLAYEGLPSKTYLSKTLAQYTSKTCSNCGFTITSADYDRVLEKLKKTATGWMTTINGKELKVEGQITYYNRYKRQNVVKDLSVELDRLSEESVNNDISSWTKGRSGEALSLLKKRFSHRPVQEKFVCLNCGFETHADEQAALNIARSWLFLRSQEYKKYQTNKTTGNTDKRAFVETWQSFYRKKLKEVWKPAV

SEQ ID NO: 30281 - protein, 979 aa, synthetic construct
  REGION 1..979: note = engineered CasX variant
QEIKRINKIRRRLVKDSNTKKAGKTRGPMKTLLVRVMTPDLRERLENLRKKPENIPQPISNTSRANLNKLLTDYTEMKKAILHVYWEEFQKDPVGLMSRVAQPASKKIDQNKLKPEMDEKGNLTTAGFACSQCGQPLFVYKLEQVSEKGKAYTNYFGRCNVAEHEKLILLAQLKPEKDSDEAVTYSLGKFGQRALDFYSIHVTKESTHPVKPLAQIAGNRYASSPVGKALSDACMGTIASFLSKYQDIIIEHQKVVKGNQKRLESLRELAGKENLEYPSVTLPPQPHTKEGVDAYNEVIARVRMWVNLNLWQKLKLSRDDAKPLLRLKGFPSFPLVERQANEVDWWDMVCNVKKLINEKKEDGKVFWQNLAGYKRQEALRPYLSSEEDRKKGKKFARYQLGDLLLHLEKKHGEDWGKVYDEAWERIDKKVEGLSKHIKLEEERRSEDAQSKAALTDWLRAKASFVIEGLKEADKDEFCRCELKLQKWYGDLRGKPFAIEAENSILDISGFSKQYNCAFIWQKDGVKKLNLYLIINYFKGGKLRFKKIKPEAFEANRFYTVINKKSGEIVPMEVNFNFDDPNLIILPLAFGKRVGREFIWNDLLSLETGSLKLANGRVIEKTLYNRRTRQDEPALFVALTFERREVLDSSNIKPMNLIGVDRGENIPAVIALTDPEGCPLSRFKDSLGNPTHILRIGESYKEKQRTIQAKKEVEQRRAGGYSRKYASKAKNLADDMVRNTARDLLYYAVTQDAMLIFENLSRGFGRQGKRTFMAERQYTRMEDWLTAKLAYEGLPSKTYLSKTLAQYTSKTCSNCGFTITSADYDRVLEKLKKTATGWMTTINGKELKVEGQITYYNRYKRQNVVKDLSVELDRLSEESVNNDISSWTKGRSGEALSLLKKRFSHRPVQEKFVCLNCGFETHADEQAALNIARSWLFLRSQEYKKYQTNKTTGNTDKRAFVETWQSFYRKKLKEVWKPAV

SEQ ID NO: 30282 - protein, 979 aa, synthetic construct
  REGION 1..979: note = engineered CasX variant
QEIKRINKIRRRLVKDSNTKKAGKTRGPMKTLLVRVMTPDLRERLENLRKKPENIPQPISNTSRANLNKLLTDYTEMKKAILHVYWEEFQKDPVGLMSRVAQPASKKIDQNKLKPEMDEKGNLTTAGFACSQCGQPLFVYKLEQVSEKGKAYTNYFGRCNVAEHEKLILLAQLKPEKDSDEAVTYSLGKFGQRALDFYSIHVTKESTHPVKPLAQIAGNRYASTPVGKALSDACMGTIASFLSKYQDIIIEHQKVVKGNQKRLESLRELAGKENLEYPSVTLPPQPHTKEGVDAYNEVIARVRMWVNLNLWQKLKLSRDDAKPLLRLKGFPSFPLVERQANEVDWWDMVCNVKKLINEKKEDGKVFWQNLAGYKRQEALRPYLSSEEDRKKGKKFARYQLGDLLLHLEKKHGEDWGKVYDEAWERIDKKVEGLSKHIKLEEERRSEDAQSKAALTDWLRAKASFVIEGLKEADKDEFCRCELKLQKWYGDLRGKPFAIEAENSILDISGFSKQYNCAFIWQKDGVKKLNLYLIINYFKGGKLRFKKIKPEAFEANRFYTVINKKSGEIVPMEVNFNFDDPNLIILPLAFGKRVGREFIWNDLLSLETGSLKLANGRVIEKTLYNRRTRQDEPALFVALTFERREVLDSSNIKPMNLIGVDRGENIPAVIALTDPEGCPLSRFKDSLGNPTHILRIGESYKEKQRTIQAKKEVEQRRAGGYSRKYASKAKNLADDMVRNTARDLLYYAVTQDAMLIFENLSRGFGRQGKRTFMAERQYTRMEDWLTAKLAYEGLPSKTYLSKTLAQYTSKTCSNCGFTITSADYDRVLEKLKKTATGWMTTINGKELKVEGQITYYNRYKRQNVVKDLSVELDRLSEESVNNDISSWTKGRSGEALSLLKKRFSHRPVQEKFVCLNCGFETHADEQAALNIARSWLFLRSQEYKKYQTNKTTGNTDKRAFVETWQSFYRKKLKEVWKPAV

SEQ ID NO: 30283 - protein, 979 aa, synthetic construct
  REGION 1..979: note = engineered CasX variant
QEIKRINKIRRRLVKDSNTKKAGKTRGPMKTLLVRVMTPDLRERLENLRKKPENIPQPISNTSRANLNKLLTDYTEMKKAILHVYWEEFQKDPVGLMSRVAQPASKKIDQNKLKPEMDEKGNLTTAGFACSQCGQPLFVYKLEQVSEKGKAYTNYFGRCNVAEHEKLILLAQLKPEKDSDEAVTYSLGKFGQRALDFYSIHVTKESTHPVKPLAQIAGNRYASAPVGKALSDACMGTIASFLSKYQDIIIEHQKVVKGNQKRLESLRELAGKENLEYPSVTLPPQPHTKEGVDAYNEVIARVRMWVNLNLWQKLKLSRDDAKPLLRLKGFPSFPLVERQANEVDWWDMVCNVKKLINEKKEDGKVFWQNLAGYKRQEALRPYLSSEEDRKKGKKFARYQLGDLLLHLEKKHGEDWGKVYDEAWERIDKKVEGLSKHIKLEEERRSEDAQSKAALTDWLRAKASFVIEGLKEADKDEFCRCELKLQKWYGDLRGKPFAIEAENSILDISGFSKQYNCAFIWQKDGVKKLNLYLIINYFKGGKLRFKKIKPEAFEANRFYTVINKKSGEIVPMEVNFNFDDPNLIILPLAFGKRVGREFIWNDLLSLETGSLKLANGRVIEKTLYNRRTRQDEPALFVALTFERREVLDSSNIKPMNLIGVDRGENIPAVIALTDPEGCPLSRFKDSLGNPTHILRIGESYKEKQRTIQAKKEVEQRRAGGYSRKYASKAKNLADDMVRNTARDLLYYAVTQDAMLIFENLSRGFGRQGKRTFMAERQYTRMEDWLTAKLAYEGLPSKTYLSKTLAQYTSKTCSNCGFTITSADYDRVLEKLKKTATGWMTTINGKELKVEGQITYYNRYKRQNVVKDLSVELDRLSEESVNNDISSWTKGRSGEALSLLKKRFSHRPVQEKFVCLNCGFETHADEQAALNIARSWLFLRSQEYKKYQTNKTTGNTDKRAFVETWQSFYRKKLKEVWKPAV

SEQ ID NO: 30284 - protein, 979 aa, synthetic construct
  REGION 1..979: note = engineered CasX variant
QEIKRINKIRRRLVKDSNTKKAGKTRGPMKTLLVRVMTPDLRERLENLRKKPENIPQPISNTSRANLNKLLTDYTEMKKAILHVYWEEFQKDPVGLMSRVAQPASKKIDQNKLKPEMDEKGNLTTAGFACSQCGQPLFVYKLEQVSEKGKAYTNYFGRCNVAEHEKLILLAQLKPEKDSDEAVTYSLGKFGQRALDFYSIHVTKESTHPVKPLAQIAGNRYASVPVGKALSDACMGTIASFLSKYQDIIIEHQKVVKGNQKRLESLRELAGKENLEYPSVTLPPQPHTKEGVDAYNEVIARVRMWVNLNLWQKLKLSRDDAKPLLRLKGFPSFPLVERQANEVDWWDMVCNVKKLINEKKEDGKVFWQNLAGYKRQEALRPYLSSEEDRKKGKKFARYQLGDLLLHLEKKHGEDWGKVYDEAWERIDKKVEGLSKHIKLEEERRSEDAQSKAALTDWLRAKASFVIEGLKEADKDEFCRCELKLQKWYGDLRGKPFAIEAENSILDISGFSKQYNCAFIWQKDGVKKLNLYLIINYFKGGKLRFKKIKPEAFEANRFYTVINKKSGEIVPMEVNFNFDDPNLIILPLAFGKRVGREFIWNDLLSLETGSLKLANGRVIEKTLYNRRTRQDEPALFVALTFERREVLDSSNIKPMNLIGVDRGENIPAVIALTDPEGCPLSRFKDSLGNPTHILRIGESYKEKQRTIQAKKEVEQRRAGGYSRKYASKAKNLADDMVRNTARDLLYYAVTQDAMLIFENLSRGFGRQGKRTFMAERQYTRMEDWLTAKLAYEGLPSKTYLSKTLAQYTSKTCSNCGFTITSADYDRVLEKLKKTATGWMTTINGKELKVEGQITYYNRYKRQNVVKDLSVELDRLSEESVNNDISSWTKGRSGEALSLLKKRFSHRPVQEKFVCLNCGFETHADEQAALNIARSWLFLRSQEYKKYQTNKTTGNTDKRAFVETWQSFYRKKLKEVWKPAV

SEQ ID NO: 30285 - protein, 979 aa, synthetic construct
  REGION 1..979: note = engineered CasX variant
QEIKRINKIRRRLVKDSNTKKAGKTRGPMKTLLVRVMTPDLRERLENLRKKPENIPQPISNTSRANLNKLLTDYTEMKKAILHVYWEEFQKDPVGLMSRVAQPASKKIDQNKLKPEMDEKGNLTTAGFACSQCGQPLFVYKLEQVSEKGKAYTNYFGRCNVAEHEKLIKLAQLKPEKDSDEAVTYSLGKFGQRALDFYSIHVTKESTHPVKPLAQIAGNRYASGPVGKALSDACMGTIASFLSKYQDIIIEHQKVVKGNQKRLESLRELAGKENLEYPSVTLPPQPHTKEGVDAYNEVIARVRMWVNLNLWQKLKLSRDDAKPLLRLKGFPSFPLVERQANEVDWWDMVCNVKKLINEKKEDGKVFWQNLAGYKRQEALRPYLSSEEDRKKGKKFARYQLGDLLLHLEKKHGEDWGKVYDEAWERIDKKVEGLSKHIKLEEERRSEDAQSKAALTDWLRAKASFVIEGLKEADKDEFCRCELKLQKWYGDLRGKPFAIEAENSILDISGFSKQYNCAFIWQKDGVKKLNLYLIINYFKGGKLRFKKIKPEAFEANRFYTVINKKSGEIVPMEVNFNFDDPNLIILPLAFGKRVGREFIWNDLLSLETGSLKLANGRVIEKTLYNRRTRQDEPALFVALTFERREVLDSSNIKPMNLIGVDRGENIPAVIALTDPEGCPLSRFKDSLGNPTHILRIGESYKEKQRTIQAKKEVEQRRAGGYSRKYASKAKNLADDMVRNTARDLLYYAVTQDAMLIFENLSRGFGRQGKRTFMAERQYTRMEDWLTAKLAYEGLPSKTYLSKTLAQYTSKTCSNCGFTITSADYDRVLEKLKKTATGWMTTINGKELKVEGQITYYNRYKRQNVVKDLSVELDRLSEESVNNDISSWTKGRSGEALSLLKKRFSHRPVQEKFVCLNCGFETHADEQAALNIARSWLFLRSQEYKKYQTNKTTGNTDKRAFVETWQSFYRKKLKEVWKPAV

SEQ ID NO: 30286 - protein, 978 aa, synthetic construct
  REGION 1..978: note = engineered CasX variant
QEIKRINKIRRRLVKDSNTKKAGKTRGPMKTLLVRVMTPDLRERLENLRKKPENIPQPISNTSRANLNKLLTDYTEMKKAILHVYWEEFQKDPVGLMSRVAQPASKKIDQNKLKPEMDEKGNLTTAGFACSQCGQPLFVYKLEQVSEKGKAYTNYFGRCNVAEHEKLILLAQLKPEKDSDEAVTYSLGKFGQRALDFYSIHVTKESTHPVKPLAQIAGNRYASPVGKALSDACMGTIASFLSKYQDIIIEHQKVVKGNQKRLESLRELAGKENLEYPSVTLPPQPHTKEGVDAYNEVIARVRMWVNLNLWQKLKLSRDDAKPLLRLKGFPSFPLVERQANEVDWWDMVCNVKKLINEKKEDGKVFWQNLAGYKRQEALRPYLSSEEDRKKGKKFARYQLGDLLLHLEKKHGEDWGKVYDEAWERIDKKVEGLSKHIKLEEERRSEDAQSKAALTDWLRAKASFVIEGLKEADKDEFCRCELKLQKWYGDLRGKPFAIEAENSILDISGFSKQYNCAFIWQKDGVKKLNLYLIINYFKGGKLRFKKIKPEAFEANRFYTVINKKSGEIVPMEVNFNFDDPNLIILPLAFGKRVGREFIWNDLLSLETGSLKLANGRVIEKTLYNRRTRQDEPALFVALTFERREVLDSSNIKPMNLIGVDRGENIPAVIALTDPEGCPLSRFKDSLGNPTHILRIGESYKEKQRTIQAKKEVEQRRAGGYSRKYASKAKNLADDMVRNTARDLLYYAVTQDAMLIFENLSRGFGRQGKRTFMAERQYTRMEDWLTAKLAYEGLPSKTYLSKTLAQYTSKTCSNCGFTITSADYDRVLEKLKKTATGWMTTINGKELKVEGQITYYNRYKRQNVVKDLSVELDRLSEESVNNDISSWTKGRSGEALSLLKKRFSHRPVQEKFVCLNCGFETHADEQAALNIARSWLFLRSQEYKKYQTNKTTGNTDKRAFVETWQSFYRKKLKEVWKPAV

SEQ ID NO: 30287 - protein, 980 aa, synthetic construct
  REGION 1..980: note = engineered CasX variant
QEIKRINKIRRRLVKDSNTKKAGKTRGPMKTLLVRVMTPDLRERLENLRKKPENIPQPISNTSRANLNKLLTDYTEMKKAILHVYWEEFQKDPVGLMSRVAQPASKKIDQNKLKPEMDEKGNLTTAGFACSQCGQPLFVYKLEQVSEKGKAYTNYFGRCNVAEHEKLILLAQLKPEKDSDEAVTYSLGKFGQRALDFYSIHVTKESTHPVKPLAQIAGNRYASYPVGKALSDACMGTIASFLSKYQDIIIEHQKVVKGNQKRLESLRELAGKENLEYPSVTLPPQPHTKEGVDAYNEVIARVRMWVNLNLWQKLKLSRDDAKPLLRLKGFPSFPLVERQANEVDWWDMVCNVKKLINEKKEDGKVFWQNLAGYKRQEALRPYLSSEEDRKKGKKFARYQLGDLLLHLEKKHGEDWGKVYDEAWERIDKKVEGLSKHIKLEEERRSEDAQSKAALTDWLRAKASFVIEGLKEADKDEFCRCELKLQKWYGDLRGKPFAIEAENSILDISGFSKQYNCAFIWQKDGVKKLNLYLIINYFKGGKLRFKKIKPEAFEANRFYTVINKKSGEIVPMEVNFNFDDPNLIILPLAFGKRQGREFIWNDLLSLETGSLKLANGRVIEKTLYNRRTRQDEPALFVALTFERREVLDSSNIKTPMNLIGVDRGENIPAVIALTDPEGCPLSRFKDSLGNPTHILRIGESYKEKQRTIQAKKEVEQRRAGGYSRKYASKAKNLADDMVRNTARDLLYYAVTQDAMLIFENLSRGFGRQGKRTFMAERQYTRMEDWLTAKLAYEGLPSKTYLSKTLAQYTSKTCSNCGFTITSADYDRVLEKLKKTATGWMTTINGKELKVEGQITYYNRYKRQNVVKDLSVELDRLSEESVNNDISSWTKGRSGEALSLLKKRFSHRPVQEKFVCLNCGFETHADEQAALNIARSWLFLRSQEYKKYQTNKTTGNTDKRAFVETWQSFYRKKLKEVWKPAV

SEQ ID NO: 30288 - protein, 980 aa, synthetic construct
  REGION 1..980: note = engineered CasX variant
QEIKRINKIRRRLVKDSNTKKAGKTRGPMKTLLVRVMTPDLRERLENLRKKPENIPQPISNTSRANLNKLLTDYTEMKKAILHVYWEEFQKDPVGLMSRVAQPASKKIDQNKLKPEMDEKGNLTTAGFACSQCGQPLFVYKLEQVSEKGKAYTNYFGRCNVAEHEKLILLAQLKPEKDSDEAVTYSLGKFGQRALDFYSIHVTKESTHPVKPLAQIAGNRYASHPVGKALSDACMGTIASFLSKYQDIIIEHQKVVKGNQKRLESLRELAGKENLEYPSVTLPPQPHTKEGVDAYNEVIARVRMWVNLNLWQKLKLSRDDAKPLLRLKGFPSFPLVERQANEVDWWDMVCNVKKLINEKKEDGKVFWQNLAGYKRQEALRPYLSSEEDRKKGKKFARYQLGDLLLHLEKKHGEDWGKVYDEAWERIDKKVEGLSKHIKLEEERRSEDAQSKAALTDWLRAKASFVIEGLKEADKDEFCRCELKLQKWYGDLRGKPFAIEAENSILDISGFSKQYNCAFIWQKDGVKKLNLYLIINYFKGGKLRFKKIKPEAFEANRFYTVINKKSGEIVPMEVNFNFDDPNLIILPLAFGKRQGREFIWNDLLSLETGSLKLANGRVIEKTLYNRRTRQDEPALFVALTFERREVLDSSNIKTPMNLIGVDRGENIPAVIALTDPEGCPLSRFKDSLGNPTHILRIGESYKEKQRTIQAKKEVEQRRAGGYSRKYASKAKNLADDMVRNTARDLLYYAVTQDAMLIFENLSRGFGRQGKRTFMAERQYTRMEDWLTAKLAYEGLPSKTYLSKTLAQYTSKTCSNCGFTITSADYDRVLEKLKKTATGWMTTINGKELKVEGQITYYNRYKRQNVVKDLSVELDRLSEESVNNDISSWTKGRSGEALSLLKKRFSHRPVQEKFVCLNCGFETHADEQAALNIARSWLFLRSQEYKKYQTNKTTGNTDKRAFVETWQSFYRKKLKEVWKPAV

SEQ ID NO: 30289 - protein, 980 aa, synthetic construct
  REGION 1..980: note = engineered CasX variant
QEIKRINKIRRRLVKDSNTKKAGKTRGPMKTLLVRVMTPDLRERLENLRKKPENIPQPISNTSRANLNKLLTDYTEMKKAILHVYWEEFQKDPVGLMSRVAQPASKKIDQNKLKPEMDEKGNLTTAGFACSQCGQPLFVYKLEQVSEKGKAYTNYFGRCNVAEHEKLILLAQLKPEKDSDEAVTYSLGKFGQRALDFYSIHVTKESTHPVKPLAQIAGNRYASSPVGKALSDACMGTIASFLSKYQDIIIEHQKVVKGNQKRLESLRELAGKENLEYPSVTLPPQPHTKEGVDAYNEVIARVRMWVNLNLWQKLKLSRDDAKPLLRLKGFPSFPLVERQANEVDWWDMVCNVKKLINEKKEDGKVFWQNLAGYKRQEALRPYLSSEEDRKKGKKFARYQLGDLLLHLEKKHGEDWGKVYDEAWERIDKKVEGLSKHIKLEEERRSEDAQSKAALTDWLRAKASFVIEGLKEADKDEFCRCELKLQKWYGDLRGKPFAIEAENSILDISGFSKQYNCAFIWQKDGVKKLNLYLIINYFKGGKLRFKKIKPEAFEANRFYTVINKKSGEIVPMEVNFNFDDPNLIILPLAFGKRQGREFIWNDLLSLETGSLKLANGRVIEKTLYNRRTRQDEPALFVALTFERREVLDSSNIKTPMNLIGVDRGENIPAVIALTDPEGCPLSRFKDSLGNPTHILRIGESYKEKQRTIQAKKEVEQRRAGGYSRKYASKAKNLADDMVRNTARDLLYYAVTQDAMLIFENLSRGFGRQGKRTFMAERQYTRMEDWLTAKLAYEGLPSKTYLSKTLAQYTSKTCSNCGFTITSADYDRVLEKLKKTATGWMTTINGKELKVEGQITYYNRYKRQNVVKDLSVELDRLSEESVNNDISSWTKGRSGEALSLLKKRFSHRPVQEKFVCLNCGFETHADEQAALNIARSWLFLRSQEYKKYQTNKTTGNTDKRAFVETWQSFYRKKLKEVWKPAV

SEQ ID NO: 30290 - protein, 980 aa, synthetic construct
  REGION 1..980: note = engineered CasX variant
QEIKRINKIRRRLVKDSNTKKAGKTRGPMKTLLVRVMTPDLRERLENLRKKPENIPQPISNTSRANLNKLLTDYTEMKKAILHVYWEEFQKDPVGLMSRVAQPASKKIDQNKLKPEMDEKGNLTTAGFACSQCGQPLFVYKLEQVSEKGKAYTNYFGRCNVAEHEKLILLAQLKPEKDSDEAVTYSLGKFGQRALDFYSIHVTKESTHPVKPLAQIAGNRYASTPVGKALSDACMGTIASFLSKYQDIIIEHQKVVKGNQKRLESLRELAGKENLEYPSVTLPPQPHTKEGVDAYNEVIARVRMWVNLNLWQKLKLSRDDAKPLLRLKGFPSFPLVERQANEVDWWDMVCNVKKLINEKKEDGKVFWQNLAGYKRQEALRPYLSSEEDRKKGKKFARYQLGDLLLHLEKKHGEDWGKVYDEAWERIDKKVEGLSKHIKLEEERRSEDAQSKAALTDWLRAKASFVIEGLKEADKDEFCRCELKLQKWYGDLRGKPFAIEAENSILDISGFSKQYNCAFIWQKDGVKKLNLYLIINYFKGGKLRFKKIKPEAFEANRFYTVINKKSGEIVPMEVNFNFDDPNLIILPLAFGKRQGREFIWNDLLSLETGSLKLANGRVIEKTLYNRRTRQDEPALFVALTFERREVLDSSNIKTPMNLIGVDRGENIPAVIALTDPEGCPLSRFKDSLGNPTHILRIGESYKEKQRTIQAKKEVEQRRAGGYSRKYASKAKNLADDMVRNTARDLLYYAVTQDAMLIFENLSRGFGRQGKRTFMAERQYTRMEDWLTAKLAYEGLPSKTYLSKTLAQYTSKTCSNCGFTITSADYDRVLEKLKKTATGWMTTINGKELKVEGQITYYNRYKRQNVVKDLSVELDRLSEESVNNDISSWTKGRSGEALSLLKKRFSHRPVQEKFVCLNCGFETHADEQAALNIARSWLFLRSQEYKKYQTNKTTGNTDKRAFVETWQSFYRKKLKEVWKPAV

SEQ ID NO: 30291 - protein, 980 aa, synthetic construct
  REGION 1..980: note = engineered CasX variant
QEIKRINKIRRRLVKDSNTKKAGKTRGPMKTLLVRVMTPDLRERLENLRKKPENIPQPISNTSRANLNKLLTDYTEMKKAILHVYWEEFQKDPVGLMSRVAQPASKKIDQNKLKPEMDEKGNLTTAGFACSQCGQPLFVYKLEQVSEKGKAYTNYFGRCNVAEHEKLILLAQLKPEKDSDEAVTYSLGKFGQRALDFYSIHVTKESTHPVKPLAQIAGNRYASAPVGKALSDACMGTIASFLSKYQDIIIEHQKVVKGNQKRLESLRELAGKENLEYPSVTLPPQPHTKEGVDAYNEVIARVRMWVNLNLWQKLKLSRDDAKPLLRLKGFPSFPLVERQANEVDWWDMVCNVKKLINEKKEDGKVFWQNLAGYKRQEALRPYLSSEEDRKKGKKFARYQLGDLLLHLEKKHGEDWGKVYDEAWERIDKKVEGLSKHIKLEEERRSEDAQSKAALTDWLRAKASFVIEGLKEADKDEFCRCELKLQKWYGDLRGKPFAIEAENSILDISGFSKQYNCAFIWQKDGVKKLNLYLIINYFKGGKLRFKKIKPEAFEANRFYTVINKKSGEIVPMEVNFNFDDPNLIILPLAFGKRQGREFIWNDLLSLETGSLKLANGRVIEKTLYNRRTRQDEPALFVALTFERREVLDSSNIKTPMNLIGVDRGENIPAVIALTDPEGCPLSRFKDSLGNPTHILRIGESYKEKQRTIQAKKEVEQRRAGGYSRKYASKAKNLADDMVRNTARDLLYYAVTQDAMLIFENLSRGFGRQGKRTFMAERQYTRMEDWLTAKLAYEGLPSKTYLSKTLAQYTSKTCSNCGFTITSADYDRVLEKLKKTATGWMTTINGKELKVEGQITYYNRYKRQNVVKDLSVELDRLSEESVNNDISSWTKGRSGEALSLLKKRFSHRPVQEKFVCLNCGFETHADEQAALNIARSWLFLRSQEYKKYQTNKTTGNTDKRAFVETWQSFYRKKLKEVWKPAV

SEQ ID NO: 30292 - protein, 980 aa, synthetic construct
  REGION 1..980: note = engineered CasX variant
QEIKRINKIRRRLVKDSNTKKAGKTRGPMKTLLVRVMTPDLRERLENLRKKPENIPQPISNTSRANLNKLLTDYTEMKKAILHVYWEEFQKDPVGLMSRVAQPASKKIDQNKLKPEMDEKGNLTTAGFACSQCGQPLFVYKLEQVSEKGKAYTNYFGRCNVAEHEKLILLAQLKPEKDSDEAVTYSLGKFGQRALDFYSIHVTKESTHPVKPLAQIAGNRYASVPVGKALSDACMGTIASFLSKYQDIIIEHQKVVKGNQKRLESLRELAGKENLEYPSVTLPPQPHTKEGVDAYNEVIARVRMWVNLNLWQKLKLSRDDAKPLLRLKGFPSFPLVERQANEVDWWDMVCNVKKLINEKKEDGKVFWQNLAGYKRQEALRPYLSSEEDRKKGKKFARYQLGDLLLHLEKKHGEDWGKVYDEAWERIDKKVEGLSKHIKLEEERRSEDAQSKAALTDWLRAKASFVIEGLKEADKDEFCRCELKLQKWYGDLRGKPFAIEAENSILDISGFSKQYNCAFIWQKDGVKKLNLYLIINYFKGGKLRFKKIKPEAFEANRFYTVINKKSGEIVPMEVNFNFDDPNLIILPLAFGKRQGREFIWNDLLSLETGSLKLANGRVIEKTLYNRRTRQDEPALFVALTFERREVLDSSNIKTPMNLIGVDRGENIPAVIALTDPEGCPLSRFKDSLGNPTHILRIGESYKEKQRTIQAKKEVEQRRAGGYSRKYASKAKNLADDMVRNTARDLLYYAVTQDAMLIFENLSRGFGRQGKRTFMAERQYTRMEDWLTAKLAYEGLPSKTYLSKTLAQYTSKTCSNCGFTITSADYDRVLEKLKKTATGWMTTINGKELKVEGQITYYNRYKRQNVVKDLSVELDRLSEESVNNDISSWTKGRSGEALSLLKKRFSHRPVQEKFVCLNCGFETHADEQAALNIARSWLFLRSQEYKKYQTNKTTGNTDKRAFVETWQSFYRKKLKEVWKPAV

SEQ ID NO: 30293 - protein, 980 aa, synthetic construct
  REGION 1..980: note = engineered CasX variant
QEIKRINKIRRRLVKDSNTKKAGKTRGPMKTLLVRVMTPDLRERLENLRKKPENIPQPISNTSRANLNKLLTDYTEMKKAILHVYWEEFQKDPVGLMSRVAQPASKKIDQNKLKPEMDEKGNLTTAGFACSQCGQPLFVYKLEQVSEKGKAYTNYFGRCNVAEHEKLIKLAQLKPEKDSDEAVTYSLGKFGQRALDFYSIHVTKESTHPVKPLAQIAGNRYASGPVGKALSDACMGTIASFLSKYQDIIIEHQKVVKGNQKRLESLRELAGKENLEYPSVTLPPQPHTKEGVDAYNEVIARVRMWVNLNLWQKLKLSRDDAKPLLRLKGFPSFPLVERQANEVDWWDMVCNVKKLINEKKEDGKVFWQNLAGYKRQEALRPYLSSEEDRKKGKKFARYQLGDLLLHLEKKHGEDWGKVYDEAWERIDKKVEGLSKHIKLEEERRSEDAQSKAALTDWLRAKASFVIEGLKEADKDEFCRCELKLQKWYGDLRGKPFAIEAENSILDISGFSKQYNCAFIWQKDGVKKLNLYLIINYFKGGKLRFKKIKPEAFEANRFYTVINKKSGEIVPMEVNFNFDDPNLIILPLAFGKRQGREFIWNDLLSLETGSLKLANGRVIEKTLYNRRTRQDEPALFVALTFERREVLDSSNIKTPMNLIGVDRGENIPAVIALTDPEGCPLSRFKDSLGNPTHILRIGESYKEKQRTIQAKKEVEQRRAGGYSRKYASKAKNLADDMVRNTARDLLYYAVTQDAMLIFENLSRGFGRQGKRTFMAERQYTRMEDWLTAKLAYEGLPSKTYLSKTLAQYTSKTCSNCGFTITSADYDRVLEKLKKTATGWMTTINGKELKVEGQITYYNRYKRQNVVKDLSVELDRLSEESVNNDISSWTKGRSGEALSLLKKRFSHRPVQEKFVCLNCGFETHADEQAALNIARSWLFLRSQEYKKYQTNKTTGNTDKRAFVETWQSFYRKKLKEVWKPAV

SEQ ID NO: 30294 - protein, 979 aa, synthetic construct
  REGION 1..979: note = engineered CasX variant
QEIKRINKIRRRLVKDSNTKKAGKTRGPMKTLLVRVMTPDLRERLENLRKKPENIPQPISNTSRANLNKLLTDYTEMKKAILHVYWEEFQKDPVGLMSRVAQPASKKIDQNKLKPEMDEKGNLTTAGFACSQCGQPLFVYKLEQVSEKGKAYTNYFGRCNVAEHEKLILLAQLKPEKDSDEAVTYSLGKFGQRALDFYSIHVTKESTHPVKPLAQIAGNRYASPVGKALSDACMGTIASFLSKYQDIIIEHQKVVKGNQKRLESLRELAGKENLEYPSVTLPPQPHTKEGVDAYNEVIARVRMWVNLNLWQKLKLSRDDAKPLLRLKGFPSFPLVERQANEVDWWDMVCNVKKLINEKKEDGKVFWQNLAGYKRQEALRPYLSSEEDRKKGKKFARYQLGDLLLHLEKKHGEDWGKVYDEAWERIDKKVEGLSKHIKLEEERRSEDAQSKAALTDWLRAKASFVIEGLKEADKDEFCRCELKLQKWYGDLRGKPFAIEAENSILDISGFSKQYNCAFIWQKDGVKKLNLYLIINYFKGGKLRFKKIKPEAFEANRFYTVINKKSGEIVPMEVNFNFDDPNLIILPLAFGKRQGREFIWNDLLSLETGSLKLANGRVIEKTLYNRRTRQDEPALFVALTFERREVLDSSNIKTPMNLIGVDRGENIPAVIALTDPEGCPLSRFKDSLGNPTHILRIGESYKEKQRTIQAKKEVEQRRAGGYSRKYASKAKNLADDMVRNTARDLLYYAVTQDAMLIFENLSRGFGRQGKRTFMAERQYTRMEDWLTAKLAYEGLPSKTYLSKTLAQYTSKTCSNCGFTITSADYDRVLEKLKKTATGWMTTINGKELKVEGQITYYNRYKRQNVVKDLSVELDRLSEESVNNDISSWTKGRSGEALSLLKKRFSHRPVQEKFVCLNCGFETHADEQAALNIARSWLFLRSQEYKKYQTNKTTGNTDKRAFVETWQSFYRKKLKEVWKPAV

SEQ ID NO: 30295 - protein, 980 aa, synthetic construct
  REGION 1..980: note = engineered CasX variant
QEIKRINKIRRRLVKDSNTKKAGKTRGPMKTLLVRVMTPDLRERLENLRKKPENIPQPISNTSRANLNKLLTDYTEMKKAILHVYWEEFQKDPVGLMSRVAQPASKKIDQNKLKPEMDEKGNLTTAGFACSQCGQPLFVYKLEQVSEKGKAYTNYFGRCNVAEHEKLILLAQLKPEKDSDEAVTYSLGKFGQRALDFYSIHVTKESTHPVKPLAQIAGNRYASYPVGKALSDACMGTIASFLSKYQDIIIEHQKVVKGNQKRLESLRELAGKENLEYPSVTLPPQPHTKEGVDAYNEVIARVRMWVNLNLWQKLKLSRDDAKPLLRLKGFPSFPLVERQANEVDWWDMVCNVKKLINEKKEDGKVFWQNLAGYKRQEALRPYLSSEEDRKKGKKFARYQLGDLLLHLEKKHGEDWGKVYDEAWERIDKKVEGLSKHIKLEEERRSEDAQSKAALTDWLRAKASFVIEGLKEADKDEFCRCELKLQKWYGDLRGKPFAIEAENSILDISGFSKQYNCAFIWQKDGVKKLNLYLIINYFKGGKLRFKKIKPEAFEANRFYTVINKKSGEIVPMEVNFNFDDPNLIILPLAFGKRQGREFIWNDLLSLETGSLKLANGRVIEKTLYNRRTRQDEPALFVALTFERREVLDSSNIKPMSNLIGVDRGENIPAVIALTDPEGCPLSRFKDSLGNPTHILRIGESYKEKQRTIQAKKEVEQRRAGGYSRKYASKAKNLADDMVRNTARDLLYYAVTQDAMLIFENLSRGFGRQGKRTFMAERQYTRMEDWLTAKLAYEGLPSKTYLSKTLAQYTSKTCSNCGFTITSADYDRVLEKLKKTATGWMTTINGKELKVEGQITYYNRYKRQNVVKDLSVELDRLSEESVNNDISSWTKGRSGEALSLLKKRFSHRPVQEKFVCLNCGFETHADEQAALNIARSWLFLRSQEYKKYQTNKTTGNTDKRAFVETWQSFYRKKLKEVWKPAV

SEQ ID NO: 30296 - protein, 980 aa, synthetic construct
  REGION 1..980: note = engineered CasX variant
QEIKRINKIRRRLVKDSNTKKAGKTRGPMKTLLVRVMTPDLRERLENLRKKPENIPQPISNTSRANLNKLLTDYTEMKKAILHVYWEEFQKDPVGLMSRVAQPASKKIDQNKLKPEMDEKGNLTTAGFACSQCGQPLFVYKLEQVSEKGKAYTNYFGRCNVAEHEKLILLAQLKPEKDSDEAVTYSLGKFGQRALDFYSIHVTKESTHPVKPLAQIAGNRYASHPVGKALSDACMGTIASFLSKYQDIIIEHQKVVKGNQKRLESLRELAGKENLEYPSVTLPPQPHTKEGVDAYNEVIARVRMWVNLNLWQKLKLSRDDAKPLLRLKGFPSFPLVERQANEVDWWDMVCNVKKLINEKKEDGKVFWQNLAGYKRQEALRPYLSSEEDRKKGKKFARYQLGDLLLHLEKKHGEDWGKVYDEAWERIDKKVEGLSKHIKLEEERRSEDAQSKAALTDWLRAKASFVIEGLKEADKDEFCRCELKLQKWYGDLRGKPFAIEAENSILDISGFSKQYNCAFIWQKDGVKKLNLYLIINYFKGGKLRFKKIKPEAFEANRFYTVINKKSGEIVPMEVNFNFDDPNLIILPLAFGKRQGREFIWNDLLSLETGSLKLANGRVIEKTLYNRRTRQDEPALFVALTFERREVLDSSNIKPMSNLIGVDRGENIPAVIALTDPEGCPLSRFKDSLGNPTHILRIGESYKEKQRTIQAKKEVEQRRAGGYSRKYASKAKNLADDMVRNTARDLLYYAVTQDAMLIFENLSRGFGRQGKRTFMAERQYTRMEDWLTAKLAYEGLPSKTYLSKTLAQYTSKTCSNCGFTITSADYDRVLEKLKKTATGWMTTINGKELKVEGQITYYNRYKRQNVVKDLSVELDRLSEESVNNDISSWTKGRSGEALSLLKKRFSHRPVQEKFVCLNCGFETHADEQAALNIARSWLFLRSQEYKKYQTNKTTGNTDKRAFVETWQSFYRKKLKEVWKPAV

SEQ ID NO: 30297 - protein, 980 aa, synthetic construct
  REGION 1..980: note = engineered CasX variant
QEIKRINKIRRRLVKDSNTKKAGKTRGPMKTLLVRVMTPDLRERLENLRKKPENIPQPISNTSRANLNKLLTDYTEMKKAILHVYWEEFQKDPVGLMSRVAQPASKKIDQNKLKPEMDEKGNLTTAGFACSQCGQPLFVYKLEQVSEKGKAYTNYFGRCNVAEHEKLILLAQLKPEKDSDEAVTYSLGKFGQRALDFYSIHVTKESTHPVKPLAQIAGNRYASSPVGKALSDACMGTIASFLSKYQDIIIEHQKVVKGNQKRLESLRELAGKENLEYPSVTLPPQPHTKEGVDAYNEVIARVRMWVNLNLWQKLKLSRDDAKPLLRLKGFPSFPLVERQANEVDWWDMVCNVKKLINEKKEDGKVFWQNLAGYKRQEALRPYLSSEEDRKKGKKFARYQLGDLLLHLEKKHGEDWGKVYDEAWERIDKKVEGLSKHIKLEEERRSEDAQSKAALTDWLRAKASFVIEGLKEADKDEFCRCELKLQKWYGDLRGKPFAIEAENSILDISGFSKQYNCAFIWQKDGVKKLNLYLIINYFKGGKLRFKKIKPEAFEANRFYTVINKKSGEIVPMEVNFNFDDPNLIILPLAFGKRQGREFIWNDLLSLETGSLKLANGRVIEKTLYNRRTRQDEPALFVALTFERREVLDSSNIKPMSNLIGVDRGENIPAVIALTDPEGCPLSRFKDSLGNPTHILRIGESYKEKQRTIQAKKEVEQRRAGGYSRKYASKAKNLADDMVRNTARDLLYYAVTQDAMLIFENLSRGFGRQGKRTFMAERQYTRMEDWLTAKLAYEGLPSKTYLSKTLAQYTSKTCSNCGFTITSADYDRVLEKLKKTATGWMTTINGKELKVEGQITYYNRYKRQNVVKDLSVELDRLSEESVNNDISSWTKGRSGEALSLLKKRFSHRPVQEKFVCLNCGFETHADEQAALNIARSWLFLRSQEYKKYQTNKTTGNTDKRAFVETWQSFYRKKLKEVWKPAV

SEQ ID NO: 30298 - protein, 980 aa, synthetic construct
  REGION 1..980: note = engineered CasX variant
QEIKRINKIRRRLVKDSNTKKAGKTRGPMKTLLVRVMTPDLRERLENLRKKPENIPQPISNTSRANLNKLLTDYTEMKKAILHVYWEEFQKDPVGLMSRVAQPASKKIDQNKLKPEMDEKGNLTTAGFACSQCGQPLFVYKLEQVSEKGKAYTNYFGRCNVAEHEKLILLAQLKPEKDSDEAVTYSLGKFGQRALDFYSIHVTKESTHPVKPLAQIAGNRYASTPVGKALSDACMGTIASFLSKYQDIIIEHQKVVKGNQKRLESLRELAGKENLEYPSVTLPPQPHTKEGVDAYNEVIARVRMWVNLNLWQKLKLSRDDAKPLLRLKGFPSFPLVERQANEVDWWDMVCNVKKLINEKKEDGKVFWQNLAGYKRQEALRPYLSSEEDRKKGKKFARYQLGDLLLHLEKKHGEDWGKVYDEAWERIDKKVEGLSKHIKLEEERRSEDAQSKAALTDWLRAKASFVIEGLKEADKDEFCRCELKLQKWYGDLRGKPFAIEAENSILDISGFSKQYNCAFIWQKDGVKKLNLYLIINYFKGGKLRFKKIKPEAFEANRFYTVINKKSGEIVPMEVNFNFDDPNLIILPLAFGKRQGREFIWNDLLSLETGSLKLANGRVIEKTLYNRRTRQDEPALFVALTFERREVLDSSNIKPMSNLIGVDRGENIPAVIALTDPEGCPLSRFKDSLGNPTHILRIGESYKEKQRTIQAKKEVEQRRAGGYSRKYASKAKNLADDMVRNTARDLLYYAVTQDAMLIFENLSRGFGRQGKRTFMAERQYTRMEDWLTAKLAYEGLPSKTYLSKTLAQYTSKTCSNCGFTITSADYDRVLEKLKKTATGWMTTINGKELKVEGQITYYNRYKRQNVVKDLSVELDRLSEESVNNDISSWTKGRSGEALSLLKKRFSHRPVQEKFVCLNCGFETHADEQAALNIARSWLFLRSQEYKKYQTNKTTGNTDKRAFVETWQSFYRKKLKEVWKPAV

SEQ ID NO: 30299 - protein, 980 aa, synthetic construct
  REGION 1..980: note = engineered CasX variant
QEIKRINKIRRRLVKDSNTKKAGKTRGPMKTLLVRVMTPDLRERLENLRKKPENIPQPISNTSRANLNKLLTDYTEMKKAILHVYWEEFQKDPVGLMSRVAQPASKKIDQNKLKPEMDEKGNLTTAGFACSQCGQPLFVYKLEQVSEKGKAYTNYFGRCNVAEHEKLILLAQLKPEKDSDEAVTYSLGKFGQRALDFYSIHVTKESTHPVKPLAQIAGNRYASAPVGKALSDACMGTIASFLSKYQDIIIEHQKVVKGNQKRLESLRELAGKENLEYPSVTLPPQPHTKEGVDAYNEVIARVRMWVNLNLWQKLKLSRDDAKPLLRLKGFPSFPLVERQANEVDWWDMVCNVKKLINEKKEDGKVFWQNLAGYKRQEALRPYLSSEEDRKKGKKFARYQLGDLLLHLEKKHGEDWGKVYDEAWERIDKKVEGLSKHIKLEEERRSEDAQSKAALTDWLRAKASFVIEGLKEADKDEFCRCELKLQKWYGDLRGKPFAIEAENSILDISGFSKQYNCAFIWQKDGVKKLNLYLIINYFKGGKLRFKKIKPEAFEANRFYTVINKKSGEIVPMEVNFNFDDPNLIILPLAFGKRQGREFIWNDLLSLETGSLKLANGRVIEKTLYNRRTRQDEPALFVALTFERREVLDSSNIKPMSNLIGVDRGENIPAVIALTDPEGCPLSRFKDSLGNPTHILRIGESYKEKQRTIQAKKEVEQRRAGGYSRKYASKAKNLADDMVRNTARDLLYYAVTQDAMLIFENLSRGFGRQGKRTFMAERQYTRMEDWLTAKLAYEGLPSKTYLSKTLAQYTSKTCSNCGFTITSADYDRVLEKLKKTATGWMTTINGKELKVEGQITYYNRYKRQNVVKDLSVELDRLSEESVNNDISSWTKGRSGEALSLLKKRFSHRPVQEKFVCLNCGFETHADEQAALNIARSWLFLRSQEYKKYQTNKTTGNTDKRAFVETWQSFYRKKLKEVWKPAV

SEQ ID NO: 30300 - protein, 980 aa, synthetic construct
  REGION 1..980: note = engineered CasX variant
QEIKRINKIRRRLVKDSNTKKAGKTRGPMKTLLVRVMTPDLRERLENLRKKPENIPQPISNTSRANLNKLLTDYTEMKKAILHVYWEEFQKDPVGLMSRVAQPASKKIDQNKLKPEMDEKGNLTTAGFACSQCGQPLFVYKLEQVSEKGKAYTNYFGRCNVAEHEKLILLAQLKPEKDSDEAVTYSLGKFGQRALDFYSIHVTKESTHPVKPLAQIAGNRYASVPVGKALSDACMGTIASFLSKYQDIIIEHQKVVKGNQKRLESLRELAGKENLEYPSVTLPPQPHTKEGVDAYNEVIARVRMWVNLNLWQKLKLSRDDAKPLLRLKGFPSFPLVERQANEVDWWDMVCNVKKLINEKKEDGKVFWQNLAGYKRQEALRPYLSSEEDRKKGKKFARYQLGDLLLHLEKKHGEDWGKVYDEAWERIDKKVEGLSKHIKLEEERRSEDAQSKAALTDWLRAKASFVIEGLKEADKDEFCRCELKLQKWYGDLRGKPFAIEAENSILDISGFSKQYNCAFIWQKDGVKKLNLYLIINYFKGGKLRFKKIKPEAFEANRFYTVINKKSGEIVPMEVNFNFDDPNLIILPLAFGKRQGREFIWNDLLSLETGSLKLANGRVIEKTLYNRRTRQDEPALFVALTFERREVLDSSNIKPMSNLIGVDRGENIPAVIALTDPEGCPLSRFKDSLGNPTHILRIGESYKEKQRTIQAKKEVEQRRAGGYSRKYASKAKNLADDMVRNTARDLLYYAVTQDAMLIFENLSRGFGRQGKRTFMAERQYTRMEDWLTAKLAYEGLPSKTYLSKTLAQYTSKTCSNCGFTITSADYDRVLEKLKKTATGWMTTINGKELKVEGQITYYNRYKRQNVVKDLSVELDRLSEESVNNDISSWTKGRSGEALSLLKKRFSHRPVQEKFVCLNCGFETHADEQAALNIARSWLFLRSQEYKKYQTNKTTGNTDKRAFVETWQSFYRKKLKEVWKPAV

SEQ ID NO: 30301 - protein, 980 aa, synthetic construct
  REGION 1..980: note = engineered CasX variant
QEIKRINKIRRRLVKDSNTKKAGKTRGPMKTLLVRVMTPDLRERLENLRKKPENIPQPISNTSRANLNKLLTDYTEMKKAILHVYWEEFQKDPVGLMSRVAQPASKKIDQNKLKPEMDEKGNLTTAGFACSQCGQPLFVYKLEQVSEKGKAYTNYFGRCNVAEHEKLIKLAQLKPEKDSDEAVTYSLGKFGQRALDFYSIHVTKESTHPVKPLAQIAGNRYASGPVGKALSDACMGTIASFLSKYQDIIIEHQKVVKGNQKRLESLRELAGKENLEYPSVTLPPQPHTKEGVDAYNEVIARVRMWVNLNLWQKLKLSRDDAKPLLRLKGFPSFPLVERQANEVDWWDMVCNVKKLINEKKEDGKVFWQNLAGYKRQEALRPYLSSEEDRKKGKKFARYQLGDLLLHLEKKHGEDWGKVYDEAWERIDKKVEGLSKHIKLEEERRSEDAQSKAALTDWLRAKASFVIEGLKEADKDEFCRCELKLQKWYGDLRGKPFAIEAENSILDISGFSKQYNCAFIWQKDGVKKLNLYLIINYFKGGKLRFKKIKPEAFEANRFYTVINKKSGEIVPMEVNFNFDDPNLIILPLAFGKRQGREFIWNDLLSLETGSLKLANGRVIEKTLYNRRTRQDEPALFVALTFERREVLDSSNIKPMSNLIGVDRGENIPAVIALTDPEGCPLSRFKDSLGNPTHILRIGESYKEKQRTIQAKKEVEQRRAGGYSRKYASKAKNLADDMVRNTARDLLYYAVTQDAMLIFENLSRGFGRQGKRTFMAERQYTRMEDWLTAKLAYEGLPSKTYLSKTLAQYTSKTCSNCGFTITSADYDRVLEKLKKTATGWMTTINGKELKVEGQITYYNRYKRQNVVKDLSVELDRLSEESVNNDISSWTKGRSGEALSLLKKRFSHRPVQEKFVCLNCGFETHADEQAALNIARSWLFLRSQEYKKYQTNKTTGNTDKRAFVETWQSFYRKKLKEVWKPAV

SEQ ID NO: 30302 - protein, 979 aa, synthetic construct
  REGION 1..979: note = engineered CasX variant
QEIKRINKIRRRLVKDSNTKKAGKTRGPMKTLLVRVMTPDLRERLENLRKKPENIPQPISNTSRANLNKLLTDYTEMKKAILHVYWEEFQKDPVGLMSRVAQPASKKIDQNKLKPEMDEKGNLTTAGFACSQCGQPLFVYKLEQVSEKGKAYTNYFGRCNVAEHEKLILLAQLKPEKDSDEAVTYSLGKFGQRALDFYSIHVTKESTHPVKPLAQIAGNRYASPVGKALSDACMGTIASFLSKYQDIIIEHQKVVKGNQKRLESLRELAGKENLEYPSVTLPPQPHTKEGVDAYNEVIARVRMWVNLNLWQKLKLSRDDAKPLLRLKGFPSFPLVERQANEVDWWDMVCNVKKLINEKKEDGKVFWQNLAGYKRQEALRPYLSSEEDRKKGKKFARYQLGDLLLHLEKKHGEDWGKVYDEAWERIDKKVEGLSKHIKLEEERRSEDAQSKAALTDWLRAKASFVIEGLKEADKDEFCRCELKLQKWYGDLRGKPFAIEAENSILDISGFSKQYNCAFIWQKDGVKKLNLYLIINYFKGGKLRFKKIKPEAFEANRFYTVINKKSGEIVPMEVNFNFDDPNLIILPLAFGKRQGREFIWNDLLSLETGSLKLANGRVIEKTLYNRRTRQDEPALFVALTFERREVLDSSNIKPMSNLIGVDRGENIPAVIALTDPEGCPLSRFKDSLGNPTHILRIGESYKEKQRTIQAKKEVEQRRAGGYSRKYASKAKNLADDMVRNTARDLLYYAVTQDAMLIFENLSRGFGRQGKRTFMAERQYTRMEDWLTAKLAYEGLPSKTYLSKTLAQYTSKTCSNCGFTITSADYDRVLEKLKKTATGWMTTINGKELKVEGQITYYNRYKRQNVVKDLSVELDRLSEESVNNDISSWTKGRSGEALSLLKKRFSHRPVQEKFVCLNCGFETHADEQAALNIARSWLFLRSQEYKKYQTNKTTGNTDKRAFVETWQSFYRKKLKEVWKPAV

SEQ ID NO: 30303 - protein, 979 aa, synthetic construct
  REGION 1..979: note = engineered CasX variant
QEIKRINKIRRRLVKDSNTKKAGKTRGPMKTLLVRVMTPDLRERLENLRKKPENIPQPISNTSRANLNKLLTDYTEMKKAILHVYWEEFQKDPVGLMSRVAQPASKKIDQNKLKPEMDEKGNLTTAGFACSQCGQPLFVYKLEQVSEKGKAYTNYFGRCNVAEHEKLILLAQLKPEKDSDEAVTYSLGKFGQRALDFYSIHVTKESTHPVKPLAQIAGNRYASYPVGKALSDACMGTIASFLSKYQDIIIEHQKVVKGNQKRLESLRELAGKENLEYPSVTLPPQPHTKEGVDAYNEVIARVRMWVNLNLWQKLKLSRDDAKPLLRLKGFPSFPLVERQANEVDWWDMVCNVKKLINEKKEDGKVFWQNLAGYKRQEALRPYLSSEEDRKKGKKFARYQLGDLLLHLEKKHGEDWGKVYDEAWERIDKKVEGLSKHIKLEEERRSEDAQSKAALTDWLRAKASFVIEGLKEADKDEFCRCELKLQKWYGDLRGKPFAIEAENSILDISGFSKQYNCAFIWQKDGVKKLNLYLIINYFKGGKLRFKKIKPEAFEANRFYTVINKKSGEIVPMEVNFNFDDPNLIILPLAFGKRQGREFIWNDLLSLETGSLKLANGRVIEKTLYNRRTRQDEPALFVALTFERREVLDSSNIKPMNLIGVDRGENIPAVIALTDPEGCPLSRFKDSLGNPTHILRIRESYKEKQRTIQAKKEVEQRRAGGYSRKYASKAKNLADDMVRNTARDLLYYAVTQDAMLIFENLSRGFGRQGKRTFMAERQYTRMEDWLTAKLAYEGLPSKTYLSKTLAQYTSKTCSNCGFTITSADYDRVLEKLKKTATGWMTTINGKELKVEGQITYYNRYKRQNVVKDLSVELDRLSEESVNNDISSWTKGRSGEALSLLKKRFSHRPVQEKFVCLNCGFETHADEQAALNIARSWLFLRSQEYKKYQTNKTTGNTDKRAFVETWQSFYRKKLKEVWKPAV

SEQ ID NO: 30304 - protein, 979 aa, synthetic construct
  REGION 1..979: note = engineered CasX variant
QEIKRINKIRRRLVKDSNTKKAGKTRGPMKTLLVRVMTPDLRERLENLRKKPENIPQPISNTSRANLNKLLTDYTEMKKAILHVYWEEFQKDPVGLMSRVAQPASKKIDQNKLKPEMDEKGNLTTAGFACSQCGQPLFVYKLEQVSEKGKAYTNYFGRCNVAEHEKLILLAQLKPEKDSDEAVTYSLGKFGQRALDFYSIHVTKESTHPVKPLAQIAGNRYASHPVGKALSDACMGTIASFLSKYQDIIIEHQKVVKGNQKRLESLRELAGKENLEYPSVTLPPQPHTKEGVDAYNEVIARVRMWVNLNLWQKLKLSRDDAKPLLRLKGFPSFPLVERQANEVDWWDMVCNVKKLINEKKEDGKVFWQNLAGYKRQEALRPYLSSEEDRKKGKKFARYQLGDLLLHLEKKHGEDWGKVYDEAWERIDKKVEGLSKHIKLEEERRSEDAQSKAALTDWLRAKASFVIEGLKEADKDEFCRCELKLQKWYGDLRGKPFAIEAENSILDISGFSKQYNCAFIWQKDGVKKLNLYLIINYFKGGKLRFKKIKPEAFEANRFYTVINKKSGEIVPMEVNFNFDDPNLIILPLAFGKRQGREFIWNDLLSLETGSLKLANGRVIEKTLYNRRTRQDEPALFVALTFERREVLDSSNIKPMNLIGVDRGENIPAVIALTDPEGCPLSRFKDSLGNPTHILRIRESYKEKQRTIQAKKEVEQRRAGGYSRKYASKAKNLADDMVRNTARDLLYYAVTQDAMLIFENLSRGFGRQGKRTFMAERQYTRMEDWLTAKLAYEGLPSKTYLSKTLAQYTSKTCSNCGFTITSADYDRVLEKLKKTATGWMTTINGKELKVEGQITYYNRYKRQNVVKDLSVELDRLSEESVNNDISSWTKGRSGEALSLLKKRFSHRPVQEKFVCLNCGFETHADEQAALNIARSWLFLRSQEYKKYQTNKTTGNTDKRAFVETWQSFYRKKLKEVWKPAV

SEQ ID NO: 30305 - protein, 979 aa, synthetic construct
  REGION 1..979: note = engineered CasX variant
QEIKRINKIRRRLVKDSNTKKAGKTRGPMKTLLVRVMTPDLRERLENLRKKPENIPQPISNTSRANLNKLLTDYTEMKKAILHVYWEEFQKDPVGLMSRVAQPASKKIDQNKLKPEMDEKGNLTTAGFACSQCGQPLFVYKLEQVSEKGKAYTNYFGRCNVAEHEKLILLAQLKPEKDSDEAVTYSLGKFGQRALDFYSIHVTKESTHPVKPLAQIAGNRYASSPVGKALSDACMGTIASFLSKYQDIIIEHQKVVKGNQKRLESLRELAGKENLEYPSVTLPPQPHTKEGVDAYNEVIARVRMWVNLNLWQKLKLSRDDAKPLLRLKGFPSFPLVERQANEVDWWDMVCNVKKLINEKKEDGKVFWQNLAGYKRQEALRPYLSSEEDRKKGKKFARYQLGDLLLHLEKKHGEDWGKVYDEAWERIDKKVEGLSKHIKLEEERRSEDAQSKAALTDWLRAKASFVIEGLKEADKDEFCRCELKLQKWYGDLRGKPFAIEAENSILDISGFSKQYNCAFIWQKDGVKKLNLYLIINYFKGGKLRFKKIKPEAFEANRFYTVINKKSGEIVPMEVNFNFDDPNLIILPLAFGKRQGREFIWNDLLSLETGSLKLANGRVIEKTLYNRRTRQDEPALFVALTFERREVLDSSNIKPMNLIGVDRGENIPAVIALTDPEGCPLSRFKDSLGNPTHILRIRESYKEKQRTIQAKKEVEQRRAGGYSRKYASKAKNLADDMVRNTARDLLYYAVTQDAMLIFENLSRGFGRQGKRTFMAERQYTRMEDWLTAKLAYEGLPSKTYLSKTLAQYTSKTCSNCGFTITSADYDRVLEKLKKTATGWMTTINGKELKVEGQITYYNRYKRQNVVKDLSVELDRLSEESVNNDISSWTKGRSGEALSLLKKRFSHRPVQEKFVCLNCGFETHADEQAALNIARSWLFLRSQEYKKYQTNKTTGNTDKRAFVETWQSFYRKKLKEVWKPAV

SEQ ID NO: 30306 - protein, 979 aa, synthetic construct
  REGION 1..979: note = engineered CasX variant
QEIKRINKIRRRLVKDSNTKKAGKTRGPMKTLLVRVMTPDLRERLENLRKKPENIPQPISNTSRANLNKLLTDYTEMKKAILHVYWEEFQKDPVGLMSRVAQPASKKIDQNKLKPEMDEKGNLTTAGFACSQCGQPLFVYKLEQVSEKGKAYTNYFGRCNVAEHEKLILLAQLKPEKDSDEAVTYSLGKFGQRALDFYSIHVTKESTHPVKPLAQIAGNRYASTPVGKALSDACMGTIASFLSKYQDIIIEHQKVVKGNQKRLESLRELAGKENLEYPSVTLPPQPHTKEGVDAYNEVIARVRMWVNLNLWQKLKLSRDDAKPLLRLKGFPSFPLVERQANEVDWWDMVCNVKKLINEKKEDGKVFWQNLAGYKRQEALRPYLSSEEDRKKGKKFARYQLGDLLLHLEKKHGEDWGKVYDEAWERIDKKVEGLSKHIKLEEERRSEDAQSKAALTDWLRAKASFVIEGLKEADKDEFCRCELKLQKWYGDLRGKPFAIEAENSILDISGFSKQYNCAFIWQKDGVKKLNLYLIINYFKGGKLRFKKIKPEAFEANRFYTVINKKSGEIVPMEVNFNFDDPNLIILPLAFGKRQGREFIWNDLLSLETGSLKLANGRVIEKTLYNRRTRQDEPALFVALTFERREVLDSSNIKPMNLIGVDRGENIPAVIALTDPEGCPLSRFKDSLGNPTHILRIRESYKEKQRTIQAKKEVEQRRAGGYSRKYASKAKNLADDMVRNTARDLLYYAVTQDAMLIFENLSRGFGRQGKRTFMAERQYTRMEDWLTAKLAYEGLPSKTYLSKTLAQYTSKTCSNCGFTITSADYDRVLEKLKKTATGWMTTINGKELKVEGQITYYNRYKRQNVVKDLSVELDRLSEESVNNDISSWTKGRSGEALSLLKKRFSHRPVQEKFVCLNCGFETHADEQAALNIARSWLFLRSQEYKKYQTNKTTGNTDKRAFVETWQSFYRKKLKEVWKPAV

SEQ ID NO: 30307 - protein, 979 aa, synthetic construct
  REGION 1..979: note = engineered CasX variant
QEIKRINKIRRRLVKDSNTKKAGKTRGPMKTLLVRVMTPDLRERLENLRKKPENIPQPISNTSRANLNKLLTDYTEMKKAILHVYWEEFQKDPVGLMSRVAQPASKKIDQNKLKPEMDEKGNLTTAGFACSQCGQPLFVYKLEQVSEKGKAYTNYFGRCNVAEHEKLILLAQLKPEKDSDEAVTYSLGKFGQRALDFYSIHVTKESTHPVKPLAQIAGNRYASAPVGKALSDACMGTIASFLSKYQDIIIEHQKVVKGNQKRLESLRELAGKENLEYPSVTLPPQPHTKEGVDAYNEVIARVRMWVNLNLWQKLKLSRDDAKPLLRLKGFPSFPLVERQANEVDWWDMVCNVKKLINEKKEDGKVFWQNLAGYKRQEALRPYLSSEEDRKKGKKFARYQLGDLLLHLEKKHGEDWGKVYDEAWERIDKKVEGLSKHIKLEEERRSEDAQSKAALTDWLRAKASFVIEGLKEADKDEFCRCELKLQKWYGDLRGKPFAIEAENSILDISGFSKQYNCAFIWQKDGVKKLNLYLIINYFKGGKLRFKKIKPEAFEANRFYTVINKKSGEIVPMEVNFNFDDPNLIILPLAFGKRQGREFIWNDLLSLETGSLKLANGRVIEKTLYNRRTRQDEPALFVALTFERREVLDSSNIKPMNLIGVDRGENIPAVIALTDPEGCPLSRFKDSLGNPTHILRIRESYKEKQRTIQAKKEVEQRRAGGYSRKYASKAKNLADDMVRNTARDLLYYAVTQDAMLIFENLSRGFGRQGKRTFMAERQYTRMEDWLTAKLAYEGLPSKTYLSKTLAQYTSKTCSNCGFTITSADYDRVLEKLKKTATGWMTTINGKELKVEGQITYYNRYKRQNVVKDLSVELDRLSEESVNNDISSWTKGRSGEALSLLKKRFSHRPVQEKFVCLNCGFETHADEQAALNIARSWLFLRSQEYKKYQTNKTTGNTDKRAFVETWQSFYRKKLKEVWKPAV

SEQ ID NO: 30308 - protein, 979 aa, synthetic construct
  REGION 1..979: note = engineered CasX variant
QEIKRINKIRRRLVKDSNTKKAGKTRGPMKTLLVRVMTPDLRERLENLRKKPENIPQPISNTSRANLNKLLTDYTEMKKAILHVYWEEFQKDPVGLMSRVAQPASKKIDQNKLKPEMDEKGNLTTAGFACSQCGQPLFVYKLEQVSEKGKAYTNYFGRCNVAEHEKLILLAQLKPEKDSDEAVTYSLGKFGQRALDFYSIHVTKESTHPVKPLAQIAGNRYASVPVGKALSDACMGTIASFLSKYQDIIIEHQKVVKGNQKRLESLRELAGKENLEYPSVTLPPQPHTKEGVDAYNEVIARVRMWVNLNLWQKLKLSRDDAKPLLRLKGFPSFPLVERQANEVDWWDMVCNVKKLINEKKEDGKVFWQNLAGYKRQEALRPYLSSEEDRKKGKKFARYQLGDLLLHLEKKHGEDWGKVYDEAWERIDKKVEGLSKHIKLEEERRSEDAQSKAALTDWLRAKASFVIEGLKEADKDEFCRCELKLQKWYGDLRGKPFAIEAENSILDISGFSKQYNCAFIWQKDGVKKLNLYLIINYFKGGKLRFKKIKPEAFEANRFYTVINKKSGEIVPMEVNFNFDDPNLIILPLAFGKRQGREFIWNDLLSLETGSLKLANGRVIEKTLYNRRTRQDEPALFVALTFERREVLDSSNIKPMNLIGVDRGENIPAVIALTDPEGCPLSRFKDSLGNPTHILRIRESYKEKQRTIQAKKEVEQRRAGGYSRKYASKAKNLADDMVRNTARDLLYYAVTQDAMLIFENLSRGFGRQGKRTFMAERQYTRMEDWLTAKLAYEGLPSKTYLSKTLAQYTSKTCSNCGFTITSADYDRVLEKLKKTATGWMTTINGKELKVEGQITYYNRYKRQNVVKDLSVELDRLSEESVNNDISSWTKGRSGEALSLLKKRFSHRPVQEKFVCLNCGFETHADEQAALNIARSWLFLRSQEYKKYQTNKTTGNTDKRAFVETWQSFYRKKLKEVWKPAV

SEQ ID NO: 30309 - protein, 979 aa, synthetic construct
  REGION 1..979: note = engineered CasX variant
QEIKRINKIRRRLVKDSNTKKAGKTRGPMKTLLVRVMTPDLRERLENLRKKPENIPQPISNTSRANLNKLLTDYTEMKKAILHVYWEEFQKDPVGLMSRVAQPASKKIDQNKLKPEMDEKGNLTTAGFACSQCGQPLFVYKLEQVSEKGKAYTNYFGRCNVAEHEKLIKLAQLKPEKDSDEAVTYSLGKFGQRALDFYSIHVTKESTHPVKPLAQIAGNRYASGPVGKALSDACMGTIASFLSKYQDIIIEHQKVVKGNQKRLESLRELAGKENLEYPSVTLPPQPHTKEGVDAYNEVIARVRMWVNLNLWQKLKLSRDDAKPLLRLKGFPSFPLVERQANEVDWWDMVCNVKKLINEKKEDGKVFWQNLAGYKRQEALRPYLSSEEDRKKGKKFARYQLGDLLLHLEKKHGEDWGKVYDEAWERIDKKVEGLSKHIKLEEERRSEDAQSKAALTDWLRAKASFVIEGLKEADKDEFCRCELKLQKWYGDLRGKPFAIEAENSILDISGFSKQYNCAFIWQKDGVKKLNLYLIINYFKGGKLRFKKIKPEAFEANRFYTVINKKSGEIVPMEVNFNFDDPNLIILPLAFGKRQGREFIWNDLLSLETGSLKLANGRVIEKTLYNRRTRQDEPALFVALTFERREVLDSSNIKPMNLIGVDRGENIPAVIALTDPEGCPLSRFKDSLGNPTHILRIRESYKEKQRTIQAKKEVEQRRAGGYSRKYASKAKNLADDMVRNTARDLLYYAVTQDAMLIFENLSRGFGRQGKRTFMAERQYTRMEDWLTAKLAYEGLPSKTYLSKTLAQYTSKTCSNCGFTITSADYDRVLEKLKKTATGWMTTINGKELKVEGQITYYNRYKRQNVVKDLSVELDRLSEESVNNDISSWTKGRSGEALSLLKKRFSHRPVQEKFVCLNCGFETHADEQAALNIARSWLFLRSQEYKKYQTNKTTGNTDKRAFVETWQSFYRKKLKEVWKPAV

SEQ ID NO: 30310 - protein, 978 aa, synthetic construct
  REGION 1..978: note = engineered CasX variant
QEIKRINKIRRRLVKDSNTKKAGKTRGPMKTLLVRVMTPDLRERLENLRKKPENIPQPISNTSRANLNKLLTDYTEMKKAILHVYWEEFQKDPVGLMSRVAQPASKKIDQNKLKPEMDEKGNLTTAGFACSQCGQPLFVYKLEQVSEKGKAYTNYFGRCNVAEHEKLILLAQLKPEKDSDEAVTYSLGKFGQRALDFYSIHVTKESTHPVKPLAQIAGNRYASPVGKALSDACMGTIASFLSKYQDIIIEHQKVVKGNQKRLESLRELAGKENLEYPSVTLPPQPHTKEGVDAYNEVIARVRMWVNLNLWQKLKLSRDDAKPLLRLKGFPSFPLVERQANEVDWWDMVCNVKKLINEKKEDGKVFWQNLAGYKRQEALRPYLSSEEDRKKGKKFARYQLGDLLLHLEKKHGEDWGKVYDEAWERIDKKVEGLSKHIKLEEERRSEDAQSKAALTDWLRAKASFVIEGLKEADKDEFCRCELKLQKWYGDLRGKPFAIEAENSILDISGFSKQYNCAFIWQKDGVKKLNLYLIINYFKGGKLRFKKIKPEAFEANRFYTVINKKSGEIVPMEVNFNFDDPNLIILPLAFGKRQGREFIWNDLLSLETGSLKLANGRVIEKTLYNRRTRQDEPALFVALTFERREVLDSSNIKPMNLIGVDRGENIPAVIALTDPEGCPLSRFKDSLGNPTHILRIRESYKEKQRTIQAKKEVEQRRAGGYSRKYASKAKNLADDMVRNTARDLLYYAVTQDAMLIFENLSRGFGRQGKRTFMAERQYTRMEDWLTAKLAYEGLPSKTYLSKTLAQYTSKTCSNCGFTITSADYDRVLEKLKKTATGWMTTINGKELKVEGQITYYNRYKRQNVVKDLSVELDRLSEESVNNDISSWTKGRSGEALSLLKKRFSHRPVQEKFVCLNCGFETHADEQAALNIARSWLFLRSQEYKKYQTNKTTGNTDKRAFVETWQSFYRKKLKEVWKPAV

SEQ ID NO: 30311 - protein, 979 aa, synthetic construct
  REGION 1..979: note = engineered CasX variant
QEIKRINKIRRRLVKDSNTKKAGKTRGPMKTLLVRVMTPDLRERLENLRKKPENIPQPISNTSRANLNKLLTDYTEMKKAILHVYWEEFQKDPVGLMSRVAQPASKKIDQNKLKPEMDEKGNLTTAGFACSQCGQPLFVYKLEQVSEKGKAYTNYFGRCNVAEHEKLILLAQLKPEKDSDEAVTYSLGKFGQRALDFYSIHVTKESTHPVKPLAQIAGNRYASYPVGKALSDACMGTIASFLSKYQDIIIEHQKVVKGNQKRLESLRELAGKENLEYPSVTLPPQPHTKEGVDAYNEVIARVRMWVNLNLWQKLKLSRDDAKPLLRLKGFPSFPLVERQANEVDWWDMVCNVKKLINEKKEDGKVFWQNLAGYKRQEALRPYLSSEEDRKKGKKFARYQLGDLLLHLEKKHGEDWGKVYDEAWERIDKKVEGLSKHIKLEEERRSEDAQSKAALTDWLRAKASFVIEGLKEADKDEFCRCELKLQKWYGDLRGKPFAIEAENSILDISGFSKQYNCAFIWQKDGVKKLNLYLIINYFKGGKLRFKKIKPEAFEANRFYTVINKKSGEIVPMEVNFNFDDPNLIILPLAFGKRQGREFIWNDLLSLETGSLKLANGRVIEKTLYNRRTRQDEPALFVALTFERREVLDSSNIKPMNLIGVDRGENIPAVIALTDPEGCPLSRFKDSLGNPTHILRIGESYKEKQRTIQAKKEVEQRRAGGYSRKYASKAKNLADDMVRNTARDLLYYAVTQDAMLIFENLSRGFGRQGKRTFSAERQYTRMEDWLTAKLAYEGLPSKTYLSKTLAQYTSKTCSNCGFTITSADYDRVLEKLKKTATGWMTTINGKELKVEGQITYYNRYKRQNVVKDLSVELDRLSEESVNNDISSWTKGRSGEALSLLKKRFSHRPVQEKFVCLNCGFETHADEQAALNIARSWLFLRSQEYKKYQTNKTTGNTDKRAFVETWQSFYRKKLKEVWKPAV

SEQ ID NO: 30312 - protein, 979 aa, synthetic construct
  REGION 1..979: note = engineered CasX variant
QEIKRINKIRRRLVKDSNTKKAGKTRGPMKTLLVRVMTPDLRERLENLRKKPENIPQPISNTSRANLNKLLTDYTEMKKAILHVYWEEFQKDPVGLMSRVAQPASKKIDQNKLKPEMDEKGNLTTAGFACSQCGQPLFVYKLEQVSEKGKAYTNYFGRCNVAEHEKLILLAQLKPEKDSDEAVTYSLGKFGQRALDFYSIHVTKESTHPVKPLAQIAGNRYASHPVGKALSDACMGTIASFLSKYQDIIIEHQKVVKGNQKRLESLRELAGKENLEYPSVTLPPQPHTKEGVDAYNEVIARVRMWVNLNLWQKLKLSRDDAKPLLRLKGFPSFPLVERQANEVDWWDMVCNVKKLINEKKEDGKVFWQNLAGYKRQEALRPYLSSEEDRKKGKKFARYQLGDLLLHLEKKHGEDWGKVYDEAWERIDKKVEGLSKHIKLEEERRSEDAQSKAALTDWLRAKASFVIEGLKEADKDEFCRCELKLQKWYGDLRGKPFAIEAENSILDISGFSKQYNCAFIWQKDGVKKLNLYLIINYFKGGKLRFKKIKPEAFEANRFYTVINKKSGEIVPMEVNFNFDDPNLIILPLAFGKRQGREFIWNDLLSLETGSLKLANGRVIEKTLYNRRTRQDEPALFVALTFERREVLDSSNIKPMNLIGVDRGENIPAVIALTDPEGCPLSRFKDSLGNPTHILRIGESYKEKQRTIQAKKEVEQRRAGGYSRKYASKAKNLADDMVRNTARDLLYYAVTQDAMLIFENLSRGFGRQGKRTFSAERQYTRMEDWLTAKLAYEGLPSKTYLSKTLAQYTSKTCSNCGFTITSADYDRVLEKLKKTATGWMTTINGKELKVEGQITYYNRYKRQNVVKDLSVELDRLSEESVNNDISSWTKGRSGEALSLLKKRFSHRPVQEKFVCLNCGFETHADEQAALNIARSWLFLRSQEYKKYQTNKTTGNTDKRAFVETWQSFYRKKLKEVWKPAV

SEQ ID NO: 30313 - protein, 979 aa, synthetic construct
  REGION 1..979: note = engineered CasX variant
QEIKRINKIRRRLVKDSNTKKAGKTRGPMKTLLVRVMTPDLRERLENLRKKPENIPQPISNTSRANLNKLLTDYTEMKKAILHVYWEEFQKDPVGLMSRVAQPASKKIDQNKLKPEMDEKGNLTTAGFACSQCGQPLFVYKLEQVSEKGKAYTNYFGRCNVAEHEKLILLAQLKPEKDSDEAVTYSLGKFGQRALDFYSIHVTKESTHPVKPLAQIAGNRYASSPVGKALSDACMGTIASFLSKYQDIIIEHQKVVKGNQKRLESLRELAGKENLEYPSVTLPPQPHTKEGVDAYNEVIARVRMWVNLNLWQKLKLSRDDAKPLLRLKGFPSFPLVERQANEVDWWDMVCNVKKLINEKKEDGKVFWQNLAGYKRQEALRPYLSSEEDRKKGKKFARYQLGDLLLHLEKKHGEDWGKVYDEAWERIDKKVEGLSKHIKLEEERRSEDAQSKAALTDWLRAKASFVIEGLKEADKDEFCRCELKLQKWYGDLRGKPFAIEAENSILDISGFSKQYNCAFIWQKDGVKKLNLYLIINYFKGGKLRFKKIKPEAFEANRFYTVINKKSGEIVPMEVNFNFDDPNLIILPLAFGKRQGREFIWNDLLSLETGSLKLANGRVIEKTLYNRRTRQDEPALFVALTFERREVLDSSNIKPMNLIGVDRGENIPAVIALTDPEGCPLSRFKDSLGNPTHILRIGESYKEKQRTIQAKKEVEQRRAGGYSRKYASKAKNLADDMVRNTARDLLYYAVTQDAMLIFENLSRGFGRQGKRTFSAERQYTRMEDWLTAKLAYEGLPSKTYLSKTLAQYTSKTCSNCGFTITSADYDRVLEKLKKTATGWMTTINGKELKVEGQITYYNRYKRQNVVKDLSVELDRLSEESVNNDISSWTKGRSGEALSLLKKRFSHRPVQEKFVCLNCGFETHADEQAALNIARSWLFLRSQEYKKYQTNKTTGNTDKRAFVETWQSFYRKKLKEVWKPAV

SEQ ID NO: 30314 - protein, 979 aa, synthetic construct
  REGION 1..979: note = engineered CasX variant
QEIKRINKIRRRLVKDSNTKKAGKTRGPMKTLLVRVMTPDLRERLENLRKKPENIPQPISNTSRANLNKLLTDYTEMKKAILHVYWEEFQKDPVGLMSRVAQPASKKIDQNKLKPEMDEKGNLTTAGFACSQCGQPLFVYKLEQVSEKGKAYTNYFGRCNVAEHEKLILLAQLKPEKDSDEAVTYSLGKFGQRALDFYSIHVTKESTHPVKPLAQIAGNRYASTPVGKALSDACMGTIASFLSKYQDIIIEHQKVVKGNQKRLESLRELAGKENLEYPSVTLPPQPHTKEGVDAYNEVIARVRMWVNLNLWQKLKLSRDDAKPLLRLKGFPSFPLVERQANEVDWWDMVCNVKKLINEKKEDGKVFWQNLAGYKRQEALRPYLSSEEDRKKGKKFARYQLGDLLLHLEKKHGEDWGKVYDEAWERIDKKVEGLSKHIKLEEERRSEDAQSKAALTDWLRAKASFVIEGLKEADKDEFCRCELKLQKWYGDLRGKPFAIEAENSILDISGFSKQYNCAFIWQKDGVKKLNLYLIINYFKGGKLRFKKIKPEAFEANRFYTVINKKSGEIVPMEVNFNFDDPNLIILPLAFGKRQGREFIWNDLLSLETGSLKLANGRVIEKTLYNRRTRQDEPALFVALTFERREVLDSSNIKPMNLIGVDRGENIPAVIALTDPEGCPLSRFKDSLGNPTHILRIGESYKEKQRTIQAKKEVEQRRAGGYSRKYASKAKNLADDMVRNTARDLLYYAVTQDAMLIFENLSRGFGRQGKRTFSAERQYTRMEDWLTAKLAYEGLPSKTYLSKTLAQYTSKTCSNCGFTITSADYDRVLEKLKKTATGWMTTINGKELKVEGQITYYNRYKRQNVVKDLSVELDRLSEESVNNDISSWTKGRSGEALSLLKKRFSHRPVQEKFVCLNCGFETHADEQAALNIARSWLFLRSQEYKKYQTNKTTGNTDKRAFVETWQSFYRKKLKEVWKPAV

SEQ ID NO: 30315 - protein, 979 aa, synthetic construct
  REGION 1..979: note = engineered CasX variant
QEIKRINKIRRRLVKDSNTKKAGKTRGPMKTLLVRVMTPDLRERLENLRKKPENIPQPISNTSRANLNKLLTDYTEMKKAILHVYWEEFQKDPVGLMSRVAQPASKKIDQNKLKPEMDEKGNLTTAGFACSQCGQPLFVYKLEQVSEKGKAYTNYFGRCNVAEHEKLILLAQLKPEKDSDEAVTYSLGKFGQRALDFYSIHVTKESTHPVKPLAQIAGNRYASAPVGKALSDACMGTIASFLSKYQDIIIEHQKVVKGNQKRLESLRELAGKENLEYPSVTLPPQPHTKEGVDAYNEVIARVRMWVNLNLWQKLKLSRDDAKPLLRLKGFPSFPLVERQANEVDWWDMVCNVKKLINEKKEDGKVFWQNLAGYKRQEALRPYLSSEEDRKKGKKFARYQLGDLLLHLEKKHGEDWGKVYDEAWERIDKKVEGLSKHIKLEEERRSEDAQSKAALTDWLRAKASFVIEGLKEADKDEFCRCELKLQKWYGDLRGKPFAIEAENSILDISGFSKQYNCAFIWQKDGVKKLNLYLIINYFKGGKLRFKKIKPEAFEANRFYTVINKKSGEIVPMEVNFNFDDPNLIILPLAFGKRQGREFIWNDLLSLETGSLKLANGRVIEKTLYNRRTRQDEPALFVALTFERREVLDSSNIKPMNLIGVDRGENIPAVIALTDPEGCPLSRFKDSLGNPTHILRIGESYKEKQRTIQAKKEVEQRRAGGYSRKYASKAKNLADDMVRNTARDLLYYAVTQDAMLIFENLSRGFGRQGKRTFSAERQYTRMEDWLTAKLAYEGLPSKTYLSKTLAQYTSKTCSNCGFTITSADYDRVLEKLKKTATGWMTTINGKELKVEGQITYYNRYKRQNVVKDLSVELDRLSEESVNNDISSWTKGRSGEALSLLKKRFSHRPVQEKFVCLNCGFETHADEQAALNIARSWLFLRSQEYKKYQTNKTTGNTDKRAFVETWQSFYRKKLKEVWKPAV

SEQ ID NO: 30316 - protein, 979 aa, synthetic construct
  REGION 1..979: note = engineered CasX variant
QEIKRINKIRRRLVKDSNTKKAGKTRGPMKTLLVRVMTPDLRERLENLRKKPENIPQPISNTSRANLNKLLTDYTEMKKAILHVYWEEFQKDPVGLMSRVAQPASKKIDQNKLKPEMDEKGNLTTAGFACSQCGQPLFVYKLEQVSEKGKAYTNYFGRCNVAEHEKLILLAQLKPEKDSDEAVTYSLGKFGQRALDFYSIHVTKESTHPVKPLAQIAGNRYASVPVGKALSDACMGTIASFLSKYQDIIIEHQKVVKGNQKRLESLRELAGKENLEYPSVTLPPQPHTKEGVDAYNEVIARVRMWVNLNLWQKLKLSRDDAKPLLRLKGFPSFPLVERQANEVDWWDMVCNVKKLINEKKEDGKVFWQNLAGYKRQEALRPYLSSEEDRKKGKKFARYQLGDLLLHLEKKHGEDWGKVYDEAWERIDKKVEGLSKHIKLEEERRSEDAQSKAALTDWLRAKASFVIEGLKEADKDEFCRCELKLQKWYGDLRGKPFAIEAENSILDISGFSKQYNCAFIWQKDGVKKLNLYLIINYFKGGKLRFKKIKPEAFEANRFYTVINKKSGEIVPMEVNFNFDDPNLIILPLAFGKRQGREFIWNDLLSLETGSLKLANGRVIEKTLYNRRTRQDEPALFVALTFERREVLDSSNIKPMNLIGVDRGENIPAVIALTDPEGCPLSRFKDSLGNPTHILRIGESYKEKQRTIQAKKEVEQRRAGGYSRKYASKAKNLADDMVRNTARDLLYYAVTQDAMLIFENLSRGFGRQGKRTFSAERQYTRMEDWLTAKLAYEGLPSKTYLSKTLAQYTSKTCSNCGFTITSADYDRVLEKLKKTATGWMTTINGKELKVEGQITYYNRYKRQNVVKDLSVELDRLSEESVNNDISSWTKGRSGEALSLLKKRFSHRPVQEKFVCLNCGFETHADEQAALNIARSWLFLRSQEYKKYQTNKTTGNTDKRAFVETWQSFYRKKLKEVWKPAV

SEQ ID NO: 30317 - protein, 979 aa, synthetic construct
  REGION 1..979: note = engineered CasX variant
QEIKRINKIRRRLVKDSNTKKAGKTRGPMKTLLVRVMTPDLRERLENLRKKPENIPQPISNTSRANLNKLLTDYTEMKKAILHVYWEEFQKDPVGLMSRVAQPASKKIDQNKLKPEMDEKGNLTTAGFACSQCGQPLFVYKLEQVSEKGKAYTNYFGRCNVAEHEKLIKLAQLKPEKDSDEAVTYSLGKFGQRALDFYSIHVTKESTHPVKPLAQIAGNRYASGPVGKALSDACMGTIASFLSKYQDIIIEHQKVVKGNQKRLESLRELAGKENLEYPSVTLPPQPHTKEGVDAYNEVIARVRMWVNLNLWQKLKLSRDDAKPLLRLKGFPSFPLVERQANEVDWWDMVCNVKKLINEKKEDGKVFWQNLAGYKRQEALRPYLSSEEDRKKGKKFARYQLGDLLLHLEKKHGEDWGKVYDEAWERIDKKVEGLSKHIKLEEERRSEDAQSKAALTDWLRAKASFVIEGLKEADKDEFCRCELKLQKWYGDLRGKPFAIEAENSILDISGFSKQYNCAFIWQKDGVKKLNLYLIINYFKGGKLRFKKIKPEAFEANRFYTVINKKSGEIVPMEVNFNFDDPNLIILPLAFGKRQGREFIWNDLLSLETGSLKLANGRVIEKTLYNRRTRQDEPALFVALTFERREVLDSSNIKPMNLIGVDRGENIPAVIALTDPEGCPLSRFKDSLGNPTHILRIGESYKEKQRTIQAKKEVEQRRAGGYSRKYASKAKNLADDMVRNTARDLLYYAVTQDAMLIFENLSRGFGRQGKRTFSAERQYTRMEDWLTAKLAYEGLPSKTYLSKTLAQYTSKTCSNCGFTITSADYDRVLEKLKKTATGWMTTINGKELKVEGQITYYNRYKRQNVVKDLSVELDRLSEESVNNDISSWTKGRSGEALSLLKKRFSHRPVQEKFVCLNCGFETHADEQAALNIARSWLFLRSQEYKKYQTNKTTGNTDKRAFVETWQSFYRKKLKEVWKPAV

SEQ ID NO: 30318 - protein, 978 aa, synthetic construct
  REGION 1..978: note = engineered CasX variant
QEIKRINKIRRRLVKDSNTKKAGKTRGPMKTLLVRVMTPDLRERLENLRKKPENIPQPISNTSRANLNKLLTDYTEMKKAILHVYWEEFQKDPVGLMSRVAQPASKKIDQNKLKPEMDEKGNLTTAGFACSQCGQPLFVYKLEQVSEKGKAYTNYFGRCNVAEHEKLILLAQLKPEKDSDEAVTYSLGKFGQRALDFYSIHVTKESTHPVKPLAQIAGNRYASPVGKALSDACMGTIASFLSKYQDIIIEHQKVVKGNQKRLESLRELAGKENLEYPSVTLPPQPHTKEGVDAYNEVIARVRMWVNLNLWQKLKLSRDDAKPLLRLKGFPSFPLVERQANEVDWWDMVCNVKKLINEKKEDGKVFWQNLAGYKRQEALRPYLSSEEDRKKGKKFARYQLGDLLLHLEKKHGEDWGKVYDEAWERIDKKVEGLSKHIKLEEERRSEDAQSKAALTDWLRAKASFVIEGLKEADKDEFCRCELKLQKWYGDLRGKPFAIEAENSILDISGFSKQYNCAFIWQKDGVKKLNLYLIINYFKGGKLRFKKIKPEAFEANRFYTVINKKSGEIVPMEVNFNFDDPNLIILPLAFGKRQGREFIWNDLLSLETGSLKLANGRVIEKTLYNRRTRQDEPALFVALTFERREVLDSSNIKPMNLIGVDRGENIPAVIALTDPEGCPLSRFKDSLGNPTHILRIGESYKEKQRTIQAKKEVEQRRAGGYSRKYASKAKNLADDMVRNTARDLLYYAVTQDAMLIFENLSRGFGRQGKRTFSAERQYTRMEDWLTAKLAYEGLPSKTYLSKTLAQYTSKTCSNCGFTITSADYDRVLEKLKKTATGWMTTINGKELKVEGQITYYNRYKRQNVVKDLSVELDRLSEESVNNDISSWTKGRSGEALSLLKKRFSHRPVQEKFVCLNCGFETHADEQAALNIARSWLFLRSQEYKKYQTNKTTGNTDKRAFVETWQSFYRKKLKEVWKPAV

SEQ ID NO: 30319 - protein, 979 aa, synthetic construct
  REGION 1..979: note = engineered CasX variant
QEIKRINKIRRRLVKDSNTKKAGKTRGPMKTLLVRVMTPDLRERLENLRKKPENIPQPISNTSRANLNKLLTDYTEMKKAILHVYWEEFQKDPVGLMSRVAQPASKKIDQNKLKPEMDEKGNLTTAGFACSQCGQPLFVYKLEQVSEKGKAYTNYFGRCNVAEHEKLILLAQLKPEKDSDEAVTYSLGKFGQRALDFYSIHVTKESTHPVKPLAQIAGNRYASYPVGKALSDACMGTIASFLSKYQDIIIEHQKVVKGNQKRLESLRELAGKENLEYPSVTLPPQPHTKEGVDAYNEVIARVRMWVNLNLWQKLKLSRDDAKPLLRLKGFPSFPLVERQANEVDWWDMVCNVKKLINEKKEDGKVFWQNLAGYKRQEALRPYLSSEEDRKKGKKFARYQLGDLLLHLEKKHGEDWGKVYDEAWERIDKKVEGLSKHIKLEEERRSEDAQSKAALTDWLRAKASFVIEGLKEADKDEFCRCELKLQKWYGDLRGKPFAIEAENSILDISGFSKQYNCAFIWQKDGVKKLNLYLIINYFKGGKLRFKKIKPEAFEANRFYTVINKKSGEIVPMEVNFNFDDPNLIILPLAFGKRQGREFIWNDLLSLETGSLKLANGRVIEKTLYNRRTRQDEPALFVALTFERREVLDSSNIKPMNLIGVDRGENIPAVIALTDPEGCPLSRFKDSLGNPTHILRIGESYKEKQRTIQAKKEVEQRRAGGYSRKYASKAKNLADDMVRNTARDLLYYAVTQDAMLIFENLSRGFGRQGKRTFMAERQYTRMEDWLTAKLAYEGLPSKTYLSKTLAQYTSKTCSNCGFTITSADYDRVLEKLKKTATGWMTTINGKELKVEGQITYYNRYKRQNVVKDLSVELDRLSEESVNNDISSWDKGRSGEALSLLKKRFSHRPVQEKFVCLNCGFETHADEQAALNIARSWLFLRSQEYKKYQTNKTTGNTDKRAFVETWQSFYRKKLKEVWKPAV

SEQ ID NO: 30320 - protein, 979 aa, synthetic construct
  REGION 1..979: note = engineered CasX variant
QEIKRINKIRRRLVKDSNTKKAGKTRGPMKTLLVRVMTPDLRERLENLRKKPENIPQPISNTSRANLNKLLTDYTEMKKAILHVYWEEFQKDPVGLMSRVAQPASKKIDQNKLKPEMDEKGNLTTAGFACSQCGQPLFVYKLEQVSEKGKAYTNYFGRCNVAEHEKLILLAQLKPEKDSDEAVTYSLGKFGQRALDFYSIHVTKESTHPVKPLAQIAGNRYASHPVGKALSDACMGTIASFLSKYQDIIIEHQKVVKGNQKRLESLRELAGKENLEYPSVTLPPQPHTKEGVDAYNEVIARVRMWVNLNLWQKLKLSRDDAKPLLRLKGFPSFPLVERQANEVDWWDMVCNVKKLINEKKEDGKVFWQNLAGYKRQEALRPYLSSEEDRKKGKKFARYQLGDLLLHLEKKHGEDWGKVYDEAWERIDKKVEGLSKHIKLEEERRSEDAQSKAALTDWLRAKASFVIEGLKEADKDEFCRCELKLQKWYGDLRGKPFAIEAENSILDISGFSKQYNCAFIWQKDGVKKLNLYLIINYFKGGKLRFKKIKPEAFEANRFYTVINKKSGEIVPMEVNFNFDDPNLIILPLAFGKRQGREFIWNDLLSLETGSLKLANGRVIEKTLYNRRTRQDEPALFVALTFERREVLDSSNIKPMNLIGVDRGENIPAVIALTDPEGCPLSRFKDSLGNPTHILRIGESYKEKQRTIQAKKEVEQRRAGGYSRKYASKAKNLADDMVRNTARDLLYYAVTQDAMLIFENLSRGFGRQGKRTFMAERQYTRMEDWLTAKLAYEGLPSKTYLSKTLAQYTSKTCSNCGFTITSADYDRVLEKLKKTATGWMTTINGKELKVEGQITYYNRYKRQNVVKDLSVELDRLSEESVNNDISSWDKGRSGEALSLLKKRFSHRPVQEKFVCLNCGFETHADEQAALNIARSWLFLRSQEYKKYQTNKTTGNTDKRAFVETWQSFYRKKLKEVWKPAV

SEQ ID NO: 30321 - protein, 979 aa, synthetic construct
  REGION 1..979: note = engineered CasX variant
QEIKRINKIRRRLVKDSNTKKAGKTRGPMKTLLVRVMTPDLRERLENLRKKPENIPQPISNTSRANLNKLLTDYTEMKKAILHVYWEEFQKDPVGLMSRVAQPASKKIDQNKLKPEMDEKGNLTTAGFACSQCGQPLFVYKLEQVSEKGKAYTNYFGRCNVAEHEKLILLAQLKPEKDSDEAVTYSLGKFGQRALDFYSIHVTKESTHPVKPLAQIAGNRYASSPVGKALSDACMGTIASFLSKYQDIIIEHQKVVKGNQKRLESLRELAGKENLEYPSVTLPPQPHTKEGVDAYNEVIARVRMWVNLNLWQKLKLSRDDAKPLLRLKGFPSFPLVERQANEVDWWDMVCNVKKLINEKKEDGKVFWQNLAGYKRQEALRPYLSSEEDRKKGKKFARYQLGDLLLHLEKKHGEDWGKVYDEAWERIDKKVEGLSKHIKLEEERRSEDAQSKAALTDWLRAKASFVIEGLKEADKDEFCRCELKLQKWYGDLRGKPFAIEAENSILDISGFSKQYNCAFIWQKDGVKKLNLYLIINYFKGGKLRFKKIKPEAFEANRFYTVINKKSGEIVPMEVNFNFDDPNLIILPLAFGKRQGREFIWNDLLSLETGSLKLANGRVIEKTLYNRRTRQDEPALFVALTFERREVLDSSNIKPMNLIGVDRGENIPAVIALTDPEGCPLSRFKDSLGNPTHILRIGESYKEKQRTIQAKKEVEQRRAGGYSRKYASKAKNLADDMVRNTARDLLYYAVTQDAMLIFENLSRGFGRQGKRTFMAERQYTRMEDWLTAKLAYEGLPSKTYLSKTLAQYTSKTCSNCGFTITSADYDRVLEKLKKTATGWMTTINGKELKVEGQITYYNRYKRQNVVKDLSVELDRLSEESVNNDISSWDKGRSGEALSLLKKRFSHRPVQEKFVCLNCGFETHADEQAALNIARSWLFLRSQEYKKYQTNKTTGNTDKRAFVETWQSFYRKKLKEVWKPAV

SEQ ID NO: 30322 - protein, 979 aa, synthetic construct
  REGION 1..979: note = engineered CasX variant
QEIKRINKIRRRLVKDSNTKKAGKTRGPMKTLLVRVMTPDLRERLENLRKKPENIPQPISNTSRANLNKLLTDYTEMKKAILHVYWEEFQKDPVGLMSRVAQPASKKIDQNKLKPEMDEKGNLTTAGFACSQCGQPLFVYKLEQVSEKGKAYTNYFGRCNVAEHEKLILLAQLKPEKDSDEAVTYSLGKFGQRALDFYSIHVTKESTHPVKPLAQIAGNRYASTPVGKALSDACMGTIASFLSKYQDIIIEHQKVVKGNQKRLESLRELAGKENLEYPSVTLPPQPHTKEGVDAYNEVIARVRMWVNLNLWQKLKLSRDDAKPLLRLKGFPSFPLVERQANEVDWWDMVCNVKKLINEKKEDGKVFWQNLAGYKRQEALRPYLSSEEDRKKGKKFARYQLGDLLLHLEKKHGEDWGKVYDEAWERIDKKVEGLSKHIKLEEERRSEDAQSKAALTDWLRAKASFVIEGLKEADKDEFCRCELKLQKWYGDLRGKPFAIEAENSILDISGFSKQYNCAFIWQKDGVKKLNLYLIINYFKGGKLRFKKIKPEAFEANRFYTVINKKSGEIVPMEVNFNFDDPNLIILPLAFGKRQGREFIWNDLLSLETGSLKLANGRVIEKTLYNRRTRQDEPALFVALTFERREVLDSSNIKPMNLIGVDRGENIPAVIALTDPEGCPLSRFKDSLGNPTHILRIGESYKEKQRTIQAKKEVEQRRAGGYSRKYASKAKNLADDMVRNTARDLLYYAVTQDAMLIFENLSRGFGRQGKRTFMAERQYTRMEDWLTAKLAYEGLPSKTYLSKTLAQYTSKTCSNCGFTITSADYDRVLEKLKKTATGWMTTINGKELKVEGQITYYNRYKRQNVVKDLSVELDRLSEESVNNDISSWDKGRSGEALSLLKKRFSHRPVQEKFVCLNCGFETHADEQAALNIARSWLFLRSQEYKKYQTNKTTGNTDKRAFVETWQSFYRKKLKEVWKPAV

SEQ ID NO: 30323 - protein, 979 aa, synthetic construct
  REGION 1..979: note = engineered CasX variant
QEIKRINKIRRRLVKDSNTKKAGKTRGPMKTLLVRVMTPDLRERLENLRKKPENIPQPISNTSRANLNKLLTDYTEMKKAILHVYWEEFQKDPVGLMSRVAQPASKKIDQNKLKPEMDEKGNLTTAGFACSQCGQPLFVYKLEQVSEKGKAYTNYFGRCNVAEHEKLILLAQLKPEKDSDEAVTYSLGKFGQRALDFYSIHVTKESTHPVKPLAQIAGNRYASAPVGKALSDACMGTIASFLSKYQDIIIEHQKVVKGNQKRLESLRELAGKENLEYPSVTLPPQPHTKEGVDAYNEVIARVRMWVNLNLWQKLKLSRDDAKPLLRLKGFPSFPLVERQANEVDWWDMVCNVKKLINEKKEDGKVFWQNLAGYKRQEALRPYLSSEEDRKKGKKFARYQLGDLLLHLEKKHGEDWGKVYDEAWERIDKKVEGLSKHIKLEEERRSEDAQSKAALTDWLRAKASFVIEGLKEADKDEFCRCELKLQKWYGDLRGKPFAIEAENSILDISGFSKQYNCAFIWQKDGVKKLNLYLIINYFKGGKLRFKKIKPEAFEANRFYTVINKKSGEIVPMEVNFNFDDPNLIILPLAFGKRQGREFIWNDLLSLETGSLKLANGRVIEKTLYNRRTRQDEPALFVALTFERREVLDSSNIKPMNLIGVDRGENIPAVIALTDPEGCPLSRFKDSLGNPTHILRIGESYKEKQRTIQAKKEVEQRRAGGYSRKYASKAKNLADDMVRNTARDLLYYAVTQDAMLIFENLSRGFGRQGKRTFMAERQYTRMEDWLTAKLAYEGLPSKTYLSKTLAQYTSKTCSNCGFTITSADYDRVLEKLKKTATGWMTTINGKELKVEGQITYYNRYKRQNVVKDLSVELDRLSEESVNNDISSWDKGRSGEALSLLKKRFSHRPVQEKFVCLNCGFETHADEQAALNIARSWLFLRSQEYKKYQTNKTTGNTDKRAFVETWQSFYRKKLKEVWKPAV

SEQ ID NO: 30324 - protein, 979 aa, synthetic construct
  REGION 1..979: note = engineered CasX variant
QEIKRINKIRRRLVKDSNTKKAGKTRGPMKTLLVRVMTPDLRERLENLRKKPENIPQPISNTSRANLNKLLTDYTEMKKAILHVYWEEFQKDPVGLMSRVAQPASKKIDQNKLKPEMDEKGNLTTAGFACSQCGQPLFVYKLEQVSEKGKAYTNYFGRCNVAEHEKLILLAQLKPEKDSDEAVTYSLGKFGQRALDFYSIHVTKESTHPVKPLAQIAGNRYASVPVGKALSDACMGTIASFLSKYQDIIIEHQKVVKGNQKRLESLRELAGKENLEYPSVTLPPQPHTKEGVDAYNEVIARVRMWVNLNLWQKLKLSRDDAKPLLRLKGFPSFPLVERQANEVDWWDMVCNVKKLINEKKEDGKVFWQNLAGYKRQEALRPYLSSEEDRKKGKKFARYQLGDLLLHLEKKHGEDWGKVYDEAWERIDKKVEGLSKHIKLEEERRSEDAQSKAALTDWLRAKASFVIEGLKEADKDEFCRCELKLQKWYGDLRGKPFAIEAENSILDISGFSKQYNCAFIWQKDGVKKLNLYLIINYFKGGKLRFKKIKPEAFEANRFYTVINKKSGEIVPMEVNFNFDDPNLIILPLAFGKRQGREFIWNDLLSLETGSLKLANGRVIEKTLYNRRTRQDEPALFVALTFERREVLDSSNIKPMNLIGVDRGENIPAVIALTDPEGCPLSRFKDSLGNPTHILRIGESYKEKQRTIQAKKEVEQRRAGGYSRKYASKAKNLADDMVRNTARDLLYYAVTQDAMLIFENLSRGFGRQGKRTFMAERQYTRMEDWLTAKLAYEGLPSKTYLSKTLAQYTSKTCSNCGFTITSADYDRVLEKLKKTATGWMTTINGKELKVEGQITYYNRYKRQNVVKDLSVELDRLSEESVNNDISSWDKGRSGEALSLLKKRFSHRPVQEKFVCLNCGFETHADEQAALNIARSWLFLRSQEYKKYQTNKTTGNTDKRAFVETWQSFYRKKLKEVWKPAV

SEQ ID NO: 30325 - protein, 979 aa, synthetic construct
  REGION 1..979: note = engineered CasX variant
QEIKRINKIRRRLVKDSNTKKAGKTRGPMKTLLVRVMTPDLRERLENLRKKPENIPQPISNTSRANLNKLLTDYTEMKKAILHVYWEEFQKDPVGLMSRVAQPASKKIDQNKLKPEMDEKGNLTTAGFACSQCGQPLFVYKLEQVSEKGKAYTNYFGRCNVAEHEKLIKLAQLKPEKDSDEAVTYSLGKFGQRALDFYSIHVTKESTHPVKPLAQIAGNRYASGPVGKALSDACMGTIASFLSKYQDIIIEHQKVVKGNQKRLESLRELAGKENLEYPSVTLPPQPHTKEGVDAYNEVIARVRMWVNLNLWQKLKLSRDDAKPLLRLKGFPSFPLVERQANEVDWWDMVCNVKKLINEKKEDGKVFWQNLAGYKRQEALRPYLSSEEDRKKGKKFARYQLGDLLLHLEKKHGEDWGKVYDEAWERIDKKVEGLSKHIKLEEERRSEDAQSKAALTDWLRAKASFVIEGLKEADKDEFCRCELKLQKWYGDLRGKPFAIEAENSILDISGFSKQYNCAFIWQKDGVKKLNLYLIINYFKGGKLRFKKIKPEAFEANRFYTVINKKSGEIVPMEVNFNFDDPNLIILPLAFGKRQGREFIWNDLLSLETGSLKLANGRVIEKTLYNRRTRQDEPALFVALTFERREVLDSSNIKPMNLIGVDRGENIPAVIALTDPEGCPLSRFKDSLGNPTHILRIGESYKEKQRTIQAKKEVEQRRAGGYSRKYASKAKNLADDMVRNTARDLLYYAVTQDAMLIFENLSRGFGRQGKRTFMAERQYTRMEDWLTAKLAYEGLPSKTYLSKTLAQYTSKTCSNCGFTITSADYDRVLEKLKKTATGWMTTINGKELKVEGQITYYNRYKRQNVVKDLSVELDRLSEESVNNDISSWDKGRSGEALSLLKKRFSHRPVQEKFVCLNCGFETHADEQAALNIARSWLFLRSQEYKKYQTNKTTGNTDKRAFVETWQSFYRKKLKEVWKPAV

SEQ ID NO: 30326 - protein, 978 aa, synthetic construct
  REGION 1..978: note = engineered CasX variant
QEIKRINKIRRRLVKDSNTKKAGKTRGPMKTLLVRVMTPDLRERLENLRKKPENIPQPISNTSRANLNKLLTDYTEMKKAILHVYWEEFQKDPVGLMSRVAQPASKKIDQNKLKPEMDEKGNLTTAGFACSQCGQPLFVYKLEQVSEKGKAYTNYFGRCNVAEHEKLILLAQLKPEKDSDEAVTYSLGKFGQRALDFYSIHVTKESTHPVKPLAQIAGNRYASPVGKALSDACMGTIASFLSKYQDIIIEHQKVVKGNQKRLESLRELAGKENLEYPSVTLPPQPHTKEGVDAYNEVIARVRMWVNLNLWQKLKLSRDDAKPLLRLKGFPSFPLVERQANEVDWWDMVCNVKKLINEKKEDGKVFWQNLAGYKRQEALRPYLSSEEDRKKGKKFARYQLGDLLLHLEKKHGEDWGKVYDEAWERIDKKVEGLSKHIKLEEERRSEDAQSKAALTDWLRAKASFVIEGLKEADKDEFCRCELKLQKWYGDLRGKPFAIEAENSILDISGFSKQYNCAFIWQKDGVKKLNLYLIINYFKGGKLRFKKIKPEAFEANRFYTVINKKSGEIVPMEVNFNFDDPNLIILPLAFGKRQGREFIWNDLLSLETGSLKLANGRVIEKTLYNRRTRQDEPALFVALTFERREVLDSSNIKPMNLIGVDRGENIPAVIALTDPEGCPLSRFKDSLGNPTHILRIGESYKEKQRTIQAKKEVEQRRAGGYSRKYASKAKNLADDMVRNTARDLLYYAVTQDAMLIFENLSRGFGRQGKRTFMAERQYTRMEDWLTAKLAYEGLPSKTYLSKTLAQYTSKTCSNCGFTITSADYDRVLEKLKKTATGWMTTINGKELKVEGQITYYNRYKRQNVVKDLSVELDRLSEESVNNDISSWDKGRSGEALSLLKKRFSHRPVQEKFVCLNCGFETHADEQAALNIARSWLFLRSQEYKKYQTNKTTGNTDKRAFVETWQSFYRKKLKEVWKPAV

SEQ ID NO: 30327 - protein, 979 aa, synthetic construct
  REGION 1..979: note = engineered CasX variant
QEIKRINKIRRRLVKDSNTKKAGKTRGPMKTLLVRVMTPDLRERLENLRKKPENIPQPISNTSRANLNKLLTDYTEMKKAILHVYWEEFQVDPVGLMSRVAQPASKKIDQNKLKPEMDEKGNLTTAGFACSQCGQPLFVYKLEQVSEKGKAYTNYFGRCNVAEHEKLILLAQLKPEKDSDEAVTYSLGKFGQRALDFYSIHVTKESTHPVKPLAQIAGNRYASYPVGKALSDACMGTIASFLSKYQDIIIEHQKVVKGNQKRLESLRELAGKENLEYPSVTLPPQPHTKEGVDAYNEVIARVRMWVNLNLWQKLKLSRDDAKPLLRLKGFPSFPLVERQANEVDWWDMVCNVKKLINEKKEDGKVFWQNLAGYKRQEALRPYLSSEEDRKKGKKFARYQLGDLLLHLEKKHGEDWGKVYDEAWERIDKKVEGLSKHIKLEEERRSEDAQSKAALTDWLRAKASFVIEGLKEADKDEFCRCELKLQKWYGDLRGKPFAIEAENSILDISGFSKQYNCAFIWQKDGVKKLNLYLIINYFKGGKLRFKKIKPEAFEANRFYTVINKKSGEIVPMEVNFNFDDPNLIILPLAFGKRQGREFIWNDLLSLETGSLKLANGRVIEKTLYNRRTRQDEPALFVALTFERREVLDSSNIKPMNLIGVDRGENIPAVIALTDPEGCPLSRFKDSLGNPTHILRIGESYKEKQRTIQAKKEVEQRRAGGYSRKYASKAKNLADDMVRNTARDLLYYAVTQDAMLIFENLSRGFGRQGKRTFMAERQYTRMEDWLTAKLAYEGLPSKTYLSKTLAQYTSKTCSNCGFTITSADYDRVLEKLKKTATGWMTTINGKELKVEGQITYYNRYKRQNVVKDLSVELDRLSEESVNNDISSWTKGRSGEALSLLKKRFSHRPVQEKFVCLNCGFETHADEQAALNIARSWLFLRSQEYKKYQTNKTTGNTDKRAFVETWQSFYRKKLKEVWKPAV

SEQ ID NO: 30328 - protein, 979 aa, synthetic construct
  REGION 1..979: note = engineered CasX variant
QEIKRINKIRRRLVKDSNTKKAGKTRGPMKTLLVRVMTPDLRERLENLRKKPENIPQPISNTSRANLNKLLTDYTEMKKAILHVYWEEFQVDPVGLMSRVAQPASKKIDQNKLKPEMDEKGNLTTAGFACSQCGQPLFVYKLEQVSEKGKAYTNYFGRCNVAEHEKLILLAQLKPEKDSDEAVTYSLGKFGQRALDFYSIHVTKESTHPVKPLAQIAGNRYASHPVGKALSDACMGTIASFLSKYQDIIIEHQKVVKGNQKRLESLRELAGKENLEYPSVTLPPQPHTKEGVDAYNEVIARVRMWVNLNLWQKLKLSRDDAKPLLRLKGFPSFPLVERQANEVDWWDMVCNVKKLINEKKEDGKVFWQNLAGYKRQEALRPYLSSEEDRKKGKKFARYQLGDLLLHLEKKHGEDWGKVYDEAWERIDKKVEGLSKHIKLEEERRSEDAQSKAALTDWLRAKASFVIEGLKEADKDEFCRCELKLQKWYGDLRGKPFAIEAENSILDISGFSKQYNCAFIWQKDGVKKLNLYLIINYFKGGKLRFKKIKPEAFEANRFYTVINKKSGEIVPMEVNFNFDDPNLIILPLAFGKRQGREFIWNDLLSLETGSLKLANGRVIEKTLYNRRTRQDEPALFVALTFERREVLDSSNIKPMNLIGVDRGENIPAVIALTDPEGCPLSRFKDSLGNPTHILRIGESYKEKQRTIQAKKEVEQRRAGGYSRKYASKAKNLADDMVRNTARDLLYYAVTQDAMLIFENLSRGFGRQGKRTFMAERQYTRMEDWLTAKLAYEGLPSKTYLSKTLAQYTSKTCSNCGFTITSADYDRVLEKLKKTATGWMTTINGKELKVEGQITYYNRYKRQNVVKDLSVELDRLSEESVNNDISSWTKGRSGEALSLLKKRFSHRPVQEKFVCLNCGFETHADEQAALNIARSWLFLRSQEYKKYQTNKTTGNTDKRAFVETWQSFYRKKLKEVWKPAV

SEQ ID NO: 30329 - protein, 979 aa, synthetic construct
  REGION 1..979: note = engineered CasX variant
QEIKRINKIRRRLVKDSNTKKAGKTRGPMKTLLVRVMTPDLRERLENLRKKPENIPQPISNTSRANLNKLLTDYTEMKKAILHVYWEEFQVDPVGLMSRVAQPASKKIDQNKLKPEMDEKGNLTTAGFACSQCGQPLFVYKLEQVSEKGKAYTNYFGRCNVAEHEKLILLAQLKPEKDSDEAVTYSLGKFGQRALDFYSIHVTKESTHPVKPLAQIAGNRYASSPVGKALSDACMGTIASFLSKYQDIIIEHQKVVKGNQKRLESLRELAGKENLEYPSVTLPPQPHTKEGVDAYNEVIARVRMWVNLNLWQKLKLSRDDAKPLLRLKGFPSFPLVERQANEVDWWDMVCNVKKLINEKKEDGKVFWQNLAGYKRQEALRPYLSSEEDRKKGKKFARYQLGDLLLHLEKKHGEDWGKVYDEAWERIDKKVEGLSKHIKLEEERRSEDAQSKAALTDWLRAKASFVIEGLKEADKDEFCRCELKLQKWYGDLRGKPFAIEAENSILDISGFSKQYNCAFIWQKDGVKKLNLYLIINYFKGGKLRFKKIKPEAFEANRFYTVINKKSGEIVPMEVNFNFDDPNLIILPLAFGKRQGREFIWNDLLSLETGSLKLANGRVIEKTLYNRRTRQDEPALFVALTFERREVLDSSNIKPMNLIGVDRGENIPAVIALTDPEGCPLSRFKDSLGNPTHILRIGESYKEKQRTIQAKKEVEQRRAGGYSRKYASKAKNLADDMVRNTARDLLYYAVTQDAMLIFENLSRGFGRQGKRTFMAERQYTRMEDWLTAKLAYEGLPSKTYLSKTLAQYTSKTCSNCGFTITSADYDRVLEKLKKTATGWMTTINGKELKVEGQITYYNRYKRQNVVKDLSVELDRLSEESVNNDISSWTKGRSGEALSLLKKRFSHRPVQEKFVCLNCGFETHADEQAALNIARSWLFLRSQEYKKYQTNKTTGNTDKRAFVETWQSFYRKKLKEVWKPAV

SEQ ID NO: 30330 - protein, 979 aa, synthetic construct
  REGION 1..979: note = engineered CasX variant
QEIKRINKIRRRLVKDSNTKKAGKTRGPMKTLLVRVMTPDLRERLENLRKKPENIPQPISNTSRANLNKLLTDYTEMKKAILHVYWEEFQVDPVGLMSRVAQPASKKIDQNKLKPEMDEKGNLTTAGFACSQCGQPLFVYKLEQVSEKGKAYTNYFGRCNVAEHEKLILLAQLKPEKDSDEAVTYSLGKFGQRALDFYSIHVTKESTHPVKPLAQIAGNRYASTPVGKALSDACMGTIASFLSKYQDIIIEHQKVVKGNQKRLESLRELAGKENLEYPSVTLPPQPHTKEGVDAYNEVIARVRMWVNLNLWQKLKLSRDDAKPLLRLKGFPSFPLVERQANEVDWWDMVCNVKKLINEKKEDGKVFWQNLAGYKRQEALRPYLSSEEDRKKGKKFARYQLGDLLLHLEKKHGEDWGKVYDEAWERIDKKVEGLSKHIKLEEERRSEDAQSKAALTDWLRAKASFVIEGLKEADKDEFCRCELKLQKWYGDLRGKPFAIEAENSILDISGFSKQYNCAFIWQKDGVKKLNLYLIINYFKGGKLRFKKIKPEAFEANRFYTVINKKSGEIVPMEVNFNFDDPNLIILPLAFGKRQGREFIWNDLLSLETGSLKLANGRVIEKTLYNRRTRQDEPALFVALTFERREVLDSSNIKPMNLIGVDRGENIPAVIALTDPEGCPLSRFKDSLGNPTHILRIGESYKEKQRTIQAKKEVEQRRAGGYSRKYASKAKNLADDMVRNTARDLLYYAVTQDAMLIFENLSRGFGRQGKRTFMAERQYTRMEDWLTAKLAYEGLPSKTYLSKTLAQYTSKTCSNCGFTITSADYDRVLEKLKKTATGWMTTINGKELKVEGQITYYNRYKRQNVVKDLSVELDRLSEESVNNDISSWTKGRSGEALSLLKKRFSHRPVQEKFVCLNCGFETHADEQAALNIARSWLFLRSQEYKKYQTNKTTGNTDKRAFVETWQSFYRKKLKEVWKPAV

SEQ ID NO: 30331 - protein, 979 aa, synthetic construct
  REGION 1..979: note = engineered CasX variant
QEIKRINKIRRRLVKDSNTKKAGKTRGPMKTLLVRVMTPDLRERLENLRKKPENIPQPISNTSRANLNKLLTDYTEMKKAILHVYWEEFQVDPVGLMSRVAQPASKKIDQNKLKPEMDEKGNLTTAGFACSQCGQPLFVYKLEQVSEKGKAYTNYFGRCNVAEHEKLILLAQLKPEKDSDEAVTYSLGKFGQRALDFYSIHVTKESTHPVKPLAQIAGNRYASAPVGKALSDACMGTIASFLSKYQDIIIEHQKVVKGNQKRLESLRELAGKENLEYPSVTLPPQPHTKEGVDAYNEVIARVRMWVNLNLWQKLKLSRDDAKPLLRLKGFPSFPLVERQANEVDWWDMVCNVKKLINEKKEDGKVFWQNLAGYKRQEALRPYLSSEEDRKKGKKFARYQLGDLLLHLEKKHGEDWGKVYDEAWERIDKKVEGLSKHIKLEEERRSEDAQSKAALTDWLRAKASFVIEGLKEADKDEFCRCELKLQKWYGDLRGKPFAIEAENSILDISGFSKQYNCAFIWQKDGVKKLNLYLIINYFKGGKLRFKKIKPEAFEANRFYTVINKKSGEIVPMEVNFNFDDPNLIILPLAFGKRQGREFIWNDLLSLETGSLKLANGRVIEKTLYNRRTRQDEPALFVALTFERREVLDSSNIKPMNLIGVDRGENIPAVIALTDPEGCPLSRFKDSLGNPTHILRIGESYKEKQRTIQAKKEVEQRRAGGYSRKYASKAKNLADDMVRNTARDLLYYAVTQDAMLIFENLSRGFGRQGKRTFMAERQYTRMEDWLTAKLAYEGLPSKTYLSKTLAQYTSKTCSNCGFTITSADYDRVLEKLKKTATGWMTTINGKELKVEGQITYYNRYKRQNVVKDLSVELDRLSEESVNNDISSWTKGRSGEALSLLKKRFSHRPVQEKFVCLNCGFETHADEQAALNIARSWLFLRSQEYKKYQTNKTTGNTDKRAFVETWQSFYRKKLKEVWKPAV

SEQ ID NO: 30332 - protein, 979 aa, synthetic construct
  REGION 1..979: note = engineered CasX variant
QEIKRINKIRRRLVKDSNTKKAGKTRGPMKTLLVRVMTPDLRERLENLRKKPENIPQPISNTSRANLNKLLTDYTEMKKAILHVYWEEFQVDPVGLMSRVAQPASKKIDQNKLKPEMDEKGNLTTAGFACSQCGQPLFVYKLEQVSEKGKAYTNYFGRCNVAEHEKLILLAQLKPEKDSDEAVTYSLGKFGQRALDFYSIHVTKESTHPVKPLAQIAGNRYASVPVGKALSDACMGTIASFLSKYQDIIIEHQKVVKGNQKRLESLRELAGKENLEYPSVTLPPQPHTKEGVDAYNEVIARVRMWVNLNLWQKLKLSRDDAKPLLRLKGFPSFPLVERQANEVDWWDMVCNVKKLINEKKEDGKVFWQNLAGYKRQEALRPYLSSEEDRKKGKKFARYQLGDLLLHLEKKHGEDWGKVYDEAWERIDKKVEGLSKHIKLEEERRSEDAQSKAALTDWLRAKASFVIEGLKEADKDEFCRCELKLQKWYGDLRGKPFAIEAENSILDISGFSKQYNCAFIWQKDGVKKLNLYLIINYFKGGKLRFKKIKPEAFEANRFYTVINKKSGEIVPMEVNFNFDDPNLIILPLAFGKRQGREFIWNDLLSLETGSLKLANGRVIEKTLYNRRTRQDEPALFVALTFERREVLDSSNIKPMNLIGVDRGENIPAVIALTDPEGCPLSRFKDSLGNPTHILRIGESYKEKQRTIQAKKEVEQRRAGGYSRKYASKAKNLADDMVRNTARDLLYYAVTQDAMLIFENLSRGFGRQGKRTFMAERQYTRMEDWLTAKLAYEGLPSKTYLSKTLAQYTSKTCSNCGFTITSADYDRVLEKLKKTATGWMTTINGKELKVEGQITYYNRYKRQNVVKDLSVELDRLSEESVNNDISSWTKGRSGEALSLLKKRFSHRPVQEKFVCLNCGFETHADEQAALNIARSWLFLRSQEYKKYQTNKTTGNTDKRAFVETWQSFYRKKLKEVWKPAV

SEQ ID NO: 30333 - protein, 979 aa, synthetic construct
  REGION 1..979: note = engineered CasX variant
QEIKRINKIRRRLVKDSNTKKAGKTRGPMKTLLVRVMTPDLRERLENLRKKPENIPQPISNTSRANLNKLLTDYTEMKKAILHVYWEEFQVDPVGLMSRVAQPASKKIDQNKLKPEMDEKGNLTTAGFACSQCGQPLFVYKLEQVSEKGKAYTNYFGRCNVAEHEKLIKLAQLKPEKDSDEAVTYSLGKFGQRALDFYSIHVTKESTHPVKPLAQIAGNRYASGPVGKALSDACMGTIASFLSKYQDIIIEHQKVVKGNQKRLESLRELAGKENLEYPSVTLPPQPHTKEGVDAYNEVIARVRMWVNLNLWQKLKLSRDDAKPLLRLKGFPSFPLVERQANEVDWWDMVCNVKKLINEKKEDGKVFWQNLAGYKRQEALRPYLSSEEDRKKGKKFARYQLGDLLLHLEKKHGEDWGKVYDEAWERIDKKVEGLSKHIKLEEERRSEDAQSKAALTDWLRAKASFVIEGLKEADKDEFCRCELKLQKWYGDLRGKPFAIEAENSILDISGFSKQYNCAFIWQKDGVKKLNLYLIINYFKGGKLRFKKIKPEAFEANRFYTVINKKSGEIVPMEVNFNFDDPNLIILPLAFGKRQGREFIWNDLLSLETGSLKLANGRVIEKTLYNRRTRQDEPALFVALTFERREVLDSSNIKPMNLIGVDRGENIPAVIALTDPEGCPLSRFKDSLGNPTHILRIGESYKEKQRTIQAKKEVEQRRAGGYSRKYASKAKNLADDMVRNTARDLLYYAVTQDAMLIFENLSRGFGRQGKRTFMAERQYTRMEDWLTAKLAYEGLPSKTYLSKTLAQYTSKTCSNCGFTITSADYDRVLEKLKKTATGWMTTINGKELKVEGQITYYNRYKRQNVVKDLSVELDRLSEESVNNDISSWTKGRSGEALSLLKKRFSHRPVQEKFVCLNCGFETHADEQAALNIARSWLFLRSQEYKKYQTNKTTGNTDKRAFVETWQSFYRKKLKEVWKPAV

SEQ ID NO: 30334 - protein, 978 aa, synthetic construct
  REGION 1..978: note = engineered CasX variant
QEIKRINKIRRRLVKDSNTKKAGKTRGPMKTLLVRVMTPDLRERLENLRKKPENIPQPISNTSRANLNKLLTDYTEMKKAILHVYWEEFQVDPVGLMSRVAQPASKKIDQNKLKPEMDEKGNLTTAGFACSQCGQPLFVYKLEQVSEKGKAYTNYFGRCNVAEHEKLILLAQLKPEKDSDEAVTYSLGKFGQRALDFYSIHVTKESTHPVKPLAQIAGNRYASPVGKALSDACMGTIASFLSKYQDIIIEHQKVVKGNQKRLESLRELAGKENLEYPSVTLPPQPHTKEGVDAYNEVIARVRMWVNLNLWQKLKLSRDDAKPLLRLKGFPSFPLVERQANEVDWWDMVCNVKKLINEKKEDGKVFWQNLAGYKRQEALRPYLSSEEDRKKGKKFARYQLGDLLLHLEKKHGEDWGKVYDEAWERIDKKVEGLSKHIKLEEERRSEDAQSKAALTDWLRAKASFVIEGLKEADKDEFCRCELKLQKWYGDLRGKPFAIEAENSILDISGFSKQYNCAFIWQKDGVKKLNLYLIINYFKGGKLRFKKIKPEAFEANRFYTVINKKSGEIVPMEVNFNFDDPNLIILPLAFGKRQGREFIWNDLLSLETGSLKLANGRVIEKTLYNRRTRQDEPALFVALTFERREVLDSSNIKPMNLIGVDRGENIPAVIALTDPEGCPLSRFKDSLGNPTHILRIGESYKEKQRTIQAKKEVEQRRAGGYSRKYASKAKNLADDMVRNTARDLLYYAVTQDAMLIFENLSRGFGRQGKRTFMAERQYTRMEDWLTAKLAYEGLPSKTYLSKTLAQYTSKTCSNCGFTITSADYDRVLEKLKKTATGWMTTINGKELKVEGQITYYNRYKRQNVVKDLSVELDRLSEESVNNDISSWTKGRSGEALSLLKKRFSHRPVQEKFVCLNCGFETHADEQAALNIARSWLFLRSQEYKKYQTNKTTGNTDKRAFVETWQSFYRKKLKEVWKPAV

SEQ ID NO: 30335 - protein, 979 aa, synthetic construct
  REGION 1..979: note = engineered CasX variant
QEIKRLNKIRRRLVKDSNTKKAGKTRGPMKTLLVRVMTPDLRERLENLRKKPENIPQPISNTSRANLNKLLTDYTEMKKAILHVYWEEFQKDPVGLMSRVAQPASKKIDQNKLKPEMDEKGNLTTAGFACSQCGQPLFVYKLEQVSEKGKAYTNYFGRCNVAEHEKLILLAQLKPEKDSDEAVTYSLGKFGQRALDFYSIHVTKESTHPVKPLAQIAGNRYASYPVGKALSDACMGTIASFLSKYQDIIIEHQKVVKGNQKRLESLRELAGKENLEYPSVTLPPQPHTKEGVDAYNEVIARVRMWVNLNLWQKLKLSRDDAKPLLRLKGFPSFPLVERQANEVDWWDMVCNVKKLINEKKEDGKVFWQNLAGYKRQEALRPYLSSEEDRKKGKKFARYQLGDLLLHLEKKHGEDWGKVYDEAWERIDKKVEGLSKHIKLEEERRSEDAQSKAALTDWLRAKASFVIEGLKEADKDEFCRCELKLQKWYGDLRGKPFAIEAENSILDISGFSKQYNCAFIWQKDGVKKLNLYLIINYFKGGKLRFKKIKPEAFEANRFYTVINKKSGEIVPMEVNFNFDDPNLIILPLAFGKRQGREFIWNDLLSLETGSLKLANGRVIEKTLYNRRTRQDEPALFVALTFERREVLDSSNIKPMNLIGVDRGENIPAVIALTDPEGCPLSRFKDSLGNPTHILRIGESYKEKQRTIQAKKEVEQRRAGGYSRKYASKAKNLADDMVRNTARDLLYYAVTQDAMLIFENLSRGFGRQGKRTFMAERQYTRMEDWLTAKLAYEGLPSKTYLSKTLAQYTSKTCSNCGFTITSADYDRVLEKLKKTATGWMTTINGKELKVEGQITYYNRYKRQNVVKDLSVELDRLSEESVNNDISSWTKGRSGEALSLLKKRFSHRPVQEKFVCLNCGFETHADEQAALNIARSWLFLRSQEYKKYQTNKTTGNTDKRAFVETWQSFYRKKLKEVWKPAV

SEQ ID NO: 30336 - protein, 979 aa, synthetic construct
  REGION 1..979: note = engineered CasX variant
QEIKRLNKIRRRLVKDSNTKKAGKTRGPMKTLLVRVMTPDLRERLENLRKKPENIPQPISNTSRANLNKLLTDYTEMKKAILHVYWEEFQKDPVGLMSRVAQPASKKIDQNKLKPEMDEKGNLTTAGFACSQCGQPLFVYKLEQVSEKGKAYTNYFGRCNVAEHEKLILLAQLKPEKDSDEAVTYSLGKFGQRALDFYSIHVTKESTHPVKPLAQIAGNRYASHPVGKALSDACMGTIASFLSKYQDIIIEHQKVVKGNQKRLESLRELAGKENLEYPSVTLPPQPHTKEGVDAYNEVIARVRMWVNLNLWQKLKLSRDDAKPLLRLKGFPSFPLVERQANEVDWWDMVCNVKKLINEKKEDGKVFWQNLAGYKRQEALRPYLSSEEDRKKGKKFARYQLGDLLLHLEKKHGEDWGKVYDEAWERIDKKVEGLSKHIKLEEERRSEDAQSKAALTDWLRAKASFVIEGLKEADKDEFCRCELKLQKWYGDLRGKPFAIEAENSILDISGFSKQYNCAFIWQKDGVKKLNLYLIINYFKGGKLRFKKIKPEAFEANRFYTVINKKSGEIVPMEVNFNFDDPNLIILPLAFGKRQGREFIWNDLLSLETGSLKLANGRVIEKTLYNRRTRQDEPALFVALTFERREVLDSSNIKPMNLIGVDRGENIPAVIALTDPEGCPLSRFKDSLGNPTHILRIGESYKEKQRTIQAKKEVEQRRAGGYSRKYASKAKNLADDMVRNTARDLLYYAVTQDAMLIFENLSRGFGRQGKRTFMAERQYTRMEDWLTAKLAYEGLPSKTYLSKTLAQYTSKTCSNCGFTITSADYDRVLEKLKKTATGWMTTINGKELKVEGQITYYNRYKRQNVVKDLSVELDRLSEESVNNDISSWTKGRSGEALSLLKKRFSHRPVQEKFVCLNCGFETHADEQAALNIARSWLFLRSQEYKKYQTNKTTGNTDKRAFVETWQSFYRKKLKEVWKPAV

SEQ ID NO: 30337 - protein, 979 aa, synthetic construct
  REGION 1..979: note = engineered CasX variant
QEIKRLNKIRRRLVKDSNTKKAGKTRGPMKTLLVRVMTPDLRERLENLRKKPENIPQPISNTSRANLNKLLTDYTEMKKAILHVYWEEFQKDPVGLMSRVAQPASKKIDQNKLKPEMDEKGNLTTAGFACSQCGQPLFVYKLEQVSEKGKAYTNYFGRCNVAEHEKLILLAQLKPEKDSDEAVTYSLGKFGQRALDFYSIHVTKESTHPVKPLAQIAGNRYASSPVGKALSDACMGTIASFLSKYQDIIIEHQKVVKGNQKRLESLRELAGKENLEYPSVTLPPQPHTKEGVDAYNEVIARVRMWVNLNLWQKLKLSRDDAKPLLRLKGFPSFPLVERQANEVDWWDMVCNVKKLINEKKEDGKVFWQNLAGYKRQEALRPYLSSEEDRKKGKKFARYQLGDLLLHLEKKHGEDWGKVYDEAWERIDKKVEGLSKHIKLEEERRSEDAQSKAALTDWLRAKASFVIEGLKEADKDEFCRCELKLQKWYGDLRGKPFAIEAENSILDISGFSKQYNCAFIWQKDGVKKLNLYLIINYFKGGKLRFKKIKPEAFEANRFYTVINKKSGEIVPMEVNFNFDDPNLIILPLAFGKRQGREFIWNDLLSLETGSLKLANGRVIEKTLYNRRTRQDEPALFVALTFERREVLDSSNIKPMNLIGVDRGENIPAVIALTDPEGCPLSRFKDSLGNPTHILRIGESYKEKQRTIQAKKEVEQRRAGGYSRKYASKAKNLADDMVRNTARDLLYYAVTQDAMLIFENLSRGFGRQGKRTFMAERQYTRMEDWLTAKLAYEGLPSKTYLSKTLAQYTSKTCSNCGFTITSADYDRVLEKLKKTATGWMTTINGKELKVEGQITYYNRYKRQNVVKDLSVELDRLSEESVNNDISSWTKGRSGEALSLLKKRFSHRPVQEKFVCLNCGFETHADEQAALNIARSWLFLRSQEYKKYQTNKTTGNTDKRAFVETWQSFYRKKLKEVWKPAV

SEQ ID NO: 30338 - protein, 979 aa, synthetic construct
  REGION 1..979: note = engineered CasX variant
QEIKRLNKIRRRLVKDSNTKKAGKTRGPMKTLLVRVMTPDLRERLENLRKKPENIPQPISNTSRANLNKLLTDYTEMKKAILHVYWEEFQKDPVGLMSRVAQPASKKIDQNKLKPEMDEKGNLTTAGFACSQCGQPLFVYKLEQVSEKGKAYTNYFGRCNVAEHEKLILLAQLKPEKDSDEAVTYSLGKFGQRALDFYSIHVTKESTHPVKPLAQIAGNRYASTPVGKALSDACMGTIASFLSKYQDIIIEHQKVVKGNQKRLESLRELAGKENLEYPSVTLPPQPHTKEGVDAYNEVIARVRMWVNLNLWQKLKLSRDDAKPLLRLKGFPSFPLVERQANEVDWWDMVCNVKKLINEKKEDGKVFWQNLAGYKRQEALRPYLSSEEDRKKGKKFARYQLGDLLLHLEKKHGEDWGKVYDEAWERIDKKVEGLSKHIKLEEERRSEDAQSKAALTDWLRAKASFVIEGLKEADKDEFCRCELKLQKWYGDLRGKPFAIEAENSILDISGFSKQYNCAFIWQKDGVKKLNLYLIINYFKGGKLRFKKIKPEAFEANRFYTVINKKSGEIVPMEVNFNFDDPNLIILPLAFGKRQGREFIWNDLLSLETGSLKLANGRVIEKTLYNRRTRQDEPALFVALTFERREVLDSSNIKPMNLIGVDRGENIPAVIALTDPEGCPLSRFKDSLGNPTHILRIGESYKEKQRTIQAKKEVEQRRAGGYSRKYASKAKNLADDMVRNTARDLLYYAVTQDAMLIFENLSRGFGRQGKRTFMAERQYTRMEDWLTAKLAYEGLPSKTYLSKTLAQYTSKTCSNCGFTITSADYDRVLEKLKKTATGWMTTINGKELKVEGQITYYNRYKRQNVVKDLSVELDRLSEESVNNDISSWTKGRSGEALSLLKKRFSHRPVQEKFVCLNCGFETHADEQAALNIARSWLFLRSQEYKKYQTNKTTGNTDKRAFVETWQSFYRKKLKEVWKPAV

SEQ ID NO: 30339 - protein, 979 aa, synthetic construct
  REGION 1..979: note = engineered CasX variant
QEIKRLNKIRRRLVKDSNTKKAGKTRGPMKTLLVRVMTPDLRERLENLRKKPENIPQPISNTSRANLNKLLTDYTEMKKAILHVYWEEFQKDPVGLMSRVAQPASKKIDQNKLKPEMDEKGNLTTAGFACSQCGQPLFVYKLEQVSEKGKAYTNYFGRCNVAEHEKLILLAQLKPEKDSDEAVTYSLGKFGQRALDFYSIHVTKESTHPVKPLAQIAGNRYASAPVGKALSDACMGTIASFLSKYQDIIIEHQKVVKGNQKRLESLRELAGKENLEYPSVTLPPQPHTKEGVDAYNEVIARVRMWVNLNLWQKLKLSRDDAKPLLRLKGFPSFPLVERQANEVDWWDMVCNVKKLINEKKEDGKVFWQNLAGYKRQEALRPYLSSEEDRKKGKKFARYQLGDLLLHLEKKHGEDWGKVYDEAWERIDKKVEGLSKHIKLEEERRSEDAQSKAALTDWLRAKASFVIEGLKEADKDEFCRCELKLQKWYGDLRGKPFAIEAENSILDISGFSKQYNCAFIWQKDGVKKLNLYLIINYFKGGKLRFKKIKPEAFEANRFYTVINKKSGEIVPMEVNFNFDDPNLIILPLAFGKRQGREFIWNDLLSLETGSLKLANGRVIEKTLYNRRTRQDEPALFVALTFERREVLDSSNIKPMNLIGVDRGENIPAVIALTDPEGCPLSRFKDSLGNPTHILRIGESYKEKQRTIQAKKEVEQRRAGGYSRKYASKAKNLADDMVRNTARDLLYYAVTQDAMLIFENLSRGFGRQGKRTFMAERQYTRMEDWLTAKLAYEGLPSKTYLSKTLAQYTSKTCSNCGFTITSADYDRVLEKLKKTATGWMTTINGKELKVEGQITYYNRYKRQNVVKDLSVELDRLSEESVNNDISSWTKGRSGEALSLLKKRFSHRPVQEKFVCLNCGFETHADEQAALNIARSWLFLRSQEYKKYQTNKTTGNTDKRAFVETWQSFYRKKLKEVWKPAV

SEQ ID NO: 30340 - protein, 979 aa, synthetic construct
  REGION 1..979: note = engineered CasX variant
QEIKRLNKIRRRLVKDSNTKKAGKTRGPMKTLLVRVMTPDLRERLENLRKKPENIPQPISNTSRANLNKLLTDYTEMKKAILHVYWEEFQKDPVGLMSRVAQPASKKIDQNKLKPEMDEKGNLTTAGFACSQCGQPLFVYKLEQVSEKGKAYTNYFGRCNVAEHEKLILLAQLKPEKDSDEAVTYSLGKFGQRALDFYSIHVTKESTHPVKPLAQIAGNRYASVPVGKALSDACMGTIASFLSKYQDIIIEHQKVVKGNQKRLESLRELAGKENLEYPSVTLPPQPHTKEGVDAYNEVIARVRMWVNLNLWQKLKLSRDDAKPLLRLKGFPSFPLVERQANEVDWWDMVCNVKKLINEKKEDGKVFWQNLAGYKRQEALRPYLSSEEDRKKGKKFARYQLGDLLLHLEKKHGEDWGKVYDEAWERIDKKVEGLSKHIKLEEERRSEDAQSKAALTDWLRAKASFVIEGLKEADKDEFCRCELKLQKWYGDLRGKPFAIEAENSILDISGFSKQYNCAFIWQKDGVKKLNLYLIINYFKGGKLRFKKIKPEAFEANRFYTVINKKSGEIVPMEVNFNFDDPNLIILPLAFGKRQGREFIWNDLLSLETGSLKLANGRVIEKTLYNRRTRQDEPALFVALTFERREVLDSSNIKPMNLIGVDRGENIPAVIALTDPEGCPLSRFKDSLGNPTHILRIGESYKEKQRTIQAKKEVEQRRAGGYSRKYASKAKNLADDMVRNTARDLLYYAVTQDAMLIFENLSRGFGRQGKRTFMAERQYTRMEDWLTAKLAYEGLPSKTYLSKTLAQYTSKTCSNCGFTITSADYDRVLEKLKKTATGWMTTINGKELKVEGQITYYNRYKRQNVVKDLSVELDRLSEESVNNDISSWTKGRSGEALSLLKKRFSHRPVQEKFVCLNCGFETHADEQAALNIARSWLFLRSQEYKKYQTNKTTGNTDKRAFVETWQSFYRKKLKEVWKPAV

SEQ ID NO: 30341 - protein, 979 aa, synthetic construct
  REGION 1..979: note = engineered CasX variant
QEIKRLNKIRRRLVKDSNTKKAGKTRGPMKTLLVRVMTPDLRERLENLRKKPENIPQPISNTSRANLNKLLTDYTEMKKAILHVYWEEFQKDPVGLMSRVAQPASKKIDQNKLKPEMDEKGNLTTAGFACSQCGQPLFVYKLEQVSEKGKAYTNYFGRCNVAEHEKLIKLAQLKPEKDSDEAVTYSLGKFGQRALDFYSIHVTKESTHPVKPLAQIAGNRYASGPVGKALSDACMGTIASFLSKYQDIIIEHQKVVKGNQKRLESLRELAGKENLEYPSVTLPPQPHTKEGVDAYNEVIARVRMWVNLNLWQKLKLSRDDAKPLLRLKGFPSFPLVERQANEVDWWDMVCNVKKLINEKKEDGKVFWQNLAGYKRQEALRPYLSSEEDRKKGKKFARYQLGDLLLHLEKKHGEDWGKVYDEAWERIDKKVEGLSKHIKLEEERRSEDAQSKAALTDWLRAKASFVIEGLKEADKDEFCRCELKLQKWYGDLRGKPFAIEAENSILDISGFSKQYNCAFIWQKDGVKKLNLYLIINYFKGGKLRFKKIKPEAFEANRFYTVINKKSGEIVPMEVNFNFDDPNLIILPLAFGKRQGREFIWNDLLSLETGSLKLANGRVIEKTLYNRRTRQDEPALFVALTFERREVLDSSNIKPMNLIGVDRGENIPAVIALTDPEGCPLSRFKDSLGNPTHILRIGESYKEKQRTIQAKKEVEQRRAGGYSRKYASKAKNLADDMVRNTARDLLYYAVTQDAMLIFENLSRGFGRQGKRTFMAERQYTRMEDWLTAKLAYEGLPSKTYLSKTLAQYTSKTCSNCGFTITSADYDRVLEKLKKTATGWMTTINGKELKVEGQITYYNRYKRQNVVKDLSVELDRLSEESVNNDISSWTKGRSGEALSLLKKRFSHRPVQEKFVCLNCGFETHADEQAALNIARSWLFLRSQEYKKYQTNKTTGNTDKRAFVETWQSFYRKKLKEVWKPAV

SEQ ID NO: 30342 - protein, 978 aa, synthetic construct
  REGION 1..978: note = engineered CasX variant
QEIKRLNKIRRRLVKDSNTKKAGKTRGPMKTLLVRVMTPDLRERLENLRKKPENIPQPISNTSRANLNKLLTDYTEMKKAILHVYWEEFQKDPVGLMSRVAQPASKKIDQNKLKPEMDEKGNLTTAGFACSQCGQPLFVYKLEQVSEKGKAYTNYFGRCNVAEHEKLILLAQLKPEKDSDEAVTYSLGKFGQRALDFYSIHVTKESTHPVKPLAQIAGNRYASPVGKALSDACMGTIASFLSKYQDIIIEHQKVVKGNQKRLESLRELAGKENLEYPSVTLPPQPHTKEGVDAYNEVIARVRMWVNLNLWQKLKLSRDDAKPLLRLKGFPSFPLVERQANEVDWWDMVCNVKKLINEKKEDGKVFWQNLAGYKRQEALRPYLSSEEDRKKGKKFARYQLGDLLLHLEKKHGEDWGKVYDEAWERIDKKVEGLSKHIKLEEERRSEDAQSKAALTDWLRAKASFVIEGLKEADKDEFCRCELKLQKWYGDLRGKPFAIEAENSILDISGFSKQYNCAFIWQKDGVKKLNLYLIINYFKGGKLRFKKIKPEAFEANRFYTVINKKSGEIVPMEVNFNFDDPNLIILPLAFGKRQGREFIWNDLLSLETGSLKLANGRVIEKTLYNRRTRQDEPALFVALTFERREVLDSSNIKPMNLIGVDRGENIPAVIALTDPEGCPLSRFKDSLGNPTHILRIGESYKEKQRTIQAKKEVEQRRAGGYSRKYASKAKNLADDMVRNTARDLLYYAVTQDAMLIFENLSRGFGRQGKRTFMAERQYTRMEDWLTAKLAYEGLPSKTYLSKTLAQYTSKTCSNCGFTITSADYDRVLEKLKKTATGWMTTINGKELKVEGQITYYNRYKRQNVVKDLSVELDRLSEESVNNDISSWTKGRSGEALSLLKKRFSHRPVQEKFVCLNCGFETHADEQAALNIARSWLFLRSQEYKKYQTNKTTGNTDKRAFVETWQSFYRKKLKEVWKPAV

SEQ ID NO: 30343 - protein, 979 aa, synthetic construct
  REGION 1..979: note = engineered CasX variant
QEIKRINKIRRRLVKDSNTKKAGKTRGPMKTLLVRVMTPDLRERLENLRKKPENIPQPISNTSRANLNKLLTDYTEMKKAILHVYWEEFQKDPVGLMSRVAQPASKKIDQNKLKPEMDEKGNLTTAGFACSQCGQPLFVYKLEQVSEKGKAYTNYVGRCNVAEHEKLILLAQLKPEKDSDEAVTYSLGKFGQRALDFYSIHVTKESTHPVKPLAQIAGNRYASYPVGKALSDACMGTIASFLSKYQDIIIEHQKVVKGNQKRLESLRELAGKENLEYPSVTLPPQPHTKEGVDAYNEVIARVRMWVNLNLWQKLKLSRDDAKPLLRLKGFPSFPLVERQANEVDWWDMVCNVKKLINEKKEDGKVFWQNLAGYKRQEALRPYLSSEEDRKKGKKFARYQLGDLLLHLEKKHGEDWGKVYDEAWERIDKKVEGLSKHIKLEEERRSEDAQSKAALTDWLRAKASFVIEGLKEADKDEFCRCELKLQKWYGDLRGKPFAIEAENSILDISGFSKQYNCAFIWQKDGVKKLNLYLIINYFKGGKLRFKKIKPEAFEANRFYTVINKKSGEIVPMEVNFNFDDPNLIILPLAFGKRQGREFIWNDLLSLETGSLKLANGRVIEKTLYNRRTRQDEPALFVALTFERREVLDSSNIKPMNLIGVDRGENIPAVIALTDPEGCPLSRFKDSLGNPTHILRIGESYKEKQRTIQAKKEVEQRRAGGYSRKYASKAKNLADDMVRNTARDLLYYAVTQDAMLIFENLSRGFGRQGKRTFMAERQYTRMEDWLTAKLAYEGLPSKTYLSKTLAQYTSKTCSNCGFTITSADYDRVLEKLKKTATGWMTTINGKELKVEGQITYYNRYKRQNVVKDLSVELDRLSEESVNNDISSWTKGRSGEALSLLKKRFSHRPVQEKFVCLNCGFETHADEQAALNIARSWLFLRSQEYKKYQTNKTTGNTDKRAFVETWQSFYRKKLKEVWKPAV

SEQ ID NO: 30344 - protein, 979 aa, synthetic construct
  REGION 1..979: note = engineered CasX variant
QEIKRINKIRRRLVKDSNTKKAGKTRGPMKTLLVRVMTPDLRERLENLRKKPENIPQPISNTSRANLNKLLTDYTEMKKAILHVYWEEFQKDPVGLMSRVAQPASKKIDQNKLKPEMDEKGNLTTAGFACSQCGQPLFVYKLEQVSEKGKAYTNYVGRCNVAEHEKLILLAQLKPEKDSDEAVTYSLGKFGQRALDFYSIHVTKESTHPVKPLAQIAGNRYASHPVGKALSDACMGTIASFLSKYQDIIIEHQKVVKGNQKRLESLRELAGKENLEYPSVTLPPQPHTKEGVDAYNEVIARVRMWVNLNLWQKLKLSRDDAKPLLRLKGFPSFPLVERQANEVDWWDMVCNVKKLINEKKEDGKVFWQNLAGYKRQEALRPYLSSEEDRKKGKKFARYQLGDLLLHLEKKHGEDWGKVYDEAWERIDKKVEGLSKHIKLEEERRSEDAQSKAALTDWLRAKASFVIEGLKEADKDEFCRCELKLQKWYGDLRGKPFAIEAENSILDISGFSKQYNCAFIWQKDGVKKLNLYLIINYFKGGKLRFKKIKPEAFEANRFYTVINKKSGEIVPMEVNFNFDDPNLIILPLAFGKRQGREFIWNDLLSLETGSLKLANGRVIEKTLYNRRTRQDEPALFVALTFERREVLDSSNIKPMNLIGVDRGENIPAVIALTDPEGCPLSRFKDSLGNPTHILRIGESYKEKQRTIQAKKEVEQRRAGGYSRKYASKAKNLADDMVRNTARDLLYYAVTQDAMLIFENLSRGFGRQGKRTFMAERQYTRMEDWLTAKLAYEGLPSKTYLSKTLAQYTSKTCSNCGFTITSADYDRVLEKLKKTATGWMTTINGKELKVEGQITYYNRYKRQNVVKDLSVELDRLSEESVNNDISSWTKGRSGEALSLLKKRFSHRPVQEKFVCLNCGFETHADEQAALNIARSWLFLRSQEYKKYQTNKTTGNTDKRAFVETWQSFYRKKLKEVWKPAV

SEQ ID NO: 30345 - protein, 979 aa, synthetic construct
  REGION 1..979: note = engineered CasX variant
QEIKRINKIRRRLVKDSNTKKAGKTRGPMKTLLVRVMTPDLRERLENLRKKPENIPQPISNTSRANLNKLLTDYTEMKKAILHVYWEEFQKDPVGLMSRVAQPASKKIDQNKLKPEMDEKGNLTTAGFACSQCGQPLFVYKLEQVSEKGKAYTNYVGRCNVAEHEKLILLAQLKPEKDSDEAVTYSLGKFGQRALDFYSIHVTKESTHPVKPLAQIAGNRYASSPVGKALSDACMGTIASFLSKYQDIIIEHQKVVKGNQKRLESLRELAGKENLEYPSVTLPPQPHTKEGVDAYNEVIARVRMWVNLNLWQKLKLSRDDAKPLLRLKGFPSFPLVERQANEVDWWDMVCNVKKLINEKKEDGKVFWQNLAGYKRQEALRPYLSSEEDRKKGKKFARYQLGDLLLHLEKKHGEDWGKVYDEAWERIDKKVEGLSKHIKLEEERRSEDAQSKAALTDWLRAKASFVIEGLKEADKDEFCRCELKLQKWYGDLRGKPFAIEAENSILDISGFSKQYNCAFIWQKDGVKKLNLYLIINYFKGGKLRFKKIKPEAFEANRFYTVINKKSGEIVPMEVNFNFDDPNLIILPLAFGKRQGREFIWNDLLSLETGSLKLANGRVIEKTLYNRRTRQDEPALFVALTFERREVLDSSNIKPMNLIGVDRGENIPAVIALTDPEGCPLSRFKDSLGNPTHILRIGESYKEKQRTIQAKKEVEQRRAGGYSRKYASKAKNLADDMVRNTARDLLYYAVTQDAMLIFENLSRGFGRQGKRTFMAERQYTRMEDWLTAKLAYEGLPSKTYLSKTLAQYTSKTCSNCGFTITSADYDRVLEKLKKTATGWMTTINGKELKVEGQITYYNRYKRQNVVKDLSVELDRLSEESVNNDISSWTKGRSGEALSLLKKRFSHRPVQEKFVCLNCGFETHADEQAALNIARSWLFLRSQEYKKYQTNKTTGNTDKRAFVETWQSFYRKKLKEVWKPAV

SEQ ID NO: 30346 - protein, 979 aa, synthetic construct
  REGION 1..979: note = engineered CasX variant
QEIKRINKIRRRLVKDSNTKKAGKTRGPMKTLLVRVMTPDLRERLENLRKKPENIPQPISNTSRANLNKLLTDYTEMKKAILHVYWEEFQKDPVGLMSRVAQPASKKIDQNKLKPEMDEKGNLTTAGFACSQCGQPLFVYKLEQVSEKGKAYTNYVGRCNVAEHEKLILLAQLKPEKDSDEAVTYSLGKFGQRALDFYSIHVTKESTHPVKPLAQIAGNRYASTPVGKALSDACMGTIASFLSKYQDIIIEHQKVVKGNQKRLESLRELAGKENLEYPSVTLPPQPHTKEGVDAYNEVIARVRMWVNLNLWQKLKLSRDDAKPLLRLKGFPSFPLVERQANEVDWWDMVCNVKKLINEKKEDGKVFWQNLAGYKRQEALRPYLSSEEDRKKGKKFARYQLGDLLLHLEKKHGEDWGKVYDEAWERIDKKVEGLSKHIKLEEERRSEDAQSKAALTDWLRAKASFVIEGLKEADKDEFCRCELKLQKWYGDLRGKPFAIEAENSILDISGFSKQYNCAFIWQKDGVKKLNLYLIINYFKGGKLRFKKIKPEAFEANRFYTVINKKSGEIVPMEVNFNFDDPNLIILPLAFGKRQGREFIWNDLLSLETGSLKLANGRVIEKTLYNRRTRQDEPALFVALTFERREVLDSSNIKPMNLIGVDRGENIPAVIALTDPEGCPLSRFKDSLGNPTHILRIGESYKEKQRTIQAKKEVEQRRAGGYSRKYASKAKNLADDMVRNTARDLLYYAVTQDAMLIFENLSRGFGRQGKRTFMAERQYTRMEDWLTAKLAYEGLPSKTYLSKTLAQYTSKTCSNCGFTITSADYDRVLEKLKKTATGWMTTINGKELKVEGQITYYNRYKRQNVVKDLSVELDRLSEESVNNDISSWTKGRSGEALSLLKKRFSHRPVQEKFVCLNCGFETHADEQAALNIARSWLFLRSQEYKKYQTNKTTGNTDKRAFVETWQSFYRKKLKEVWKPAV

SEQ ID NO: 30347 - protein, 979 aa, synthetic construct
  REGION 1..979: note = engineered CasX variant
QEIKRINKIRRRLVKDSNTKKAGKTRGPMKTLLVRVMTPDLRERLENLRKKPENIPQPISNTSRANLNKLLTDYTEMKKAILHVYWEEFQKDPVGLMSRVAQPASKKIDQNKLKPEMDEKGNLTTAGFACSQCGQPLFVYKLEQVSEKGKAYTNYVGRCNVAEHEKLILLAQLKPEKDSDEAVTYSLGKFGQRALDFYSIHVTKESTHPVKPLAQIAGNRYASAPVGKALSDACMGTIASFLSKYQDIIIEHQKVVKGNQKRLESLRELAGKENLEYPSVTLPPQPHTKEGVDAYNEVIARVRMWVNLNLWQKLKLSRDDAKPLLRLKGFPSFPLVERQANEVDWWDMVCNVKKLINEKKEDGKVFWQNLAGYKRQEALRPYLSSEEDRKKGKKFARYQLGDLLLHLEKKHGEDWGKVYDEAWERIDKKVEGLSKHIKLEEERRSEDAQSKAALTDWLRAKASFVIEGLKEADKDEFCRCELKLQKWYGDLRGKPFAIEAENSILDISGFSKQYNCAFIWQKDGVKKLNLYLIINYFKGGKLRFKKIKPEAFEANRFYTVINKKSGEIVPMEVNFNFDDPNLIILPLAFGKRQGREFIWNDLLSLETGSLKLANGRVIEKTLYNRRTRQDEPALFVALTFERREVLDSSNIKPMNLIGVDRGENIPAVIALTDPEGCPLSRFKDSLGNPTHILRIGESYKEKQRTIQAKKEVEQRRAGGYSRKYASKAKNLADDMVRNTARDLLYYAVTQDAMLIFENLSRGFGRQGKRTFMAERQYTRMEDWLTAKLAYEGLPSKTYLSKTLAQYTSKTCSNCGFTITSADYDRVLEKLKKTATGWMTTINGKELKVEGQITYYNRYKRQNVVKDLSVELDRLSEESVNNDISSWTKGRSGEALSLLKKRFSHRPVQEKFVCLNCGFETHADEQAALNIARSWLFLRSQEYKKYQTNKTTGNTDKRAFVETWQSFYRKKLKEVWKPAV

SEQ ID NO: 30348 - protein, 979 aa, synthetic construct
  REGION 1..979: note = engineered CasX variant
QEIKRINKIRRRLVKDSNTKKAGKTRGPMKTLLVRVMTPDLRERLENLRKKPENIPQPISNTSRANLNKLLTDYTEMKKAILHVYWEEFQKDPVGLMSRVAQPASKKIDQNKLKPEMDEKGNLTTAGFACSQCGQPLFVYKLEQVSEKGKAYTNYVGRCNVAEHEKLILLAQLKPEKDSDEAVTYSLGKFGQRALDFYSIHVTKESTHPVKPLAQIAGNRYASVPVGKALSDACMGTIASFLSKYQDIIIEHQKVVKGNQKRLESLRELAGKENLEYPSVTLPPQPHTKEGVDAYNEVIARVRMWVNLNLWQKLKLSRDDAKPLLRLKGFPSFPLVERQANEVDWWDMVCNVKKLINEKKEDGKVFWQNLAGYKRQEALRPYLSSEEDRKKGKKFARYQLGDLLLHLEKKHGEDWGKVYDEAWERIDKKVEGLSKHIKLEEERRSEDAQSKAALTDWLRAKASFVIEGLKEADKDEFCRCELKLQKWYGDLRGKPFAIEAENSILDISGFSKQYNCAFIWQKDGVKKLNLYLIINYFKGGKLRFKKIKPEAFEANRFYTVINKKSGEIVPMEVNFNFDDPNLIILPLAFGKRQGREFIWNDLLSLETGSLKLANGRVIEKTLYNRRTRQDEPALFVALTFERREVLDSSNIKPMNLIGVDRGENIPAVIALTDPEGCPLSRFKDSLGNPTHILRIGESYKEKQRTIQAKKEVEQRRAGGYSRKYASKAKNLADDMVRNTARDLLYYAVTQDAMLIFENLSRGFGRQGKRTFMAERQYTRMEDWLTAKLAYEGLPSKTYLSKTLAQYTSKTCSNCGFTITSADYDRVLEKLKKTATGWMTTINGKELKVEGQITYYNRYKRQNVVKDLSVELDRLSEESVNNDISSWTKGRSGEALSLLKKRFSHRPVQEKFVCLNCGFETHADEQAALNIARSWLFLRSQEYKKYQTNKTTGNTDKRAFVETWQSFYRKKLKEVWKPAV

SEQ ID NO: 30349 - protein, 979 aa, synthetic construct
  REGION 1..979: note = engineered CasX variant
QEIKRINKIRRRLVKDSNTKKAGKTRGPMKTLLVRVMTPDLRERLENLRKKPENIPQPISNTSRANLNKLLTDYTEMKKAILHVYWEEFQKDPVGLMSRVAQPASKKIDQNKLKPEMDEKGNLTTAGFACSQCGQPLFVYKLEQVSEKGKAYTNYVGRCNVAEHEKLIKLAQLKPEKDSDEAVTYSLGKFGQRALDFYSIHVTKESTHPVKPLAQIAGNRYASGPVGKALSDACMGTIASFLSKYQDIIIEHQKVVKGNQKRLESLRELAGKENLEYPSVTLPPQPHTKEGVDAYNEVIARVRMWVNLNLWQKLKLSRDDAKPLLRLKGFPSFPLVERQANEVDWWDMVCNVKKLINEKKEDGKVFWQNLAGYKRQEALRPYLSSEEDRKKGKKFARYQLGDLLLHLEKKHGEDWGKVYDEAWERIDKKVEGLSKHIKLEEERRSEDAQSKAALTDWLRAKASFVIEGLKEADKDEFCRCELKLQKWYGDLRGKPFAIEAENSILDISGFSKQYNCAFIWQKDGVKKLNLYLIINYFKGGKLRFKKIKPEAFEANRFYTVINKKSGEIVPMEVNFNFDDPNLIILPLAFGKRQGREFIWNDLLSLETGSLKLANGRVIEKTLYNRRTRQDEPALFVALTFERREVLDSSNIKPMNLIGVDRGENIPAVIALTDPEGCPLSRFKDSLGNPTHILRIGESYKEKQRTIQAKKEVEQRRAGGYSRKYASKAKNLADDMVRNTARDLLYYAVTQDAMLIFENLSRGFGRQGKRTFMAERQYTRMEDWLTAKLAYEGLPSKTYLSKTLAQYTSKTCSNCGFTITSADYDRVLEKLKKTATGWMTTINGKELKVEGQITYYNRYKRQNVVKDLSVELDRLSEESVNNDISSWTKGRSGEALSLLKKRFSHRPVQEKFVCLNCGFETHADEQAALNIARSWLFLRSQEYKKYQTNKTTGNTDKRAFVETWQSFYRKKLKEVWKPAV

SEQ ID NO: 30350 - protein, 978 aa, synthetic construct
  REGION 1..978: note = engineered CasX variant
QEIKRINKIRRRLVKDSNTKKAGKTRGPMKTLLVRVMTPDLRERLENLRKKPENIPQPISNTSRANLNKLLTDYTEMKKAILHVYWEEFQKDPVGLMSRVAQPASKKIDQNKLKPEMDEKGNLTTAGFACSQCGQPLFVYKLEQVSEKGKAYTNYVGRCNVAEHEKLILLAQLKPEKDSDEAVTYSLGKFGQRALDFYSIHVTKESTHPVKPLAQIAGNRYASPVGKALSDACMGTIASFLSKYQDIIIEHQKVVKGNQKRLESLRELAGKENLEYPSVTLPPQPHTKEGVDAYNEVIARVRMWVNLNLWQKLKLSRDDAKPLLRLKGFPSFPLVERQANEVDWWDMVCNVKKLINEKKEDGKVFWQNLAGYKRQEALRPYLSSEEDRKKGKKFARYQLGDLLLHLEKKHGEDWGKVYDEAWERIDKKVEGLSKHIKLEEERRSEDAQSKAALTDWLRAKASFVIEGLKEADKDEFCRCELKLQKWYGDLRGKPFAIEAENSILDISGFSKQYNCAFIWQKDGVKKLNLYLIINYFKGGKLRFKKIKPEAFEANRFYTVINKKSGEIVPMEVNFNFDDPNLIILPLAFGKRQGREFIWNDLLSLETGSLKLANGRVIEKTLYNRRTRQDEPALFVALTFERREVLDSSNIKPMNLIGVDRGENIPAVIALTDPEGCPLSRFKDSLGNPTHILRIGESYKEKQRTIQAKKEVEQRRAGGYSRKYASKAKNLADDMVRNTARDLLYYAVTQDAMLIFENLSRGFGRQGKRTFMAERQYTRMEDWLTAKLAYEGLPSKTYLSKTLAQYTSKTCSNCGFTITSADYDRVLEKLKKTATGWMTTINGKELKVEGQITYYNRYKRQNVVKDLSVELDRLSEESVNNDISSWTKGRSGEALSLLKKRFSHRPVQEKFVCLNCGFETHADEQAALNIARSWLFLRSQEYKKYQTNKTTGNTDKRAFVETWQSFYRKKLKEVWKPAV

SEQ ID NO: 30351 - protein, 979 aa, synthetic construct
  REGION 1..979: note = engineered CasX variant
QEIKRINKIRRRLVKDSNTKKAGKTRGPMKTLLVRVMTPDLRERLENLRKKPENIPQPISNTSRANLNKLLTDYTEMKKAILHVYWEEFQKDPVGLMSRVAQPASKKIDQNKLKPEMDEKGNLTTAGFACSQCGQPLFVYKLEQVSEKGKAYTNYFGRCNVAEHEKLILLAQLKPEKDSDEAVTYSLGKFGQRALDFYSIHVTKESTHPVKPLAQIAGNRYASYPVGKALSDACMGTIASFLSKYQDIIIEHQKVVKGNQKRLESLRELAGKENLEYPSVTLPPQPHTKEGVDAYNEVIARVRMWVNLNLWQKLKLSRDDAKPLLRLKGFPSFPLVERQANEVDWWDMVCNVKKLINEKKEDGKVFWQNLAGYKRQEALRPYLSSEEDRKKGKKFARYQLGDLLLHLEKKHGEDWGKVYDEAWERIDKKVEGLSKHIKLEEERRSEDAQSKAALTDWLRAKASFVIEGLKEADKDEFCRCELKLQKWYGDLRGKPFAIEAENSILDISGFSKQYNCAFIWQKDGVKKLNLYLIINYFKGGKLRFKKIKPEAFEANRFYTVINKKSGEIVPMEVNFNFDDPNLIILPLAFGKRQGREFIWNDLLSLETGSLKLANGRVIEKTLYNRRTRQDEPALFVALTFERREVLDSSNIKPMNLIGVDRGENIPAVIALTDPEGCPLSRFKDSLGNPTHILRIGESYKEKQRTIQAKKEVEQRRAGGYSRKYASKAKNLADDMVRNTARDLLYYAVTQDAMLIFENLSRGFGRQGKRTFMAERQYTRMEDWLTAKLAYEGLASKTYLSKTLAQYTSKTCSNCGFTITSADYDRVLEKLKKTATGWMTTINGKELKVEGQITYYNRYKRQNVVKDLSVELDRLSEESVNNDISSWTKGRSGEALSLLKKRFSHRPVQEKFVCLNCGFETHADEQAALNIARSWLFLRSQEYKKYQTNKTTGNTDKRAFVETWQSFYRKKLKEVWKPAV

SEQ ID NO: 30352 - protein, 979 aa, synthetic construct
  REGION 1..979: note = engineered CasX variant
QEIKRINKIRRRLVKDSNTKKAGKTRGPMKTLLVRVMTPDLRERLENLRKKPENIPQPISNTSRANLNKLLTDYTEMKKAILHVYWEEFQKDPVGLMSRVAQPASKKIDQNKLKPEMDEKGNLTTAGFACSQCGQPLFVYKLEQVSEKGKAYTNYFGRCNVAEHEKLILLAQLKPEKDSDEAVTYSLGKFGQRALDFYSIHVTKESTHPVKPLAQIAGNRYASHPVGKALSDACMGTIASFLSKYQDIIIEHQKVVKGNQKRLESLRELAGKENLEYPSVTLPPQPHTKEGVDAYNEVIARVRMWVNLNLWQKLKLSRDDAKPLLRLKGFPSFPLVERQANEVDWWDMVCNVKKLINEKKEDGKVFWQNLAGYKRQEALRPYLSSEEDRKKGKKFARYQLGDLLLHLEKKHGEDWGKVYDEAWERIDKKVEGLSKHIKLEEERRSEDAQSKAALTDWLRAKASFVIEGLKEADKDEFCRCELKLQKWYGDLRGKPFAIEAENSILDISGFSKQYNCAFIWQKDGVKKLNLYLIINYFKGGKLRFKKIKPEAFEANRFYTVINKKSGEIVPMEVNFNFDDPNLIILPLAFGKRQGREFIWNDLLSLETGSLKLANGRVIEKTLYNRRTRQDEPALFVALTFERREVLDSSNIKPMNLIGVDRGENIPAVIALTDPEGCPLSRFKDSLGNPTHILRIGESYKEKQRTIQAKKEVEQRRAGGYSRKYASKAKNLADDMVRNTARDLLYYAVTQDAMLIFENLSRGFGRQGKRTFMAERQYTRMEDWLTAKLAYEGLASKTYLSKTLAQYTSKTCSNCGFTITSADYDRVLEKLKKTATGWMTTINGKELKVEGQITYYNRYKRQNVVKDLSVELDRLSEESVNNDISSWTKGRSGEALSLLKKRFSHRPVQEKFVCLNCGFETHADEQAALNIARSWLFLRSQEYKKYQTNKTTGNTDKRAFVETWQSFYRKKLKEVWKPAV

SEQ ID NO: 30353 - protein, 979 aa, synthetic construct
  REGION 1..979: note = engineered CasX variant
QEIKRINKIRRRLVKDSNTKKAGKTRGPMKTLLVRVMTPDLRERLENLRKKPENIPQPISNTSRANLNKLLTDYTEMKKAILHVYWEEFQKDPVGLMSRVAQPASKKIDQNKLKPEMDEKGNLTTAGFACSQCGQPLFVYKLEQVSEKGKAYTNYFGRCNVAEHEKLILLAQLKPEKDSDEAVTYSLGKFGQRALDFYSIHVTKESTHPVKPLAQIAGNRYASSPVGKALSDACMGTIASFLSKYQDIIIEHQKVVKGNQKRLESLRELAGKENLEYPSVTLPPQPHTKEGVDAYNEVIARVRMWVNLNLWQKLKLSRDDAKPLLRLKGFPSFPLVERQANEVDWWDMVCNVKKLINEKKEDGKVFWQNLAGYKRQEALRPYLSSEEDRKKGKKFARYQLGDLLLHLEKKHGEDWGKVYDEAWERIDKKVEGLSKHIKLEEERRSEDAQSKAALTDWLRAKASFVIEGLKEADKDEFCRCELKLQKWYGDLRGKPFAIEAENSILDISGFSKQYNCAFIWQKDGVKKLNLYLIINYFKGGKLRFKKIKPEAFEANRFYTVINKKSGEIVPMEVNFNFDDPNLIILPLAFGKRQGREFIWNDLLSLETGSLKLANGRVIEKTLYNRRTRQDEPALFVALTFERREVLDSSNIKPMNLIGVDRGENIPAVIALTDPEGCPLSRFKDSLGNPTHILRIGESYKEKQRTIQAKKEVEQRRAGGYSRKYASKAKNLADDMVRNTARDLLYYAVTQDAMLIFENLSRGFGRQGKRTFMAERQYTRMEDWLTAKLAYEGLASKTYLSKTLAQYTSKTCSNCGFTITSADYDRVLEKLKKTATGWMTTINGKELKVEGQITYYNRYKRQNVVKDLSVELDRLSEESVNNDISSWTKGRSGEALSLLKKRFSHRPVQEKFVCLNCGFETHADEQAALNIARSWLFLRSQEYKKYQTNKTTGNTDKRAFVETWQSFYRKKLKEVWKPAV

SEQ ID NO: 30354 - protein, 979 aa, synthetic construct
  REGION 1..979: note = engineered CasX variant
QEIKRINKIRRRLVKDSNTKKAGKTRGPMKTLLVRVMTPDLRERLENLRKKPENIPQPISNTSRANLNKLLTDYTEMKKAILHVYWEEFQKDPVGLMSRVAQPASKKIDQNKLKPEMDEKGNLTTAGFACSQCGQPLFVYKLEQVSEKGKAYTNYFGRCNVAEHEKLILLAQLKPEKDSDEAVTYSLGKFGQRALDFYSIHVTKESTHPVKPLAQIAGNRYASTPVGKALSDACMGTIASFLSKYQDIIIEHQKVVKGNQKRLESLRELAGKENLEYPSVTLPPQPHTKEGVDAYNEVIARVRMWVNLNLWQKLKLSRDDAKPLLRLKGFPSFPLVERQANEVDWWDMVCNVKKLINEKKEDGKVFWQNLAGYKRQEALRPYLSSEEDRKKGKKFARYQLGDLLLHLEKKHGEDWGKVYDEAWERIDKKVEGLSKHIKLEEERRSEDAQSKAALTDWLRAKASFVIEGLKEADKDEFCRCELKLQKWYGDLRGKPFAIEAENSILDISGFSKQYNCAFIWQKDGVKKLNLYLIINYFKGGKLRFKKIKPEAFEANRFYTVINKKSGEIVPMEVNFNFDDPNLIILPLAFGKRQGREFIWNDLLSLETGSLKLANGRVIEKTLYNRRTRQDEPALFVALTFERREVLDSSNIKPMNLIGVDRGENIPAVIALTDPEGCPLSRFKDSLGNPTHILRIGESYKEKQRTIQAKKEVEQRRAGGYSRKYASKAKNLADDMVRNTARDLLYYAVTQDAMLIFENLSRGFGRQGKRTFMAERQYTRMEDWLTAKLAYEGLASKTYLSKTLAQYTSKTCSNCGFTITSADYDRVLEKLKKTATGWMTTINGKELKVEGQITYYNRYKRQNVVKDLSVELDRLSEESVNNDISSWTKGRSGEALSLLKKRFSHRPVQEKFVCLNCGFETHADEQAALNIARSWLFLRSQEYKKYQTNKTTGNTDKRAFVETWQSFYRKKLKEVWKPAV

SEQ ID NO: 30355 - protein, 979 aa, synthetic construct
  REGION 1..979: note = engineered CasX variant
QEIKRINKIRRRLVKDSNTKKAGKTRGPMKTLLVRVMTPDLRERLENLRKKPENIPQPISNTSRANLNKLLTDYTEMKKAILHVYWEEFQKDPVGLMSRVAQPASKKIDQNKLKPEMDEKGNLTTAGFACSQCGQPLFVYKLEQVSEKGKAYTNYFGRCNVAEHEKLILLAQLKPEKDSDEAVTYSLGKFGQRALDFYSIHVTKESTHPVKPLAQIAGNRYASAPVGKALSDACMGTIASFLSKYQDIIIEHQKVVKGNQKRLESLRELAGKENLEYPSVTLPPQPHTKEGVDAYNEVIARVRMWVNLNLWQKLKLSRDDAKPLLRLKGFPSFPLVERQANEVDWWDMVCNVKKLINEKKEDGKVFWQNLAGYKRQEALRPYLSSEEDRKKGKKFARYQLGDLLLHLEKKHGEDWGKVYDEAWERIDKKVEGLSKHIKLEEERRSEDAQSKAALTDWLRAKASFVIEGLKEADKDEFCRCELKLQKWYGDLRGKPFAIEAENSILDISGFSKQYNCAFIWQKDGVKKLNLYLIINYFKGGKLRFKKIKPEAFEANRFYTVINKKSGEIVPMEVNFNFDDPNLIILPLAFGKRQGREFIWNDLLSLETGSLKLANGRVIEKTLYNRRTRQDEPALFVALTFERREVLDSSNIKPMNLIGVDRGENIPAVIALTDPEGCPLSRFKDSLGNPTHILRIGESYKEKQRTIQAKKEVEQRRAGGYSRKYASKAKNLADDMVRNTARDLLYYAVTQDAMLIFENLSRGFGRQGKRTFMAERQYTRMEDWLTAKLAYEGLASKTYLSKTLAQYTSKTCSNCGFTITSADYDRVLEKLKKTATGWMTTINGKELKVEGQITYYNRYKRQNVVKDLSVELDRLSEESVNNDISSWTKGRSGEALSLLKKRFSHRPVQEKFVCLNCGFETHADEQAALNIARSWLFLRSQEYKKYQTNKTTGNTDKRAFVETWQSFYRKKLKEVWKPAV

SEQ ID NO: 30356 - protein, 979 aa, synthetic construct
  REGION 1..979: note = engineered CasX variant
QEIKRINKIRRRLVKDSNTKKAGKTRGPMKTLLVRVMTPDLRERLENLRKKPENIPQPISNTSRANLNKLLTDYTEMKKAILHVYWEEFQKDPVGLMSRVAQPASKKIDQNKLKPEMDEKGNLTTAGFACSQCGQPLFVYKLEQVSEKGKAYTNYFGRCNVAEHEKLILLAQLKPEKDSDEAVTYSLGKFGQRALDFYSIHVTKESTHPVKPLAQIAGNRYASVPVGKALSDACMGTIASFLSKYQDIIIEHQKVVKGNQKRLESLRELAGKENLEYPSVTLPPQPHTKEGVDAYNEVIARVRMWVNLNLWQKLKLSRDDAKPLLRLKGFPSFPLVERQANEVDWWDMVCNVKKLINEKKEDGKVFWQNLAGYKRQEALRPYLSSEEDRKKGKKFARYQLGDLLLHLEKKHGEDWGKVYDEAWERIDKKVEGLSKHIKLEEERRSEDAQSKAALTDWLRAKASFVIEGLKEADKDEFCRCELKLQKWYGDLRGKPFAIEAENSILDISGFSKQYNCAFIWQKDGVKKLNLYLIINYFKGGKLRFKKIKPEAFEANRFYTVINKKSGEIVPMEVNFNFDDPNLIILPLAFGKRQGREFIWNDLLSLETGSLKLANGRVIEKTLYNRRTRQDEPALFVALTFERREVLDSSNIKPMNLIGVDRGENIPAVIALTDPEGCPLSRFKDSLGNPTHILRIGESYKEKQRTIQAKKEVEQRRAGGYSRKYASKAKNLADDMVRNTARDLLYYAVTQDAMLIFENLSRGFGRQGKRTFMAERQYTRMEDWLTAKLAYEGLASKTYLSKTLAQYTSKTCSNCGFTITSADYDRVLEKLKKTATGWMTTINGKELKVEGQITYYNRYKRQNVVKDLSVELDRLSEESVNNDISSWTKGRSGEALSLLKKRFSHRPVQEKFVCLNCGFETHADEQAALNIARSWLFLRSQEYKKYQTNKTTGNTDKRAFVETWQSFYRKKLKEVWKPAV

SEQ ID NO: 30357 - protein, 979 aa, synthetic construct
  REGION 1..979: note = engineered CasX variant
QEIKRINKIRRRLVKDSNTKKAGKTRGPMKTLLVRVMTPDLRERLENLRKKPENIPQPISNTSRANLNKLLTDYTEMKKAILHVYWEEFQKDPVGLMSRVAQPASKKIDQNKLKPEMDEKGNLTTAGFACSQCGQPLFVYKLEQVSEKGKAYTNYFGRCNVAEHEKLIKLAQLKPEKDSDEAVTYSLGKFGQRALDFYSIHVTKESTHPVKPLAQIAGNRYASGPVGKALSDACMGTIASFLSKYQDIIIEHQKVVKGNQKRLESLRELAGKENLEYPSVTLPPQPHTKEGVDAYNEVIARVRMWVNLNLWQKLKLSRDDAKPLLRLKGFPSFPLVERQANEVDWWDMVCNVKKLINEKKEDGKVFWQNLAGYKRQEALRPYLSSEEDRKKGKKFARYQLGDLLLHLEKKHGEDWGKVYDEAWERIDKKVEGLSKHIKLEEERRSEDAQSKAALTDWLRAKASFVIEGLKEADKDEFCRCELKLQKWYGDLRGKPFAIEAENSILDISGFSKQYNCAFIWQKDGVKKLNLYLIINYFKGGKLRFKKIKPEAFEANRFYTVINKKSGEIVPMEVNFNFDDPNLIILPLAFGKRQGREFIWNDLLSLETGSLKLANGRVIEKTLYNRRTRQDEPALFVALTFERREVLDSSNIKPMNLIGVDRGENIPAVIALTDPEGCPLSRFKDSLGNPTHILRIGESYKEKQRTIQAKKEVEQRRAGGYSRKYASKAKNLADDMVRNTARDLLYYAVTQDAMLIFENLSRGFGRQGKRTFMAERQYTRMEDWLTAKLAYEGLASKTYLSKTLAQYTSKTCSNCGFTITSADYDRVLEKLKKTATGWMTTINGKELKVEGQITYYNRYKRQNVVKDLSVELDRLSEESVNNDISSWTKGRSGEALSLLKKRFSHRPVQEKFVCLNCGFETHADEQAALNIARSWLFLRSQEYKKYQTNKTTGNTDKRAFVETWQSFYRKKLKEVWKPAV

SEQ ID NO: 30358 - protein, 978 aa, synthetic construct
  REGION 1..978: note = engineered CasX variant
QEIKRINKIRRRLVKDSNTKKAGKTRGPMKTLLVRVMTPDLRERLENLRKKPENIPQPISNTSRANLNKLLTDYTEMKKAILHVYWEEFQKDPVGLMSRVAQPASKKIDQNKLKPEMDEKGNLTTAGFACSQCGQPLFVYKLEQVSEKGKAYTNYFGRCNVAEHEKLILLAQLKPEKDSDEAVTYSLGKFGQRALDFYSIHVTKESTHPVKPLAQIAGNRYASPVGKALSDACMGTIASFLSKYQDIIIEHQKVVKGNQKRLESLRELAGKENLEYPSVTLPPQPHTKEGVDAYNEVIARVRMWVNLNLWQKLKLSRDDAKPLLRLKGFPSFPLVERQANEVDWWDMVCNVKKLINEKKEDGKVFWQNLAGYKRQEALRPYLSSEEDRKKGKKFARYQLGDLLLHLEKKHGEDWGKVYDEAWERIDKKVEGLSKHIKLEEERRSEDAQSKAALTDWLRAKASFVIEGLKEADKDEFCRCELKLQKWYGDLRGKPFAIEAENSILDISGFSKQYNCAFIWQKDGVKKLNLYLIINYFKGGKLRFKKIKPEAFEANRFYTVINKKSGEIVPMEVNFNFDDPNLIILPLAFGKRQGREFIWNDLLSLETGSLKLANGRVIEKTLYNRRTRQDEPALFVALTFERREVLDSSNIKPMNLIGVDRGENIPAVIALTDPEGCPLSRFKDSLGNPTHILRIGESYKEKQRTIQAKKEVEQRRAGGYSRKYASKAKNLADDMVRNTARDLLYYAVTQDAMLIFENLSRGFGRQGKRTFMAERQYTRMEDWLTAKLAYEGLASKTYLSKTLAQYTSKTCSNCGFTITSADYDRVLEKLKKTATGWMTTINGKELKVEGQITYYNRYKRQNVVKDLSVELDRLSEESVNNDISSWTKGRSGEALSLLKKRFSHRPVQEKFVCLNCGFETHADEQAALNIARSWLFLRSQEYKKYQTNKTTGNTDKRAFVETWQSFYRKKLKEVWKPAV

SEQ ID NO: 30359 - protein, 979 aa, synthetic construct
  REGION 1..979: note = engineered CasX variant
QEIKRINKIRRRLVKDSNTKKAGKTRGPMKTLLVRVMTPDLRERLENLRKKPENIPQPISNTSRANLNKLLTDYTEMKKAILHVYWEEFQKDPVGLMSRVAQPASKKIDQNKLKPEMDEKGNLTTAGFACSQCGQPLFVYKLEQVSEKGKAYTNYFGRCNVAEHEKLILLAQLKPEKDSDEAVTYSLGKFGQRALDFYSIHVTKESTHPVKPLAQIAGNRYASYPVGKALSDACMGTIASFLSKYQDIIIEHQKVVKGNQKRLESLRELAGKENLEYPSVTLPPQPHTKEGVDAYNEVIARVRMWVNLNLWQKLKLSRDDAKPLLRLKGFPSFPLVERQANEVDWWDMVCNVKKLINEKKEDGKVFWQNLAGYKRQEALRPYLSSEEDRKKGKKFARYQLGDLLLHLEKKHGEDWGKVYDEAWERIDKKVEGLSKHIKLEEERRSEDAQSKAALTDWLRAKASFVIEGLKEADKDEFCRCELKLQKWYGDLRGKPFAIEAENSILDISGFSKQYNCAFIWQKDGVKKLNLYLIINYFKGGKLRFKKIKPEAFEANRFYTVINKKSGEIVPMEVNFNFDDPNLIILPLAFGKRQGREFIWNDLLSLETGSLKLANGRVIEKTLYNRRTRQDEPALFVALTFERREVLDSSNIKPMNLIGVDRGENIPAVIALTDPEGCPLSRFKDSLGNPTHILRIGESYKEKQRTIQAKKEVEQRRAGGYSRKYASKAKNLADDMVRNTARDLLYYAVTQDAMLIFENLSRGFGRQGKRTFMAERQYTRMEDWLTAKLAYEGLPSKVYLSKTLAQYTSKTCSNCGFTITSADYDRVLEKLKKTATGWMTTINGKELKVEGQITYYNRYKRQNVVKDLSVELDRLSEESVNNDISSWTKGRSGEALSLLKKRFSHRPVQEKFVCLNCGFETHADEQAALNIARSWLFLRSQEYKKYQTNKTTGNTDKRAFVETWQSFYRKKLKEVWKPAV

SEQ ID NO: 30360 - protein, 979 aa, synthetic construct
  REGION 1..979: note = engineered CasX variant
QEIKRINKIRRRLVKDSNTKKAGKTRGPMKTLLVRVMTPDLRERLENLRKKPENIPQPISNTSRANLNKLLTDYTEMKKAILHVYWEEFQKDPVGLMSRVAQPASKKIDQNKLKPEMDEKGNLTTAGFACSQCGQPLFVYKLEQVSEKGKAYTNYFGRCNVAEHEKLILLAQLKPEKDSDEAVTYSLGKFGQRALDFYSIHVTKESTHPVKPLAQIAGNRYASHPVGKALSDACMGTIASFLSKYQDIIIEHQKVVKGNQKRLESLRELAGKENLEYPSVTLPPQPHTKEGVDAYNEVIARVRMWVNLNLWQKLKLSRDDAKPLLRLKGFPSFPLVERQANEVDWWDMVCNVKKLINEKKEDGKVFWQNLAGYKRQEALRPYLSSEEDRKKGKKFARYQLGDLLLHLEKKHGEDWGKVYDEAWERIDKKVEGLSKHIKLEEERRSEDAQSKAALTDWLRAKASFVIEGLKEADKDEFCRCELKLQKWYGDLRGKPFAIEAENSILDISGFSKQYNCAFIWQKDGVKKLNLYLIINYFKGGKLRFKKIKPEAFEANRFYTVINKKSGEIVPMEVNFNFDDPNLIILPLAFGKRQGREFIWNDLLSLETGSLKLANGRVIEKTLYNRRTRQDEPALFVALTFERREVLDSSNIKPMNLIGVDRGENIPAVIALTDPEGCPLSRFKDSLGNPTHILRIGESYKEKQRTIQAKKEVEQRRAGGYSRKYASKAKNLADDMVRNTARDLLYYAVTQDAMLIFENLSRGFGRQGKRTFMAERQYTRMEDWLTAKLAYEGLPSKVYLSKTLAQYTSKTCSNCGFTITSADYDRVLEKLKKTATGWMTTINGKELKVEGQITYYNRYKRQNVVKDLSVELDRLSEESVNNDISSWTKGRSGEALSLLKKRFSHRPVQEKFVCLNCGFETHADEQAALNIARSWLFLRSQEYKKYQTNKTTGNTDKRAFVETWQSFYRKKLKEVWKPAV

SEQ ID NO: 30361 - protein, 979 aa, synthetic construct
  REGION 1..979: note = engineered CasX variant
QEIKRINKIRRRLVKDSNTKKAGKTRGPMKTLLVRVMTPDLRERLENLRKKPENIPQPISNTSRANLNKLLTDYTEMKKAILHVYWEEFQKDPVGLMSRVAQPASKKIDQNKLKPEMDEKGNLTTAGFACSQCGQPLFVYKLEQVSEKGKAYTNYFGRCNVAEHEKLILLAQLKPEKDSDEAVTYSLGKFGQRALDFYSIHVTKESTHPVKPLAQIAGNRYASSPVGKALSDACMGTIASFLSKYQDIIIEHQKVVKGNQKRLESLRELAGKENLEYPSVTLPPQPHTKEGVDAYNEVIARVRMWVNLNLWQKLKLSRDDAKPLLRLKGFPSFPLVERQANEVDWWDMVCNVKKLINEKKEDGKVFWQNLAGYKRQEALRPYLSSEEDRKKGKKFARYQLGDLLLHLEKKHGEDWGKVYDEAWERIDKKVEGLSKHIKLEEERRSEDAQSKAALTDWLRAKASFVIEGLKEADKDEFCRCELKLQKWYGDLRGKPFAIEAENSILDISGFSKQYNCAFIWQKDGVKKLNLYLIINYFKGGKLRFKKIKPEAFEANRFYTVINKKSGEIVPMEVNFNFDDPNLIILPLAFGKRQGREFIWNDLLSLETGSLKLANGRVIEKTLYNRRTRQDEPALFVALTFERREVLDSSNIKPMNLIGVDRGENIPAVIALTDPEGCPLSRFKDSLGNPTHILRIGESYKEKQRTIQAKKEVEQRRAGGYSRKYASKAKNLADDMVRNTARDLLYYAVTQDAMLIFENLSRGFGRQGKRTFMAERQYTRMEDWLTAKLAYEGLPSKVYLSKTLAQYTSKTCSNCGFTITSADYDRVLEKLKKTATGWMTTINGKELKVEGQITYYNRYKRQNVVKDLSVELDRLSEESVNNDISSWTKGRSGEALSLLKKRFSHRPVQEKFVCLNCGFETHADEQAALNIARSWLFLRSQEYKKYQTNKTTGNTDKRAFVETWQSFYRKKLKEVWKPAV

SEQ ID NO: 30362 - protein, 979 aa, synthetic construct
  REGION 1..979: note = engineered CasX variant
QEIKRINKIRRRLVKDSNTKKAGKTRGPMKTLLVRVMTPDLRERLENLRKKPENIPQPISNTSRANLNKLLTDYTEMKKAILHVYWEEFQKDPVGLMSRVAQPASKKIDQNKLKPEMDEKGNLTTAGFACSQCGQPLFVYKLEQVSEKGKAYTNYFGRCNVAEHEKLILLAQLKPEKDSDEAVTYSLGKFGQRALDFYSIHVTKESTHPVKPLAQIAGNRYASTPVGKALSDACMGTIASFLSKYQDIIIEHQKVVKGNQKRLESLRELAGKENLEYPSVTLPPQPHTKEGVDAYNEVIARVRMWVNLNLWQKLKLSRDDAKPLLRLKGFPSFPLVERQANEVDWWDMVCNVKKLINEKKEDGKVFWQNLAGYKRQEALRPYLSSEEDRKKGKKFARYQLGDLLLHLEKKHGEDWGKVYDEAWERIDKKVEGLSKHIKLEEERRSEDAQSKAALTDWLRAKASFVIEGLKEADKDEFCRCELKLQKWYGDLRGKPFAIEAENSILDISGFSKQYNCAFIWQKDGVKKLNLYLIINYFKGGKLRFKKIKPEAFEANRFYTVINKKSGEIVPMEVNFNFDDPNLIILPLAFGKRQGREFIWNDLLSLETGSLKLANGRVIEKTLYNRRTRQDEPALFVALTFERREVLDSSNIKPMNLIGVDRGENIPAVIALTDPEGCPLSRFKDSLGNPTHILRIGESYKEKQRTIQAKKEVEQRRAGGYSRKYASKAKNLADDMVRNTARDLLYYAVTQDAMLIFENLSRGFGRQGKRTFMAERQYTRMEDWLTAKLAYEGLPSKVYLSKTLAQYTSKTCSNCGFTITSADYDRVLEKLKKTATGWMTTINGKELKVEGQITYYNRYKRQNVVKDLSVELDRLSEESVNNDISSWTKGRSGEALSLLKKRFSHRPVQEKFVCLNCGFETHADEQAALNIARSWLFLRSQEYKKYQTNKTTGNTDKRAFVETWQSFYRKKLKEVWKPAV

SEQ ID NO: 30363 - protein, 979 aa, synthetic construct
  REGION 1..979: note = engineered CasX variant
QEIKRINKIRRRLVKDSNTKKAGKTRGPMKTLLVRVMTPDLRERLENLRKKPENIPQPISNTSRANLNKLLTDYTEMKKAILHVYWEEFQKDPVGLMSRVAQPASKKIDQNKLKPEMDEKGNLTTAGFACSQCGQPLFVYKLEQVSEKGKAYTNYFGRCNVAEHEKLILLAQLKPEKDSDEAVTYSLGKFGQRALDFYSIHVTKESTHPVKPLAQIAGNRYASAPVGKALSDACMGTIASFLSKYQDIIIEHQKVVKGNQKRLESLRELAGKENLEYPSVTLPPQPHTKEGVDAYNEVIARVRMWVNLNLWQKLKLSRDDAKPLLRLKGFPSFPLVERQANEVDWWDMVCNVKKLINEKKEDGKVFWQNLAGYKRQEALRPYLSSEEDRKKGKKFARYQLGDLLLHLEKKHGEDWGKVYDEAWERIDKKVEGLSKHIKLEEERRSEDAQSKAALTDWLRAKASFVIEGLKEADKDEFCRCELKLQKWYGDLRGKPFAIEAENSILDISGFSKQYNCAFIWQKDGVKKLNLYLIINYFKGGKLRFKKIKPEAFEANRFYTVINKKSGEIVPMEVNFNFDDPNLIILPLAFGKRQGREFIWNDLLSLETGSLKLANGRVIEKTLYNRRTRQDEPALFVALTFERREVLDSSNIKPMNLIGVDRGENIPAVIALTDPEGCPLSRFKDSLGNPTHILRIGESYKEKQRTIQAKKEVEQRRAGGYSRKYASKAKNLADDMVRNTARDLLYYAVTQDAMLIFENLSRGFGRQGKRTFMAERQYTRMEDWLTAKLAYEGLPSKVYLSKTLAQYTSKTCSNCGFTITSADYDRVLEKLKKTATGWMTTINGKELKVEGQITYYNRYKRQNVVKDLSVELDRLSEESVNNDISSWTKGRSGEALSLLKKRFSHRPVQEKFVCLNCGFETHADEQAALNIARSWLFLRSQEYKKYQTNKTTGNTDKRAFVETWQSFYRKKLKEVWKPAV

SEQ ID NO: 30364 - protein, 979 aa, synthetic construct
  REGION 1..979: note = engineered CasX variant
QEIKRINKIRRRLVKDSNTKKAGKTRGPMKTLLVRVMTPDLRERLENLRKKPENIPQPISNTSRANLNKLLTDYTEMKKAILHVYWEEFQKDPVGLMSRVAQPASKKIDQNKLKPEMDEKGNLTTAGFACSQCGQPLFVYKLEQVSEKGKAYTNYFGRCNVAEHEKLILLAQLKPEKDSDEAVTYSLGKFGQRALDFYSIHVTKESTHPVKPLAQIAGNRYASVPVGKALSDACMGTIASFLSKYQDIIIEHQKVVKGNQKRLESLRELAGKENLEYPSVTLPPQPHTKEGVDAYNEVIARVRMWVNLNLWQKLKLSRDDAKPLLRLKGFPSFPLVERQANEVDWWDMVCNVKKLINEKKEDGKVFWQNLAGYKRQEALRPYLSSEEDRKKGKKFARYQLGDLLLHLEKKHGEDWGKVYDEAWERIDKKVEGLSKHIKLEEERRSEDAQSKAALTDWLRAKASFVIEGLKEADKDEFCRCELKLQKWYGDLRGKPFAIEAENSILDISGFSKQYNCAFIWQKDGVKKLNLYLIINYFKGGKLRFKKIKPEAFEANRFYTVINKKSGEIVPMEVNFNFDDPNLIILPLAFGKRQGREFIWNDLLSLETGSLKLANGRVIEKTLYNRRTRQDEPALFVALTFERREVLDSSNIKPMNLIGVDRGENIPAVIALTDPEGCPLSRFKDSLGNPTHILRIGESYKEKQRTIQAKKEVEQRRAGGYSRKYASKAKNLADDMVRNTARDLLYYAVTQDAMLIFENLSRGFGRQGKRTFMAERQYTRMEDWLTAKLAYEGLPSKVYLSKTLAQYTSKTCSNCGFTITSADYDRVLEKLKKTATGWMTTINGKELKVEGQITYYNRYKRQNVVKDLSVELDRLSEESVNNDISSWTKGRSGEALSLLKKRFSHRPVQEKFVCLNCGFETHADEQAALNIARSWLFLRSQEYKKYQTNKTTGNTDKRAFVETWQSFYRKKLKEVWKPAV

SEQ ID NO: 30365 - protein, 979 aa, synthetic construct
  REGION 1..979: note = engineered CasX variant
QEIKRINKIRRRLVKDSNTKKAGKTRGPMKTLLVRVMTPDLRERLENLRKKPENIPQPISNTSRANLNKLLTDYTEMKKAILHVYWEEFQKDPVGLMSRVAQPASKKIDQNKLKPEMDEKGNLTTAGFACSQCGQPLFVYKLEQVSEKGKAYTNYFGRCNVAEHEKLIKLAQLKPEKDSDEAVTYSLGKFGQRALDFYSIHVTKESTHPVKPLAQIAGNRYASGPVGKALSDACMGTIASFLSKYQDIIIEHQKVVKGNQKRLESLRELAGKENLEYPSVTLPPQPHTKEGVDAYNEVIARVRMWVNLNLWQKLKLSRDDAKPLLRLKGFPSFPLVERQANEVDWWDMVCNVKKLINEKKEDGKVFWQNLAGYKRQEALRPYLSSEEDRKKGKKFARYQLGDLLLHLEKKHGEDWGKVYDEAWERIDKKVEGLSKHIKLEEERRSEDAQSKAALTDWLRAKASFVIEGLKEADKDEFCRCELKLQKWYGDLRGKPFAIEAENSILDISGFSKQYNCAFIWQKDGVKKLNLYLIINYFKGGKLRFKKIKPEAFEANRFYTVINKKSGEIVPMEVNFNFDDPNLIILPLAFGKRQGREFIWNDLLSLETGSLKLANGRVIEKTLYNRRTRQDEPALFVALTFERREVLDSSNIKPMNLIGVDRGENIPAVIALTDPEGCPLSRFKDSLGNPTHILRIGESYKEKQRTIQAKKEVEQRRAGGYSRKYASKAKNLADDMVRNTARDLLYYAVTQDAMLIFENLSRGFGRQGKRTFMAERQYTRMEDWLTAKLAYEGLPSKVYLSKTLAQYTSKTCSNCGFTITSADYDRVLEKLKKTATGWMTTINGKELKVEGQITYYNRYKRQNVVKDLSVELDRLSEESVNNDISSWTKGRSGEALSLLKKRFSHRPVQEKFVCLNCGFETHADEQAALNIARSWLFLRSQEYKKYQTNKTTGNTDKRAFVETWQSFYRKKLKEVWKPAV

SEQ ID NO: 30366 - protein, 978 aa, synthetic construct
  REGION 1..978: note = engineered CasX variant
QEIKRINKIRRRLVKDSNTKKAGKTRGPMKTLLVRVMTPDLRERLENLRKKPENIPQPISNTSRANLNKLLTDYTEMKKAILHVYWEEFQKDPVGLMSRVAQPASKKIDQNKLKPEMDEKGNLTTAGFACSQCGQPLFVYKLEQVSEKGKAYTNYFGRCNVAEHEKLILLAQLKPEKDSDEAVTYSLGKFGQRALDFYSIHVTKESTHPVKPLAQIAGNRYASPVGKALSDACMGTIASFLSKYQDIIIEHQKVVKGNQKRLESLRELAGKENLEYPSVTLPPQPHTKEGVDAYNEVIARVRMWVNLNLWQKLKLSRDDAKPLLRLKGFPSFPLVERQANEVDWWDMVCNVKKLINEKKEDGKVFWQNLAGYKRQEALRPYLSSEEDRKKGKKFARYQLGDLLLHLEKKHGEDWGKVYDEAWERIDKKVEGLSKHIKLEEERRSEDAQSKAALTDWLRAKASFVIEGLKEADKDEFCRCELKLQKWYGDLRGKPFAIEAENSILDISGFSKQYNCAFIWQKDGVKKLNLYLIINYFKGGKLRFKKIKPEAFEANRFYTVINKKSGEIVPMEVNFNFDDPNLIILPLAFGKRQGREFIWNDLLSLETGSLKLANGRVIEKTLYNRRTRQDEPALFVALTFERREVLDSSNIKPMNLIGVDRGENIPAVIALTDPEGCPLSRFKDSLGNPTHILRIGESYKEKQRTIQAKKEVEQRRAGGYSRKYASKAKNLADDMVRNTARDLLYYAVTQDAMLIFENLSRGFGRQGKRTFMAERQYTRMEDWLTAKLAYEGLPSKVYLSKTLAQYTSKTCSNCGFTITSADYDRVLEKLKKTATGWMTTINGKELKVEGQITYYNRYKRQNVVKDLSVELDRLSEESVNNDISSWTKGRSGEALSLLKKRFSHRPVQEKFVCLNCGFETHADEQAALNIARSWLFLRSQEYKKYQTNKTTGNTDKRAFVETWQSFYRKKLKEVWKPAV

SEQ ID NO: 30367 - protein, 980 aa, synthetic construct
  REGION 1..980: note = engineered CasX variant
QEIKRINKIRRRLVKDSNTKKAGKTRGPMKTLLVRVMTPDLRERLENLRKKPENIPQPISNTSRANLNKLLTDYTEMKKAILHVYWEEFQKDPVGLMSRVAQPASKKIDQNKLKPEMDEKGNLTTAGFACSQCGQPLFVYKLEQVSEKGKAYTNYFGRCNVAEHEKLILLAQLKPEKDSDEAVTYSLGKFGQRALDFYSIHVTKESTHPVKPLAQIAGNRYASYPVGKALSDACMGTIASFLSKYQDIIIEHQKVVKGNQKRLESLRELAGKENLEYPSVTLPPQPHTKEGVDAYNEVIARVRMWVNLNLWQKLKLSRDDAKPLLRLKGFPSFPLVERQANEVDWWDMVCNVKKLINEKKEDGKVFWQNLAGYKRQEALRPYLSSEEDRKKGKKFARYQLGDLLLHLEKKHGEDWGKVYDEAWERIDKKVEGLSKHIKLEEERRSEDAQSKAALTDWLRAKASFVIEGLKEADKDEFCRCELKLQKWYGDLRGKPFAIEAENSILDISGFSKQYNCAFIWQKDGVKKLNLYLIINYFKGGKLRFKKIKPEAFEANRFYTVINKKSGEIVPMEVNFNFDDPNLIILPLAFGKRQGREFIWNDLLSLETGSLKLANGRVIEKTLYNRRTRQDEPALFVALTFERREVLDSSNIKPMNLIGVDRGENIPAVIALTDPEGCPLSRFKDSLGNPTHILRIGESYKEKQRTIQAKKEVEQRRAGGYSRKYASKAKNLADDMVRNTARDLLYYAVTQDAMLIFENLSRGFGRQGKRTFMAERQYTRMEDWLTAKLAYEGPLPSKTYLSKTLAQYTSKTCSNCGFTITSADYDRVLEKLKKTATGWMTTINGKELKVEGQITYYNRYKRQNVVKDLSVELDRLSEESVNNDISSWTKGRSGEALSLLKKRFSHRPVQEKFVCLNCGFETHADEQAALNIARSWLFLRSQEYKKYQTNKTTGNTDKRAFVETWQSFYRKKLKEVWKPAV

SEQ ID NO: 30368 - protein, 980 aa, synthetic construct
  REGION 1..980: note = engineered CasX variant
QEIKRINKIRRRLVKDSNTKKAGKTRGPMKTLLVRVMTPDLRERLENLRKKPENIPQPISNTSRANLNKLLTDYTEMKKAILHVYWEEFQKDPVGLMSRVAQPASKKIDQNKLKPEMDEKGNLTTAGFACSQCGQPLFVYKLEQVSEKGKAYTNYFGRCNVAEHEKLILLAQLKPEKDSDEAVTYSLGKFGQRALDFYSIHVTKESTHPVKPLAQIAGNRYASHPVGKALSDACMGTIASFLSKYQDIIIEHQKVVKGNQKRLESLRELAGKENLEYPSVTLPPQPHTKEGVDAYNEVIARVRMWVNLNLWQKLKLSRDDAKPLLRLKGFPSFPLVERQANEVDWWDMVCNVKKLINEKKEDGKVFWQNLAGYKRQEALRPYLSSEEDRKKGKKFARYQLGDLLLHLEKKHGEDWGKVYDEAWERIDKKVEGLSKHIKLEEERRSEDAQSKAALTDWLRAKASFVIEGLKEADKDEFCRCELKLQKWYGDLRGKPFAIEAENSILDISGFSKQYNCAFIWQKDGVKKLNLYLIINYFKGGKLRFKKIKPEAFEANRFYTVINKKSGEIVPMEVNFNFDDPNLIILPLAFGKRQGREFIWNDLLSLETGSLKLANGRVIEKTLYNRRTRQDEPALFVALTFERREVLDSSNIKPMNLIGVDRGENIPAVIALTDPEGCPLSRFKDSLGNPTHILRIGESYKEKQRTIQAKKEVEQRRAGGYSRKYASKAKNLADDMVRNTARDLLYYAVTQDAMLIFENLSRGFGRQGKRTFMAERQYTRMEDWLTAKLAYEGPLPSKTYLSKTLAQYTSKTCSNCGFTITSADYDRVLEKLKKTATGWMTTINGKELKVEGQITYYNRYKRQNVVKDLSVELDRLSEESVNNDISSWTKGRSGEALSLLKKRFSHRPVQEKFVCLNCGFETHADEQAALNIARSWLFLRSQEYKKYQTNKTTGNTDKRAFVETWQSFYRKKLKEVWKPAV

SEQ ID NO: 30369 - protein, 980 aa, synthetic construct
  REGION 1..980: note = engineered CasX variant
QEIKRINKIRRRLVKDSNTKKAGKTRGPMKTLLVRVMTPDLRERLENLRKKPENIPQPISNTSRANLNKLLTDYTEMKKAILHVYWEEFQKDPVGLMSRVAQPASKKIDQNKLKPEMDEKGNLTTAGFACSQCGQPLFVYKLEQVSEKGKAYTNYFGRCNVAEHEKLILLAQLKPEKDSDEAVTYSLGKFGQRALDFYSIHVTKESTHPVKPLAQIAGNRYASSPVGKALSDACMGTIASFLSKYQDIIIEHQKVVKGNQKRLESLRELAGKENLEYPSVTLPPQPHTKEGVDAYNEVIARVRMWVNLNLWQKLKLSRDDAKPLLRLKGFPSFPLVERQANEVDWWDMVCNVKKLINEKKEDGKVFWQNLAGYKRQEALRPYLSSEEDRKKGKKFARYQLGDLLLHLEKKHGEDWGKVYDEAWERIDKKVEGLSKHIKLEEERRSEDAQSKAALTDWLRAKASFVIEGLKEADKDEFCRCELKLQKWYGDLRGKPFAIEAENSILDISGFSKQYNCAFIWQKDGVKKLNLYLIINYFKGGKLRFKKIKPEAFEANRFYTVINKKSGEIVPMEVNFNFDDPNLIILPLAFGKRQGREFIWNDLLSLETGSLKLANGRVIEKTLYNRRTRQDEPALFVALTFERREVLDSSNIKPMNLIGVDRGENIPAVIALTDPEGCPLSRFKDSLGNPTHILRIGESYKEKQRTIQAKKEVEQRRAGGYSRKYASKAKNLADDMVRNTARDLLYYAVTQDAMLIFENLSRGFGRQGKRTFMAERQYTRMEDWLTAKLAYEGPLPSKTYLSKTLAQYTSKTCSNCGFTITSADYDRVLEKLKKTATGWMTTINGKELKVEGQITYYNRYKRQNVVKDLSVELDRLSEESVNNDISSWTKGRSGEALSLLKKRFSHRPVQEKFVCLNCGFETHADEQAALNIARSWLFLRSQEYKKYQTNKTTGNTDKRAFVETWQSFYRKKLKEVWKPAV

SEQ ID NO: 30370 - protein, 980 aa, synthetic construct
  REGION 1..980: note = engineered CasX variant
QEIKRINKIRRRLVKDSNTKKAGKTRGPMKTLLVRVMTPDLRERLENLRKKPENIPQPISNTSRANLNKLLTDYTEMKKAILHVYWEEFQKDPVGLMSRVAQPASKKIDQNKLKPEMDEKGNLTTAGFACSQCGQPLFVYKLEQVSEKGKAYTNYFGRCNVAEHEKLILLAQLKPEKDSDEAVTYSLGKFGQRALDFYSIHVTKESTHPVKPLAQIAGNRYASTPVGKALSDACMGTIASFLSKYQDIIIEHQKVVKGNQKRLESLRELAGKENLEYPSVTLPPQPHTKEGVDAYNEVIARVRMWVNLNLWQKLKLSRDDAKPLLRLKGFPSFPLVERQANEVDWWDMVCNVKKLINEKKEDGKVFWQNLAGYKRQEALRPYLSSEEDRKKGKKFARYQLGDLLLHLEKKHGEDWGKVYDEAWERIDKKVEGLSKHIKLEEERRSEDAQSKAALTDWLRAKASFVIEGLKEADKDEFCRCELKLQKWYGDLRGKPFAIEAENSILDISGFSKQYNCAFIWQKDGVKKLNLYLIINYFKGGKLRFKKIKPEAFEANRFYTVINKKSGEIVPMEVNFNFDDPNLIILPLAFGKRQGREFIWNDLLSLETGSLKLANGRVIEKTLYNRRTRQDEPALFVALTFERREVLDSSNIKPMNLIGVDRGENIPAVIALTDPEGCPLSRFKDSLGNPTHILRIGESYKEKQRTIQAKKEVEQRRAGGYSRKYASKAKNLADDMVRNTARDLLYYAVTQDAMLIFENLSRGFGRQGKRTFMAERQYTRMEDWLTAKLAYEGPLPSKTYLSKTLAQYTSKTCSNCGFTITSADYDRVLEKLKKTATGWMTTINGKELKVEGQITYYNRYKRQNVVKDLSVELDRLSEESVNNDISSWTKGRSGEALSLLKKRFSHRPVQEKFVCLNCGFETHADEQAALNIARSWLFLRSQEYKKYQTNKTTGNTDKRAFVETWQSFYRKKLKEVWKPAV

SEQ ID NO: 30371 - protein, 980 aa, synthetic construct
  REGION 1..980: note = engineered CasX variant
QEIKRINKIRRRLVKDSNTKKAGKTRGPMKTLLVRVMTPDLRERLENLRKKPENIPQPISNTSRANLNKLLTDYTEMKKAILHVYWEEFQKDPVGLMSRVAQPASKKIDQNKLKPEMDEKGNLTTAGFACSQCGQPLFVYKLEQVSEKGKAYTNYFGRCNVAEHEKLILLAQLKPEKDSDEAVTYSLGKFGQRALDFYSIHVTKESTHPVKPLAQIAGNRYASAPVGKALSDACMGTIASFLSKYQDIIIEHQKVVKGNQKRLESLRELAGKENLEYPSVTLPPQPHTKEGVDAYNEVIARVRMWVNLNLWQKLKLSRDDAKPLLRLKGFPSFPLVERQANEVDWWDMVCNVKKLINEKKEDGKVFWQNLAGYKRQEALRPYLSSEEDRKKGKKFARYQLGDLLLHLEKKHGEDWGKVYDEAWERIDKKVEGLSKHIKLEEERRSEDAQSKAALTDWLRAKASFVIEGLKEADKDEFCRCELKLQKWYGDLRGKPFAIEAENSILDISGFSKQYNCAFIWQKDGVKKLNLYLIINYFKGGKLRFKKIKPEAFEANRFYTVINKKSGEIVPMEVNFNFDDPNLIILPLAFGKRQGREFIWNDLLSLETGSLKLANGRVIEKTLYNRRTRQDEPALFVALTFERREVLDSSNIKPMNLIGVDRGENIPAVIALTDPEGCPLSRFKDSLGNPTHILRIGESYKEKQRTIQAKKEVEQRRAGGYSRKYASKAKNLADDMVRNTARDLLYYAVTQDAMLIFENLSRGFGRQGKRTFMAERQYTRMEDWLTAKLAYEGPLPSKTYLSKTLAQYTSKTCSNCGFTITSADYDRVLEKLKKTATGWMTTINGKELKVEGQITYYNRYKRQNVVKDLSVELDRLSEESVNNDISSWTKGRSGEALSLLKKRFSHRPVQEKFVCLNCGFETHADEQAALNIARSWLFLRSQEYKKYQTNKTTGNTDKRAFVETWQSFYRKKLKEVWKPAV

SEQ ID NO: 30372 - protein, 980 aa, synthetic construct
  REGION 1..980: note = engineered CasX variant
QEIKRINKIRRRLVKDSNTKKAGKTRGPMKTLLVRVMTPDLRERLENLRKKPENIPQPISNTSRANLNKLLTDYTEMKKAILHVYWEEFQKDPVGLMSRVAQPASKKIDQNKLKPEMDEKGNLTTAGFACSQCGQPLFVYKLEQVSEKGKAYTNYFGRCNVAEHEKLILLAQLKPEKDSDEAVTYSLGKFGQRALDFYSIHVTKESTHPVKPLAQIAGNRYASVPVGKALSDACMGTIASFLSKYQDIIIEHQKVVKGNQKRLESLRELAGKENLEYPSVTLPPQPHTKEGVDAYNEVIARVRMWVNLNLWQKLKLSRDDAKPLLRLKGFPSFPLVERQANEVDWWDMVCNVKKLINEKKEDGKVFWQNLAGYKRQEALRPYLSSEEDRKKGKKFARYQLGDLLLHLEKKHGEDWGKVYDEAWERIDKKVEGLSKHIKLEEERRSEDAQSKAALTDWLRAKASFVIEGLKEADKDEFCRCELKLQKWYGDLRGKPFAIEAENSILDISGFSKQYNCAFIWQKDGVKKLNLYLIINYFKGGKLRFKKIKPEAFEANRFYTVINKKSGEIVPMEVNFNFDDPNLIILPLAFGKRQGREFIWNDLLSLETGSLKLANGRVIEKTLYNRRTRQDEPALFVALTFERREVLDSSNIKPMNLIGVDRGENIPAVIALTDPEGCPLSRFKDSLGNPTHILRIGESYKEKQRTIQAKKEVEQRRAGGYSRKYASKAKNLADDMVRNTARDLLYYAVTQDAMLIFENLSRGFGRQGKRTFMAERQYTRMEDWLTAKLAYEGPLPSKTYLSKTLAQYTSKTCSNCGFTITSADYDRVLEKLKKTATGWMTTINGKELKVEGQITYYNRYKRQNVVKDLSVELDRLSEESVNNDISSWTKGRSGEALSLLKKRFSHRPVQEKFVCLNCGFETHADEQAALNIARSWLFLRSQEYKKYQTNKTTGNTDKRAFVETWQSFYRKKLKEVWKPAV

SEQ ID NO: 30373 - protein, 980 aa, synthetic construct
  REGION 1..980: note = engineered CasX variant
QEIKRINKIRRRLVKDSNTKKAGKTRGPMKTLLVRVMTPDLRERLENLRKKPENIPQPISNTSRANLNKLLTDYTEMKKAILHVYWEEFQKDPVGLMSRVAQPASKKIDQNKLKPEMDEKGNLTTAGFACSQCGQPLFVYKLEQVSEKGKAYTNYFGRCNVAEHEKLIKLAQLKPEKDSDEAVTYSLGKFGQRALDFYSIHVTKESTHPVKPLAQIAGNRYASGPVGKALSDACMGTIASFLSKYQDIIIEHQKVVKGNQKRLESLRELAGKENLEYPSVTLPPQPHTKEGVDAYNEVIARVRMWVNLNLWQKLKLSRDDAKPLLRLKGFPSFPLVERQANEVDWWDMVCNVKKLINEKKEDGKVFWQNLAGYKRQEALRPYLSSEEDRKKGKKFARYQLGDLLLHLEKKHGEDWGKVYDEAWERIDKKVEGLSKHIKLEEERRSEDAQSKAALTDWLRAKASFVIEGLKEADKDEFCRCELKLQKWYGDLRGKPFAIEAENSILDISGFSKQYNCAFIWQKDGVKKLNLYLIINYFKGGKLRFKKIKPEAFEANRFYTVINKKSGEIVPMEVNFNFDDPNLIILPLAFGKRQGREFIWNDLLSLETGSLKLANGRVIEKTLYNRRTRQDEPALFVALTFERREVLDSSNIKPMNLIGVDRGENIPAVIALTDPEGCPLSRFKDSLGNPTHILRIGESYKEKQRTIQAKKEVEQRRAGGYSRKYASKAKNLADDMVRNTARDLLYYAVTQDAMLIFENLSRGFGRQGKRTFMAERQYTRMEDWLTAKLAYEGPLPSKTYLSKTLAQYTSKTCSNCGFTITSADYDRVLEKLKKTATGWMTTINGKELKVEGQITYYNRYKRQNVVKDLSVELDRLSEESVNNDISSWTKGRSGEALSLLKKRFSHRPVQEKFVCLNCGFETHADEQAALNIARSWLFLRSQEYKKYQTNKTTGNTDKRAFVETWQSFYRKKLKEVWKPAV

SEQ ID NO: 30374 - protein, 979 aa, synthetic construct
  REGION 1..979: note = engineered CasX variant
QEIKRINKIRRRLVKDSNTKKAGKTRGPMKTLLVRVMTPDLRERLENLRKKPENIPQPISNTSRANLNKLLTDYTEMKKAILHVYWEEFQKDPVGLMSRVAQPASKKIDQNKLKPEMDEKGNLTTAGFACSQCGQPLFVYKLEQVSEKGKAYTNYFGRCNVAEHEKLILLAQLKPEKDSDEAVTYSLGKFGQRALDFYSIHVTKESTHPVKPLAQIAGNRYASPVGKALSDACMGTIASFLSKYQDIIIEHQKVVKGNQKRLESLRELAGKENLEYPSVTLPPQPHTKEGVDAYNEVIARVRMWVNLNLWQKLKLSRDDAKPLLRLKGFPSFPLVERQANEVDWWDMVCNVKKLINEKKEDGKVFWQNLAGYKRQEALRPYLSSEEDRKKGKKFARYQLGDLLLHLEKKHGEDWGKVYDEAWERIDKKVEGLSKHIKLEEERRSEDAQSKAALTDWLRAKASFVIEGLKEADKDEFCRCELKLQKWYGDLRGKPFAIEAENSILDISGFSKQYNCAFIWQKDGVKKLNLYLIINYFKGGKLRFKKIKPEAFEANRFYTVINKKSGEIVPMEVNFNFDDPNLIILPLAFGKRQGREFIWNDLLSLETGSLKLANGRVIEKTLYNRRTRQDEPALFVALTFERREVLDSSNIKPMNLIGVDRGENIPAVIALTDPEGCPLSRFKDSLGNPTHILRIGESYKEKQRTIQAKKEVEQRRAGGYSRKYASKAKNLADDMVRNTARDLLYYAVTQDAMLIFENLSRGFGRQGKRTFMAERQYTRMEDWLTAKLAYEGPLPSKTYLSKTLAQYTSKTCSNCGFTITSADYDRVLEKLKKTATGWMTTINGKELKVEGQITYYNRYKRQNVVKDLSVELDRLSEESVNNDISSWTKGRSGEALSLLKKRFSHRPVQEKFVCLNCGFETHADEQAALNIARSWLFLRSQEYKKYQTNKTTGNTDKRAFVETWQSFYRKKLKEVWKPAV

SEQ ID NO: 30375 - protein, 980 aa, synthetic construct
  REGION 1..980: note = engineered CasX variant
QEIKRINKIRRRLVKDSNTKKAGKTRGPMKTLLVRVMTPDLRERLENLRKKPENIPQPISNTSRANLNKLLTDYTEMKKAILHVYWEEFQKDPVGLMSRVAQPASKKIDQNKLKPEMDEKGNLTTAGFACSQCGQPLFVYKLEQVSEKGKAYTNYFGRCNVAEHEKLILLAQLKPEKDSDEAVTYSLGKFGQRALDFYSIHVTKESTHPVKPLAQIAGNRYASYPVGKALSDACMGTIASFLSKYQDIIIEHQKVVKGNQKRLESLRELAGKENLEYPSVTLPPQPHTKEGVDAYNEVIARVRMWVNLNLWQKLKLSRDDAKPLLRLKGFPSFPLVERQANEVDWWDMVCNVKKLINEKKEDGKVFWQNLAGYKRQEALRPYLSSEEDVRKKGKKFARYQLGDLLLHLEKKHGEDWGKVYDEAWERIDKKVEGLSKHIKLEEERRSEDAQSKAALTDWLRAKASFVIEGLKEADKDEFCRCELKLQKWYGDLRGKPFAIEAENSILDISGFSKQYNCAFIWQKDGVKKLNLYLIINYFKGGKLRFKKIKPEAFEANRFYTVINKKSGEIVPMEVNFNFDDPNLIILPLAFGKRQGREFIWNDLLSLETGSLKLANGRVIEKTLYNRRTRQDEPALFVALTFERREVLDSSNIKPMNLIGVDRGENIPAVIALTDPEGCPLSRFKDSLGNPTHILRIGESYKEKQRTIQAKKEVEQRRAGGYSRKYASKAKNLADDMVRNTARDLLYYAVTQDAMLIFENLSRGFGRQGKRTFMAERQYTRMEDWLTAKLAYEGLPSKTYLSKTLAQYTSKTCSNCGFTITSADYDRVLEKLKKTATGWMTTINGKELKVEGQITYYNRYKRQNVVKDLSVELDRLSEESVNNDISSWTKGRSGEALSLLKKRFSHRPVQEKFVCLNCGFETHADEQAALNIARSWLFLRSQEYKKYQTNKTTGNTDKRAFVETWQSFYRKKLKEVWKPAV

SEQ ID NO: 30376 - protein, 980 aa, synthetic construct
  REGION 1..980: note = engineered CasX variant
QEIKRINKIRRRLVKDSNTKKAGKTRGPMKTLLVRVMTPDLRERLENLRKKPENIPQPISNTSRANLNKLLTDYTEMKKAILHVYWEEFQKDPVGLMSRVAQPASKKIDQNKLKPEMDEKGNLTTAGFACSQCGQPLFVYKLEQVSEKGKAYTNYFGRCNVAEHEKLILLAQLKPEKDSDEAVTYSLGKFGQRALDFYSIHVTKESTHPVKPLAQIAGNRYASHPVGKALSDACMGTIASFLSKYQDIIIEHQKVVKGNQKRLESLRELAGKENLEYPSVTLPPQPHTKEGVDAYNEVIARVRMWVNLNLWQKLKLSRDDAKPLLRLKGFPSFPLVERQANEVDWWDMVCNVKKLINEKKEDGKVFWQNLAGYKRQEALRPYLSSEEDVRKKGKKFARYQLGDLLLHLEKKHGEDWGKVYDEAWERIDKKVEGLSKHIKLEEERRSEDAQSKAALTDWLRAKASFVIEGLKEADKDEFCRCELKLQKWYGDLRGKPFAIEAENSILDISGFSKQYNCAFIWQKDGVKKLNLYLIINYFKGGKLRFKKIKPEAFEANRFYTVINKKSGEIVPMEVNFNFDDPNLIILPLAFGKRQGREFIWNDLLSLETGSLKLANGRVIEKTLYNRRTRQDEPALFVALTFERREVLDSSNIKPMNLIGVDRGENIPAVIALTDPEGCPLSRFKDSLGNPTHILRIGESYKEKQRTIQAKKEVEQRRAGGYSRKYASKAKNLADDMVRNTARDLLYYAVTQDAMLIFENLSRGFGRQGKRTFMAERQYTRMEDWLTAKLAYEGLPSKTYLSKTLAQYTSKTCSNCGFTITSADYDRVLEKLKKTATGWMTTINGKELKVEGQITYYNRYKRQNVVKDLSVELDRLSEESVNNDISSWTKGRSGEALSLLKKRFSHRPVQEKFVCLNCGFETHADEQAALNIARSWLFLRSQEYKKYQTNKTTGNTDKRAFVETWQSFYRKKLKEVWKPAV

SEQ ID NO: 30377 - protein, 980 aa, synthetic construct
  REGION 1..980: note = engineered CasX variant
QEIKRINKIRRRLVKDSNTKKAGKTRGPMKTLLVRVMTPDLRERLENLRKKPENIPQPISNTSRANLNKLLTDYTEMKKAILHVYWEEFQKDPVGLMSRVAQPASKKIDQNKLKPEMDEKGNLTTAGFACSQCGQPLFVYKLEQVSEKGKAYTNYFGRCNVAEHEKLILLAQLKPEKDSDEAVTYSLGKFGQRALDFYSIHVTKESTHPVKPLAQIAGNRYASSPVGKALSDACMGTIASFLSKYQDIIIEHQKVVKGNQKRLESLRELAGKENLEYPSVTLPPQPHTKEGVDAYNEVIARVRMWVNLNLWQKLKLSRDDAKPLLRLKGFPSFPLVERQANEVDWWDMVCNVKKLINEKKEDGKVFWQNLAGYKRQEALRPYLSSEEDVRKKGKKFARYQLGDLLLHLEKKHGEDWGKVYDEAWERIDKKVEGLSKHIKLEEERRSEDAQSKAALTDWLRAKASFVIEGLKEADKDEFCRCELKLQKWYGDLRGKPFAIEAENSILDISGFSKQYNCAFIWQKDGVKKLNLYLIINYFKGGKLRFKKIKPEAFEANRFYTVINKKSGEIVPMEVNFNFDDPNLIILPLAFGKRQGREFIWNDLLSLETGSLKLANGRVIEKTLYNRRTRQDEPALFVALTFERREVLDSSNIKPMNLIGVDRGENIPAVIALTDPEGCPLSRFKDSLGNPTHILRIGESYKEKQRTIQAKKEVEQRRAGGYSRKYASKAKNLADDMVRNTARDLLYYAVTQDAMLIFENLSRGFGRQGKRTFMAERQYTRMEDWLTAKLAYEGLPSKTYLSKTLAQYTSKTCSNCGFTITSADYDRVLEKLKKTATGWMTTINGKELKVEGQITYYNRYKRQNVVKDLSVELDRLSEESVNNDISSWTKGRSGEALSLLKKRFSHRPVQEKFVCLNCGFETHADEQAALNIARSWLFLRSQEYKKYQTNKTTGNTDKRAFVETWQSFYRKKLKEVWKPAV

SEQ ID NO: 30378 - protein, 980 aa, synthetic construct
  REGION 1..980: note = engineered CasX variant
QEIKRINKIRRRLVKDSNTKKAGKTRGPMKTLLVRVMTPDLRERLENLRKKPENIPQPISNTSRANLNKLLTDYTEMKKAILHVYWEEFQKDPVGLMSRVAQPASKKIDQNKLKPEMDEKGNLTTAGFACSQCGQPLFVYKLEQVSEKGKAYTNYFGRCNVAEHEKLILLAQLKPEKDSDEAVTYSLGKFGQRALDFYSIHVTKESTHPVKPLAQIAGNRYASTPVGKALSDACMGTIASFLSKYQDIIIEHQKVVKGNQKRLESLRELAGKENLEYPSVTLPPQPHTKEGVDAYNEVIARVRMWVNLNLWQKLKLSRDDAKPLLRLKGFPSFPLVERQANEVDWWDMVCNVKKLINEKKEDGKVFWQNLAGYKRQEALRPYLSSEEDVRKKGKKFARYQLGDLLLHLEKKHGEDWGKVYDEAWERIDKKVEGLSKHIKLEEERRSEDAQSKAALTDWLRAKASFVIEGLKEADKDEFCRCELKLQKWYGDLRGKPFAIEAENSILDISGFSKQYNCAFIWQKDGVKKLNLYLIINYFKGGKLRFKKIKPEAFEANRFYTVINKKSGEIVPMEVNFNFDDPNLIILPLAFGKRQGREFIWNDLLSLETGSLKLANGRVIEKTLYNRRTRQDEPALFVALTFERREVLDSSNIKPMNLIGVDRGENIPAVIALTDPEGCPLSRFKDSLGNPTHILRIGESYKEKQRTIQAKKEVEQRRAGGYSRKYASKAKNLADDMVRNTARDLLYYAVTQDAMLIFENLSRGFGRQGKRTFMAERQYTRMEDWLTAKLAYEGLPSKTYLSKTLAQYTSKTCSNCGFTITSADYDRVLEKLKKTATGWMTTINGKELKVEGQITYYNRYKRQNVVKDLSVELDRLSEESVNNDISSWTKGRSGEALSLLKKRFSHRPVQEKFVCLNCGFETHADEQAALNIARSWLFLRSQEYKKYQTNKTTGNTDKRAFVETWQSFYRKKLKEVWKPAV

SEQ ID NO: 30379 - protein, 980 aa, synthetic construct
  REGION 1..980: note = engineered CasX variant
QEIKRINKIRRRLVKDSNTKKAGKTRGPMKTLLVRVMTPDLRERLENLRKKPENIPQPISNTSRANLNKLLTDYTEMKKAILHVYWEEFQKDPVGLMSRVAQPASKKIDQNKLKPEMDEKGNLTTAGFACSQCGQPLFVYKLEQVSEKGKAYTNYFGRCNVAEHEKLILLAQLKPEKDSDEAVTYSLGKFGQRALDFYSIHVTKESTHPVKPLAQIAGNRYASAPVGKALSDACMGTIASFLSKYQDIIIEHQKVVKGNQKRLESLRELAGKENLEYPSVTLPPQPHTKEGVDAYNEVIARVRMWVNLNLWQKLKLSRDDAKPLLRLKGFPSFPLVERQANEVDWWDMVCNVKKLINEKKEDGKVFWQNLAGYKRQEALRPYLSSEEDVRKKGKKFARYQLGDLLLHLEKKHGEDWGKVYDEAWERIDKKVEGLSKHIKLEEERRSEDAQSKAALTDWLRAKASFVIEGLKEADKDEFCRCELKLQKWYGDLRGKPFAIEAENSILDISGFSKQYNCAFIWQKDGVKKLNLYLIINYFKGGKLRFKKIKPEAFEANRFYTVINKKSGEIVPMEVNFNFDDPNLIILPLAFGKRQGREFIWNDLLSLETGSLKLANGRVIEKTLYNRRTRQDEPALFVALTFERREVLDSSNIKPMNLIGVDRGENIPAVIALTDPEGCPLSRFKDSLGNPTHILRIGESYKEKQRTIQAKKEVEQRRAGGYSRKYASKAKNLADDMVRNTARDLLYYAVTQDAMLIFENLSRGFGRQGKRTFMAERQYTRMEDWLTAKLAYEGLPSKTYLSKTLAQYTSKTCSNCGFTITSADYDRVLEKLKKTATGWMTTINGKELKVEGQITYYNRYKRQNVVKDLSVELDRLSEESVNNDISSWTKGRSGEALSLLKKRFSHRPVQEKFVCLNCGFETHADEQAALNIARSWLFLRSQEYKKYQTNKTTGNTDKRAFVETWQSFYRKKLKEVWKPAV

SEQ ID NO: 30380 - protein, 980 aa, synthetic construct
  REGION 1..980: note = engineered CasX variant
QEIKRINKIRRRLVKDSNTKKAGKTRGPMKTLLVRVMTPDLRERLENLRKKPENIPQPISNTSRANLNKLLTDYTEMKKAILHVYWEEFQKDPVGLMSRVAQPASKKIDQNKLKPEMDEKGNLTTAGFACSQCGQPLFVYKLEQVSEKGKAYTNYFGRCNVAEHEKLILLAQLKPEKDSDEAVTYSLGKFGQRALDFYSIHVTKESTHPVKPLAQIAGNRYASVPVGKALSDACMGTIASFLSKYQDIIIEHQKVVKGNQKRLESLRELAGKENLEYPSVTLPPQPHTKEGVDAYNEVIARVRMWVNLNLWQKLKLSRDDAKPLLRLKGFPSFPLVERQANEVDWWDMVCNVKKLINEKKEDGKVFWQNLAGYKRQEALRPYLSSEEDVRKKGKKFARYQLGDLLLHLEKKHGEDWGKVYDEAWERIDKKVEGLSKHIKLEEERRSEDAQSKAALTDWLRAKASFVIEGLKEADKDEFCRCELKLQKWYGDLRGKPFAIEAENSILDISGFSKQYNCAFIWQKDGVKKLNLYLIINYFKGGKLRFKKIKPEAFEANRFYTVINKKSGEIVPMEVNFNFDDPNLIILPLAFGKRQGREFIWNDLLSLETGSLKLANGRVIEKTLYNRRTRQDEPALFVALTFERREVLDSSNIKPMNLIGVDRGENIPAVIALTDPEGCPLSRFKDSLGNPTHILRIGESYKEKQRTIQAKKEVEQRRAGGYSRKYASKAKNLADDMVRNTARDLLYYAVTQDAMLIFENLSRGFGRQGKRTFMAERQYTRMEDWLTAKLAYEGLPSKTYLSKTLAQYTSKTCSNCGFTITSADYDRVLEKLKKTATGWMTTINGKELKVEGQITYYNRYKRQNVVKDLSVELDRLSEESVNNDISSWTKGRSGEALSLLKKRFSHRPVQEKFVCLNCGFETHADEQAALNIARSWLFLRSQEYKKYQTNKTTGNTDKRAFVETWQSFYRKKLKEVWKPAV

SEQ ID NO: 30381 - protein, 980 aa, synthetic construct
  REGION 1..980: note = engineered CasX variant
QEIKRINKIRRRLVKDSNTKKAGKTRGPMKTLLVRVMTPDLRERLENLRKKPENIPQPISNTSRANLNKLLTDYTEMKKAILHVYWEEFQKDPVGLMSRVAQPASKKIDQNKLKPEMDEKGNLTTAGFACSQCGQPLFVYKLEQVSEKGKAYTNYFGRCNVAEHEKLIKLAQLKPEKDSDEAVTYSLGKFGQRALDFYSIHVTKESTHPVKPLAQIAGNRYASGPVGKALSDACMGTIASFLSKYQDIIIEHQKVVKGNQKRLESLRELAGKENLEYPSVTLPPQPHTKEGVDAYNEVIARVRMWVNLNLWQKLKLSRDDAKPLLRLKGFPSFPLVERQANEVDWWDMVCNVKKLINEKKEDGKVFWQNLAGYKRQEALRPYLSSEEDVRKKGKKFARYQLGDLLLHLEKKHGEDWGKVYDEAWERIDKKVEGLSKHIKLEEERRSEDAQSKAALTDWLRAKASFVIEGLKEADKDEFCRCELKLQKWYGDLRGKPFAIEAENSILDISGFSKQYNCAFIWQKDGVKKLNLYLIINYFKGGKLRFKKIKPEAFEANRFYTVINKKSGEIVPMEVNFNFDDPNLIILPLAFGKRQGREFIWNDLLSLETGSLKLANGRVIEKTLYNRRTRQDEPALFVALTFERREVLDSSNIKPMNLIGVDRGENIPAVIALTDPEGCPLSRFKDSLGNPTHILRIGESYKEKQRTIQAKKEVEQRRAGGYSRKYASKAKNLADDMVRNTARDLLYYAVTQDAMLIFENLSRGFGRQGKRTFMAERQYTRMEDWLTAKLAYEGLPSKTYLSKTLAQYTSKTCSNCGFTITSADYDRVLEKLKKTATGWMTTINGKELKVEGQITYYNRYKRQNVVKDLSVELDRLSEESVNNDISSWTKGRSGEALSLLKKRFSHRPVQEKFVCLNCGFETHADEQAALNIARSWLFLRSQEYKKYQTNKTTGNTDKRAFVETWQSFYRKKLKEVWKPAV

SEQ ID NO: 30382 - protein, 979 aa, synthetic construct
  REGION 1..979: note = engineered CasX variant
QEIKRINKIRRRLVKDSNTKKAGKTRGPMKTLLVRVMTPDLRERLENLRKKPENIPQPISNTSRANLNKLLTDYTEMKKAILHVYWEEFQKDPVGLMSRVAQPASKKIDQNKLKPEMDEKGNLTTAGFACSQCGQPLFVYKLEQVSEKGKAYTNYFGRCNVAEHEKLILLAQLKPEKDSDEAVTYSLGKFGQRALDFYSIHVTKESTHPVKPLAQIAGNRYASPVGKALSDACMGTIASFLSKYQDIIIEHQKVVKGNQKRLESLRELAGKENLEYPSVTLPPQPHTKEGVDAYNEVIARVRMWVNLNLWQKLKLSRDDAKPLLRLKGFPSFPLVERQANEVDWWDMVCNVKKLINEKKEDGKVFWQNLAGYKRQEALRPYLSSEEDVRKKGKKFARYQLGDLLLHLEKKHGEDWGKVYDEAWERIDKKVEGLSKHIKLEEERRSEDAQSKAALTDWLRAKASFVIEGLKEADKDEFCRCELKLQKWYGDLRGKPFAIEAENSILDISGFSKQYNCAFIWQKDGVKKLNLYLIINYFKGGKLRFKKIKPEAFEANRFYTVINKKSGEIVPMEVNFNFDDPNLIILPLAFGKRQGREFIWNDLLSLETGSLKLANGRVIEKTLYNRRTRQDEPALFVALTFERREVLDSSNIKPMNLIGVDRGENIPAVIALTDPEGCPLSRFKDSLGNPTHILRIGESYKEKQRTIQAKKEVEQRRAGGYSRKYASKAKNLADDMVRNTARDLLYYAVTQDAMLIFENLSRGFGRQGKRTFMAERQYTRMEDWLTAKLAYEGLPSKTYLSKTLAQYTSKTCSNCGFTITSADYDRVLEKLKKTATGWMTTINGKELKVEGQITYYNRYKRQNVVKDLSVELDRLSEESVNNDISSWTKGRSGEALSLLKKRFSHRPVQEKFVCLNCGFETHADEQAALNIARSWLFLRSQEYKKYQTNKTTGNTDKRAFVETWQSFYRKKLKEVWKPAV

SEQ ID NO: 30383 - protein, 979 aa, synthetic construct
  REGION 1..979: note = engineered CasX variant
QEIKRINKIRRRLVKDSNTKKAGKTRGPMKTLLVRVMTPDLRERLENLRKKPENIPQPISNTSRANLNKLLTDYTEMKKAILHVYWEEFQKDPVGLMSRVAQPASKKIDQNKLKPEMDEKGNLTTAGFACSQCGQPLFVYKLEQVSEKGKAYTNYFGRCNVAEHEKLILLAQLKPEKDSDEAVTYSLGKFGQRALDFYSIHVTKESTHPVKPLAQIAGNRYASYPVGKALSDACMGTIASFLSKYQDIIIEHQKVVKGNQKRLESLRELAGKENLEYPSVTLPPQPHTKEGVDAYNEVIARVRMWVNLNLWQKLKLSRDDAKPLLRLKGFPSFPLVERQANEVDWWDMVCNVKKLINEKKEDGKVFWQNLAGYKRQEALRPYLSSEEDRKKGKKFARYQLGDLLLHLEKKHGEDWGKVYDEAWERIDKKVEGLSKHIKLEEERRSEDAQSKAALTDWLRAKASFVIEGLKEADKDEFCRCELKLQKWYGDLRGKPFAIEAENSILDISGFSKQYNCAFIWQKDGVKKLNLYLIINYFKGGKLRFKKIKPEAFEANRFYTVINKKSGEIVPMEVNFNFDDPNLIILPLAFGKRQGREFIWNDLLSLETGSLKLANGRVIEKTLYNRRTRQDEPALFVALTFERREVLDSSNIKPMNLIGVDRGENIPAVIALTDPEGCPLSRFKDSLGNPTHILRIGESYKEKQRTIQAKKEVEQRRAGGYSRKYASKAKNLADDMVRNTARDLLYYAVTQDAMLIFENLSRGFGRQGKRTFMAERQYTRMEDWLTAKLAYEGLPSKTYLSKTLAQYTSKTCSNCGFTITSADYDRMLEKLKKTATGWMTTINGKELKVEGQITYYNRYKRQNVVKDLSVELDRLSEESVNNDISSWTKGRSGEALSLLKKRFSHRPVQEKFVCLNCGFETHADEQAALNIARSWLFLRSQEYKKYQTNKTTGNTDKRAFVETWQSFYRKKLKEVWKPAV

SEQ ID NO: 30384 - protein, 979 aa, synthetic construct
  REGION 1..979: note = engineered CasX variant
QEIKRINKIRRRLVKDSNTKKAGKTRGPMKTLLVRVMTPDLRERLENLRKKPENIPQPISNTSRANLNKLLTDYTEMKKAILHVYWEEFQKDPVGLMSRVAQPASKKIDQNKLKPEMDEKGNLTTAGFACSQCGQPLFVYKLEQVSEKGKAYTNYFGRCNVAEHEKLILLAQLKPEKDSDEAVTYSLGKFGQRALDFYSIHVTKESTHPVKPLAQIAGNRYASHPVGKALSDACMGTIASFLSKYQDIIIEHQKVVKGNQKRLESLRELAGKENLEYPSVTLPPQPHTKEGVDAYNEVIARVRMWVNLNLWQKLKLSRDDAKPLLRLKGFPSFPLVERQANEVDWWDMVCNVKKLINEKKEDGKVFWQNLAGYKRQEALRPYLSSEEDRKKGKKFARYQLGDLLLHLEKKHGEDWGKVYDEAWERIDKKVEGLSKHIKLEEERRSEDAQSKAALTDWLRAKASFVIEGLKEADKDEFCRCELKLQKWYGDLRGKPFAIEAENSILDISGFSKQYNCAFIWQKDGVKKLNLYLIINYFKGGKLRFKKIKPEAFEANRFYTVINKKSGEIVPMEVNFNFDDPNLIILPLAFGKRQGREFIWNDLLSLETGSLKLANGRVIEKTLYNRRTRQDEPALFVALTFERREVLDSSNIKPMNLIGVDRGENIPAVIALTDPEGCPLSRFKDSLGNPTHILRIGESYKEKQRTIQAKKEVEQRRAGGYSRKYASKAKNLADDMVRNTARDLLYYAVTQDAMLIFENLSRGFGRQGKRTFMAERQYTRMEDWLTAKLAYEGLPSKTYLSKTLAQYTSKTCSNCGFTITSADYDRMLEKLKKTATGWMTTINGKELKVEGQITYYNRYKRQNVVKDLSVELDRLSEESVNNDISSWTKGRSGEALSLLKKRFSHRPVQEKFVCLNCGFETHADEQAALNIARSWLFLRSQEYKKYQTNKTTGNTDKRAFVETWQSFYRKKLKEVWKPAV

SEQ ID NO: 30385 - protein, 979 aa, synthetic construct
  REGION 1..979: note = engineered CasX variant
QEIKRINKIRRRLVKDSNTKKAGKTRGPMKTLLVRVMTPDLRERLENLRKKPENIPQPISNTSRANLNKLLTDYTEMKKAILHVYWEEFQKDPVGLMSRVAQPASKKIDQNKLKPEMDEKGNLTTAGFACSQCGQPLFVYKLEQVSEKGKAYTNYFGRCNVAEHEKLILLAQLKPEKDSDEAVTYSLGKFGQRALDFYSIHVTKESTHPVKPLAQIAGNRYASSPVGKALSDACMGTIASFLSKYQDIIIEHQKVVKGNQKRLESLRELAGKENLEYPSVTLPPQPHTKEGVDAYNEVIARVRMWVNLNLWQKLKLSRDDAKPLLRLKGFPSFPLVERQANEVDWWDMVCNVKKLINEKKEDGKVFWQNLAGYKRQEALRPYLSSEEDRKKGKKFARYQLGDLLLHLEKKHGEDWGKVYDEAWERIDKKVEGLSKHIKLEEERRSEDAQSKAALTDWLRAKASFVIEGLKEADKDEFCRCELKLQKWYGDLRGKPFAIEAENSILDISGFSKQYNCAFIWQKDGVKKLNLYLIINYFKGGKLRFKKIKPEAFEANRFYTVINKKSGEIVPMEVNFNFDDPNLIILPLAFGKRQGREFIWNDLLSLETGSLKLANGRVIEKTLYNRRTRQDEPALFVALTFERREVLDSSNIKPMNLIGVDRGENIPAVIALTDPEGCPLSRFKDSLGNPTHILRIGESYKEKQRTIQAKKEVEQRRAGGYSRKYASKAKNLADDMVRNTARDLLYYAVTQDAMLIFENLSRGFGRQGKRTFMAERQYTRMEDWLTAKLAYEGLPSKTYLSKTLAQYTSKTCSNCGFTITSADYDRMLEKLKKTATGWMTTINGKELKVEGQITYYNRYKRQNVVKDLSVELDRLSEESVNNDISSWTKGRSGEALSLLKKRFSHRPVQEKFVCLNCGFETHADEQAALNIARSWLFLRSQEYKKYQTNKTTGNTDKRAFVETWQSFYRKKLKEVWKPAV

SEQ ID NO: 30386 - protein, 979 aa, synthetic construct
  REGION 1..979: note = engineered CasX variant
QEIKRINKIRRRLVKDSNTKKAGKTRGPMKTLLVRVMTPDLRERLENLRKKPENIPQPISNTSRANLNKLLTDYTEMKKAILHVYWEEFQKDPVGLMSRVAQPASKKIDQNKLKPEMDEKGNLTTAGFACSQCGQPLFVYKLEQVSEKGKAYTNYFGRCNVAEHEKLILLAQLKPEKDSDEAVTYSLGKFGQRALDFYSIHVTKESTHPVKPLAQIAGNRYASTPVGKALSDACMGTIASFLSKYQDIIIEHQKVVKGNQKRLESLRELAGKENLEYPSVTLPPQPHTKEGVDAYNEVIARVRMWVNLNLWQKLKLSRDDAKPLLRLKGFPSFPLVERQANEVDWWDMVCNVKKLINEKKEDGKVFWQNLAGYKRQEALRPYLSSEEDRKKGKKFARYQLGDLLLHLEKKHGEDWGKVYDEAWERIDKKVEGLSKHIKLEEERRSEDAQSKAALTDWLRAKASFVIEGLKEADKDEFCRCELKLQKWYGDLRGKPFAIEAENSILDISGFSKQYNCAFIWQKDGVKKLNLYLIINYFKGGKLRFKKIKPEAFEANRFYTVINKKSGEIVPMEVNFNFDDPNLIILPLAFGKRQGREFIWNDLLSLETGSLKLANGRVIEKTLYNRRTRQDEPALFVALTFERREVLDSSNIKPMNLIGVDRGENIPAVIALTDPEGCPLSRFKDSLGNPTHILRIGESYKEKQRTIQAKKEVEQRRAGGYSRKYASKAKNLADDMVRNTARDLLYYAVTQDAMLIFENLSRGFGRQGKRTFMAERQYTRMEDWLTAKLAYEGLPSKTYLSKTLAQYTSKTCSNCGFTITSADYDRMLEKLKKTATGWMTTINGKELKVEGQITYYNRYKRQNVVKDLSVELDRLSEESVNNDISSWTKGRSGEALSLLKKRFSHRPVQEKFVCLNCGFETHADEQAALNIARSWLFLRSQEYKKYQTNKTTGNTDKRAFVETWQSFYRKKLKEVWKPAV

SEQ ID NO: 30387 - protein, 979 aa, synthetic construct
  REGION 1..979: note = engineered CasX variant
QEIKRINKIRRRLVKDSNTKKAGKTRGPMKTLLVRVMTPDLRERLENLRKKPENIPQPISNTSRANLNKLLTDYTEMKKAILHVYWEEFQKDPVGLMSRVAQPASKKIDQNKLKPEMDEKGNLTTAGFACSQCGQPLFVYKLEQVSEKGKAYTNYFGRCNVAEHEKLILLAQLKPEKDSDEAVTYSLGKFGQRALDFYSIHVTKESTHPVKPLAQIAGNRYASAPVGKALSDACMGTIASFLSKYQDIIIEHQKVVKGNQKRLESLRELAGKENLEYPSVTLPPQPHTKEGVDAYNEVIARVRMWVNLNLWQKLKLSRDDAKPLLRLKGFPSFPLVERQANEVDWWDMVCNVKKLINEKKEDGKVFWQNLAGYKRQEALRPYLSSEEDRKKGKKFARYQLGDLLLHLEKKHGEDWGKVYDEAWERIDKKVEGLSKHIKLEEERRSEDAQSKAALTDWLRAKASFVIEGLKEADKDEFCRCELKLQKWYGDLRGKPFAIEAENSILDISGFSKQYNCAFIWQKDGVKKLNLYLIINYFKGGKLRFKKIKPEAFEANRFYTVINKKSGEIVPMEVNFNFDDPNLIILPLAFGKRQGREFIWNDLLSLETGSLKLANGRVIEKTLYNRRTRQDEPALFVALTFERREVLDSSNIKPMNLIGVDRGENIPAVIALTDPEGCPLSRFKDSLGNPTHILRIGESYKEKQRTIQAKKEVEQRRAGGYSRKYASKAKNLADDMVRNTARDLLYYAVTQDAMLIFENLSRGFGRQGKRTFMAERQYTRMEDWLTAKLAYEGLPSKTYLSKTLAQYTSKTCSNCGFTITSADYDRMLEKLKKTATGWMTTINGKELKVEGQITYYNRYKRQNVVKDLSVELDRLSEESVNNDISSWTKGRSGEALSLLKKRFSHRPVQEKFVCLNCGFETHADEQAALNIARSWLFLRSQEYKKYQTNKTTGNTDKRAFVETWQSFYRKKLKEVWKPAV

SEQ ID NO: 30388 - protein, 979 aa, synthetic construct
  REGION 1..979: note = engineered CasX variant
QEIKRINKIRRRLVKDSNTKKAGKTRGPMKTLLVRVMTPDLRERLENLRKKPENIPQPISNTSRANLNKLLTDYTEMKKAILHVYWEEFQKDPVGLMSRVAQPASKKIDQNKLKPEMDEKGNLTTAGFACSQCGQPLFVYKLEQVSEKGKAYTNYFGRCNVAEHEKLILLAQLKPEKDSDEAVTYSLGKFGQRALDFYSIHVTKESTHPVKPLAQIAGNRYASVPVGKALSDACMGTIASFLSKYQDIIIEHQKVVKGNQKRLESLRELAGKENLEYPSVTLPPQPHTKEGVDAYNEVIARVRMWVNLNLWQKLKLSRDDAKPLLRLKGFPSFPLVERQANEVDWWDMVCNVKKLINEKKEDGKVFWQNLAGYKRQEALRPYLSSEEDRKKGKKFARYQLGDLLLHLEKKHGEDWGKVYDEAWERIDKKVEGLSKHIKLEEERRSEDAQSKAALTDWLRAKASFVIEGLKEADKDEFCRCELKLQKWYGDLRGKPFAIEAENSILDISGFSKQYNCAFIWQKDGVKKLNLYLIINYFKGGKLRFKKIKPEAFEANRFYTVINKKSGEIVPMEVNFNFDDPNLIILPLAFGKRQGREFIWNDLLSLETGSLKLANGRVIEKTLYNRRTRQDEPALFVALTFERREVLDSSNIKPMNLIGVDRGENIPAVIALTDPEGCPLSRFKDSLGNPTHILRIGESYKEKQRTIQAKKEVEQRRAGGYSRKYASKAKNLADDMVRNTARDLLYYAVTQDAMLIFENLSRGFGRQGKRTFMAERQYTRMEDWLTAKLAYEGLPSKTYLSKTLAQYTSKTCSNCGFTITSADYDRMLEKLKKTATGWMTTINGKELKVEGQITYYNRYKRQNVVKDLSVELDRLSEESVNNDISSWTKGRSGEALSLLKKRFSHRPVQEKFVCLNCGFETHADEQAALNIARSWLFLRSQEYKKYQTNKTTGNTDKRAFVETWQSFYRKKLKEVWKPAV

SEQ ID NO: 30389 - protein, 979 aa, synthetic construct
  REGION 1..979: note = engineered CasX variant
QEIKRINKIRRRLVKDSNTKKAGKTRGPMKTLLVRVMTPDLRERLENLRKKPENIPQPISNTSRANLNKLLTDYTEMKKAILHVYWEEFQKDPVGLMSRVAQPASKKIDQNKLKPEMDEKGNLTTAGFACSQCGQPLFVYKLEQVSEKGKAYTNYFGRCNVAEHEKLIKLAQLKPEKDSDEAVTYSLGKFGQRALDFYSIHVTKESTHPVKPLAQIAGNRYASGPVGKALSDACMGTIASFLSKYQDIIIEHQKVVKGNQKRLESLRELAGKENLEYPSVTLPPQPHTKEGVDAYNEVIARVRMWVNLNLWQKLKLSRDDAKPLLRLKGFPSFPLVERQANEVDWWDMVCNVKKLINEKKEDGKVFWQNLAGYKRQEALRPYLSSEEDRKKGKKFARYQLGDLLLHLEKKHGEDWGKVYDEAWERIDKKVEGLSKHIKLEEERRSEDAQSKAALTDWLRAKASFVIEGLKEADKDEFCRCELKLQKWYGDLRGKPFAIEAENSILDISGFSKQYNCAFIWQKDGVKKLNLYLIINYFKGGKLRFKKIKPEAFEANRFYTVINKKSGEIVPMEVNFNFDDPNLIILPLAFGKRQGREFIWNDLLSLETGSLKLANGRVIEKTLYNRRTRQDEPALFVALTFERREVLDSSNIKPMNLIGVDRGENIPAVIALTDPEGCPLSRFKDSLGNPTHILRIGESYKEKQRTIQAKKEVEQRRAGGYSRKYASKAKNLADDMVRNTARDLLYYAVTQDAMLIFENLSRGFGRQGKRTFMAERQYTRMEDWLTAKLAYEGLPSKTYLSKTLAQYTSKTCSNCGFTITSADYDRMLEKLKKTATGWMTTINGKELKVEGQITYYNRYKRQNVVKDLSVELDRLSEESVNNDISSWTKGRSGEALSLLKKRFSHRPVQEKFVCLNCGFETHADEQAALNIARSWLFLRSQEYKKYQTNKTTGNTDKRAFVETWQSFYRKKLKEVWKPAV

SEQ ID NO: 30390 - protein, 978 aa, synthetic construct
  REGION 1..978: note = engineered CasX variant
QEIKRINKIRRRLVKDSNTKKAGKTRGPMKTLLVRVMTPDLRERLENLRKKPENIPQPISNTSRANLNKLLTDYTEMKKAILHVYWEEFQKDPVGLMSRVAQPASKKIDQNKLKPEMDEKGNLTTAGFACSQCGQPLFVYKLEQVSEKGKAYTNYFGRCNVAEHEKLILLAQLKPEKDSDEAVTYSLGKFGQRALDFYSIHVTKESTHPVKPLAQIAGNRYASPVGKALSDACMGTIASFLSKYQDIIIEHQKVVKGNQKRLESLRELAGKENLEYPSVTLPPQPHTKEGVDAYNEVIARVRMWVNLNLWQKLKLSRDDAKPLLRLKGFPSFPLVERQANEVDWWDMVCNVKKLINEKKEDGKVFWQNLAGYKRQEALRPYLSSEEDRKKGKKFARYQLGDLLLHLEKKHGEDWGKVYDEAWERIDKKVEGLSKHIKLEEERRSEDAQSKAALTDWLRAKASFVIEGLKEADKDEFCRCELKLQKWYGDLRGKPFAIEAENSILDISGFSKQYNCAFIWQKDGVKKLNLYLIINYFKGGKLRFKKIKPEAFEANRFYTVINKKSGEIVPMEVNFNFDDPNLIILPLAFGKRQGREFIWNDLLSLETGSLKLANGRVIEKTLYNRRTRQDEPALFVALTFERREVLDSSNIKPMNLIGVDRGENIPAVIALTDPEGCPLSRFKDSLGNPTHILRIGESYKEKQRTIQAKKEVEQRRAGGYSRKYASKAKNLADDMVRNTARDLLYYAVTQDAMLIFENLSRGFGRQGKRTFMAERQYTRMEDWLTAKLAYEGLPSKTYLSKTLAQYTSKTCSNCGFTITSADYDRMLEKLKKTATGWMTTINGKELKVEGQITYYNRYKRQNVVKDLSVELDRLSEESVNNDISSWTKGRSGEALSLLKKRFSHRPVQEKFVCLNCGFETHADEQAALNIARSWLFLRSQEYKKYQTNKTTGNTDKRAFVETWQSFYRKKLKEVWKPAV

SEQ ID NO: 30391 - protein, 979 aa, synthetic construct
  REGION 1..979: note = engineered CasX variant
QEIKRINKIRRRLVKDSNTKKAGKTRGPMKTLLVRVMTPDLRERLENLRKKPENIPQPISNTSRANLNKLLTDYTEMKKAILHVYWEEFQKDPVGLMSRVAQPASKKIDQNKLKPEMDEKGNLTTAGFACSQCGQPLFVYKLEQVSEKGKAYTNYFGRCNVAEHEKLILLAQLKPEKDSDEAVTYSLGKFGQRALDFYSIHVTKESTHPVKPLAQIAGNRYASYPVGKALSDACMGTIASFLSKYQDIIIEHQKVVKGNQKRLESLRELAGKENLEYPSVTLPPQPHTKEGVDAYNEVIARVRMWVNLNLWQKLKLSRDDAKPLLRLKGFPSFPLVERQANEVDWWDMVCNVKKLINEKKEDGKVFWQNLAGYKRQEALRPYLSSEEDRKKGKKFARYQLGDLLLHLEKKHGEDWGKVYDEAWERIDKKVEGLSKHIKLEEERRSEDAQSKAALTDWLRAKASFVIEGLKEADKDEFCRCELKLQKWYGDLRGKPFAIEAENSILDISGFSKQYNCAFIWQKDGVKKLNLYLIINYFKGGKLRFKKIKPEAFEANRFYTVINKKSGEIVPMEVNFNFDDPNLIILPLAFGKRQGREFIWNDLLSLETGSLKLANGRVIEKTLYNRRTRQDEPALFVALTFERREVLDSSNIKPMNLIGVDRGENIPAVIALTDPEGCPLSRFKDSLGNPTHILRIGESYKEKQRTIQAKKEVEQRRAGGYSRKYASKAKNLADDMVRNTARDLLYYAVTQDAMLIFENLSRGFGRQGKRTFMAERQYTRMEDWLTAKLAYEGLPSKTYLSKTLAQYTSKTCSNCGFTITSADYDRVLEKLKKTATGWMTTINGKELKVEGQITYYNRYKRQNVVKDLSVELDRLSEESVNNDISSWTKGRQGEALSLLKKRFSHRPVQEKFVCLNCGFETHADEQAALNIARSWLFLRSQEYKKYQTNKTTGNTDKRAFVETWQSFYRKKLKEVWKPAV

SEQ ID NO: 30392 - protein, 979 aa, synthetic construct
  REGION 1..979: note = engineered CasX variant
QEIKRINKIRRRLVKDSNTKKAGKTRGPMKTLLVRVMTPDLRERLENLRKKPENIPQPISNTSRANLNKLLTDYTEMKKAILHVYWEEFQKDPVGLMSRVAQPASKKIDQNKLKPEMDEKGNLTTAGFACSQCGQPLFVYKLEQVSEKGKAYTNYFGRCNVAEHEKLILLAQLKPEKDSDEAVTYSLGKFGQRALDFYSIHVTKESTHPVKPLAQIAGNRYASHPVGKALSDACMGTIASFLSKYQDIIIEHQKVVKGNQKRLESLRELAGKENLEYPSVTLPPQPHTKEGVDAYNEVIARVRMWVNLNLWQKLKLSRDDAKPLLRLKGFPSFPLVERQANEVDWWDMVCNVKKLINEKKEDGKVFWQNLAGYKRQEALRPYLSSEEDRKKGKKFARYQLGDLLLHLEKKHGEDWGKVYDEAWERIDKKVEGLSKHIKLEEERRSEDAQSKAALTDWLRAKASFVIEGLKEADKDEFCRCELKLQKWYGDLRGKPFAIEAENSILDISGFSKQYNCAFIWQKDGVKKLNLYLIINYFKGGKLRFKKIKPEAFEANRFYTVINKKSGEIVPMEVNFNFDDPNLIILPLAFGKRQGREFIWNDLLSLETGSLKLANGRVIEKTLYNRRTRQDEPALFVALTFERREVLDSSNIKPMNLIGVDRGENIPAVIALTDPEGCPLSRFKDSLGNPTHILRIGESYKEKQRTIQAKKEVEQRRAGGYSRKYASKAKNLADDMVRNTARDLLYYAVTQDAMLIFENLSRGFGRQGKRTFMAERQYTRMEDWLTAKLAYEGLPSKTYLSKTLAQYTSKTCSNCGFTITSADYDRVLEKLKKTATGWMTTINGKELKVEGQITYYNRYKRQNVVKDLSVELDRLSEESVNNDISSWTKGRQGEALSLLKKRFSHRPVQEKFVCLNCGFETHADEQAALNIARSWLFLRSQEYKKYQTNKTTGNTDKRAFVETWQSFYRKKLKEVWKPAV

SEQ ID NO: 30393 - protein, 979 aa, synthetic construct
  REGION 1..979: note = engineered CasX variant
QEIKRINKIRRRLVKDSNTKKAGKTRGPMKTLLVRVMTPDLRERLENLRKKPENIPQPISNTSRANLNKLLTDYTEMKKAILHVYWEEFQKDPVGLMSRVAQPASKKIDQNKLKPEMDEKGNLTTAGFACSQCGQPLFVYKLEQVSEKGKAYTNYFGRCNVAEHEKLILLAQLKPEKDSDEAVTYSLGKFGQRALDFYSIHVTKESTHPVKPLAQIAGNRYASSPVGKALSDACMGTIASFLSKYQDIIIEHQKVVKGNQKRLESLRELAGKENLEYPSVTLPPQPHTKEGVDAYNEVIARVRMWVNLNLWQKLKLSRDDAKPLLRLKGFPSFPLVERQANEVDWWDMVCNVKKLINEKKEDGKVFWQNLAGYKRQEALRPYLSSEEDRKKGKKFARYQLGDLLLHLEKKHGEDWGKVYDEAWERIDKKVEGLSKHIKLEEERRSEDAQSKAALTDWLRAKASFVIEGLKEADKDEFCRCELKLQKWYGDLRGKPFAIEAENSILDISGFSKQYNCAFIWQKDGVKKLNLYLIINYFKGGKLRFKKIKPEAFEANRFYTVINKKSGEIVPMEVNFNFDDPNLIILPLAFGKRQGREFIWNDLLSLETGSLKLANGRVIEKTLYNRRTRQDEPALFVALTFERREVLDSSNIKPMNLIGVDRGENIPAVIALTDPEGCPLSRFKDSLGNPTHILRIGESYKEKQRTIQAKKEVEQRRAGGYSRKYASKAKNLADDMVRNTARDLLYYAVTQDAMLIFENLSRGFGRQGKRTFMAERQYTRMEDWLTAKLAYEGLPSKTYLSKTLAQYTSKTCSNCGFTITSADYDRVLEKLKKTATGWMTTINGKELKVEGQITYYNRYKRQNVVKDLSVELDRLSEESVNNDISSWTKGRQGEALSLLKKRFSHRPVQEKFVCLNCGFETHADEQAALNIARSWLFLRSQEYKKYQTNKTTGNTDKRAFVETWQSFYRKKLKEVWKPAV

SEQ ID NO: 30394 - protein, 979 aa, synthetic construct
  REGION 1..979: note = engineered CasX variant
QEIKRINKIRRRLVKDSNTKKAGKTRGPMKTLLVRVMTPDLRERLENLRKKPENIPQPISNTSRANLNKLLTDYTEMKKAILHVYWEEFQKDPVGLMSRVAQPASKKIDQNKLKPEMDEKGNLTTAGFACSQCGQPLFVYKLEQVSEKGKAYTNYFGRCNVAEHEKLILLAQLKPEKDSDEAVTYSLGKFGQRALDFYSIHVTKESTHPVKPLAQIAGNRYASTPVGKALSDACMGTIASFLSKYQDIIIEHQKVVKGNQKRLESLRELAGKENLEYPSVTLPPQPHTKEGVDAYNEVIARVRMWVNLNLWQKLKLSRDDAKPLLRLKGFPSFPLVERQANEVDWWDMVCNVKKLINEKKEDGKVFWQNLAGYKRQEALRPYLSSEEDRKKGKKFARYQLGDLLLHLEKKHGEDWGKVYDEAWERIDKKVEGLSKHIKLEEERRSEDAQSKAALTDWLRAKASFVIEGLKEADKDEFCRCELKLQKWYGDLRGKPFAIEAENSILDISGFSKQYNCAFIWQKDGVKKLNLYLIINYFKGGKLRFKKIKPEAFEANRFYTVINKKSGEIVPMEVNFNFDDPNLIILPLAFGKRQGREFIWNDLLSLETGSLKLANGRVIEKTLYNRRTRQDEPALFVALTFERREVLDSSNIKPMNLIGVDRGENIPAVIALTDPEGCPLSRFKDSLGNPTHILRIGESYKEKQRTIQAKKEVEQRRAGGYSRKYASKAKNLADDMVRNTARDLLYYAVTQDAMLIFENLSRGFGRQGKRTFMAERQYTRMEDWLTAKLAYEGLPSKTYLSKTLAQYTSKTCSNCGFTITSADYDRVLEKLKKTATGWMTTINGKELKVEGQITYYNRYKRQNVVKDLSVELDRLSEESVNNDISSWTKGRQGEALSLLKKRFSHRPVQEKFVCLNCGFETHADEQAALNIARSWLFLRSQEYKKYQTNKTTGNTDKRAFVETWQSFYRKKLKEVWKPAV

SEQ ID NO: 30395 - protein, 979 aa, synthetic construct
  REGION 1..979: note = engineered CasX variant
QEIKRINKIRRRLVKDSNTKKAGKTRGPMKTLLVRVMTPDLRERLENLRKKPENIPQPISNTSRANLNKLLTDYTEMKKAILHVYWEEFQKDPVGLMSRVAQPASKKIDQNKLKPEMDEKGNLTTAGFACSQCGQPLFVYKLEQVSEKGKAYTNYFGRCNVAEHEKLILLAQLKPEKDSDEAVTYSLGKFGQRALDFYSIHVTKESTHPVKPLAQIAGNRYASAPVGKALSDACMGTIASFLSKYQDIIIEHQKVVKGNQKRLESLRELAGKENLEYPSVTLPPQPHTKEGVDAYNEVIARVRMWVNLNLWQKLKLSRDDAKPLLRLKGFPSFPLVERQANEVDWWDMVCNVKKLINEKKEDGKVFWQNLAGYKRQEALRPYLSSEEDRKKGKKFARYQLGDLLLHLEKKHGEDWGKVYDEAWERIDKKVEGLSKHIKLEEERRSEDAQSKAALTDWLRAKASFVIEGLKEADKDEFCRCELKLQKWYGDLRGKPFAIEAENSILDISGFSKQYNCAFIWQKDGVKKLNLYLIINYFKGGKLRFKKIKPEAFEANRFYTVINKKSGEIVPMEVNFNFDDPNLIILPLAFGKRQGREFIWNDLLSLETGSLKLANGRVIEKTLYNRRTRQDEPALFVALTFERREVLDSSNIKPMNLIGVDRGENIPAVIALTDPEGCPLSRFKDSLGNPTHILRIGESYKEKQRTIQAKKEVEQRRAGGYSRKYASKAKNLADDMVRNTARDLLYYAVTQDAMLIFENLSRGFGRQGKRTFMAERQYTRMEDWLTAKLAYEGLPSKTYLSKTLAQYTSKTCSNCGFTITSADYDRVLEKLKKTATGWMTTINGKELKVEGQITYYNRYKRQNVVKDLSVELDRLSEESVNNDISSWTKGRQGEALSLLKKRFSHRPVQEKFVCLNCGFETHADEQAALNIARSWLFLRSQEYKKYQTNKTTGNTDKRAFVETWQSFYRKKLKEVWKPAV

SEQ ID NO: 30396 - protein, 979 aa, synthetic construct
  REGION 1..979: note = engineered CasX variant
QEIKRINKIRRRLVKDSNTKKAGKTRGPMKTLLVRVMTPDLRERLENLRKKPENIPQPISNTSRANLNKLLTDYTEMKKAILHVYWEEFQKDPVGLMSRVAQPASKKIDQNKLKPEMDEKGNLTTAGFACSQCGQPLFVYKLEQVSEKGKAYTNYFGRCNVAEHEKLILLAQLKPEKDSDEAVTYSLGKFGQRALDFYSIHVTKESTHPVKPLAQIAGNRYASVPVGKALSDACMGTIASFLSKYQDIIIEHQKVVKGNQKRLESLRELAGKENLEYPSVTLPPQPHTKEGVDAYNEVIARVRMWVNLNLWQKLKLSRDDAKPLLRLKGFPSFPLVERQANEVDWWDMVCNVKKLINEKKEDGKVFWQNLAGYKRQEALRPYLSSEEDRKKGKKFARYQLGDLLLHLEKKHGEDWGKVYDEAWERIDKKVEGLSKHIKLEEERRSEDAQSKAALTDWLRAKASFVIEGLKEADKDEFCRCELKLQKWYGDLRGKPFAIEAENSILDISGFSKQYNCAFIWQKDGVKKLNLYLIINYFKGGKLRFKKIKPEAFEANRFYTVINKKSGEIVPMEVNFNFDDPNLIILPLAFGKRQGREFIWNDLLSLETGSLKLANGRVIEKTLYNRRTRQDEPALFVALTFERREVLDSSNIKPMNLIGVDRGENIPAVIALTDPEGCPLSRFKDSLGNPTHILRIGESYKEKQRTIQAKKEVEQRRAGGYSRKYASKAKNLADDMVRNTARDLLYYAVTQDAMLIFENLSRGFGRQGKRTFMAERQYTRMEDWLTAKLAYEGLPSKTYLSKTLAQYTSKTCSNCGFTITSADYDRVLEKLKKTATGWMTTINGKELKVEGQITYYNRYKRQNVVKDLSVELDRLSEESVNNDISSWTKGRQGEALSLLKKRFSHRPVQEKFVCLNCGFETHADEQAALNIARSWLFLRSQEYKKYQTNKTTGNTDKRAFVETWQSFYRKKLKEVWKPAV

SEQ ID NO: 30397 - protein, 979 aa, synthetic construct
  REGION 1..979: note = engineered CasX variant
QEIKRINKIRRRLVKDSNTKKAGKTRGPMKTLLVRVMTPDLRERLENLRKKPENIPQPISNTSRANLNKLLTDYTEMKKAILHVYWEEFQKDPVGLMSRVAQPASKKIDQNKLKPEMDEKGNLTTAGFACSQCGQPLFVYKLEQVSEKGKAYTNYFGRCNVAEHEKLIKLAQLKPEKDSDEAVTYSLGKFGQRALDFYSIHVTKESTHPVKPLAQIAGNRYASGPVGKALSDACMGTIASFLSKYQDIIIEHQKVVKGNQKRLESLRELAGKENLEYPSVTLPPQPHTKEGVDAYNEVIARVRMWVNLNLWQKLKLSRDDAKPLLRLKGFPSFPLVERQANEVDWWDMVCNVKKLINEKKEDGKVFWQNLAGYKRQEALRPYLSSEEDRKKGKKFARYQLGDLLLHLEKKHGEDWGKVYDEAWERIDKKVEGLSKHIKLEEERRSEDAQSKAALTDWLRAKASFVIEGLKEADKDEFCRCELKLQKWYGDLRGKPFAIEAENSILDISGFSKQYNCAFIWQKDGVKKLNLYLIINYFKGGKLRFKKIKPEAFEANRFYTVINKKSGEIVPMEVNFNFDDPNLIILPLAFGKRQGREFIWNDLLSLETGSLKLANGRVIEKTLYNRRTRQDEPALFVALTFERREVLDSSNIKPMNLIGVDRGENIPAVIALTDPEGCPLSRFKDSLGNPTHILRIGESYKEKQRTIQAKKEVEQRRAGGYSRKYASKAKNLADDMVRNTARDLLYYAVTQDAMLIFENLSRGFGRQGKRTFMAERQYTRMEDWLTAKLAYEGLPSKTYLSKTLAQYTSKTCSNCGFTITSADYDRVLEKLKKTATGWMTTINGKELKVEGQITYYNRYKRQNVVKDLSVELDRLSEESVNNDISSWTKGRQGEALSLLKKRFSHRPVQEKFVCLNCGFETHADEQAALNIARSWLFLRSQEYKKYQTNKTTGNTDKRAFVETWQSFYRKKLKEVWKPAV

SEQ ID NO: 30398 - protein, 978 aa, synthetic construct
  REGION 1..978: note = engineered CasX variant
QEIKRINKIRRRLVKDSNTKKAGKTRGPMKTLLVRVMTPDLRERLENLRKKPENIPQPISNTSRANLNKLLTDYTEMKKAILHVYWEEFQKDPVGLMSRVAQPASKKIDQNKLKPEMDEKGNLTTAGFACSQCGQPLFVYKLEQVSEKGKAYTNYFGRCNVAEHEKLILLAQLKPEKDSDEAVTYSLGKFGQRALDFYSIHVTKESTHPVKPLAQIAGNRYASPVGKALSDACMGTIASFLSKYQDIIIEHQKVVKGNQKRLESLRELAGKENLEYPSVTLPPQPHTKEGVDAYNEVIARVRMWVNLNLWQKLKLSRDDAKPLLRLKGFPSFPLVERQANEVDWWDMVCNVKKLINEKKEDGKVFWQNLAGYKRQEALRPYLSSEEDRKKGKKFARYQLGDLLLHLEKKHGEDWGKVYDEAWERIDKKVEGLSKHIKLEEERRSEDAQSKAALTDWLRAKASFVIEGLKEADKDEFCRCELKLQKWYGDLRGKPFAIEAENSILDISGFSKQYNCAFIWQKDGVKKLNLYLIINYFKGGKLRFKKIKPEAFEANRFYTVINKKSGEIVPMEVNFNFDDPNLIILPLAFGKRQGREFIWNDLLSLETGSLKLANGRVIEKTLYNRRTRQDEPALFVALTFERREVLDSSNIKPMNLIGVDRGENIPAVIALTDPEGCPLSRFKDSLGNPTHILRIGESYKEKQRTIQAKKEVEQRRAGGYSRKYASKAKNLADDMVRNTARDLLYYAVTQDAMLIFENLSRGFGRQGKRTFMAERQYTRMEDWLTAKLAYEGLPSKTYLSKTLAQYTSKTCSNCGFTITSADYDRVLEKLKKTATGWMTTINGKELKVEGQITYYNRYKRQNVVKDLSVELDRLSEESVNNDISSWTKGRQGEALSLLKKRFSHRPVQEKFVCLNCGFETHADEQAALNIARSWLFLRSQEYKKYQTNKTTGNTDKRAFVETWQSFYRKKLKEVWKPAV

SEQ ID NO: 30399 - protein, 979 aa, synthetic construct
  REGION 1..979: note = engineered CasX variant
QEIKRINKIRRRLVKDSNTKKAGKTRGPMKTLLVRVMTPDLRERLENLRKKPENIPQPISNTSRANLNKLLTDYTEMKKAILHVYWEEFQKDPVGLMSRVAQPASKKIDQNKLKPEMDEKGNLTTAGFACSQCGQPLFVYKLEQVSEKGKAYTNYFGRCNVAEHEKLILLAQLKPEKDSDEAVTYSLGKFGQRALDFYSIHVTKESTHPVKPLAQIAGNRYASYPVGKALSDACMGTIASFLSKYQDIIIEHQKVVKGNQKRLESLRELAGKENLEYPSVTLPPQPHTKEGVDAYNEVIARVRMWVNLNLWQKLKLSRDDAKPLLRLKGFPSFPLVERQANEVDWWDMVCNVKKLINEKKEDGKVFWQNLAGYKRQEALRPYLSSEEDRKKGKKFARYQLGDLLLHLEKKHGEDWGKVYDEAWERIDKKVEGLSKHIKLEEERRSEDAQSKAALTDWLRAKASFVIEGLKEADKDEFCRCELKLQKWYGDLRGKPFAIEAENSILDISGFSKQYNCAFIWQKDGVKKLNLYLIINYFKGGKLRFKKIKPEAFEANRFYTVINKKSGEIVPMEVNFNFDDPNLIILPLAFGKRQGREFIWNDLLSLETGSLKLANGRVIEKTLYNRRTRQDEPALFVALTFERREVLDSSNIKPMNLIGVDRGENIPAVIALTDPEGCPLSRFKDSLGNPTHILRIGESYKEKQRTIQAKKEVEQRRAGGYSRKYASKAKNLADDMVRNTARDLLYYAVTQDAMLIFENLSRGFGRQGKRTFMAERQYTRMEDWLTAKLAYEGLPSKTYLSKTLAQYTSKTCSNCGFTITSADYDRVLEKLKKTATGWMTTINGKELKVEGQITYYNRYKRQNVVKDLSVELDRLSEESVNNDISSWTKGRSGEALSLLKKRFSHRPVQEKFVCLNCEFETHADEQAALNIARSWLFLRSQEYKKYQTNKTTGNTDKRAFVETWQSFYRKKLKEVWKPAV

SEQ ID NO: 30400 - protein, 979 aa, synthetic construct
  REGION 1..979: note = engineered CasX variant
QEIKRINKIRRRLVKDSNTKKAGKTRGPMKTLLVRVMTPDLRERLENLRKKPENIPQPISNTSRANLNKLLTDYTEMKKAILHVYWEEFQKDPVGLMSRVAQPASKKIDQNKLKPEMDEKGNLTTAGFACSQCGQPLFVYKLEQVSEKGKAYTNYFGRCNVAEHEKLILLAQLKPEKDSDEAVTYSLGKFGQRALDFYSIHVTKESTHPVKPLAQIAGNRYASHPVGKALSDACMGTIASFLSKYQDIIIEHQKVVKGNQKRLESLRELAGKENLEYPSVTLPPQPHTKEGVDAYNEVIARVRMWVNLNLWQKLKLSRDDAKPLLRLKGFPSFPLVERQANEVDWWDMVCNVKKLINEKKEDGKVFWQNLAGYKRQEALRPYLSSEEDRKKGKKFARYQLGDLLLHLEKKHGEDWGKVYDEAWERIDKKVEGLSKHIKLEEERRSEDAQSKAALTDWLRAKASFVIEGLKEADKDEFCRCELKLQKWYGDLRGKPFAIEAENSILDISGFSKQYNCAFIWQKDGVKKLNLYLIINYFKGGKLRFKKIKPEAFEANRFYTVINKKSGEIVPMEVNFNFDDPNLIILPLAFGKRQGREFIWNDLLSLETGSLKLANGRVIEKTLYNRRTRQDEPALFVALTFERREVLDSSNIKPMNLIGVDRGENIPAVIALTDPEGCPLSRFKDSLGNPTHILRIGESYKEKQRTIQAKKEVEQRRAGGYSRKYASKAKNLADDMVRNTARDLLYYAVTQDAMLIFENLSRGFGRQGKRTFMAERQYTRMEDWLTAKLAYEGLPSKTYLSKTLAQYTSKTCSNCGFTITSADYDRVLEKLKKTATGWMTTINGKELKVEGQITYYNRYKRQNVVKDLSVELDRLSEESVNNDISSWTKGRSGEALSLLKKRFSHRPVQEKFVCLNCEFETHADEQAALNIARSWLFLRSQEYKKYQTNKTTGNTDKRAFVETWQSFYRKKLKEVWKPAV

SEQ ID NO: 30401 - protein, 979 aa, synthetic construct
  REGION 1..979: note = engineered CasX variant
QEIKRINKIRRRLVKDSNTKKAGKTRGPMKTLLVRVMTPDLRERLENLRKKPENIPQPISNTSRANLNKLLTDYTEMKKAILHVYWEEFQKDPVGLMSRVAQPASKKIDQNKLKPEMDEKGNLTTAGFACSQCGQPLFVYKLEQVSEKGKAYTNYFGRCNVAEHEKLILLAQLKPEKDSDEAVTYSLGKFGQRALDFYSIHVTKESTHPVKPLAQIAGNRYASSPVGKALSDACMGTIASFLSKYQDIIIEHQKVVKGNQKRLESLRELAGKENLEYPSVTLPPQPHTKEGVDAYNEVIARVRMWVNLNLWQKLKLSRDDAKPLLRLKGFPSFPLVERQANEVDWWDMVCNVKKLINEKKEDGKVFWQNLAGYKRQEALRPYLSSEEDRKKGKKFARYQLGDLLLHLEKKHGEDWGKVYDEAWERIDKKVEGLSKHIKLEEERRSEDAQSKAALTDWLRAKASFVIEGLKEADKDEFCRCELKLQKWYGDLRGKPFAIEAENSILDISGFSKQYNCAFIWQKDGVKKLNLYLIINYFKGGKLRFKKIKPEAFEANRFYTVINKKSGEIVPMEVNFNFDDPNLIILPLAFGKRQGREFIWNDLLSLETGSLKLANGRVIEKTLYNRRTRQDEPALFVALTFERREVLDSSNIKPMNLIGVDRGENIPAVIALTDPEGCPLSRFKDSLGNPTHILRIGESYKEKQRTIQAKKEVEQRRAGGYSRKYASKAKNLADDMVRNTARDLLYYAVTQDAMLIFENLSRGFGRQGKRTFMAERQYTRMEDWLTAKLAYEGLPSKTYLSKTLAQYTSKTCSNCGFTITSADYDRVLEKLKKTATGWMTTINGKELKVEGQITYYNRYKRQNVVKDLSVELDRLSEESVNNDISSWTKGRSGEALSLLKKRFSHRPVQEKFVCLNCEFETHADEQAALNIARSWLFLRSQEYKKYQTNKTTGNTDKRAFVETWQSFYRKKLKEVWKPAV

SEQ ID NO: 30402 - protein, 979 aa, synthetic construct
  REGION 1..979: note = engineered CasX variant
QEIKRINKIRRRLVKDSNTKKAGKTRGPMKTLLVRVMTPDLRERLENLRKKPENIPQPISNTSRANLNKLLTDYTEMKKAILHVYWEEFQKDPVGLMSRVAQPASKKIDQNKLKPEMDEKGNLTTAGFACSQCGQPLFVYKLEQVSEKGKAYTNYFGRCNVAEHEKLILLAQLKPEKDSDEAVTYSLGKFGQRALDFYSIHVTKESTHPVKPLAQIAGNRYASTPVGKALSDACMGTIASFLSKYQDIIIEHQKVVKGNQKRLESLRELAGKENLEYPSVTLPPQPHTKEGVDAYNEVIARVRMWVNLNLWQKLKLSRDDAKPLLRLKGFPSFPLVERQANEVDWWDMVCNVKKLINEKKEDGKVFWQNLAGYKRQEALRPYLSSEEDRKKGKKFARYQLGDLLLHLEKKHGEDWGKVYDEAWERIDKKVEGLSKHIKLEEERRSEDAQSKAALTDWLRAKASFVIEGLKEADKDEFCRCELKLQKWYGDLRGKPFAIEAENSILDISGFSKQYNCAFIWQKDGVKKLNLYLIINYFKGGKLRFKKIKPEAFEANRFYTVINKKSGEIVPMEVNFNFDDPNLIILPLAFGKRQGREFIWNDLLSLETGSLKLANGRVIEKTLYNRRTRQDEPALFVALTFERREVLDSSNIKPMNLIGVDRGENIPAVIALTDPEGCPLSRFKDSLGNPTHILRIGESYKEKQRTIQAKKEVEQRRAGGYSRKYASKAKNLADDMVRNTARDLLYYAVTQDAMLIFENLSRGFGRQGKRTFMAERQYTRMEDWLTAKLAYEGLPSKTYLSKTLAQYTSKTCSNCGFTITSADYDRVLEKLKKTATGWMTTINGKELKVEGQITYYNRYKRQNVVKDLSVELDRLSEESVNNDISSWTKGRSGEALSLLKKRFSHRPVQEKFVCLNCEFETHADEQAALNIARSWLFLRSQEYKKYQTNKTTGNTDKRAFVETWQSFYRKKLKEVWKPAV

SEQ ID NO: 30403 - protein, 979 aa, synthetic construct
  REGION 1..979: note = engineered CasX variant
QEIKRINKIRRRLVKDSNTKKAGKTRGPMKTLLVRVMTPDLRERLENLRKKPENIPQPISNTSRANLNKLLTDYTEMKKAILHVYWEEFQKDPVGLMSRVAQPASKKIDQNKLKPEMDEKGNLTTAGFACSQCGQPLFVYKLEQVSEKGKAYTNYFGRCNVAEHEKLILLAQLKPEKDSDEAVTYSLGKFGQRALDFYSIHVTKESTHPVKPLAQIAGNRYASAPVGKALSDACMGTIASFLSKYQDIIIEHQKVVKGNQKRLESLRELAGKENLEYPSVTLPPQPHTKEGVDAYNEVIARVRMWVNLNLWQKLKLSRDDAKPLLRLKGFPSFPLVERQANEVDWWDMVCNVKKLINEKKEDGKVFWQNLAGYKRQEALRPYLSSEEDRKKGKKFARYQLGDLLLHLEKKHGEDWGKVYDEAWERIDKKVEGLSKHIKLEEERRSEDAQSKAALTDWLRAKASFVIEGLKEADKDEFCRCELKLQKWYGDLRGKPFAIEAENSILDISGFSKQYNCAFIWQKDGVKKLNLYLIINYFKGGKLRFKKIKPEAFEANRFYTVINKKSGEIVPMEVNFNFDDPNLIILPLAFGKRQGREFIWNDLLSLETGSLKLANGRVIEKTLYNRRTRQDEPALFVALTFERREVLDSSNIKPMNLIGVDRGENIPAVIALTDPEGCPLSRFKDSLGNPTHILRIGESYKEKQRTIQAKKEVEQRRAGGYSRKYASKAKNLADDMVRNTARDLLYYAVTQDAMLIFENLSRGFGRQGKRTFMAERQYTRMEDWLTAKLAYEGLPSKTYLSKTLAQYTSKTCSNCGFTITSADYDRVLEKLKKTATGWMTTINGKELKVEGQITYYNRYKRQNVVKDLSVELDRLSEESVNNDISSWTKGRSGEALSLLKKRFSHRPVQEKFVCLNCEFETHADEQAALNIARSWLFLRSQEYKKYQTNKTTGNTDKRAFVETWQSFYRKKLKEVWKPAV

SEQ ID NO: 30404 - protein, 979 aa, synthetic construct
  REGION 1..979: note = engineered CasX variant
QEIKRINKIRRRLVKDSNTKKAGKTRGPMKTLLVRVMTPDLRERLENLRKKPENIPQPISNTSRANLNKLLTDYTEMKKAILHVYWEEFQKDPVGLMSRVAQPASKKIDQNKLKPEMDEKGNLTTAGFACSQCGQPLFVYKLEQVSEKGKAYTNYFGRCNVAEHEKLILLAQLKPEKDSDEAVTYSLGKFGQRALDFYSIHVTKESTHPVKPLAQIAGNRYASVPVGKALSDACMGTIASFLSKYQDIIIEHQKVVKGNQKRLESLRELAGKENLEYPSVTLPPQPHTKEGVDAYNEVIARVRMWVNLNLWQKLKLSRDDAKPLLRLKGFPSFPLVERQANEVDWWDMVCNVKKLINEKKEDGKVFWQNLAGYKRQEALRPYLSSEEDRKKGKKFARYQLGDLLLHLEKKHGEDWGKVYDEAWERIDKKVEGLSKHIKLEEERRSEDAQSKAALTDWLRAKASFVIEGLKEADKDEFCRCELKLQKWYGDLRGKPFAIEAENSILDISGFSKQYNCAFIWQKDGVKKLNLYLIINYFKGGKLRFKKIKPEAFEANRFYTVINKKSGEIVPMEVNFNFDDPNLIILPLAFGKRQGREFIWNDLLSLETGSLKLANGRVIEKTLYNRRTRQDEPALFVALTFERREVLDSSNIKPMNLIGVDRGENIPAVIALTDPEGCPLSRFKDSLGNPTHILRIGESYKEKQRTIQAKKEVEQRRAGGYSRKYASKAKNLADDMVRNTARDLLYYAVTQDAMLIFENLSRGFGRQGKRTFMAERQYTRMEDWLTAKLAYEGLPSKTYLSKTLAQYTSKTCSNCGFTITSADYDRVLEKLKKTATGWMTTINGKELKVEGQITYYNRYKRQNVVKDLSVELDRLSEESVNNDISSWTKGRSGEALSLLKKRFSHRPVQEKFVCLNCEFETHADEQAALNIARSWLFLRSQEYKKYQTNKTTGNTDKRAFVETWQSFYRKKLKEVWKPAV

SEQ ID NO: 30405 - protein, 979 aa, synthetic construct
  REGION 1..979: note = engineered CasX variant
QEIKRINKIRRRLVKDSNTKKAGKTRGPMKTLLVRVMTPDLRERLENLRKKPENIPQPISNTSRANLNKLLTDYTEMKKAILHVYWEEFQKDPVGLMSRVAQPASKKIDQNKLKPEMDEKGNLTTAGFACSQCGQPLFVYKLEQVSEKGKAYTNYFGRCNVAEHEKLIKLAQLKPEKDSDEAVTYSLGKFGQRALDFYSIHVTKESTHPVKPLAQIAGNRYASGPVGKALSDACMGTIASFLSKYQDIIIEHQKVVKGNQKRLESLRELAGKENLEYPSVTLPPQPHTKEGVDAYNEVIARVRMWVNLNLWQKLKLSRDDAKPLLRLKGFPSFPLVERQANEVDWWDMVCNVKKLINEKKEDGKVFWQNLAGYKRQEALRPYLSSEEDRKKGKKFARYQLGDLLLHLEKKHGEDWGKVYDEAWERIDKKVEGLSKHIKLEEERRSEDAQSKAALTDWLRAKASFVIEGLKEADKDEFCRCELKLQKWYGDLRGKPFAIEAENSILDISGFSKQYNCAFIWQKDGVKKLNLYLIINYFKGGKLRFKKIKPEAFEANRFYTVINKKSGEIVPMEVNFNFDDPNLIILPLAFGKRQGREFIWNDLLSLETGSLKLANGRVIEKTLYNRRTRQDEPALFVALTFERREVLDSSNIKPMNLIGVDRGENIPAVIALTDPEGCPLSRFKDSLGNPTHILRIGESYKEKQRTIQAKKEVEQRRAGGYSRKYASKAKNLADDMVRNTARDLLYYAVTQDAMLIFENLSRGFGRQGKRTFMAERQYTRMEDWLTAKLAYEGLPSKTYLSKTLAQYTSKTCSNCGFTITSADYDRVLEKLKKTATGWMTTINGKELKVEGQITYYNRYKRQNVVKDLSVELDRLSEESVNNDISSWTKGRSGEALSLLKKRFSHRPVQEKFVCLNCEFETHADEQAALNIARSWLFLRSQEYKKYQTNKTTGNTDKRAFVETWQSFYRKKLKEVWKPAV

SEQ ID NO: 30406 - protein, 978 aa, synthetic construct
  REGION 1..978: note = engineered CasX variant
QEIKRINKIRRRLVKDSNTKKAGKTRGPMKTLLVRVMTPDLRERLENLRKKPENIPQPISNTSRANLNKLLTDYTEMKKAILHVYWEEFQKDPVGLMSRVAQPASKKIDQNKLKPEMDEKGNLTTAGFACSQCGQPLFVYKLEQVSEKGKAYTNYFGRCNVAEHEKLILLAQLKPEKDSDEAVTYSLGKFGQRALDFYSIHVTKESTHPVKPLAQIAGNRYASPVGKALSDACMGTIASFLSKYQDIIIEHQKVVKGNQKRLESLRELAGKENLEYPSVTLPPQPHTKEGVDAYNEVIARVRMWVNLNLWQKLKLSRDDAKPLLRLKGFPSFPLVERQANEVDWWDMVCNVKKLINEKKEDGKVFWQNLAGYKRQEALRPYLSSEEDRKKGKKFARYQLGDLLLHLEKKHGEDWGKVYDEAWERIDKKVEGLSKHIKLEEERRSEDAQSKAALTDWLRAKASFVIEGLKEADKDEFCRCELKLQKWYGDLRGKPFAIEAENSILDISGFSKQYNCAFIWQKDGVKKLNLYLIINYFKGGKLRFKKIKPEAFEANRFYTVINKKSGEIVPMEVNFNFDDPNLIILPLAFGKRQGREFIWNDLLSLETGSLKLANGRVIEKTLYNRRTRQDEPALFVALTFERREVLDSSNIKPMNLIGVDRGENIPAVIALTDPEGCPLSRFKDSLGNPTHILRIGESYKEKQRTIQAKKEVEQRRAGGYSRKYASKAKNLADDMVRNTARDLLYYAVTQDAMLIFENLSRGFGRQGKRTFMAERQYTRMEDWLTAKLAYEGLPSKTYLSKTLAQYTSKTCSNCGFTITSADYDRVLEKLKKTATGWMTTINGKELKVEGQITYYNRYKRQNVVKDLSVELDRLSEESVNNDISSWTKGRSGEALSLLKKRFSHRPVQEKFVCLNCEFETHADEQAALNIARSWLFLRSQEYKKYQTNKTTGNTDKRAFVETWQSFYRKKLKEVWKPAV

SEQ ID NO: 30407 - protein, 980 aa, synthetic construct
  REGION 1..980: note = engineered CasX variant
QEIKRINKIRRRLVKDSNTKKAGKTRGPMKTLLVRVMTPDLRERLENLRKKPENIPQPISNTSRANLNKLLTDYTEMKKAILHVYWEEFQKDPVGLMSRVAQPASKKIDQNKLKPEMDEKGNLTTAGFACSQCGQPLFVYKLEQVSEKGKAYTNYFGRCNVAEHEKLILLAQLKPEKDSDEAVTYSLGKFGQRALDFYSIHVTKESTHPVKPLAQIAGNRYASYPVGKALSDACMGTIASFLSKYQDIIIEHQKVVKGNQKRLESLRELAGKENLEYPSVTLPPQPHTKEGVDAYNEVIARVRMWVNLNLWQKLKLSRDDAKPLLRLKGFPSFPLVERQANEVDWWDMVCNVKKLINEKKEDGKVFWQNLAGYKRQEALRPYLSSEEDRKKGKKFARYQLGDLLLHLEKKHGEDWGKVYDEAWERIDKKVEGLSKHIKLEEERRSEDAQSKAALTDWLRAKASFVIEGLKEADKDEFCRCELKLQKWYGDLRGKPFAIEAENSILDISGFSKQYNCAFIWQKDGVKKLNLYLIINYFKGGKLRFKKIKPEAFEANRFYTVINKKSGEIVPMEVNFNFDDPNLIILPLAFGKRQGREFIWNDLLSLETGSLKLANGRVIEKTLYNRRTRQDEPALFVALTFERREVLDSSNIKPMNLIGVDRGENIPAVIALTDPEGCPLSRFKDSLGNPTHILRIGESYKEKQRTIQAKKEVEQRRAGGYSRKYASKAKNLADDMVRNTARDLLYYAVTQDAMLIFENLSRGFGRQGKRTFMAERQYTRMEDWLTAKLAYEGLPSKTYLSKTLAQYTSKTCSNCGFTITSADYDRVLEKLKKTATGWMTTINGKELKVEGQITYYNRYKRQNVVKDLSVELDRLSEESVNNDISSWTKGRSGEALSLLKKRFSHRPVQEKFVCLNCGFETHADEQAALNIARSWLFLRSQEYKKYQTNKTSTGNTDKRAFVETWQSFYRKKLKEVWKPAV

SEQ ID NO: 30408 - protein, 980 aa, synthetic construct
  REGION 1..980: note = engineered CasX variant
QEIKRINKIRRRLVKDSNTKKAGKTRGPMKTLLVRVMTPDLRERLENLRKKPENIPQPISNTSRANLNKLLTDYTEMKKAILHVYWEEFQKDPVGLMSRVAQPASKKIDQNKLKPEMDEKGNLTTAGFACSQCGQPLFVYKLEQVSEKGKAYTNYFGRCNVAEHEKLILLAQLKPEKDSDEAVTYSLGKFGQRALDFYSIHVTKESTHPVKPLAQIAGNRYASHPVGKALSDACMGTIASFLSKYQDIIIEHQKVVKGNQKRLESLRELAGKENLEYPSVTLPPQPHTKEGVDAYNEVIARVRMWVNLNLWQKLKLSRDDAKPLLRLKGFPSFPLVERQANEVDWWDMVCNVKKLINEKKEDGKVFWQNLAGYKRQEALRPYLSSEEDRKKGKKFARYQLGDLLLHLEKKHGEDWGKVYDEAWERIDKKVEGLSKHIKLEEERRSEDAQSKAALTDWLRAKASFVIEGLKEADKDEFCRCELKLQKWYGDLRGKPFAIEAENSILDISGFSKQYNCAFIWQKDGVKKLNLYLIINYFKGGKLRFKKIKPEAFEANRFYTVINKKSGEIVPMEVNFNFDDPNLIILPLAFGKRQGREFIWNDLLSLETGSLKLANGRVIEKTLYNRRTRQDEPALFVALTFERREVLDSSNIKPMNLIGVDRGENIPAVIALTDPEGCPLSRFKDSLGNPTHILRIGESYKEKQRTIQAKKEVEQRRAGGYSRKYASKAKNLADDMVRNTARDLLYYAVTQDAMLIFENLSRGFGRQGKRTFMAERQYTRMEDWLTAKLAYEGLPSKTYLSKTLAQYTSKTCSNCGFTITSADYDRVLEKLKKTATGWMTTINGKELKVEGQITYYNRYKRQNVVKDLSVELDRLSEESVNNDISSWTKGRSGEALSLLKKRFSHRPVQEKFVCLNCGFETHADEQAALNIARSWLFLRSQEYKKYQTNKTSTGNTDKRAFVETWQSFYRKKLKEVWKPAV

SEQ ID NO: 30409 - protein, 980 aa, synthetic construct
  REGION 1..980: note = engineered CasX variant
QEIKRINKIRRRLVKDSNTKKAGKTRGPMKTLLVRVMTPDLRERLENLRKKPENIPQPISNTSRANLNKLLTDYTEMKKAILHVYWEEFQKDPVGLMSRVAQPASKKIDQNKLKPEMDEKGNLTTAGFACSQCGQPLFVYKLEQVSEKGKAYTNYFGRCNVAEHEKLILLAQLKPEKDSDEAVTYSLGKFGQRALDFYSIHVTKESTHPVKPLAQIAGNRYASSPVGKALSDACMGTIASFLSKYQDIIIEHQKVVKGNQKRLESLRELAGKENLEYPSVTLPPQPHTKEGVDAYNEVIARVRMWVNLNLWQKLKLSRDDAKPLLRLKGFPSFPLVERQANEVDWWDMVCNVKKLINEKKEDGKVFWQNLAGYKRQEALRPYLSSEEDRKKGKKFARYQLGDLLLHLEKKHGEDWGKVYDEAWERIDKKVEGLSKHIKLEEERRSEDAQSKAALTDWLRAKASFVIEGLKEADKDEFCRCELKLQKWYGDLRGKPFAIEAENSILDISGFSKQYNCAFIWQKDGVKKLNLYLIINYFKGGKLRFKKIKPEAFEANRFYTVINKKSGEIVPMEVNFNFDDPNLIILPLAFGKRQGREFIWNDLLSLETGSLKLANGRVIEKTLYNRRTRQDEPALFVALTFERREVLDSSNIKPMNLIGVDRGENIPAVIALTDPEGCPLSRFKDSLGNPTHILRIGESYKEKQRTIQAKKEVEQRRAGGYSRKYASKAKNLADDMVRNTARDLLYYAVTQDAMLIFENLSRGFGRQGKRTFMAERQYTRMEDWLTAKLAYEGLPSKTYLSKTLAQYTSKTCSNCGFTITSADYDRVLEKLKKTATGWMTTINGKELKVEGQITYYNRYKRQNVVKDLSVELDRLSEESVNNDISSWTKGRSGEALSLLKKRFSHRPVQEKFVCLNCGFETHADEQAALNIARSWLFLRSQEYKKYQTNKTSTGNTDKRAFVETWQSFYRKKLKEVWKPAV

SEQ ID NO: 30410 - protein, 980 aa, synthetic construct
  REGION 1..980: note = engineered CasX variant
QEIKRINKIRRRLVKDSNTKKAGKTRGPMKTLLVRVMTPDLRERLENLRKKPENIPQPISNTSRANLNKLLTDYTEMKKAILHVYWEEFQKDPVGLMSRVAQPASKKIDQNKLKPEMDEKGNLTTAGFACSQCGQPLFVYKLEQVSEKGKAYTNYFGRCNVAEHEKLILLAQLKPEKDSDEAVTYSLGKFGQRALDFYSIHVTKESTHPVKPLAQIAGNRYASTPVGKALSDACMGTIASFLSKYQDIIIEHQKVVKGNQKRLESLRELAGKENLEYPSVTLPPQPHTKEGVDAYNEVIARVRMWVNLNLWQKLKLSRDDAKPLLRLKGFPSFPLVERQANEVDWWDMVCNVKKLINEKKEDGKVFWQNLAGYKRQEALRPYLSSEEDRKKGKKFARYQLGDLLLHLEKKHGEDWGKVYDEAWERIDKKVEGLSKHIKLEEERRSEDAQSKAALTDWLRAKASFVIEGLKEADKDEFCRCELKLQKWYGDLRGKPFAIEAENSILDISGFSKQYNCAFIWQKDGVKKLNLYLIINYFKGGKLRFKKIKPEAFEANRFYTVINKKSGEIVPMEVNFNFDDPNLIILPLAFGKRQGREFIWNDLLSLETGSLKLANGRVIEKTLYNRRTRQDEPALFVALTFERREVLDSSNIKPMNLIGVDRGENIPAVIALTDPEGCPLSRFKDSLGNPTHILRIGESYKEKQRTIQAKKEVEQRRAGGYSRKYASKAKNLADDMVRNTARDLLYYAVTQDAMLIFENLSRGFGRQGKRTFMAERQYTRMEDWLTAKLAYEGLPSKTYLSKTLAQYTSKTCSNCGFTITSADYDRVLEKLKKTATGWMTTINGKELKVEGQITYYNRYKRQNVVKDLSVELDRLSEESVNNDISSWTKGRSGEALSLLKKRFSHRPVQEKFVCLNCGFETHADEQAALNIARSWLFLRSQEYKKYQTNKTSTGNTDKRAFVETWQSFYRKKLKEVWKPAV

SEQ ID NO: 30411 - protein, 980 aa, synthetic construct
  REGION 1..980: note = engineered CasX variant
QEIKRINKIRRRLVKDSNTKKAGKTRGPMKTLLVRVMTPDLRERLENLRKKPENIPQPISNTSRANLNKLLTDYTEMKKAILHVYWEEFQKDPVGLMSRVAQPASKKIDQNKLKPEMDEKGNLTTAGFACSQCGQPLFVYKLEQVSEKGKAYTNYFGRCNVAEHEKLILLAQLKPEKDSDEAVTYSLGKFGQRALDFYSIHVTKESTHPVKPLAQIAGNRYASAPVGKALSDACMGTIASFLSKYQDIIIEHQKVVKGNQKRLESLRELAGKENLEYPSVTLPPQPHTKEGVDAYNEVIARVRMWVNLNLWQKLKLSRDDAKPLLRLKGFPSFPLVERQANEVDWWDMVCNVKKLINEKKEDGKVFWQNLAGYKRQEALRPYLSSEEDRKKGKKFARYQLGDLLLHLEKKHGEDWGKVYDEAWERIDKKVEGLSKHIKLEEERRSEDAQSKAALTDWLRAKASFVIEGLKEADKDEFCRCELKLQKWYGDLRGKPFAIEAENSILDISGFSKQYNCAFIWQKDGVKKLNLYLIINYFKGGKLRFKKIKPEAFEANRFYTVINKKSGEIVPMEVNFNFDDPNLIILPLAFGKRQGREFIWNDLLSLETGSLKLANGRVIEKTLYNRRTRQDEPALFVALTFERREVLDSSNIKPMNLIGVDRGENIPAVIALTDPEGCPLSRFKDSLGNPTHILRIGESYKEKQRTIQAKKEVEQRRAGGYSRKYASKAKNLADDMVRNTARDLLYYAVTQDAMLIFENLSRGFGRQGKRTFMAERQYTRMEDWLTAKLAYEGLPSKTYLSKTLAQYTSKTCSNCGFTITSADYDRVLEKLKKTATGWMTTINGKELKVEGQITYYNRYKRQNVVKDLSVELDRLSEESVNNDISSWTKGRSGEALSLLKKRFSHRPVQEKFVCLNCGFETHADEQAALNIARSWLFLRSQEYKKYQTNKTSTGNTDKRAFVETWQSFYRKKLKEVWKPAV

SEQ ID NO: 30412 - protein, 980 aa, synthetic construct
  REGION 1..980: note = engineered CasX variant
QEIKRINKIRRRLVKDSNTKKAGKTRGPMKTLLVRVMTPDLRERLENLRKKPENIPQPISNTSRANLNKLLTDYTEMKKAILHVYWEEFQKDPVGLMSRVAQPASKKIDQNKLKPEMDEKGNLTTAGFACSQCGQPLFVYKLEQVSEKGKAYTNYFGRCNVAEHEKLILLAQLKPEKDSDEAVTYSLGKFGQRALDFYSIHVTKESTHPVKPLAQIAGNRYASVPVGKALSDACMGTIASFLSKYQDIIIEHQKVVKGNQKRLESLRELAGKENLEYPSVTLPPQPHTKEGVDAYNEVIARVRMWVNLNLWQKLKLSRDDAKPLLRLKGFPSFPLVERQANEVDWWDMVCNVKKLINEKKEDGKVFWQNLAGYKRQEALRPYLSSEEDRKKGKKFARYQLGDLLLHLEKKHGEDWGKVYDEAWERIDKKVEGLSKHIKLEEERRSEDAQSKAALTDWLRAKASFVIEGLKEADKDEFCRCELKLQKWYGDLRGKPFAIEAENSILDISGFSKQYNCAFIWQKDGVKKLNLYLIINYFKGGKLRFKKIKPEAFEANRFYTVINKKSGEIVPMEVNFNFDDPNLIILPLAFGKRQGREFIWNDLLSLETGSLKLANGRVIEKTLYNRRTRQDEPALFVALTFERREVLDSSNIKPMNLIGVDRGENIPAVIALTDPEGCPLSRFKDSLGNPTHILRIGESYKEKQRTIQAKKEVEQRRAGGYSRKYASKAKNLADDMVRNTARDLLYYAVTQDAMLIFENLSRGFGRQGKRTFMAERQYTRMEDWLTAKLAYEGLPSKTYLSKTLAQYTSKTCSNCGFTITSADYDRVLEKLKKTATGWMTTINGKELKVEGQITYYNRYKRQNVVKDLSVELDRLSEESVNNDISSWTKGRSGEALSLLKKRFSHRPVQEKFVCLNCGFETHADEQAALNIARSWLFLRSQEYKKYQTNKTSTGNTDKRAFVETWQSFYRKKLKEVWKPAV

SEQ ID NO: 30413 - protein, 980 aa, synthetic construct
  REGION 1..980: note = engineered CasX variant
QEIKRINKIRRRLVKDSNTKKAGKTRGPMKTLLVRVMTPDLRERLENLRKKPENIPQPISNTSRANLNKLLTDYTEMKKAILHVYWEEFQKDPVGLMSRVAQPASKKIDQNKLKPEMDEKGNLTTAGFACSQCGQPLFVYKLEQVSEKGKAYTNYFGRCNVAEHEKLIKLAQLKPEKDSDEAVTYSLGKFGQRALDFYSIHVTKESTHPVKPLAQIAGNRYASGPVGKALSDACMGTIASFLSKYQDIIIEHQKVVKGNQKRLESLRELAGKENLEYPSVTLPPQPHTKEGVDAYNEVIARVRMWVNLNLWQKLKLSRDDAKPLLRLKGFPSFPLVERQANEVDWWDMVCNVKKLINEKKEDGKVFWQNLAGYKRQEALRPYLSSEEDRKKGKKFARYQLGDLLLHLEKKHGEDWGKVYDEAWERIDKKVEGLSKHIKLEEERRSEDAQSKAALTDWLRAKASFVIEGLKEADKDEFCRCELKLQKWYGDLRGKPFAIEAENSILDISGFSKQYNCAFIWQKDGVKKLNLYLIINYFKGGKLRFKKIKPEAFEANRFYTVINKKSGEIVPMEVNFNFDDPNLIILPLAFGKRQGREFIWNDLLSLETGSLKLANGRVIEKTLYNRRTRQDEPALFVALTFERREVLDSSNIKPMNLIGVDRGENIPAVIALTDPEGCPLSRFKDSLGNPTHILRIGESYKEKQRTIQAKKEVEQRRAGGYSRKYASKAKNLADDMVRNTARDLLYYAVTQDAMLIFENLSRGFGRQGKRTFMAERQYTRMEDWLTAKLAYEGLPSKTYLSKTLAQYTSKTCSNCGFTITSADYDRVLEKLKKTATGWMTTINGKELKVEGQITYYNRYKRQNVVKDLSVELDRLSEESVNNDISSWTKGRSGEALSLLKKRFSHRPVQEKFVCLNCGFETHADEQAALNIARSWLFLRSQEYKKYQTNKTSTGNTDKRAFVETWQSFYRKKLKEVWKPAV

SEQ ID NO: 30414 - protein, 979 aa, synthetic construct
  REGION 1..979: note = engineered CasX variant
QEIKRINKIRRRLVKDSNTKKAGKTRGPMKTLLVRVMTPDLRERLENLRKKPENIPQPISNTSRANLNKLLTDYTEMKKAILHVYWEEFQKDPVGLMSRVAQPASKKIDQNKLKPEMDEKGNLTTAGFACSQCGQPLFVYKLEQVSEKGKAYTNYFGRCNVAEHEKLILLAQLKPEKDSDEAVTYSLGKFGQRALDFYSIHVTKESTHPVKPLAQIAGNRYASPVGKALSDACMGTIASFLSKYQDIIIEHQKVVKGNQKRLESLRELAGKENLEYPSVTLPPQPHTKEGVDAYNEVIARVRMWVNLNLWQKLKLSRDDAKPLLRLKGFPSFPLVERQANEVDWWDMVCNVKKLINEKKEDGKVFWQNLAGYKRQEALRPYLSSEEDRKKGKKFARYQLGDLLLHLEKKHGEDWGKVYDEAWERIDKKVEGLSKHIKLEEERRSEDAQSKAALTDWLRAKASFVIEGLKEADKDEFCRCELKLQKWYGDLRGKPFAIEAENSILDISGFSKQYNCAFIWQKDGVKKLNLYLIINYFKGGKLRFKKIKPEAFEANRFYTVINKKSGEIVPMEVNFNFDDPNLIILPLAFGKRQGREFIWNDLLSLETGSLKLANGRVIEKTLYNRRTRQDEPALFVALTFERREVLDSSNIKPMNLIGVDRGENIPAVIALTDPEGCPLSRFKDSLGNPTHILRIGESYKEKQRTIQAKKEVEQRRAGGYSRKYASKAKNLADDMVRNTARDLLYYAVTQDAMLIFENLSRGFGRQGKRTFMAERQYTRMEDWLTAKLAYEGLPSKTYLSKTLAQYTSKTCSNCGFTITSADYDRVLEKLKKTATGWMTTINGKELKVEGQITYYNRYKRQNVVKDLSVELDRLSEESVNNDISSWTKGRSGEALSLLKKRFSHRPVQEKFVCLNCGFETHADEQAALNIARSWLFLRSQEYKKYQTNKTSTGNTDKRAFVETWQSFYRKKLKEVWKPAV

SEQ ID NO: 30415 - protein, 980 aa, synthetic construct
  REGION 1..980: note = engineered CasX variant
QEIKRINKIRRRLVKDSNTKKAGKTRGPMKTLLVRVMTPDLRERLENLRKKPENIPQPISNTSRANLNKLLTDYTEMKKAILHVYWEEFQKDPVGLMSRVAQPASKKIDQNKLKPEMDEKGNLTTAGFACSQCGQPLFVYKLEQVSEKGKAYTNYFGRCNVAEHEKLILLAQLKPEKDSDEAVTYSLGKFGQRALDFYSIHVTKESTHPVKPLAQIAGNRYASYPVGKALSDACMGTIASFLSKYQDIIIEHQKVVKGNQKRLESLRELAGKENLEYPSVTLPPQPHTKEGVDAYNEVIARVRMWVNLNLWQKLKLSRDDAKPLLRLKGFPSFPLVERQANEVDWWDMVCNVKKLINEKKEDGKVFWQNLAGYKRQEALRPYLSSEEDRKKGKKFARYQLGDLLLHLEKKHGEDWGKVYDEAWERIDKKVEGLSKHIKLEEERRSEDAQSKAALTDWLRAKASFVIEGLKEADKDEFCRCELKLQKWYGDLRGKPFAIEAENSILDISGFSKQYNCAFIWQKDGVKKLNLYLIINYFKGGKLRFKKIKPEAFEANRFYTVINKKSGEIVPMEVNFNFDDPNLIILPLAFGKRQGREFIWNDLLSLETGSLKLANGRVIEKTLYNRRTRQDEPALFVALTFERREVLDSSNIKPMNLIGVDRGENIPAVIALTDPEGCPLSRFKDSLGNPTHILRIGESYKEKQRTIQAKKEVEQRRAGGYSRKYASKAKNLADDMVRNTARDLLYYAVTQDAMLIFENLSRGFGRQGKRTFMAERQYTRMEDWLTAKLAYEGLPSKTYLSKTLAQYTSKTCSNCGFTITSADYDRVLEKLKKTATGWMTTINGKELKVEGQITYYNRYKRQNVVKDLSVELDRLSEESVNNDISSWTKGRSGEALSLLKKRFSHRPVQEKFVCLNCGFETHADEQAALNIARSWLFLRSQEYKKYQTNKTTGKNTDKRAFVETWQSFYRKKLKEVWKPAV

SEQ ID NO: 30416 - protein, 980 aa, synthetic construct
  REGION 1..980: note = engineered CasX variant
QEIKRINKIRRRLVKDSNTKKAGKTRGPMKTLLVRVMTPDLRERLENLRKKPENIPQPISNTSRANLNKLLTDYTEMKKAILHVYWEEFQKDPVGLMSRVAQPASKKIDQNKLKPEMDEKGNLTTAGFACSQCGQPLFVYKLEQVSEKGKAYTNYFGRCNVAEHEKLILLAQLKPEKDSDEAVTYSLGKFGQRALDFYSIHVTKESTHPVKPLAQIAGNRYASHPVGKALSDACMGTIASFLSKYQDIIIEHQKVVKGNQKRLESLRELAGKENLEYPSVTLPPQPHTKEGVDAYNEVIARVRMWVNLNLWQKLKLSRDDAKPLLRLKGFPSFPLVERQANEVDWWDMVCNVKKLINEKKEDGKVFWQNLAGYKRQEALRPYLSSEEDRKKGKKFARYQLGDLLLHLEKKHGEDWGKVYDEAWERIDKKVEGLSKHIKLEEERRSEDAQSKAALTDWLRAKASFVIEGLKEADKDEFCRCELKLQKWYGDLRGKPFAIEAENSILDISGFSKQYNCAFIWQKDGVKKLNLYLIINYFKGGKLRFKKIKPEAFEANRFYTVINKKSGEIVPMEVNFNFDDPNLIILPLAFGKRQGREFIWNDLLSLETGSLKLANGRVIEKTLYNRRTRQDEPALFVALTFERREVLDSSNIKPMNLIGVDRGENIPAVIALTDPEGCPLSRFKDSLGNPTHILRIGESYKEKQRTIQAKKEVEQRRAGGYSRKYASKAKNLADDMVRNTARDLLYYAVTQDAMLIFENLSRGFGRQGKRTFMAERQYTRMEDWLTAKLAYEGLPSKTYLSKTLAQYTSKTCSNCGFTITSADYDRVLEKLKKTATGWMTTINGKELKVEGQITYYNRYKRQNVVKDLSVELDRLSEESVNNDISSWTKGRSGEALSLLKKRFSHRPVQEKFVCLNCGFETHADEQAALNIARSWLFLRSQEYKKYQTNKTTGKNTDKRAFVETWQSFYRKKLKEVWKPAV

SEQ ID NO: 30417 - protein, 980 aa, synthetic construct
  REGION 1..980: note = engineered CasX variant
QEIKRINKIRRRLVKDSNTKKAGKTRGPMKTLLVRVMTPDLRERLENLRKKPENIPQPISNTSRANLNKLLTDYTEMKKAILHVYWEEFQKDPVGLMSRVAQPASKKIDQNKLKPEMDEKGNLTTAGFACSQCGQPLFVYKLEQVSEKGKAYTNYFGRCNVAEHEKLILLAQLKPEKDSDEAVTYSLGKFGQRALDFYSIHVTKESTHPVKPLAQIAGNRYASSPVGKALSDACMGTIASFLSKYQDIIIEHQKVVKGNQKRLESLRELAGKENLEYPSVTLPPQPHTKEGVDAYNEVIARVRMWVNLNLWQKLKLSRDDAKPLLRLKGFPSFPLVERQANEVDWWDMVCNVKKLINEKKEDGKVFWQNLAGYKRQEALRPYLSSEEDRKKGKKFARYQLGDLLLHLEKKHGEDWGKVYDEAWERIDKKVEGLSKHIKLEEERRSEDAQSKAALTDWLRAKASFVIEGLKEADKDEFCRCELKLQKWYGDLRGKPFAIEAENSILDISGFSKQYNCAFIWQKDGVKKLNLYLIINYFKGGKLRFKKIKPEAFEANRFYTVINKKSGEIVPMEVNFNFDDPNLIILPLAFGKRQGREFIWNDLLSLETGSLKLANGRVIEKTLYNRRTRQDEPALFVALTFERREVLDSSNIKPMNLIGVDRGENIPAVIALTDPEGCPLSRFKDSLGNPTHILRIGESYKEKQRTIQAKKEVEQRRAGGYSRKYASKAKNLADDMVRNTARDLLYYAVTQDAMLIFENLSRGFGRQGKRTFMAERQYTRMEDWLTAKLAYEGLPSKTYLSKTLAQYTSKTCSNCGFTITSADYDRVLEKLKKTATGWMTTINGKELKVEGQITYYNRYKRQNVVKDLSVELDRLSEESVNNDISSWTKGRSGEALSLLKKRFSHRPVQEKFVCLNCGFETHADEQAALNIARSWLFLRSQEYKKYQTNKTTGKNTDKRAFVETWQSFYRKKLKEVWKPAV

SEQ ID NO: 30418 - protein, 980 aa, synthetic construct
  REGION 1..980: note = engineered CasX variant
QEIKRINKIRRRLVKDSNTKKAGKTRGPMKTLLVRVMTPDLRERLENLRKKPENIPQPISNTSRANLNKLLTDYTEMKKAILHVYWEEFQKDPVGLMSRVAQPASKKIDQNKLKPEMDEKGNLTTAGFACSQCGQPLFVYKLEQVSEKGKAYTNYFGRCNVAEHEKLILLAQLKPEKDSDEAVTYSLGKFGQRALDFYSIHVTKESTHPVKPLAQIAGNRYASTPVGKALSDACMGTIASFLSKYQDIIIEHQKVVKGNQKRLESLRELAGKENLEYPSVTLPPQPHTKEGVDAYNEVIARVRMWVNLNLWQKLKLSRDDAKPLLRLKGFPSFPLVERQANEVDWWDMVCNVKKLINEKKEDGKVFWQNLAGYKRQEALRPYLSSEEDRKKGKKFARYQLGDLLLHLEKKHGEDWGKVYDEAWERIDKKVEGLSKHIKLEEERRSEDAQSKAALTDWLRAKASFVIEGLKEADKDEFCRCELKLQKWYGDLRGKPFAIEAENSILDISGFSKQYNCAFIWQKDGVKKLNLYLIINYFKGGKLRFKKIKPEAFEANRFYTVINKKSGEIVPMEVNFNFDDPNLIILPLAFGKRQGREFIWNDLLSLETGSLKLANGRVIEKTLYNRRTRQDEPALFVALTFERREVLDSSNIKPMNLIGVDRGENIPAVIALTDPEGCPLSRFKDSLGNPTHILRIGESYKEKQRTIQAKKEVEQRRAGGYSRKYASKAKNLADDMVRNTARDLLYYAVTQDAMLIFENLSRGFGRQGKRTFMAERQYTRMEDWLTAKLAYEGLPSKTYLSKTLAQYTSKTCSNCGFTITSADYDRVLEKLKKTATGWMTTINGKELKVEGQITYYNRYKRQNVVKDLSVELDRLSEESVNNDISSWTKGRSGEALSLLKKRFSHRPVQEKFVCLNCGFETHADEQAALNIARSWLFLRSQEYKKYQTNKTTGKNTDKRAFVETWQSFYRKKLKEVWKPAV

SEQ ID NO: 30419 - protein, 980 aa, synthetic construct
  REGION 1..980: note = engineered CasX variant
QEIKRINKIRRRLVKDSNTKKAGKTRGPMKTLLVRVMTPDLRERLENLRKKPENIPQPISNTSRANLNKLLTDYTEMKKAILHVYWEEFQKDPVGLMSRVAQPASKKIDQNKLKPEMDEKGNLTTAGFACSQCGQPLFVYKLEQVSEKGKAYTNYFGRCNVAEHEKLILLAQLKPEKDSDEAVTYSLGKFGQRALDFYSIHVTKESTHPVKPLAQIAGNRYASAPVGKALSDACMGTIASFLSKYQDIIIEHQKVVKGNQKRLESLRELAGKENLEYPSVTLPPQPHTKEGVDAYNEVIARVRMWVNLNLWQKLKLSRDDAKPLLRLKGFPSFPLVERQANEVDWWDMVCNVKKLINEKKEDGKVFWQNLAGYKRQEALRPYLSSEEDRKKGKKFARYQLGDLLLHLEKKHGEDWGKVYDEAWERIDKKVEGLSKHIKLEEERRSEDAQSKAALTDWLRAKASFVIEGLKEADKDEFCRCELKLQKWYGDLRGKPFAIEAENSILDISGFSKQYNCAFIWQKDGVKKLNLYLIINYFKGGKLRFKKIKPEAFEANRFYTVINKKSGEIVPMEVNFNFDDPNLIILPLAFGKRQGREFIWNDLLSLETGSLKLANGRVIEKTLYNRRTRQDEPALFVALTFERREVLDSSNIKPMNLIGVDRGENIPAVIALTDPEGCPLSRFKDSLGNPTHILRIGESYKEKQRTIQAKKEVEQRRAGGYSRKYASKAKNLADDMVRNTARDLLYYAVTQDAMLIFENLSRGFGRQGKRTFMAERQYTRMEDWLTAKLAYEGLPSKTYLSKTLAQYTSKTCSNCGFTITSADYDRVLEKLKKTATGWMTTINGKELKVEGQITYYNRYKRQNVVKDLSVELDRLSEESVNNDISSWTKGRSGEALSLLKKRFSHRPVQEKFVCLNCGFETHADEQAALNIARSWLFLRSQEYKKYQTNKTTGKNTDKRAFVETWQSFYRKKLKEVWKPAV

SEQ ID NO: 30420 - protein, 980 aa, synthetic construct
  REGION 1..980: note = engineered CasX variant
QEIKRINKIRRRLVKDSNTKKAGKTRGPMKTLLVRVMTPDLRERLENLRKKPENIPQPISNTSRANLNKLLTDYTEMKKAILHVYWEEFQKDPVGLMSRVAQPASKKIDQNKLKPEMDEKGNLTTAGFACSQCGQPLFVYKLEQVSEKGKAYTNYFGRCNVAEHEKLILLAQLKPEKDSDEAVTYSLGKFGQRALDFYSIHVTKESTHPVKPLAQIAGNRYASVPVGKALSDACMGTIASFLSKYQDIIIEHQKVVKGNQKRLESLRELAGKENLEYPSVTLPPQPHTKEGVDAYNEVIARVRMWVNLNLWQKLKLSRDDAKPLLRLKGFPSFPLVERQANEVDWWDMVCNVKKLINEKKEDGKVFWQNLAGYKRQEALRPYLSSEEDRKKGKKFARYQLGDLLLHLEKKHGEDWGKVYDEAWERIDKKVEGLSKHIKLEEERRSEDAQSKAALTDWLRAKASFVIEGLKEADKDEFCRCELKLQKWYGDLRGKPFAIEAENSILDISGFSKQYNCAFIWQKDGVKKLNLYLIINYFKGGKLRFKKIKPEAFEANRFYTVINKKSGEIVPMEVNFNFDDPNLIILPLAFGKRQGREFIWNDLLSLETGSLKLANGRVIEKTLYNRRTRQDEPALFVALTFERREVLDSSNIKPMNLIGVDRGENIPAVIALTDPEGCPLSRFKDSLGNPTHILRIGESYKEKQRTIQAKKEVEQRRAGGYSRKYASKAKNLADDMVRNTARDLLYYAVTQDAMLIFENLSRGFGRQGKRTFMAERQYTRMEDWLTAKLAYEGLPSKTYLSKTLAQYTSKTCSNCGFTITSADYDRVLEKLKKTATGWMTTINGKELKVEGQITYYNRYKRQNVVKDLSVELDRLSEESVNNDISSWTKGRSGEALSLLKKRFSHRPVQEKFVCLNCGFETHADEQAALNIARSWLFLRSQEYKKYQTNKTTGKNTDKRAFVETWQSFYRKKLKEVWKPAV

SEQ ID NO: 30421 - protein, 980 aa, synthetic construct
  REGION 1..980: note = engineered CasX variant
QEIKRINKIRRRLVKDSNTKKAGKTRGPMKTLLVRVMTPDLRERLENLRKKPENIPQPISNTSRANLNKLLTDYTEMKKAILHVYWEEFQKDPVGLMSRVAQPASKKIDQNKLKPEMDEKGNLTTAGFACSQCGQPLFVYKLEQVSEKGKAYTNYFGRCNVAEHEKLIKLAQLKPEKDSDEAVTYSLGKFGQRALDFYSIHVTKESTHPVKPLAQIAGNRYASGPVGKALSDACMGTIASFLSKYQDIIIEHQKVVKGNQKRLESLRELAGKENLEYPSVTLPPQPHTKEGVDAYNEVIARVRMWVNLNLWQKLKLSRDDAKPLLRLKGFPSFPLVERQANEVDWWDMVCNVKKLINEKKEDGKVFWQNLAGYKRQEALRPYLSSEEDRKKGKKFARYQLGDLLLHLEKKHGEDWGKVYDEAWERIDKKVEGLSKHIKLEEERRSEDAQSKAALTDWLRAKASFVIEGLKEADKDEFCRCELKLQKWYGDLRGKPFAIEAENSILDISGFSKQYNCAFIWQKDGVKKLNLYLIINYFKGGKLRFKKIKPEAFEANRFYTVINKKSGEIVPMEVNFNFDDPNLIILPLAFGKRQGREFIWNDLLSLETGSLKLANGRVIEKTLYNRRTRQDEPALFVALTFERREVLDSSNIKPMNLIGVDRGENIPAVIALTDPEGCPLSRFKDSLGNPTHILRIGESYKEKQRTIQAKKEVEQRRAGGYSRKYASKAKNLADDMVRNTARDLLYYAVTQDAMLIFENLSRGFGRQGKRTFMAERQYTRMEDWLTAKLAYEGLPSKTYLSKTLAQYTSKTCSNCGFTITSADYDRVLEKLKKTATGWMTTINGKELKVEGQITYYNRYKRQNVVKDLSVELDRLSEESVNNDISSWTKGRSGEALSLLKKRFSHRPVQEKFVCLNCGFETHADEQAALNIARSWLFLRSQEYKKYQTNKTTGKNTDKRAFVETWQSFYRKKLKEVWKPAV

SEQ ID NO: 30422 - protein, 979 aa, synthetic construct
  REGION 1..979: note = engineered CasX variant
QEIKRINKIRRRLVKDSNTKKAGKTRGPMKTLLVRVMTPDLRERLENLRKKPENIPQPISNTSRANLNKLLTDYTEMKKAILHVYWEEFQKDPVGLMSRVAQPASKKIDQNKLKPEMDEKGNLTTAGFACSQCGQPLFVYKLEQVSEKGKAYTNYFGRCNVAEHEKLILLAQLKPEKDSDEAVTYSLGKFGQRALDFYSIHVTKESTHPVKPLAQIAGNRYASPVGKALSDACMGTIASFLSKYQDIIIEHQKVVKGNQKRLESLRELAGKENLEYPSVTLPPQPHTKEGVDAYNEVIARVRMWVNLNLWQKLKLSRDDAKPLLRLKGFPSFPLVERQANEVDWWDMVCNVKKLINEKKEDGKVFWQNLAGYKRQEALRPYLSSEEDRKKGKKFARYQLGDLLLHLEKKHGEDWGKVYDEAWERIDKKVEGLSKHIKLEEERRSEDAQSKAALTDWLRAKASFVIEGLKEADKDEFCRCELKLQKWYGDLRGKPFAIEAENSILDISGFSKQYNCAFIWQKDGVKKLNLYLIINYFKGGKLRFKKIKPEAFEANRFYTVINKKSGEIVPMEVNFNFDDPNLIILPLAFGKRQGREFIWNDLLSLETGSLKLANGRVIEKTLYNRRTRQDEPALFVALTFERREVLDSSNIKPMNLIGVDRGENIPAVIALTDPEGCPLSRFKDSLGNPTHILRIGESYKEKQRTIQAKKEVEQRRAGGYSRKYASKAKNLADDMVRNTARDLLYYAVTQDAMLIFENLSRGFGRQGKRTFMAERQYTRMEDWLTAKLAYEGLPSKTYLSKTLAQYTSKTCSNCGFTITSADYDRVLEKLKKTATGWMTTINGKELKVEGQITYYNRYKRQNVVKDLSVELDRLSEESVNNDISSWTKGRSGEALSLLKKRFSHRPVQEKFVCLNCGFETHADEQAALNIARSWLFLRSQEYKKYQTNKTTGKNTDKRAFVETWQSFYRKKLKEVWKPAV

SEQ ID NO: 30423 - protein, 979 aa, synthetic construct
  REGION 1..979: note = engineered CasX variant
QEIKRINKIRRRLVKDSNTKKAGKTRGPMKTLLVRVMTPDLRERLENLRKKPENIPQPISNTSRANLNKLLTDYTEMKKAILHVYWEEFQKDPVGLMSRVAQPASKKIDQNKLKPEMDEKGNLTTAGFACSQCGQPLFVYKLEQVSEKGKAYTNYFGRCNVAEHEKLILLAQLKPEKDSDEAVTYSLGKFGQRALDFYSIHVTKESTHPVKPLAQIAGNRYASYPVGKALSDACMGTIASFLSKYQDIIIEHQKVVKGNQKRLESLRELAGKENLEYPSVTLPPQPHTKEGVDAYNEVIARVRMWVNLNLWQKLKLSRDDAKPLLRLKKFPSFPLVERQANEVDWWDMVCNVKKLINEKKEDGKVFWQNLAGYKRQEALRPYLSSEEDRKKGKKFARYQLGDLLLHLEKKHGEDWGKVYDEAWERIDKKVEGLSKHIKLEEERRSEDAQSKAALTDWLRAKASFVIEGLKEADKDEFCRCELKLQKWYGDLRGKPFAIEAENSILDISGFSKQYNCAFIWQKDGVKKLNLYLIINYFKGGKLRFKKIKPEAFEANRFYTVINKKSGEIVPMEVNFNFDDPNLIILPLAFGKRQGREFIWNDLLSLETGSLKLANGRVIEKTLYNRRTRQDEPALFVALTFERREVLDSSNIKPMNLIGVDRGENIPAVIALTDPEGCPLSRFKDSLGNPTHILRIGESYKEKQRTIQAKKEVEQRRAGGYSRKYASKAKNLADDMVRNTARDLLYYAVTQDAMLIFENLSRGFGRQGKRTFMAERQYTRMEDWLTAKLAYEGLPSKTYLSKTLAQYTSKTCSNCGFTITSADYDRVLEKLKKTATGWMTTINGKELKVEGQITYYNRYKRQNVVKDLSVELDRLSEESVNNDISSWTKGRSGEALSLLKKRFSHRPVQEKFVCLNCGFETHADEQAALNIARSWLFLRSQEYKKYQTNKTTGNTDKRAFVETWQSFYRKKLKEVWKPAV

SEQ ID NO: 30424 - protein, 979 aa, synthetic construct
  REGION 1..979: note = engineered CasX variant
QEIKRINKIRRRLVKDSNTKKAGKTRGPMKTLLVRVMTPDLRERLENLRKKPENIPQPISNTSRANLNKLLTDYTEMKKAILHVYWEEFQKDPVGLMSRVAQPASKKIDQNKLKPEMDEKGNLTTAGFACSQCGQPLFVYKLEQVSEKGKAYTNYFGRCNVAEHEKLILLAQLKPEKDSDEAVTYSLGKFGQRALDFYSIHVTKESTHPVKPLAQIAGNRYASHPVGKALSDACMGTIASFLSKYQDIIIEHQKVVKGNQKRLESLRELAGKENLEYPSVTLPPQPHTKEGVDAYNEVIARVRMWVNLNLWQKLKLSRDDAKPLLRLKKFPSFPLVERQANEVDWWDMVCNVKKLINEKKEDGKVFWQNLAGYKRQEALRPYLSSEEDRKKGKKFARYQLGDLLLHLEKKHGEDWGKVYDEAWERIDKKVEGLSKHIKLEEERRSEDAQSKAALTDWLRAKASFVIEGLKEADKDEFCRCELKLQKWYGDLRGKPFAIEAENSILDISGFSKQYNCAFIWQKDGVKKLNLYLIINYFKGGKLRFKKIKPEAFEANRFYTVINKKSGEIVPMEVNFNFDDPNLIILPLAFGKRQGREFIWNDLLSLETGSLKLANGRVIEKTLYNRRTRQDEPALFVALTFERREVLDSSNIKPMNLIGVDRGENIPAVIALTDPEGCPLSRFKDSLGNPTHILRIGESYKEKQRTIQAKKEVEQRRAGGYSRKYASKAKNLADDMVRNTARDLLYYAVTQDAMLIFENLSRGFGRQGKRTFMAERQYTRMEDWLTAKLAYEGLPSKTYLSKTLAQYTSKTCSNCGFTITSADYDRVLEKLKKTATGWMTTINGKELKVEGQITYYNRYKRQNVVKDLSVELDRLSEESVNNDISSWTKGRSGEALSLLKKRFSHRPVQEKFVCLNCGFETHADEQAALNIARSWLFLRSQEYKKYQTNKTTGNTDKRAFVETWQSFYRKKLKEVWKPAV

SEQ ID NO: 30425 - protein, 979 aa, synthetic construct
  REGION 1..979: note = engineered CasX variant
QEIKRINKIRRRLVKDSNTKKAGKTRGPMKTLLVRVMTPDLRERLENLRKKPENIPQPISNTSRANLNKLLTDYTEMKKAILHVYWEEFQKDPVGLMSRVAQPASKKIDQNKLKPEMDEKGNLTTAGFACSQCGQPLFVYKLEQVSEKGKAYTNYFGRCNVAEHEKLILLAQLKPEKDSDEAVTYSLGKFGQRALDFYSIHVTKESTHPVKPLAQIAGNRYASSPVGKALSDACMGTIASFLSKYQDIIIEHQKVVKGNQKRLESLRELAGKENLEYPSVTLPPQPHTKEGVDAYNEVIARVRMWVNLNLWQKLKLSRDDAKPLLRLKKFPSFPLVERQANEVDWWDMVCNVKKLINEKKEDGKVFWQNLAGYKRQEALRPYLSSEEDRKKGKKFARYQLGDLLLHLEKKHGEDWGKVYDEAWERIDKKVEGLSKHIKLEEERRSEDAQSKAALTDWLRAKASFVIEGLKEADKDEFCRCELKLQKWYGDLRGKPFAIEAENSILDISGFSKQYNCAFIWQKDGVKKLNLYLIINYFKGGKLRFKKIKPEAFEANRFYTVINKKSGEIVPMEVNFNFDDPNLIILPLAFGKRQGREFIWNDLLSLETGSLKLANGRVIEKTLYNRRTRQDEPALFVALTFERREVLDSSNIKPMNLIGVDRGENIPAVIALTDPEGCPLSRFKDSLGNPTHILRIGESYKEKQRTIQAKKEVEQRRAGGYSRKYASKAKNLADDMVRNTARDLLYYAVTQDAMLIFENLSRGFGRQGKRTFMAERQYTRMEDWLTAKLAYEGLPSKTYLSKTLAQYTSKTCSNCGFTITSADYDRVLEKLKKTATGWMTTINGKELKVEGQITYYNRYKRQNVVKDLSVELDRLSEESVNNDISSWTKGRSGEALSLLKKRFSHRPVQEKFVCLNCGFETHADEQAALNIARSWLFLRSQEYKKYQTNKTTGNTDKRAFVETWQSFYRKKLKEVWKPAV

SEQ ID NO: 30426 - protein, 979 aa, synthetic construct
  REGION 1..979: note = engineered CasX variant
QEIKRINKIRRRLVKDSNTKKAGKTRGPMKTLLVRVMTPDLRERLENLRKKPENIPQPISNTSRANLNKLLTDYTEMKKAILHVYWEEFQKDPVGLMSRVAQPASKKIDQNKLKPEMDEKGNLTTAGFACSQCGQPLFVYKLEQVSEKGKAYTNYFGRCNVAEHEKLILLAQLKPEKDSDEAVTYSLGKFGQRALDFYSIHVTKESTHPVKPLAQIAGNRYASTPVGKALSDACMGTIASFLSKYQDIIIEHQKVVKGNQKRLESLRELAGKENLEYPSVTLPPQPHTKEGVDAYNEVIARVRMWVNLNLWQKLKLSRDDAKPLLRLKKFPSFPLVERQANEVDWWDMVCNVKKLINEKKEDGKVFWQNLAGYKRQEALRPYLSSEEDRKKGKKFARYQLGDLLLHLEKKHGEDWGKVYDEAWERIDKKVEGLSKHIKLEEERRSEDAQSKAALTDWLRAKASFVIEGLKEADKDEFCRCELKLQKWYGDLRGKPFAIEAENSILDISGFSKQYNCAFIWQKDGVKKLNLYLIINYFKGGKLRFKKIKPEAFEANRFYTVINKKSGEIVPMEVNFNFDDPNLIILPLAFGKRQGREFIWNDLLSLETGSLKLANGRVIEKTLYNRRTRQDEPALFVALTFERREVLDSSNIKPMNLIGVDRGENIPAVIALTDPEGCPLSRFKDSLGNPTHILRIGESYKEKQRTIQAKKEVEQRRAGGYSRKYASKAKNLADDMVRNTARDLLYYAVTQDAMLIFENLSRGFGRQGKRTFMAERQYTRMEDWLTAKLAYEGLPSKTYLSKTLAQYTSKTCSNCGFTITSADYDRVLEKLKKTATGWMTTINGKELKVEGQITYYNRYKRQNVVKDLSVELDRLSEESVNNDISSWTKGRSGEALSLLKKRFSHRPVQEKFVCLNCGFETHADEQAALNIARSWLFLRSQEYKKYQTNKTTGNTDKRAFVETWQSFYRKKLKEVWKPAV

SEQ ID NO: 30427 - protein, 979 aa, synthetic construct
  REGION 1..979: note = engineered CasX variant
QEIKRINKIRRRLVKDSNTKKAGKTRGPMKTLLVRVMTPDLRERLENLRKKPENIPQPISNTSRANLNKLLTDYTEMKKAILHVYWEEFQKDPVGLMSRVAQPASKKIDQNKLKPEMDEKGNLTTAGFACSQCGQPLFVYKLEQVSEKGKAYTNYFGRCNVAEHEKLILLAQLKPEKDSDEAVTYSLGKFGQRALDFYSIHVTKESTHPVKPLAQIAGNRYASAPVGKALSDACMGTIASFLSKYQDIIIEHQKVVKGNQKRLESLRELAGKENLEYPSVTLPPQPHTKEGVDAYNEVIARVRMWVNLNLWQKLKLSRDDAKPLLRLKKFPSFPLVERQANEVDWWDMVCNVKKLINEKKEDGKVFWQNLAGYKRQEALRPYLSSEEDRKKGKKFARYQLGDLLLHLEKKHGEDWGKVYDEAWERIDKKVEGLSKHIKLEEERRSEDAQSKAALTDWLRAKASFVIEGLKEADKDEFCRCELKLQKWYGDLRGKPFAIEAENSILDISGFSKQYNCAFIWQKDGVKKLNLYLIINYFKGGKLRFKKIKPEAFEANRFYTVINKKSGEIVPMEVNFNFDDPNLIILPLAFGKRQGREFIWNDLLSLETGSLKLANGRVIEKTLYNRRTRQDEPALFVALTFERREVLDSSNIKPMNLIGVDRGENIPAVIALTDPEGCPLSRFKDSLGNPTHILRIGESYKEKQRTIQAKKEVEQRRAGGYSRKYASKAKNLADDMVRNTARDLLYYAVTQDAMLIFENLSRGFGRQGKRTFMAERQYTRMEDWLTAKLAYEGLPSKTYLSKTLAQYTSKTCSNCGFTITSADYDRVLEKLKKTATGWMTTINGKELKVEGQITYYNRYKRQNVVKDLSVELDRLSEESVNNDISSWTKGRSGEALSLLKKRFSHRPVQEKFVCLNCGFETHADEQAALNIARSWLFLRSQEYKKYQTNKTTGNTDKRAFVETWQSFYRKKLKEVWKPAV

SEQ ID NO: 30428 - protein, 979 aa, synthetic construct
  REGION 1..979: note = engineered CasX variant
QEIKRINKIRRRLVKDSNTKKAGKTRGPMKTLLVRVMTPDLRERLENLRKKPENIPQPISNTSRANLNKLLTDYTEMKKAILHVYWEEFQKDPVGLMSRVAQPASKKIDQNKLKPEMDEKGNLTTAGFACSQCGQPLFVYKLEQVSEKGKAYTNYFGRCNVAEHEKLILLAQLKPEKDSDEAVTYSLGKFGQRALDFYSIHVTKESTHPVKPLAQIAGNRYASVPVGKALSDACMGTIASFLSKYQDIIIEHQKVVKGNQKRLESLRELAGKENLEYPSVTLPPQPHTKEGVDAYNEVIARVRMWVNLNLWQKLKLSRDDAKPLLRLKKFPSFPLVERQANEVDWWDMVCNVKKLINEKKEDGKVFWQNLAGYKRQEALRPYLSSEEDRKKGKKFARYQLGDLLLHLEKKHGEDWGKVYDEAWERIDKKVEGLSKHIKLEEERRSEDAQSKAALTDWLRAKASFVIEGLKEADKDEFCRCELKLQKWYGDLRGKPFAIEAENSILDISGFSKQYNCAFIWQKDGVKKLNLYLIINYFKGGKLRFKKIKPEAFEANRFYTVINKKSGEIVPMEVNFNFDDPNLIILPLAFGKRQGREFIWNDLLSLETGSLKLANGRVIEKTLYNRRTRQDEPALFVALTFERREVLDSSNIKPMNLIGVDRGENIPAVIALTDPEGCPLSRFKDSLGNPTHILRIGESYKEKQRTIQAKKEVEQRRAGGYSRKYASKAKNLADDMVRNTARDLLYYAVTQDAMLIFENLSRGFGRQGKRTFMAERQYTRMEDWLTAKLAYEGLPSKTYLSKTLAQYTSKTCSNCGFTITSADYDRVLEKLKKTATGWMTTINGKELKVEGQITYYNRYKRQNVVKDLSVELDRLSEESVNNDISSWTKGRSGEALSLLKKRFSHRPVQEKFVCLNCGFETHADEQAALNIARSWLFLRSQEYKKYQTNKTTGNTDKRAFVETWQSFYRKKLKEVWKPAV

SEQ ID NO: 30429 - protein, 979 aa, synthetic construct
  REGION 1..979: note = engineered CasX variant
QEIKRINKIRRRLVKDSNTKKAGKTRGPMKTLLVRVMTPDLRERLENLRKKPENIPQPISNTSRANLNKLLTDYTEMKKAILHVYWEEFQKDPVGLMSRVAQPASKKIDQNKLKPEMDEKGNLTTAGFACSQCGQPLFVYKLEQVSEKGKAYTNYFGRCNVAEHEKLIKLAQLKPEKDSDEAVTYSLGKFGQRALDFYSIHVTKESTHPVKPLAQIAGNRYASGPVGKALSDACMGTIASFLSKYQDIIIEHQKVVKGNQKRLESLRELAGKENLEYPSVTLPPQPHTKEGVDAYNEVIARVRMWVNLNLWQKLKLSRDDAKPLLRLKKFPSFPLVERQANEVDWWDMVCNVKKLINEKKEDGKVFWQNLAGYKRQEALRPYLSSEEDRKKGKKFARYQLGDLLLHLEKKHGEDWGKVYDEAWERIDKKVEGLSKHIKLEEERRSEDAQSKAALTDWLRAKASFVIEGLKEADKDEFCRCELKLQKWYGDLRGKPFAIEAENSILDISGFSKQYNCAFIWQKDGVKKLNLYLIINYFKGGKLRFKKIKPEAFEANRFYTVINKKSGEIVPMEVNFNFDDPNLIILPLAFGKRQGREFIWNDLLSLETGSLKLANGRVIEKTLYNRRTRQDEPALFVALTFERREVLDSSNIKPMNLIGVDRGENIPAVIALTDPEGCPLSRFKDSLGNPTHILRIGESYKEKQRTIQAKKEVEQRRAGGYSRKYASKAKNLADDMVRNTARDLLYYAVTQDAMLIFENLSRGFGRQGKRTFMAERQYTRMEDWLTAKLAYEGLPSKTYLSKTLAQYTSKTCSNCGFTITSADYDRVLEKLKKTATGWMTTINGKELKVEGQITYYNRYKRQNVVKDLSVELDRLSEESVNNDISSWTKGRSGEALSLLKKRFSHRPVQEKFVCLNCGFETHADEQAALNIARSWLFLRSQEYKKYQTNKTTGNTDKRAFVETWQSFYRKKLKEVWKPAV

SEQ ID NO: 30430 - protein, 978 aa, synthetic construct
  REGION 1..978: note = engineered CasX variant
QEIKRINKIRRRLVKDSNTKKAGKTRGPMKTLLVRVMTPDLRERLENLRKKPENIPQPISNTSRANLNKLLTDYTEMKKAILHVYWEEFQKDPVGLMSRVAQPASKKIDQNKLKPEMDEKGNLTTAGFACSQCGQPLFVYKLEQVSEKGKAYTNYFGRCNVAEHEKLILLAQLKPEKDSDEAVTYSLGKFGQRALDFYSIHVTKESTHPVKPLAQIAGNRYASPVGKALSDACMGTIASFLSKYQDIIIEHQKVVKGNQKRLESLRELAGKENLEYPSVTLPPQPHTKEGVDAYNEVIARVRMWVNLNLWQKLKLSRDDAKPLLRLKKFPSFPLVERQANEVDWWDMVCNVKKLINEKKEDGKVFWQNLAGYKRQEALRPYLSSEEDRKKGKKFARYQLGDLLLHLEKKHGEDWGKVYDEAWERIDKKVEGLSKHIKLEEERRSEDAQSKAALTDWLRAKASFVIEGLKEADKDEFCRCELKLQKWYGDLRGKPFAIEAENSILDISGFSKQYNCAFIWQKDGVKKLNLYLIINYFKGGKLRFKKIKPEAFEANRFYTVINKKSGEIVPMEVNFNFDDPNLIILPLAFGKRQGREFIWNDLLSLETGSLKLANGRVIEKTLYNRRTRQDEPALFVALTFERREVLDSSNIKPMNLIGVDRGENIPAVIALTDPEGCPLSRFKDSLGNPTHILRIGESYKEKQRTIQAKKEVEQRRAGGYSRKYASKAKNLADDMVRNTARDLLYYAVTQDAMLIFENLSRGFGRQGKRTFMAERQYTRMEDWLTAKLAYEGLPSKTYLSKTLAQYTSKTCSNCGFTITSADYDRVLEKLKKTATGWMTTINGKELKVEGQITYYNRYKRQNVVKDLSVELDRLSEESVNNDISSWTKGRSGEALSLLKKRFSHRPVQEKFVCLNCGFETHADEQAALNIARSWLFLRSQEYKKYQTNKTTGNTDKRAFVETWQSFYRKKLKEVWKPAV

SEQ ID NO: 30431 - protein, 979 aa, synthetic construct
  REGION 1..979: note = engineered CasX variant
QEIKRINKIRRRLVKDSNTKKAGKTRGPMKTLLVRVMTPDLRERLENLRKKPENIPQPISNTSRANLNKLLTDYTEMKKAILHVYWEEFQKDPVGLMSRVAQPASKKIDQNKLKPEMDEKGNLTTAGFACSQCGQPLFVYKLEQVSEKGKAYTNYFGRCNVAEHEKLILLAQLKPEKDSDEAVTYSLGKFGQRALDFYSIHVTKESTHPVKPLAQIAGNRYASYPVGKALSDACMGTIASFLSKYQDIIIEHQKVVKGNQKRLESLRELAGKENLEYPSVTLPPQPHTKEGVDAYNEVIARVRMWVNLNLWQKLKLSRDDAKPLLRLKGFPSFPLVERQANEVDWWDMVCNVKKLINEKKEDGKVFWQNLAGYKRQEALRPYLSSEEDRKKGKKFARYQLGDLLLHLEKKHGEDWGKVYDEAWERIDKKVEGLSKHIKLEEERRSEDAQSKAALTDWLRAKASFVIEGLKEADKDEFCRCELKLQKWYGDLRGKPFAIEAENSILDISGFSKQYNCAFIWQKDGVKKLNLYLIINYFKGGKLRFKKIKPEAFEANRFYTVINKKSGEIVPMEVNFNFDDPNLIILPLAFGKRQGREFIWNDLLSLETGSLKLANGRVIEKTLYNRRTRQDEPALFVALTFERREVLDSSNIKPMNLIGVDRGENIPAVIALTDPEGCPLSRFKDSLGNPTHILRIGERYKEKQRTIQAKKEVEQRRAGGYSRKYASKAKNLADDMVRNTARDLLYYAVTQDAMLIFENLSRGFGRQGKRTFMAERQYTRMEDWLTAKLAYEGLPSKTYLSKTLAQYTSKTCSNCGFTITSADYDRVLEKLKKTATGWMTTINGKELKVEGQITYYNRYKRQNVVKDLSVELDRLSEESVNNDISSWTKGRSGEALSLLKKRFSHRPVQEKFVCLNCGFETHADEQAALNIARSWLFLRSQEYKKYQTNKTTGNTDKRAFVETWQSFYRKKLKEVWKPAV

SEQ ID NO: 30432 - protein, 979 aa, synthetic construct
  REGION 1..979: note = engineered CasX variant
QEIKRINKIRRRLVKDSNTKKAGKTRGPMKTLLVRVMTPDLRERLENLRKKPENIPQPISNTSRANLNKLLTDYTEMKKAILHVYWEEFQKDPVGLMSRVAQPASKKIDQNKLKPEMDEKGNLTTAGFACSQCGQPLFVYKLEQVSEKGKAYTNYFGRCNVAEHEKLILLAQLKPEKDSDEAVTYSLGKFGQRALDFYSIHVTKESTHPVKPLAQIAGNRYASHPVGKALSDACMGTIASFLSKYQDIIIEHQKVVKGNQKRLESLRELAGKENLEYPSVTLPPQPHTKEGVDAYNEVIARVRMWVNLNLWQKLKLSRDDAKPLLRLKGFPSFPLVERQANEVDWWDMVCNVKKLINEKKEDGKVFWQNLAGYKRQEALRPYLSSEEDRKKGKKFARYQLGDLLLHLEKKHGEDWGKVYDEAWERIDKKVEGLSKHIKLEEERRSEDAQSKAALTDWLRAKASFVIEGLKEADKDEFCRCELKLQKWYGDLRGKPFAIEAENSILDISGFSKQYNCAFIWQKDGVKKLNLYLIINYFKGGKLRFKKIKPEAFEANRFYTVINKKSGEIVPMEVNFNFDDPNLIILPLAFGKRQGREFIWNDLLSLETGSLKLANGRVIEKTLYNRRTRQDEPALFVALTFERREVLDSSNIKPMNLIGVDRGENIPAVIALTDPEGCPLSRFKDSLGNPTHILRIGERYKEKQRTIQAKKEVEQRRAGGYSRKYASKAKNLADDMVRNTARDLLYYAVTQDAMLIFENLSRGFGRQGKRTFMAERQYTRMEDWLTAKLAYEGLPSKTYLSKTLAQYTSKTCSNCGFTITSADYDRVLEKLKKTATGWMTTINGKELKVEGQITYYNRYKRQNVVKDLSVELDRLSEESVNNDISSWTKGRSGEALSLLKKRFSHRPVQEKFVCLNCGFETHADEQAALNIARSWLFLRSQEYKKYQTNKTTGNTDKRAFVETWQSFYRKKLKEVWKPAV

SEQ ID NO: 30433 - protein, 979 aa, synthetic construct
  REGION 1..979: note = engineered CasX variant
QEIKRINKIRRRLVKDSNTKKAGKTRGPMKTLLVRVMTPDLRERLENLRKKPENIPQPISNTSRANLNKLLTDYTEMKKAILHVYWEEFQKDPVGLMSRVAQPASKKIDQNKLKPEMDEKGNLTTAGFACSQCGQPLFVYKLEQVSEKGKAYTNYFGRCNVAEHEKLILLAQLKPEKDSDEAVTYSLGKFGQRALDFYSIHVTKESTHPVKPLAQIAGNRYASSPVGKALSDACMGTIASFLSKYQDIIIEHQKVVKGNQKRLESLRELAGKENLEYPSVTLPPQPHTKEGVDAYNEVIARVRMWVNLNLWQKLKLSRDDAKPLLRLKGFPSFPLVERQANEVDWWDMVCNVKKLINEKKEDGKVFWQNLAGYKRQEALRPYLSSEEDRKKGKKFARYQLGDLLLHLEKKHGEDWGKVYDEAWERIDKKVEGLSKHIKLEEERRSEDAQSKAALTDWLRAKASFVIEGLKEADKDEFCRCELKLQKWYGDLRGKPFAIEAENSILDISGFSKQYNCAFIWQKDGVKKLNLYLIINYFKGGKLRFKKIKPEAFEANRFYTVINKKSGEIVPMEVNFNFDDPNLIILPLAFGKRQGREFIWNDLLSLETGSLKLANGRVIEKTLYNRRTRQDEPALFVALTFERREVLDSSNIKPMNLIGVDRGENIPAVIALTDPEGCPLSRFKDSLGNPTHILRIGERYKEKQRTIQAKKEVEQRRAGGYSRKYASKAKNLADDMVRNTARDLLYYAVTQDAMLIFENLSRGFGRQGKRTFMAERQYTRMEDWLTAKLAYEGLPSKTYLSKTLAQYTSKTCSNCGFTITSADYDRVLEKLKKTATGWMTTINGKELKVEGQITYYNRYKRQNVVKDLSVELDRLSEESVNNDISSWTKGRSGEALSLLKKRFSHRPVQEKFVCLNCGFETHADEQAALNIARSWLFLRSQEYKKYQTNKTTGNTDKRAFVETWQSFYRKKLKEVWKPAV

SEQ ID NO: 30434 - protein, 979 aa, synthetic construct
  REGION 1..979: note = engineered CasX variant
QEIKRINKIRRRLVKDSNTKKAGKTRGPMKTLLVRVMTPDLRERLENLRKKPENIPQPISNTSRANLNKLLTDYTEMKKAILHVYWEEFQKDPVGLMSRVAQPASKKIDQNKLKPEMDEKGNLTTAGFACSQCGQPLFVYKLEQVSEKGKAYTNYFGRCNVAEHEKLILLAQLKPEKDSDEAVTYSLGKFGQRALDFYSIHVTKESTHPVKPLAQIAGNRYASTPVGKALSDACMGTIASFLSKYQDIIIEHQKVVKGNQKRLESLRELAGKENLEYPSVTLPPQPHTKEGVDAYNEVIARVRMWVNLNLWQKLKLSRDDAKPLLRLKGFPSFPLVERQANEVDWWDMVCNVKKLINEKKEDGKVFWQNLAGYKRQEALRPYLSSEEDRKKGKKFARYQLGDLLLHLEKKHGEDWGKVYDEAWERIDKKVEGLSKHIKLEEERRSEDAQSKAALTDWLRAKASFVIEGLKEADKDEFCRCELKLQKWYGDLRGKPFAIEAENSILDISGFSKQYNCAFIWQKDGVKKLNLYLIINYFKGGKLRFKKIKPEAFEANRFYTVINKKSGEIVPMEVNFNFDDPNLIILPLAFGKRQGREFIWNDLLSLETGSLKLANGRVIEKTLYNRRTRQDEPALFVALTFERREVLDSSNIKPMNLIGVDRGENIPAVIALTDPEGCPLSRFKDSLGNPTHILRIGERYKEKQRTIQAKKEVEQRRAGGYSRKYASKAKNLADDMVRNTARDLLYYAVTQDAMLIFENLSRGFGRQGKRTFMAERQYTRMEDWLTAKLAYEGLPSKTYLSKTLAQYTSKTCSNCGFTITSADYDRVLEKLKKTATGWMTTINGKELKVEGQITYYNRYKRQNVVKDLSVELDRLSEESVNNDISSWTKGRSGEALSLLKKRFSHRPVQEKFVCLNCGFETHADEQAALNIARSWLFLRSQEYKKYQTNKTTGNTDKRAFVETWQSFYRKKLKEVWKPAV

SEQ ID NO: 30435 - protein, 979 aa, synthetic construct
  REGION 1..979: note = engineered CasX variant
QEIKRINKIRRRLVKDSNTKKAGKTRGPMKTLLVRVMTPDLRERLENLRKKPENIPQPISNTSRANLNKLLTDYTEMKKAILHVYWEEFQKDPVGLMSRVAQPASKKIDQNKLKPEMDEKGNLTTAGFACSQCGQPLFVYKLEQVSEKGKAYTNYFGRCNVAEHEKLILLAQLKPEKDSDEAVTYSLGKFGQRALDFYSIHVTKESTHPVKPLAQIAGNRYASAPVGKALSDACMGTIASFLSKYQDIIIEHQKVVKGNQKRLESLRELAGKENLEYPSVTLPPQPHTKEGVDAYNEVIARVRMWVNLNLWQKLKLSRDDAKPLLRLKGFPSFPLVERQANEVDWWDMVCNVKKLINEKKEDGKVFWQNLAGYKRQEALRPYLSSEEDRKKGKKFARYQLGDLLLHLEKKHGEDWGKVYDEAWERIDKKVEGLSKHIKLEEERRSEDAQSKAALTDWLRAKASFVIEGLKEADKDEFCRCELKLQKWYGDLRGKPFAIEAENSILDISGFSKQYNCAFIWQKDGVKKLNLYLIINYFKGGKLRFKKIKPEAFEANRFYTVINKKSGEIVPMEVNFNFDDPNLIILPLAFGKRQGREFIWNDLLSLETGSLKLANGRVIEKTLYNRRTRQDEPALFVALTFERREVLDSSNIKPMNLIGVDRGENIPAVIALTDPEGCPLSRFKDSLGNPTHILRIGERYKEKQRTIQAKKEVEQRRAGGYSRKYASKAKNLADDMVRNTARDLLYYAVTQDAMLIFENLSRGFGRQGKRTFMAERQYTRMEDWLTAKLAYEGLPSKTYLSKTLAQYTSKTCSNCGFTITSADYDRVLEKLKKTATGWMTTINGKELKVEGQITYYNRYKRQNVVKDLSVELDRLSEESVNNDISSWTKGRSGEALSLLKKRFSHRPVQEKFVCLNCGFETHADEQAALNIARSWLFLRSQEYKKYQTNKTTGNTDKRAFVETWQSFYRKKLKEVWKPAV

SEQ ID NO: 30436 - protein, 979 aa, synthetic construct
  REGION 1..979: note = engineered CasX variant
QEIKRINKIRRRLVKDSNTKKAGKTRGPMKTLLVRVMTPDLRERLENLRKKPENIPQPISNTSRANLNKLLTDYTEMKKAILHVYWEEFQKDPVGLMSRVAQPASKKIDQNKLKPEMDEKGNLTTAGFACSQCGQPLFVYKLEQVSEKGKAYTNYFGRCNVAEHEKLILLAQLKPEKDSDEAVTYSLGKFGQRALDFYSIHVTKESTHPVKPLAQIAGNRYASVPVGKALSDACMGTIASFLSKYQDIIIEHQKVVKGNQKRLESLRELAGKENLEYPSVTLPPQPHTKEGVDAYNEVIARVRMWVNLNLWQKLKLSRDDAKPLLRLKGFPSFPLVERQANEVDWWDMVCNVKKLINEKKEDGKVFWQNLAGYKRQEALRPYLSSEEDRKKGKKFARYQLGDLLLHLEKKHGEDWGKVYDEAWERIDKKVEGLSKHIKLEEERRSEDAQSKAALTDWLRAKASFVIEGLKEADKDEFCRCELKLQKWYGDLRGKPFAIEAENSILDISGFSKQYNCAFIWQKDGVKKLNLYLIINYFKGGKLRFKKIKPEAFEANRFYTVINKKSGEIVPMEVNFNFDDPNLIILPLAFGKRQGREFIWNDLLSLETGSLKLANGRVIEKTLYNRRTRQDEPALFVALTFERREVLDSSNIKPMNLIGVDRGENIPAVIALTDPEGCPLSRFKDSLGNPTHILRIGERYKEKQRTIQAKKEVEQRRAGGYSRKYASKAKNLADDMVRNTARDLLYYAVTQDAMLIFENLSRGFGRQGKRTFMAERQYTRMEDWLTAKLAYEGLPSKTYLSKTLAQYTSKTCSNCGFTITSADYDRVLEKLKKTATGWMTTINGKELKVEGQITYYNRYKRQNVVKDLSVELDRLSEESVNNDISSWTKGRSGEALSLLKKRFSHRPVQEKFVCLNCGFETHADEQAALNIARSWLFLRSQEYKKYQTNKTTGNTDKRAFVETWQSFYRKKLKEVWKPAV

SEQ ID NO: 30437 - protein, 979 aa, synthetic construct
  REGION 1..979: note = engineered CasX variant
QEIKRINKIRRRLVKDSNTKKAGKTRGPMKTLLVRVMTPDLRERLENLRKKPENIPQPISNTSRANLNKLLTDYTEMKKAILHVYWEEFQKDPVGLMSRVAQPASKKIDQNKLKPEMDEKGNLTTAGFACSQCGQPLFVYKLEQVSEKGKAYTNYFGRCNVAEHEKLIKLAQLKPEKDSDEAVTYSLGKFGQRALDFYSIHVTKESTHPVKPLAQIAGNRYASGPVGKALSDACMGTIASFLSKYQDIIIEHQKVVKGNQKRLESLRELAGKENLEYPSVTLPPQPHTKEGVDAYNEVIARVRMWVNLNLWQKLKLSRDDAKPLLRLKGFPSFPLVERQANEVDWWDMVCNVKKLINEKKEDGKVFWQNLAGYKRQEALRPYLSSEEDRKKGKKFARYQLGDLLLHLEKKHGEDWGKVYDEAWERIDKKVEGLSKHIKLEEERRSEDAQSKAALTDWLRAKASFVIEGLKEADKDEFCRCELKLQKWYGDLRGKPFAIEAENSILDISGFSKQYNCAFIWQKDGVKKLNLYLIINYFKGGKLRFKKIKPEAFEANRFYTVINKKSGEIVPMEVNFNFDDPNLIILPLAFGKRQGREFIWNDLLSLETGSLKLANGRVIEKTLYNRRTRQDEPALFVALTFERREVLDSSNIKPMNLIGVDRGENIPAVIALTDPEGCPLSRFKDSLGNPTHILRIGERYKEKQRTIQAKKEVEQRRAGGYSRKYASKAKNLADDMVRNTARDLLYYAVTQDAMLIFENLSRGFGRQGKRTFMAERQYTRMEDWLTAKLAYEGLPSKTYLSKTLAQYTSKTCSNCGFTITSADYDRVLEKLKKTATGWMTTINGKELKVEGQITYYNRYKRQNVVKDLSVELDRLSEESVNNDISSWTKGRSGEALSLLKKRFSHRPVQEKFVCLNCGFETHADEQAALNIARSWLFLRSQEYKKYQTNKTTGNTDKRAFVETWQSFYRKKLKEVWKPAV

SEQ ID NO: 30438 - protein, 978 aa, synthetic construct
  REGION 1..978: note = engineered CasX variant
QEIKRINKIRRRLVKDSNTKKAGKTRGPMKTLLVRVMTPDLRERLENLRKKPENIPQPISNTSRANLNKLLTDYTEMKKAILHVYWEEFQKDPVGLMSRVAQPASKKIDQNKLKPEMDEKGNLTTAGFACSQCGQPLFVYKLEQVSEKGKAYTNYFGRCNVAEHEKLILLAQLKPEKDSDEAVTYSLGKFGQRALDFYSIHVTKESTHPVKPLAQIAGNRYASPVGKALSDACMGTIASFLSKYQDIIIEHQKVVKGNQKRLESLRELAGKENLEYPSVTLPPQPHTKEGVDAYNEVIARVRMWVNLNLWQKLKLSRDDAKPLLRLKGFPSFPLVERQANEVDWWDMVCNVKKLINEKKEDGKVFWQNLAGYKRQEALRPYLSSEEDRKKGKKFARYQLGDLLLHLEKKHGEDWGKVYDEAWERIDKKVEGLSKHIKLEEERRSEDAQSKAALTDWLRAKASFVIEGLKEADKDEFCRCELKLQKWYGDLRGKPFAIEAENSILDISGFSKQYNCAFIWQKDGVKKLNLYLIINYFKGGKLRFKKIKPEAFEANRFYTVINKKSGEIVPMEVNFNFDDPNLIILPLAFGKRQGREFIWNDLLSLETGSLKLANGRVIEKTLYNRRTRQDEPALFVALTFERREVLDSSNIKPMNLIGVDRGENIPAVIALTDPEGCPLSRFKDSLGNPTHILRIGERYKEKQRTIQAKKEVEQRRAGGYSRKYASKAKNLADDMVRNTARDLLYYAVTQDAMLIFENLSRGFGRQGKRTFMAERQYTRMEDWLTAKLAYEGLPSKTYLSKTLAQYTSKTCSNCGFTITSADYDRVLEKLKKTATGWMTTINGKELKVEGQITYYNRYKRQNVVKDLSVELDRLSEESVNNDISSWTKGRSGEALSLLKKRFSHRPVQEKFVCLNCGFETHADEQAALNIARSWLFLRSQEYKKYQTNKTTGNTDKRAFVETWQSFYRKKLKEVWKPAV

SEQ ID NO: 30439 - protein, 979 aa, synthetic construct
  REGION 1..979: note = engineered CasX variant
QEIKRINKIRRRLVKDSNTKKAGKTRGPMKTLLVRVMTPDLRERLENLRKKPENIPQPISNTSRANLNKLLTDYTEMKKAILHVYWEEFQKDPVGLMSRVAQPASKKIDQNKLKPEMDEKGNLTTAGFACSQCGQPLFVYKLEQVSEKGKAYTNYFGRCNVAEHEKLILLAQLKPEKDSDEAVTYSLGKFGQRALDFYSIHVTKESTHPVKPLAQIAGNRYASYPVGKALSDACMGTIASFLSKYQDIIIEHQKVVKGNQKRLESLRELAGKENLEYPSVTLPPQPHTKEGVDAYNEVIARVRMWVNLNLWQKLKLSRDDAKPLLRLKGFPSFPLVERQANEVDWWDMVCNVKKLINEKKEDGKVFWQNLAGYKRQEALRPYLSSEEDRKKGKKFARYQLGDLLLHLEKKHGEDWGKVYDEAWERIDKKVEGLSKHIKLEEERRSEDAQSKAALTDWLRAKASFVIEGLKEADKDEFCRCELKLQKWYGDLRGKPFAIEAENSILDISGFSKQYNCAFIWQKDGVKKLNLYLIINYFKGGKLRFKKIKPEAFEANRFYTVINKKSGEIVPMEVNFNFDDPNLIILPLAFGKRQGREFIWNDLLSLETGSLQLANGRVIEKTLYNRRTRQDEPALFVALTFERREVLDSSNIKPMNLIGVDRGENIPAVIALTDPEGCPLSRFKDSLGNPTHILRIGESYKEKQRTIQAKKEVEQRRAGGYSRKYASKAKNLADDMVRNTARDLLYYAVTQDAMLIFENLSRGFGRQGKRTFMAERQYTRMEDWLTAKLAYEGLPSKTYLSKTLAQYTSKTCSNCGFTITSADYDRVLEKLKKTATGWMTTINGKELKVEGQITYYNRYKRQNVVKDLSVELDRLSEESVNNDISSWTKGRSGEALSLLKKRFSHRPVQEKFVCLNCGFETHADEQAALNIARSWLFLRSQEYKKYQTNKTTGNTDKRAFVETWQSFYRKKLKEVWKPAV

SEQ ID NO: 30440 - protein, 979 aa, synthetic construct
  REGION 1..979: note = engineered CasX variant
QEIKRINKIRRRLVKDSNTKKAGKTRGPMKTLLVRVMTPDLRERLENLRKKPENIPQPISNTSRANLNKLLTDYTEMKKAILHVYWEEFQKDPVGLMSRVAQPASKKIDQNKLKPEMDEKGNLTTAGFACSQCGQPLFVYKLEQVSEKGKAYTNYFGRCNVAEHEKLILLAQLKPEKDSDEAVTYSLGKFGQRALDFYSIHVTKESTHPVKPLAQIAGNRYASHPVGKALSDACMGTIASFLSKYQDIIIEHQKVVKGNQKRLESLRELAGKENLEYPSVTLPPQPHTKEGVDAYNEVIARVRMWVNLNLWQKLKLSRDDAKPLLRLKGFPSFPLVERQANEVDWWDMVCNVKKLINEKKEDGKVFWQNLAGYKRQEALRPYLSSEEDRKKGKKFARYQLGDLLLHLEKKHGEDWGKVYDEAWERIDKKVEGLSKHIKLEEERRSEDAQSKAALTDWLRAKASFVIEGLKEADKDEFCRCELKLQKWYGDLRGKPFAIEAENSILDISGFSKQYNCAFIWQKDGVKKLNLYLIINYFKGGKLRFKKIKPEAFEANRFYTVINKKSGEIVPMEVNFNFDDPNLIILPLAFGKRQGREFIWNDLLSLETGSLQLANGRVIEKTLYNRRTRQDEPALFVALTFERREVLDSSNIKPMNLIGVDRGENIPAVIALTDPEGCPLSRFKDSLGNPTHILRIGESYKEKQRTIQAKKEVEQRRAGGYSRKYASKAKNLADDMVRNTARDLLYYAVTQDAMLIFENLSRGFGRQGKRTFMAERQYTRMEDWLTAKLAYEGLPSKTYLSKTLAQYTSKTCSNCGFTITSADYDRVLEKLKKTATGWMTTINGKELKVEGQITYYNRYKRQNVVKDLSVELDRLSEESVNNDISSWTKGRSGEALSLLKKRFSHRPVQEKFVCLNCGFETHADEQAALNIARSWLFLRSQEYKKYQTNKTTGNTDKRAFVETWQSFYRKKLKEVWKPAV

SEQ ID NO: 30441 - protein, 979 aa, synthetic construct
  REGION 1..979: note = engineered CasX variant
QEIKRINKIRRRLVKDSNTKKAGKTRGPMKTLLVRVMTPDLRERLENLRKKPENIPQPISNTSRANLNKLLTDYTEMKKAILHVYWEEFQKDPVGLMSRVAQPASKKIDQNKLKPEMDEKGNLTTAGFACSQCGQPLFVYKLEQVSEKGKAYTNYFGRCNVAEHEKLILLAQLKPEKDSDEAVTYSLGKFGQRALDFYSIHVTKESTHPVKPLAQIAGNRYASSPVGKALSDACMGTIASFLSKYQDIIIEHQKVVKGNQKRLESLRELAGKENLEYPSVTLPPQPHTKEGVDAYNEVIARVRMWVNLNLWQKLKLSRDDAKPLLRLKGFPSFPLVERQANEVDWWDMVCNVKKLINEKKEDGKVFWQNLAGYKRQEALRPYLSSEEDRKKGKKFARYQLGDLLLHLEKKHGEDWGKVYDEAWERIDKKVEGLSKHIKLEEERRSEDAQSKAALTDWLRAKASFVIEGLKEADKDEFCRCELKLQKWYGDLRGKPFAIEAENSILDISGFSKQYNCAFIWQKDGVKKLNLYLIINYFKGGKLRFKKIKPEAFEANRFYTVINKKSGEIVPMEVNFNFDDPNLIILPLAFGKRQGREFIWNDLLSLETGSLQLANGRVIEKTLYNRRTRQDEPALFVALTFERREVLDSSNIKPMNLIGVDRGENIPAVIALTDPEGCPLSRFKDSLGNPTHILRIGESYKEKQRTIQAKKEVEQRRAGGYSRKYASKAKNLADDMVRNTARDLLYYAVTQDAMLIFENLSRGFGRQGKRTFMAERQYTRMEDWLTAKLAYEGLPSKTYLSKTLAQYTSKTCSNCGFTITSADYDRVLEKLKKTATGWMTTINGKELKVEGQITYYNRYKRQNVVKDLSVELDRLSEESVNNDISSWTKGRSGEALSLLKKRFSHRPVQEKFVCLNCGFETHADEQAALNIARSWLFLRSQEYKKYQTNKTTGNTDKRAFVETWQSFYRKKLKEVWKPAV

SEQ ID NO: 30442 - protein, 979 aa, synthetic construct
  REGION 1..979: note = engineered CasX variant
QEIKRINKIRRRLVKDSNTKKAGKTRGPMKTLLVRVMTPDLRERLENLRKKPENIPQPISNTSRANLNKLLTDYTEMKKAILHVYWEEFQKDPVGLMSRVAQPASKKIDQNKLKPEMDEKGNLTTAGFACSQCGQPLFVYKLEQVSEKGKAYTNYFGRCNVAEHEKLILLAQLKPEKDSDEAVTYSLGKFGQRALDFYSIHVTKESTHPVKPLAQIAGNRYASTPVGKALSDACMGTIASFLSKYQDIIIEHQKVVKGNQKRLESLRELAGKENLEYPSVTLPPQPHTKEGVDAYNEVIARVRMWVNLNLWQKLKLSRDDAKPLLRLKGFPSFPLVERQANEVDWWDMVCNVKKLINEKKEDGKVFWQNLAGYKRQEALRPYLSSEEDRKKGKKFARYQLGDLLLHLEKKHGEDWGKVYDEAWERIDKKVEGLSKHIKLEEERRSEDAQSKAALTDWLRAKASFVIEGLKEADKDEFCRCELKLQKWYGDLRGKPFAIEAENSILDISGFSKQYNCAFIWQKDGVKKLNLYLIINYFKGGKLRFKKIKPEAFEANRFYTVINKKSGEIVPMEVNFNFDDPNLIILPLAFGKRQGREFIWNDLLSLETGSLQLANGRVIEKTLYNRRTRQDEPALFVALTFERREVLDSSNIKPMNLIGVDRGENIPAVIALTDPEGCPLSRFKDSLGNPTHILRIGESYKEKQRTIQAKKEVEQRRAGGYSRKYASKAKNLADDMVRNTARDLLYYAVTQDAMLIFENLSRGFGRQGKRTFMAERQYTRMEDWLTAKLAYEGLPSKTYLSKTLAQYTSKTCSNCGFTITSADYDRVLEKLKKTATGWMTTINGKELKVEGQITYYNRYKRQNVVKDLSVELDRLSEESVNNDISSWTKGRSGEALSLLKKRFSHRPVQEKFVCLNCGFETHADEQAALNIARSWLFLRSQEYKKYQTNKTTGNTDKRAFVETWQSFYRKKLKEVWKPAV

SEQ ID NO: 30443 - protein, 979 aa, synthetic construct
  REGION 1..979: note = engineered CasX variant
QEIKRINKIRRRLVKDSNTKKAGKTRGPMKTLLVRVMTPDLRERLENLRKKPENIPQPISNTSRANLNKLLTDYTEMKKAILHVYWEEFQKDPVGLMSRVAQPASKKIDQNKLKPEMDEKGNLTTAGFACSQCGQPLFVYKLEQVSEKGKAYTNYFGRCNVAEHEKLILLAQLKPEKDSDEAVTYSLGKFGQRALDFYSIHVTKESTHPVKPLAQIAGNRYASAPVGKALSDACMGTIASFLSKYQDIIIEHQKVVKGNQKRLESLRELAGKENLEYPSVTLPPQPHTKEGVDAYNEVIARVRMWVNLNLWQKLKLSRDDAKPLLRLKGFPSFPLVERQANEVDWWDMVCNVKKLINEKKEDGKVFWQNLAGYKRQEALRPYLSSEEDRKKGKKFARYQLGDLLLHLEKKHGEDWGKVYDEAWERIDKKVEGLSKHIKLEEERRSEDAQSKAALTDWLRAKASFVIEGLKEADKDEFCRCELKLQKWYGDLRGKPFAIEAENSILDISGFSKQYNCAFIWQKDGVKKLNLYLIINYFKGGKLRFKKIKPEAFEANRFYTVINKKSGEIVPMEVNFNFDDPNLIILPLAFGKRQGREFIWNDLLSLETGSLQLANGRVIEKTLYNRRTRQDEPALFVALTFERREVLDSSNIKPMNLIGVDRGENIPAVIALTDPEGCPLSRFKDSLGNPTHILRIGESYKEKQRTIQAKKEVEQRRAGGYSRKYASKAKNLADDMVRNTARDLLYYAVTQDAMLIFENLSRGFGRQGKRTFMAERQYTRMEDWLTAKLAYEGLPSKTYLSKTLAQYTSKTCSNCGFTITSADYDRVLEKLKKTATGWMTTINGKELKVEGQITYYNRYKRQNVVKDLSVELDRLSEESVNNDISSWTKGRSGEALSLLKKRFSHRPVQEKFVCLNCGFETHADEQAALNIARSWLFLRSQEYKKYQTNKTTGNTDKRAFVETWQSFYRKKLKEVWKPAV

SEQ ID NO: 30444 - protein, 979 aa, synthetic construct
  REGION 1..979: note = engineered CasX variant
QEIKRINKIRRRLVKDSNTKKAGKTRGPMKTLLVRVMTPDLRERLENLRKKPENIPQPISNTSRANLNKLLTDYTEMKKAILHVYWEEFQKDPVGLMSRVAQPASKKIDQNKLKPEMDEKGNLTTAGFACSQCGQPLFVYKLEQVSEKGKAYTNYFGRCNVAEHEKLILLAQLKPEKDSDEAVTYSLGKFGQRALDFYSIHVTKESTHPVKPLAQIAGNRYASVPVGKALSDACMGTIASFLSKYQDIIIEHQKVVKGNQKRLESLRELAGKENLEYPSVTLPPQPHTKEGVDAYNEVIARVRMWVNLNLWQKLKLSRDDAKPLLRLKGFPSFPLVERQANEVDWWDMVCNVKKLINEKKEDGKVFWQNLAGYKRQEALRPYLSSEEDRKKGKKFARYQLGDLLLHLEKKHGEDWGKVYDEAWERIDKKVEGLSKHIKLEEERRSEDAQSKAALTDWLRAKASFVIEGLKEADKDEFCRCELKLQKWYGDLRGKPFAIEAENSILDISGFSKQYNCAFIWQKDGVKKLNLYLIINYFKGGKLRFKKIKPEAFEANRFYTVINKKSGEIVPMEVNFNFDDPNLIILPLAFGKRQGREFIWNDLLSLETGSLQLANGRVIEKTLYNRRTRQDEPALFVALTFERREVLDSSNIKPMNLIGVDRGENIPAVIALTDPEGCPLSRFKDSLGNPTHILRIGESYKEKQRTIQAKKEVEQRRAGGYSRKYASKAKNLADDMVRNTARDLLYYAVTQDAMLIFENLSRGFGRQGKRTFMAERQYTRMEDWLTAKLAYEGLPSKTYLSKTLAQYTSKTCSNCGFTITSADYDRVLEKLKKTATGWMTTINGKELKVEGQITYYNRYKRQNVVKDLSVELDRLSEESVNNDISSWTKGRSGEALSLLKKRFSHRPVQEKFVCLNCGFETHADEQAALNIARSWLFLRSQEYKKYQTNKTTGNTDKRAFVETWQSFYRKKLKEVWKPAV

SEQ ID NO: 30445 - protein, 979 aa, synthetic construct
  REGION 1..979: note = engineered CasX variant
QEIKRINKIRRRLVKDSNTKKAGKTRGPMKTLLVRVMTPDLRERLENLRKKPENIPQPISNTSRANLNKLLTDYTEMKKAILHVYWEEFQKDPVGLMSRVAQPASKKIDQNKLKPEMDEKGNLTTAGFACSQCGQPLFVYKLEQVSEKGKAYTNYFGRCNVAEHEKLIKLAQLKPEKDSDEAVTYSLGKFGQRALDFYSIHVTKESTHPVKPLAQIAGNRYASGPVGKALSDACMGTIASFLSKYQDIIIEHQKVVKGNQKRLESLRELAGKENLEYPSVTLPPQPHTKEGVDAYNEVIARVRMWVNLNLWQKLKLSRDDAKPLLRLKGFPSFPLVERQANEVDWWDMVCNVKKLINEKKEDGKVFWQNLAGYKRQEALRPYLSSEEDRKKGKKFARYQLGDLLLHLEKKHGEDWGKVYDEAWERIDKKVEGLSKHIKLEEERRSEDAQSKAALTDWLRAKASFVIEGLKEADKDEFCRCELKLQKWYGDLRGKPFAIEAENSILDISGFSKQYNCAFIWQKDGVKKLNLYLIINYFKGGKLRFKKIKPEAFEANRFYTVINKKSGEIVPMEVNFNFDDPNLIILPLAFGKRQGREFIWNDLLSLETGSLQLANGRVIEKTLYNRRTRQDEPALFVALTFERREVLDSSNIKPMNLIGVDRGENIPAVIALTDPEGCPLSRFKDSLGNPTHILRIGESYKEKQRTIQAKKEVEQRRAGGYSRKYASKAKNLADDMVRNTARDLLYYAVTQDAMLIFENLSRGFGRQGKRTFMAERQYTRMEDWLTAKLAYEGLPSKTYLSKTLAQYTSKTCSNCGFTITSADYDRVLEKLKKTATGWMTTINGKELKVEGQITYYNRYKRQNVVKDLSVELDRLSEESVNNDISSWTKGRSGEALSLLKKRFSHRPVQEKFVCLNCGFETHADEQAALNIARSWLFLRSQEYKKYQTNKTTGNTDKRAFVETWQSFYRKKLKEVWKPAV

SEQ ID NO: 30446 - protein, 978 aa, synthetic construct
  REGION 1..978: note = engineered CasX variant
QEIKRINKIRRRLVKDSNTKKAGKTRGPMKTLLVRVMTPDLRERLENLRKKPENIPQPISNTSRANLNKLLTDYTEMKKAILHVYWEEFQKDPVGLMSRVAQPASKKIDQNKLKPEMDEKGNLTTAGFACSQCGQPLFVYKLEQVSEKGKAYTNYFGRCNVAEHEKLILLAQLKPEKDSDEAVTYSLGKFGQRALDFYSIHVTKESTHPVKPLAQIAGNRYASPVGKALSDACMGTIASFLSKYQDIIIEHQKVVKGNQKRLESLRELAGKENLEYPSVTLPPQPHTKEGVDAYNEVIARVRMWVNLNLWQKLKLSRDDAKPLLRLKGFPSFPLVERQANEVDWWDMVCNVKKLINEKKEDGKVFWQNLAGYKRQEALRPYLSSEEDRKKGKKFARYQLGDLLLHLEKKHGEDWGKVYDEAWERIDKKVEGLSKHIKLEEERRSEDAQSKAALTDWLRAKASFVIEGLKEADKDEFCRCELKLQKWYGDLRGKPFAIEAENSILDISGFSKQYNCAFIWQKDGVKKLNLYLIINYFKGGKLRFKKIKPEAFEANRFYTVINKKSGEIVPMEVNFNFDDPNLIILPLAFGKRQGREFIWNDLLSLETGSLQLANGRVIEKTLYNRRTRQDEPALFVALTFERREVLDSSNIKPMNLIGVDRGENIPAVIALTDPEGCPLSRFKDSLGNPTHILRIGESYKEKQRTIQAKKEVEQRRAGGYSRKYASKAKNLADDMVRNTARDLLYYAVTQDAMLIFENLSRGFGRQGKRTFMAERQYTRMEDWLTAKLAYEGLPSKTYLSKTLAQYTSKTCSNCGFTITSADYDRVLEKLKKTATGWMTTINGKELKVEGQITYYNRYKRQNVVKDLSVELDRLSEESVNNDISSWTKGRSGEALSLLKKRFSHRPVQEKFVCLNCGFETHADEQAALNIARSWLFLRSQEYKKYQTNKTTGNTDKRAFVETWQSFYRKKLKEVWKPAV

SEQ ID NO: 30447 - protein, 979 aa, synthetic construct
  REGION 1..979: note = engineered CasX variant
QEIKRINKIRRRLVKDSNTKKAGKTGPMKTLLVRVMTPDLRERLENLRKKPENIPQPISNTSRANLNKLLTDYTEMKKAILHVYWEEFQKDPVGLMSRVAQPASKKIDQNKLKPEMDEKGNLTTAGFACSQCGQPLFVYKLEQVSEKGKAYTNYFGRCNVAEHEKLILLDQLKPEKDSDEAVTYSLGKFGQRALDFYSIHVTKESTHPVKPLAQIAGNRYASSYPVGKALSDACMGTIASFLSKYQDIIIEHQKVVKGNQKRLESLRELAGKENLEYPSVTLPPQPHTKEGVDAYNEVIARVRMWVNLNLWQKLKLSRDDAKPLLRLKGFPSFPLVERQANEVDWWDMVCNVKKLINEKKEDGKVFWQNLAGYKRQEALRPYLSSEEDRKKGKKFARYQLGDLLLHLEKKHGEDWGKVYDEAWERIDKKVEGLSKHIKLEEERRSEDAQSKAALTDWLRAKASFVIEGLKEADKDEFCRCELKLQKWYGDLRGKPFAIEAENSILDISGFSKQYNCAFIWQKDGVKKLNLYLIINYFKGGKLRFKKIKPEAFEANRFYTVINKKSGEIVPMEVNFNFDDPNLIILPLAFGKRQGREFIWNDLLSLETGSLKLANGRVIEKTLYNRRTRQDEPALFVALTFERREVLDSSNIKPMNLIGVDRGENIPAVIALTDPEGCPLSRFKDSLGNPTHILRIGESYKEKQRTIQAKKEVEQRRAGGYSRKYASKAKNLADDMVRNTARDLLYYAVTQDAMLIFENLSRGFGRQGKRTFMAERQYTRMEDWLTAKLAYEGLPSKTYLSKTLAQYTSKTCSNCGFTITSADYDRVLEKLKKTATGWMTTINGKELKVEGQITYYNRYKRQNVVKDLSVELDRLSEESVNNDISSWTKGRSGEALSLLKKRFSHRPVQEKFVCLNCGFETHADEQAALNIARSWLFLRSQEYKKYQTNKTTGNTDKRAFVETWQSFYRKKLKEVWKPAV

SEQ ID NO: 30448 - protein, 979 aa, synthetic construct
  REGION 1..979: note = engineered CasX variant
QEIKRINKIRRRLVKDSNTKKAGKTGPMKTLLVRVMTPDLRERLENLRKKPENIPQPISNTSRANLNKLLTDYTEMKKAILHVYWEEFQKDPVGLMSRVAQPASKKIDQNKLKPEMDEKGNLTTAGFACSQCGQPLFVYKLEQVSEKGKAYTNYFGRCNVAEHEKLILLDQLKPEKDSDEAVTYSLGKFGQRALDFYSIHVTKESTHPVKPLAQIAGNRYASSHPVGKALSDACMGTIASFLSKYQDIIIEHQKVVKGNQKRLESLRELAGKENLEYPSVTLPPQPHTKEGVDAYNEVIARVRMWVNLNLWQKLKLSRDDAKPLLRLKGFPSFPLVERQANEVDWWDMVCNVKKLINEKKEDGKVFWQNLAGYKRQEALRPYLSSEEDRKKGKKFARYQLGDLLLHLEKKHGEDWGKVYDEAWERIDKKVEGLSKHIKLEEERRSEDAQSKAALTDWLRAKASFVIEGLKEADKDEFCRCELKLQKWYGDLRGKPFAIEAENSILDISGFSKQYNCAFIWQKDGVKKLNLYLIINYFKGGKLRFKKIKPEAFEANRFYTVINKKSGEIVPMEVNFNFDDPNLIILPLAFGKRQGREFIWNDLLSLETGSLKLANGRVIEKTLYNRRTRQDEPALFVALTFERREVLDSSNIKPMNLIGVDRGENIPAVIALTDPEGCPLSRFKDSLGNPTHILRIGESYKEKQRTIQAKKEVEQRRAGGYSRKYASKAKNLADDMVRNTARDLLYYAVTQDAMLIFENLSRGFGRQGKRTFMAERQYTRMEDWLTAKLAYEGLPSKTYLSKTLAQYTSKTCSNCGFTITSADYDRVLEKLKKTATGWMTTINGKELKVEGQITYYNRYKRQNVVKDLSVELDRLSEESVNNDISSWTKGRSGEALSLLKKRFSHRPVQEKFVCLNCGFETHADEQAALNIARSWLFLRSQEYKKYQTNKTTGNTDKRAFVETWQSFYRKKLKEVWKPAV

SEQ ID NO: 30449 - protein, 979 aa, synthetic construct
  REGION 1..979: note = engineered CasX variant
QEIKRINKIRRRLVKDSNTKKAGKTGPMKTLLVRVMTPDLRERLENLRKKPENIPQPISNTSRANLNKLLTDYTEMKKAILHVYWEEFQKDPVGLMSRVAQPASKKIDQNKLKPEMDEKGNLTTAGFACSQCGQPLFVYKLEQVSEKGKAYTNYFGRCNVAEHEKLILLDQLKPEKDSDEAVTYSLGKFGQRALDFYSIHVTKESTHPVKPLAQIAGNRYASSSPVGKALSDACMGTIASFLSKYQDIIIEHQKVVKGNQKRLESLRELAGKENLEYPSVTLPPQPHTKEGVDAYNEVIARVRMWVNLNLWQKLKLSRDDAKPLLRLKGFPSFPLVERQANEVDWWDMVCNVKKLINEKKEDGKVFWQNLAGYKRQEALRPYLSSEEDRKKGKKFARYQLGDLLLHLEKKHGEDWGKVYDEAWERIDKKVEGLSKHIKLEEERRSEDAQSKAALTDWLRAKASFVIEGLKEADKDEFCRCELKLQKWYGDLRGKPFAIEAENSILDISGFSKQYNCAFIWQKDGVKKLNLYLIINYFKGGKLRFKKIKPEAFEANRFYTVINKKSGEIVPMEVNFNFDDPNLIILPLAFGKRQGREFIWNDLLSLETGSLKLANGRVIEKTLYNRRTRQDEPALFVALTFERREVLDSSNIKPMNLIGVDRGENIPAVIALTDPEGCPLSRFKDSLGNPTHILRIGESYKEKQRTIQAKKEVEQRRAGGYSRKYASKAKNLADDMVRNTARDLLYYAVTQDAMLIFENLSRGFGRQGKRTFMAERQYTRMEDWLTAKLAYEGLPSKTYLSKTLAQYTSKTCSNCGFTITSADYDRVLEKLKKTATGWMTTINGKELKVEGQITYYNRYKRQNVVKDLSVELDRLSEESVNNDISSWTKGRSGEALSLLKKRFSHRPVQEKFVCLNCGFETHADEQAALNIARSWLFLRSQEYKKYQTNKTTGNTDKRAFVETWQSFYRKKLKEVWKPAV

SEQ ID NO: 30450 - protein, 979 aa, synthetic construct
  REGION 1..979: note = engineered CasX variant
QEIKRINKIRRRLVKDSNTKKAGKTGPMKTLLVRVMTPDLRERLENLRKKPENIPQPISNTSRANLNKLLTDYTEMKKAILHVYWEEFQKDPVGLMSRVAQPASKKIDQNKLKPEMDEKGNLTTAGFACSQCGQPLFVYKLEQVSEKGKAYTNYFGRCNVAEHEKLILLDQLKPEKDSDEAVTYSLGKFGQRALDFYSIHVTKESTHPVKPLAQIAGNRYASSTPVGKALSDACMGTIASFLSKYQDIIIEHQKVVKGNQKRLESLRELAGKENLEYPSVTLPPQPHTKEGVDAYNEVIARVRMWVNLNLWQKLKLSRDDAKPLLRLKGFPSFPLVERQANEVDWWDMVCNVKKLINEKKEDGKVFWQNLAGYKRQEALRPYLSSEEDRKKGKKFARYQLGDLLLHLEKKHGEDWGKVYDEAWERIDKKVEGLSKHIKLEEERRSEDAQSKAALTDWLRAKASFVIEGLKEADKDEFCRCELKLQKWYGDLRGKPFAIEAENSILDISGFSKQYNCAFIWQKDGVKKLNLYLIINYFKGGKLRFKKIKPEAFEANRFYTVINKKSGEIVPMEVNFNFDDPNLIILPLAFGKRQGREFIWNDLLSLETGSLKLANGRVIEKTLYNRRTRQDEPALFVALTFERREVLDSSNIKPMNLIGVDRGENIPAVIALTDPEGCPLSRFKDSLGNPTHILRIGESYKEKQRTIQAKKEVEQRRAGGYSRKYASKAKNLADDMVRNTARDLLYYAVTQDAMLIFENLSRGFGRQGKRTFMAERQYTRMEDWLTAKLAYEGLPSKTYLSKTLAQYTSKTCSNCGFTITSADYDRVLEKLKKTATGWMTTINGKELKVEGQITYYNRYKRQNVVKDLSVELDRLSEESVNNDISSWTKGRSGEALSLLKKRFSHRPVQEKFVCLNCGFETHADEQAALNIARSWLFLRSQEYKKYQTNKTTGNTDKRAFVETWQSFYRKKLKEVWKPAV

SEQ ID NO: 30451 - protein, 979 aa, synthetic construct
  REGION 1..979: note = engineered CasX variant
QEIKRINKIRRRLVKDSNTKKAGKTGPMKTLLVRVMTPDLRERLENLRKKPENIPQPISNTSRANLNKLLTDYTEMKKAILHVYWEEFQKDPVGLMSRVAQPASKKIDQNKLKPEMDEKGNLTTAGFACSQCGQPLFVYKLEQVSEKGKAYTNYFGRCNVAEHEKLILLDQLKPEKDSDEAVTYSLGKFGQRALDFYSIHVTKESTHPVKPLAQIAGNRYASSAPVGKALSDACMGTIASFLSKYQDIIIEHQKVVKGNQKRLESLRELAGKENLEYPSVTLPPQPHTKEGVDAYNEVIARVRMWVNLNLWQKLKLSRDDAKPLLRLKGFPSFPLVERQANEVDWWDMVCNVKKLINEKKEDGKVFWQNLAGYKRQEALRPYLSSEEDRKKGKKFARYQLGDLLLHLEKKHGEDWGKVYDEAWERIDKKVEGLSKHIKLEEERRSEDAQSKAALTDWLRAKASFVIEGLKEADKDEFCRCELKLQKWYGDLRGKPFAIEAENSILDISGFSKQYNCAFIWQKDGVKKLNLYLIINYFKGGKLRFKKIKPEAFEANRFYTVINKKSGEIVPMEVNFNFDDPNLIILPLAFGKRQGREFIWNDLLSLETGSLKLANGRVIEKTLYNRRTRQDEPALFVALTFERREVLDSSNIKPMNLIGVDRGENIPAVIALTDPEGCPLSRFKDSLGNPTHILRIGESYKEKQRTIQAKKEVEQRRAGGYSRKYASKAKNLADDMVRNTARDLLYYAVTQDAMLIFENLSRGFGRQGKRTFMAERQYTRMEDWLTAKLAYEGLPSKTYLSKTLAQYTSKTCSNCGFTITSADYDRVLEKLKKTATGWMTTINGKELKVEGQITYYNRYKRQNVVKDLSVELDRLSEESVNNDISSWTKGRSGEALSLLKKRFSHRPVQEKFVCLNCGFETHADEQAALNIARSWLFLRSQEYKKYQTNKTTGNTDKRAFVETWQSFYRKKLKEVWKPAV

SEQ ID NO: 30452 - protein, 979 aa, synthetic construct
  REGION 1..979: note = engineered CasX variant
QEIKRINKIRRRLVKDSNTKKAGKTGPMKTLLVRVMTPDLRERLENLRKKPENIPQPISNTSRANLNKLLTDYTEMKKAILHVYWEEFQKDPVGLMSRVAQPASKKIDQNKLKPEMDEKGNLTTAGFACSQCGQPLFVYKLEQVSEKGKAYTNYFGRCNVAEHEKLILLDQLKPEKDSDEAVTYSLGKFGQRALDFYSIHVTKESTHPVKPLAQIAGNRYASSVPVGKALSDACMGTIASFLSKYQDIIIEHQKVVKGNQKRLESLRELAGKENLEYPSVTLPPQPHTKEGVDAYNEVIARVRMWVNLNLWQKLKLSRDDAKPLLRLKGFPSFPLVERQANEVDWWDMVCNVKKLINEKKEDGKVFWQNLAGYKRQEALRPYLSSEEDRKKGKKFARYQLGDLLLHLEKKHGEDWGKVYDEAWERIDKKVEGLSKHIKLEEERRSEDAQSKAALTDWLRAKASFVIEGLKEADKDEFCRCELKLQKWYGDLRGKPFAIEAENSILDISGFSKQYNCAFIWQKDGVKKLNLYLIINYFKGGKLRFKKIKPEAFEANRFYTVINKKSGEIVPMEVNFNFDDPNLIILPLAFGKRQGREFIWNDLLSLETGSLKLANGRVIEKTLYNRRTRQDEPALFVALTFERREVLDSSNIKPMNLIGVDRGENIPAVIALTDPEGCPLSRFKDSLGNPTHILRIGESYKEKQRTIQAKKEVEQRRAGGYSRKYASKAKNLADDMVRNTARDLLYYAVTQDAMLIFENLSRGFGRQGKRTFMAERQYTRMEDWLTAKLAYEGLPSKTYLSKTLAQYTSKTCSNCGFTITSADYDRVLEKLKKTATGWMTTINGKELKVEGQITYYNRYKRQNVVKDLSVELDRLSEESVNNDISSWTKGRSGEALSLLKKRFSHRPVQEKFVCLNCGFETHADEQAALNIARSWLFLRSQEYKKYQTNKTTGNTDKRAFVETWQSFYRKKLKEVWKPAV

SEQ ID NO: 30453 - protein, 978 aa, synthetic construct
  REGION 1..978: note = engineered CasX variant
QEIKRINKIRRRLVKDSNTKKAGKTGPMKTLLVRVMTPDLRERLENLRKKPENIPQPISNTSRANLNKLLTDYTEMKKAILHVYWEEFQKDPVGLMSRVAQPASKKIDQNKLKPEMDEKGNLTTAGFACSQCGQPLFVYKLEQVSEKGKAYTNYFGRCNVAEHEKLIKLDQLKPEKDSDEAVTYSLGKFGQRALDFYSIHVTKESTHPVKPLAQIAGNRYASSPVGKALSDACMGTIASFLSKYQDIIIEHQKVVKGNQKRLESLRELAGKENLEYPSVTLPPQPHTKEGVDAYNEVIARVRMWVNLNLWQKLKLSRDDAKPLLRLKGFPSFPLVERQANEVDWWDMVCNVKKLINEKKEDGKVFWQNLAGYKRQEALRPYLSSEEDRKKGKKFARYQLGDLLLHLEKKHGEDWGKVYDEAWERIDKKVEGLSKHIKLEEERRSEDAQSKAALTDWLRAKASFVIEGLKEADKDEFCRCELKLQKWYGDLRGKPFAIEAENSILDISGFSKQYNCAFIWQKDGVKKLNLYLIINYFKGGKLRFKKIKPEAFEANRFYTVINKKSGEIVPMEVNFNFDDPNLIILPLAFGKRQGREFIWNDLLSLETGSLKLANGRVIEKTLYNRRTRQDEPALFVALTFERREVLDSSNIKPMNLIGVDRGENIPAVIALTDPEGCPLSRFKDSLGNPTHILRIGESYKEKQRTIQAKKEVEQRRAGGYSRKYASKAKNLADDMVRNTARDLLYYAVTQDAMLIFENLSRGFGRQGKRTFMAERQYTRMEDWLTAKLAYEGLPSKTYLSKTLAQYTSKTCSNCGFTITSADYDRVLEKLKKTATGWMTTINGKELKVEGQITYYNRYKRQNVVKDLSVELDRLSEESVNNDISSWTKGRSGEALSLLKKRFSHRPVQEKFVCLNCGFETHADEQAALNIARSWLFLRSQEYKKYQTNKTTGNTDKRAFVETWQSFYRKKLKEVWKPAV

SEQ ID NO: 30454 - protein, 979 aa, synthetic construct
  REGION 1..979: note = engineered CasX variant
QEGKRINKIRRRLVKDSNTKKAGKTGPMKTLLVRVMTPDLRERLENLRKKPENIPQPISNTSRANLNKLLTDYTEMKKAILHVYWEEFQKDPVGLMSRVAQPASKKIDQNKLKPEMDEKGNLTTAGFACSQCGQPLFVYKLEQVSEKGKAYTNYFGRCNVAEHEKLILLAQLKPEKDSDEAVTYSLGKFGQRALDFYSIHVTKESTHPVKPLAQIAGNRYASSYPVGKALSDACMGTIASFLSKYQDIIIEHQKVVKGNQKRLESLRELAGKENLEYPSVTLPPQPHTKEGVDAYNEVIARVRMWVNLNLWQKLKLSRDDAKPLLRLKGFPSFPLVERQANEVDWWDMVCNVKKLINEKKEDGKVFWQNLAGYKRQEALRPYLSSEEDRKKGKKFARYQLGDLLLHLEKKHGEDWGKVYDEAWERIDKKVEGLSKHIKLEEERRSEDAQSKAALTDWLRAKASFVIEGLKEADKDEFCRCELKLQKWYGDLRGKPFAIEAENSILDISGFSKQYNCAFIWQKDGVKKLNLYLIINYFKGGKLRFKKIKPEAFEANRFYTVINKKSGEIVPMEVNFNFDDPNLIILPLAFGKRQGREFIWNDLLSLETGSLKLANGRVIEKTLYNRRTRQDEPALFVALTFERREVLDSSNIKPMNLIGVDRGENIPAVIALTDPEGCPLSRFKDSLGNPTHILRIGESYKEKQRTIQAKKEVEQRRAGGYSRKYASKAKNLADDMVRNTARDLLYYAVTQDAMLIFENLSRGFGRQGKRTFMAERQYTRMEDWLTAKLAYEGLPSKTYLSKTLAQYTSKTCSNCGFTITSADYDRVLEKLKKTATGWMTTINGKELKVEGQITYYNRYKRQNVVKDLSVELDRLSEESVNNDISSWTKGRSGEALSLLKKRFSHRPVQEKFVCLNCGFETHADEQAALNIARSWLFLRSQEYKKYQTNKTTGNTDKRAFVETWQSFYRKKLKEVWKPAV

SEQ ID NO: 30455 - protein, 979 aa, synthetic construct
  REGION 1..979: note = engineered CasX variant
QEGKRINKIRRRLVKDSNTKKAGKTGPMKTLLVRVMTPDLRERLENLRKKPENIPQPISNTSRANLNKLLTDYTEMKKAILHVYWEEFQKDPVGLMSRVAQPASKKIDQNKLKPEMDEKGNLTTAGFACSQCGQPLFVYKLEQVSEKGKAYTNYFGRCNVAEHEKLILLAQLKPEKDSDEAVTYSLGKFGQRALDFYSIHVTKESTHPVKPLAQIAGNRYASSHPVGKALSDACMGTIASFLSKYQDIIIEHQKVVKGNQKRLESLRELAGKENLEYPSVTLPPQPHTKEGVDAYNEVIARVRMWVNLNLWQKLKLSRDDAKPLLRLKGFPSFPLVERQANEVDWWDMVCNVKKLINEKKEDGKVFWQNLAGYKRQEALRPYLSSEEDRKKGKKFARYQLGDLLLHLEKKHGEDWGKVYDEAWERIDKKVEGLSKHIKLEEERRSEDAQSKAALTDWLRAKASFVIEGLKEADKDEFCRCELKLQKWYGDLRGKPFAIEAENSILDISGFSKQYNCAFIWQKDGVKKLNLYLIINYFKGGKLRFKKIKPEAFEANRFYTVINKKSGEIVPMEVNFNFDDPNLIILPLAFGKRQGREFIWNDLLSLETGSLKLANGRVIEKTLYNRRTRQDEPALFVALTFERREVLDSSNIKPMNLIGVDRGENIPAVIALTDPEGCPLSRFKDSLGNPTHILRIGESYKEKQRTIQAKKEVEQRRAGGYSRKYASKAKNLADDMVRNTARDLLYYAVTQDAMLIFENLSRGFGRQGKRTFMAERQYTRMEDWLTAKLAYEGLPSKTYLSKTLAQYTSKTCSNCGFTITSADYDRVLEKLKKTATGWMTTINGKELKVEGQITYYNRYKRQNVVKDLSVELDRLSEESVNNDISSWTKGRSGEALSLLKKRFSHRPVQEKFVCLNCGFETHADEQAALNIARSWLFLRSQEYKKYQTNKTTGNTDKRAFVETWQSFYRKKLKEVWKPAV

SEQ ID NO: 30456 - protein, 979 aa, synthetic construct
  REGION 1..979: note = engineered CasX variant
QEGKRINKIRRRLVKDSNTKKAGKTGPMKTLLVRVMTPDLRERLENLRKKPENIPQPISNTSRANLNKLLTDYTEMKKAILHVYWEEFQKDPVGLMSRVAQPASKKIDQNKLKPEMDEKGNLTTAGFACSQCGQPLFVYKLEQVSEKGKAYTNYFGRCNVAEHEKLILLAQLKPEKDSDEAVTYSLGKFGQRALDFYSIHVTKESTHPVKPLAQIAGNRYASSSPVGKALSDACMGTIASFLSKYQDIIIEHQKVVKGNQKRLESLRELAGKENLEYPSVTLPPQPHTKEGVDAYNEVIARVRMWVNLNLWQKLKLSRDDAKPLLRLKGFPSFPLVERQANEVDWWDMVCNVKKLINEKKEDGKVFWQNLAGYKRQEALRPYLSSEEDRKKGKKFARYQLGDLLLHLEKKHGEDWGKVYDEAWERIDKKVEGLSKHIKLEEERRSEDAQSKAALTDWLRAKASFVIEGLKEADKDEFCRCELKLQKWYGDLRGKPFAIEAENSILDISGFSKQYNCAFIWQKDGVKKLNLYLIINYFKGGKLRFKKIKPEAFEANRFYTVINKKSGEIVPMEVNFNFDDPNLIILPLAFGKRQGREFIWNDLLSLETGSLKLANGRVIEKTLYNRRTRQDEPALFVALTFERREVLDSSNIKPMNLIGVDRGENIPAVIALTDPEGCPLSRFKDSLGNPTHILRIGESYKEKQRTIQAKKEVEQRRAGGYSRKYASKAKNLADDMVRNTARDLLYYAVTQDAMLIFENLSRGFGRQGKRTFMAERQYTRMEDWLTAKLAYEGLPSKTYLSKTLAQYTSKTCSNCGFTITSADYDRVLEKLKKTATGWMTTINGKELKVEGQITYYNRYKRQNVVKDLSVELDRLSEESVNNDISSWTKGRSGEALSLLKKRFSHRPVQEKFVCLNCGFETHADEQAALNIARSWLFLRSQEYKKYQTNKTTGNTDKRAFVETWQSFYRKKLKEVWKPAV

SEQ ID NO: 30457 - protein, 979 aa, synthetic construct
  REGION 1..979: note = engineered CasX variant
QEGKRINKIRRRLVKDSNTKKAGKTGPMKTLLVRVMTPDLRERLENLRKKPENIPQPISNTSRANLNKLLTDYTEMKKAILHVYWEEFQKDPVGLMSRVAQPASKKIDQNKLKPEMDEKGNLTTAGFACSQCGQPLFVYKLEQVSEKGKAYTNYFGRCNVAEHEKLILLAQLKPEKDSDEAVTYSLGKFGQRALDFYSIHVTKESTHPVKPLAQIAGNRYASSTPVGKALSDACMGTIASFLSKYQDIIIEHQKVVKGNQKRLESLRELAGKENLEYPSVTLPPQPHTKEGVDAYNEVIARVRMWVNLNLWQKLKLSRDDAKPLLRLKGFPSFPLVERQANEVDWWDMVCNVKKLINEKKEDGKVFWQNLAGYKRQEALRPYLSSEEDRKKGKKFARYQLGDLLLHLEKKHGEDWGKVYDEAWERIDKKVEGLSKHIKLEEERRSEDAQSKAALTDWLRAKASFVIEGLKEADKDEFCRCELKLQKWYGDLRGKPFAIEAENSILDISGFSKQYNCAFIWQKDGVKKLNLYLIINYFKGGKLRFKKIKPEAFEANRFYTVINKKSGEIVPMEVNFNFDDPNLIILPLAFGKRQGREFIWNDLLSLETGSLKLANGRVIEKTLYNRRTRQDEPALFVALTFERREVLDSSNIKPMNLIGVDRGENIPAVIALTDPEGCPLSRFKDSLGNPTHILRIGESYKEKQRTIQAKKEVEQRRAGGYSRKYASKAKNLADDMVRNTARDLLYYAVTQDAMLIFENLSRGFGRQGKRTFMAERQYTRMEDWLTAKLAYEGLPSKTYLSKTLAQYTSKTCSNCGFTITSADYDRVLEKLKKTATGWMTTINGKELKVEGQITYYNRYKRQNVVKDLSVELDRLSEESVNNDISSWTKGRSGEALSLLKKRFSHRPVQEKFVCLNCGFETHADEQAALNIARSWLFLRSQEYKKYQTNKTTGNTDKRAFVETWQSFYRKKLKEVWKPAV

SEQ ID NO: 30458 - protein, 979 aa, synthetic construct
  REGION 1..979: note = engineered CasX variant
QEGKRINKIRRRLVKDSNTKKAGKTGPMKTLLVRVMTPDLRERLENLRKKPENIPQPISNTSRANLNKLLTDYTEMKKAILHVYWEEFQKDPVGLMSRVAQPASKKIDQNKLKPEMDEKGNLTTAGFACSQCGQPLFVYKLEQVSEKGKAYTNYFGRCNVAEHEKLILLAQLKPEKDSDEAVTYSLGKFGQRALDFYSIHVTKESTHPVKPLAQIAGNRYASSAPVGKALSDACMGTIASFLSKYQDIIIEHQKVVKGNQKRLESLRELAGKENLEYPSVTLPPQPHTKEGVDAYNEVIARVRMWVNLNLWQKLKLSRDDAKPLLRLKGFPSFPLVERQANEVDWWDMVCNVKKLINEKKEDGKVFWQNLAGYKRQEALRPYLSSEEDRKKGKKFARYQLGDLLLHLEKKHGEDWGKVYDEAWERIDKKVEGLSKHIKLEEERRSEDAQSKAALTDWLRAKASFVIEGLKEADKDEFCRCELKLQKWYGDLRGKPFAIEAENSILDISGFSKQYNCAFIWQKDGVKKLNLYLIINYFKGGKLRFKKIKPEAFEANRFYTVINKKSGEIVPMEVNFNFDDPNLIILPLAFGKRQGREFIWNDLLSLETGSLKLANGRVIEKTLYNRRTRQDEPALFVALTFERREVLDSSNIKPMNLIGVDRGENIPAVIALTDPEGCPLSRFKDSLGNPTHILRIGESYKEKQRTIQAKKEVEQRRAGGYSRKYASKAKNLADDMVRNTARDLLYYAVTQDAMLIFENLSRGFGRQGKRTFMAERQYTRMEDWLTAKLAYEGLPSKTYLSKTLAQYTSKTCSNCGFTITSADYDRVLEKLKKTATGWMTTINGKELKVEGQITYYNRYKRQNVVKDLSVELDRLSEESVNNDISSWTKGRSGEALSLLKKRFSHRPVQEKFVCLNCGFETHADEQAALNIARSWLFLRSQEYKKYQTNKTTGNTDKRAFVETWQSFYRKKLKEVWKPAV

SEQ ID NO: 30459 - protein, 979 aa, synthetic construct
  REGION 1..979: note = engineered CasX variant
QEGKRINKIRRRLVKDSNTKKAGKTGPMKTLLVRVMTPDLRERLENLRKKPENIPQPISNTSRANLNKLLTDYTEMKKAILHVYWEEFQKDPVGLMSRVAQPASKKIDQNKLKPEMDEKGNLTTAGFACSQCGQPLFVYKLEQVSEKGKAYTNYFGRCNVAEHEKLILLAQLKPEKDSDEAVTYSLGKFGQRALDFYSIHVTKESTHPVKPLAQIAGNRYASSVPVGKALSDACMGTIASFLSKYQDIIIEHQKVVKGNQKRLESLRELAGKENLEYPSVTLPPQPHTKEGVDAYNEVIARVRMWVNLNLWQKLKLSRDDAKPLLRLKGFPSFPLVERQANEVDWWDMVCNVKKLINEKKEDGKVFWQNLAGYKRQEALRPYLSSEEDRKKGKKFARYQLGDLLLHLEKKHGEDWGKVYDEAWERIDKKVEGLSKHIKLEEERRSEDAQSKAALTDWLRAKASFVIEGLKEADKDEFCRCELKLQKWYGDLRGKPFAIEAENSILDISGFSKQYNCAFIWQKDGVKKLNLYLIINYFKGGKLRFKKIKPEAFEANRFYTVINKKSGEIVPMEVNFNFDDPNLIILPLAFGKRQGREFIWNDLLSLETGSLKLANGRVIEKTLYNRRTRQDEPALFVALTFERREVLDSSNIKPMNLIGVDRGENIPAVIALTDPEGCPLSRFKDSLGNPTHILRIGESYKEKQRTIQAKKEVEQRRAGGYSRKYASKAKNLADDMVRNTARDLLYYAVTQDAMLIFENLSRGFGRQGKRTFMAERQYTRMEDWLTAKLAYEGLPSKTYLSKTLAQYTSKTCSNCGFTITSADYDRVLEKLKKTATGWMTTINGKELKVEGQITYYNRYKRQNVVKDLSVELDRLSEESVNNDISSWTKGRSGEALSLLKKRFSHRPVQEKFVCLNCGFETHADEQAALNIARSWLFLRSQEYKKYQTNKTTGNTDKRAFVETWQSFYRKKLKEVWKPAV

SEQ ID NO: 30460 - protein, 978 aa, synthetic construct
  REGION 1..978: note = engineered CasX variant
QEGKRINKIRRRLVKDSNTKKAGKTGPMKTLLVRVMTPDLRERLENLRKKPENIPQPISNTSRANLNKLLTDYTEMKKAILHVYWEEFQKDPVGLMSRVAQPASKKIDQNKLKPEMDEKGNLTTAGFACSQCGQPLFVYKLEQVSEKGKAYTNYFGRCNVAEHEKLIKLAQLKPEKDSDEAVTYSLGKFGQRALDFYSIHVTKESTHPVKPLAQIAGNRYASSPVGKALSDACMGTIASFLSKYQDIIIEHQKVVKGNQKRLESLRELAGKENLEYPSVTLPPQPHTKEGVDAYNEVIARVRMWVNLNLWQKLKLSRDDAKPLLRLKGFPSFPLVERQANEVDWWDMVCNVKKLINEKKEDGKVFWQNLAGYKRQEALRPYLSSEEDRKKGKKFARYQLGDLLLHLEKKHGEDWGKVYDEAWERIDKKVEGLSKHIKLEEERRSEDAQSKAALTDWLRAKASFVIEGLKEADKDEFCRCELKLQKWYGDLRGKPFAIEAENSILDISGFSKQYNCAFIWQKDGVKKLNLYLIINYFKGGKLRFKKIKPEAFEANRFYTVINKKSGEIVPMEVNFNFDDPNLIILPLAFGKRQGREFIWNDLLSLETGSLKLANGRVIEKTLYNRRTRQDEPALFVALTFERREVLDSSNIKPMNLIGVDRGENIPAVIALTDPEGCPLSRFKDSLGNPTHILRIGESYKEKQRTIQAKKEVEQRRAGGYSRKYASKAKNLADDMVRNTARDLLYYAVTQDAMLIFENLSRGFGRQGKRTFMAERQYTRMEDWLTAKLAYEGLPSKTYLSKTLAQYTSKTCSNCGFTITSADYDRVLEKLKKTATGWMTTINGKELKVEGQITYYNRYKRQNVVKDLSVELDRLSEESVNNDISSWTKGRSGEALSLLKKRFSHRPVQEKFVCLNCGFETHADEQAALNIARSWLFLRSQEYKKYQTNKTTGNTDKRAFVETWQSFYRKKLKEVWKPAV

SEQ ID NO: 30461 - protein, 980 aa, synthetic construct
  REGION 1..980: note = engineered CasX variant
QEIGKRINKIRRRLVKDSNTKKAGKTGPMKTLLVRVMTPDLRERLENLRKKPENIPQPISNTSRANLNKLLTDYTEMKKAILHVYWEEFQKDPVGLMSRVAQPASKKIDQNKLKPEMDEKGNLTTAGFACSQCGQPLFVYKLEQVSEKGKAYTNYFGRCNVAEHEKLILLAQLKPEKDSDEAVTYSLGKFGQRALDFYSIHVTKESTHPVKPLAQIAGNRYASSYPVGKALSDACMGTIASFLSKYQDIIIEHQKVVKGNQKRLESLRELAGKENLEYPSVTLPPQPHTKEGVDAYNEVIARVRMWVNLNLWQKLKLSRDDAKPLLRLKGFPSFPLVERQANEVDWWDMVCNVKKLINEKKEDGKVFWQNLAGYKRQEALRPYLSSEEDRKKGKKFARYQLGDLLLHLEKKHGEDWGKVYDEAWERIDKKVEGLSKHIKLEEERRSEDAQSKAALTDWLRAKASFVIEGLKEADKDEFCRCELKLQKWYGDLRGKPFAIEAENSILDISGFSKQYNCAFIWQKDGVKKLNLYLIINYFKGGKLRFKKIKPEAFEANRFYTVINKKSGEIVPMEVNFNFDDPNLIILPLAFGKRQGREFIWNDLLSLETGSLKLANGRVIEKTLYNRRTRQDEPALFVALTFERREVLDSSNIKPMNLIGVDRGENIPAVIALTDPEGCPLSRFKDSLGNPTHILRIGESYKEKQRTIQAKKEVEQRRAGGYSRKYASKAKNLADDMVRNTARDLLYYAVTQDAMLIFENLSRGFGRQGKRTFMAERQYTRMEDWLTAKLAYEGLPSKTYLSKTLAQYTSKTCSNCGFTITSADYDRVLEKLKKTATGWMTTINGKELKVEGQITYYNRYKRQNVVKDLSVELDRLSEESVNNDISSWTKGRSGEALSLLKKRFSHRPVQEKFVCLNCGFETHADEQAALNIARSWLFLRSQEYKKYQTNKTTGNTDKRAFVETWQSFYRKKLKEVWKPAV

SEQ ID NO: 30462 - protein, 980 aa, synthetic construct
  REGION 1..980: note = engineered CasX variant
QEIGKRINKIRRRLVKDSNTKKAGKTGPMKTLLVRVMTPDLRERLENLRKKPENIPQPISNTSRANLNKLLTDYTEMKKAILHVYWEEFQKDPVGLMSRVAQPASKKIDQNKLKPEMDEKGNLTTAGFACSQCGQPLFVYKLEQVSEKGKAYTNYFGRCNVAEHEKLILLAQLKPEKDSDEAVTYSLGKFGQRALDFYSIHVTKESTHPVKPLAQIAGNRYASSHPVGKALSDACMGTIASFLSKYQDIIIEHQKVVKGNQKRLESLRELAGKENLEYPSVTLPPQPHTKEGVDAYNEVIARVRMWVNLNLWQKLKLSRDDAKPLLRLKGFPSFPLVERQANEVDWWDMVCNVKKLINEKKEDGKVFWQNLAGYKRQEALRPYLSSEEDRKKGKKFARYQLGDLLLHLEKKHGEDWGKVYDEAWERIDKKVEGLSKHIKLEEERRSEDAQSKAALTDWLRAKASFVIEGLKEADKDEFCRCELKLQKWYGDLRGKPFAIEAENSILDISGFSKQYNCAFIWQKDGVKKLNLYLIINYFKGGKLRFKKIKPEAFEANRFYTVINKKSGEIVPMEVNFNFDDPNLIILPLAFGKRQGREFIWNDLLSLETGSLKLANGRVIEKTLYNRRTRQDEPALFVALTFERREVLDSSNIKPMNLIGVDRGENIPAVIALTDPEGCPLSRFKDSLGNPTHILRIGESYKEKQRTIQAKKEVEQRRAGGYSRKYASKAKNLADDMVRNTARDLLYYAVTQDAMLIFENLSRGFGRQGKRTFMAERQYTRMEDWLTAKLAYEGLPSKTYLSKTLAQYTSKTCSNCGFTITSADYDRVLEKLKKTATGWMTTINGKELKVEGQITYYNRYKRQNVVKDLSVELDRLSEESVNNDISSWTKGRSGEALSLLKKRFSHRPVQEKFVCLNCGFETHADEQAALNIARSWLFLRSQEYKKYQTNKTTGNTDKRAFVETWQSFYRKKLKEVWKPAV

SEQ ID NO: 30463 - protein, 980 aa, synthetic construct
  REGION 1..980: note = engineered CasX variant
QEIGKRINKIRRRLVKDSNTKKAGKTGPMKTLLVRVMTPDLRERLENLRKKPENIPQPISNTSRANLNKLLTDYTEMKKAILHVYWEEFQKDPVGLMSRVAQPASKKIDQNKLKPEMDEKGNLTTAGFACSQCGQPLFVYKLEQVSEKGKAYTNYFGRCNVAEHEKLILLAQLKPEKDSDEAVTYSLGKFGQRALDFYSIHVTKESTHPVKPLAQIAGNRYASSSPVGKALSDACMGTIASFLSKYQDIIIEHQKVVKGNQKRLESLRELAGKENLEYPSVTLPPQPHTKEGVDAYNEVIARVRMWVNLNLWQKLKLSRDDAKPLLRLKGFPSFPLVERQANEVDWWDMVCNVKKLINEKKEDGKVFWQNLAGYKRQEALRPYLSSEEDRKKGKKFARYQLGDLLLHLEKKHGEDWGKVYDEAWERIDKKVEGLSKHIKLEEERRSEDAQSKAALTDWLRAKASFVIEGLKEADKDEFCRCELKLQKWYGDLRGKPFAIEAENSILDISGFSKQYNCAFIWQKDGVKKLNLYLIINYFKGGKLRFKKIKPEAFEANRFYTVINKKSGEIVPMEVNFNFDDPNLIILPLAFGKRQGREFIWNDLLSLETGSLKLANGRVIEKTLYNRRTRQDEPALFVALTFERREVLDSSNIKPMNLIGVDRGENIPAVIALTDPEGCPLSRFKDSLGNPTHILRIGESYKEKQRTIQAKKEVEQRRAGGYSRKYASKAKNLADDMVRNTARDLLYYAVTQDAMLIFENLSRGFGRQGKRTFMAERQYTRMEDWLTAKLAYEGLPSKTYLSKTLAQYTSKTCSNCGFTITSADYDRVLEKLKKTATGWMTTINGKELKVEGQITYYNRYKRQNVVKDLSVELDRLSEESVNNDISSWTKGRSGEALSLLKKRFSHRPVQEKFVCLNCGFETHADEQAALNIARSWLFLRSQEYKKYQTNKTTGNTDKRAFVETWQSFYRKKLKEVWKPAV

SEQ ID NO: 30464 - protein, 980 aa, synthetic construct
  REGION 1..980: note = engineered CasX variant
QEIGKRINKIRRRLVKDSNTKKAGKTGPMKTLLVRVMTPDLRERLENLRKKPENIPQPISNTSRANLNKLLTDYTEMKKAILHVYWEEFQKDPVGLMSRVAQPASKKIDQNKLKPEMDEKGNLTTAGFACSQCGQPLFVYKLEQVSEKGKAYTNYFGRCNVAEHEKLILLAQLKPEKDSDEAVTYSLGKFGQRALDFYSIHVTKESTHPVKPLAQIAGNRYASSTPVGKALSDACMGTIASFLSKYQDIIIEHQKVVKGNQKRLESLRELAGKENLEYPSVTLPPQPHTKEGVDAYNEVIARVRMWVNLNLWQKLKLSRDDAKPLLRLKGFPSFPLVERQANEVDWWDMVCNVKKLINEKKEDGKVFWQNLAGYKRQEALRPYLSSEEDRKKGKKFARYQLGDLLLHLEKKHGEDWGKVYDEAWERIDKKVEGLSKHIKLEEERRSEDAQSKAALTDWLRAKASFVIEGLKEADKDEFCRCELKLQKWYGDLRGKPFAIEAENSILDISGFSKQYNCAFIWQKDGVKKLNLYLIINYFKGGKLRFKKIKPEAFEANRFYTVINKKSGEIVPMEVNFNFDDPNLIILPLAFGKRQGREFIWNDLLSLETGSLKLANGRVIEKTLYNRRTRQDEPALFVALTFERREVLDSSNIKPMNLIGVDRGENIPAVIALTDPEGCPLSRFKDSLGNPTHILRIGESYKEKQRTIQAKKEVEQRRAGGYSRKYASKAKNLADDMVRNTARDLLYYAVTQDAMLIFENLSRGFGRQGKRTFMAERQYTRMEDWLTAKLAYEGLPSKTYLSKTLAQYTSKTCSNCGFTITSADYDRVLEKLKKTATGWMTTINGKELKVEGQITYYNRYKRQNVVKDLSVELDRLSEESVNNDISSWTKGRSGEALSLLKKRFSHRPVQEKFVCLNCGFETHADEQAALNIARSWLFLRSQEYKKYQTNKTTGNTDKRAFVETWQSFYRKKLKEVWKPAV

SEQ ID NO: 30465 - protein, 980 aa, synthetic construct
  REGION 1..980: note = engineered CasX variant
QEIGKRINKIRRRLVKDSNTKKAGKTGPMKTLLVRVMTPDLRERLENLRKKPENIPQPISNTSRANLNKLLTDYTEMKKAILHVYWEEFQKDPVGLMSRVAQPASKKIDQNKLKPEMDEKGNLTTAGFACSQCGQPLFVYKLEQVSEKGKAYTNYFGRCNVAEHEKLILLAQLKPEKDSDEAVTYSLGKFGQRALDFYSIHVTKESTHPVKPLAQIAGNRYASSAPVGKALSDACMGTIASFLSKYQDIIIEHQKVVKGNQKRLESLRELAGKENLEYPSVTLPPQPHTKEGVDAYNEVIARVRMWVNLNLWQKLKLSRDDAKPLLRLKGFPSFPLVERQANEVDWWDMVCNVKKLINEKKEDGKVFWQNLAGYKRQEALRPYLSSEEDRKKGKKFARYQLGDLLLHLEKKHGEDWGKVYDEAWERIDKKVEGLSKHIKLEEERRSEDAQSKAALTDWLRAKASFVIEGLKEADKDEFCRCELKLQKWYGDLRGKPFAIEAENSILDISGFSKQYNCAFIWQKDGVKKLNLYLIINYFKGGKLRFKKIKPEAFEANRFYTVINKKSGEIVPMEVNFNFDDPNLIILPLAFGKRQGREFIWNDLLSLETGSLKLANGRVIEKTLYNRRTRQDEPALFVALTFERREVLDSSNIKPMNLIGVDRGENIPAVIALTDPEGCPLSRFKDSLGNPTHILRIGESYKEKQRTIQAKKEVEQRRAGGYSRKYASKAKNLADDMVRNTARDLLYYAVTQDAMLIFENLSRGFGRQGKRTFMAERQYTRMEDWLTAKLAYEGLPSKTYLSKTLAQYTSKTCSNCGFTITSADYDRVLEKLKKTATGWMTTINGKELKVEGQITYYNRYKRQNVVKDLSVELDRLSEESVNNDISSWTKGRSGEALSLLKKRFSHRPVQEKFVCLNCGFETHADEQAALNIARSWLFLRSQEYKKYQTNKTTGNTDKRAFVETWQSFYRKKLKEVWKPAV

SEQ ID NO: 30466 - protein, 980 aa, synthetic construct
  REGION 1..980: note = engineered CasX variant
QEIGKRINKIRRRLVKDSNTKKAGKTGPMKTLLVRVMTPDLRERLENLRKKPENIPQPISNTSRANLNKLLTDYTEMKKAILHVYWEEFQKDPVGLMSRVAQPASKKIDQNKLKPEMDEKGNLTTAGFACSQCGQPLFVYKLEQVSEKGKAYTNYFGRCNVAEHEKLILLAQLKPEKDSDEAVTYSLGKFGQRALDFYSIHVTKESTHPVKPLAQIAGNRYASSVPVGKALSDACMGTIASFLSKYQDIIIEHQKVVKGNQKRLESLRELAGKENLEYPSVTLPPQPHTKEGVDAYNEVIARVRMWVNLNLWQKLKLSRDDAKPLLRLKGFPSFPLVERQANEVDWWDMVCNVKKLINEKKEDGKVFWQNLAGYKRQEALRPYLSSEEDRKKGKKFARYQLGDLLLHLEKKHGEDWGKVYDEAWERIDKKVEGLSKHIKLEEERRSEDAQSKAALTDWLRAKASFVIEGLKEADKDEFCRCELKLQKWYGDLRGKPFAIEAENSILDISGFSKQYNCAFIWQKDGVKKLNLYLIINYFKGGKLRFKKIKPEAFEANRFYTVINKKSGEIVPMEVNFNFDDPNLIILPLAFGKRQGREFIWNDLLSLETGSLKLANGRVIEKTLYNRRTRQDEPALFVALTFERREVLDSSNIKPMNLIGVDRGENIPAVIALTDPEGCPLSRFKDSLGNPTHILRIGESYKEKQRTIQAKKEVEQRRAGGYSRKYASKAKNLADDMVRNTARDLLYYAVTQDAMLIFENLSRGFGRQGKRTFMAERQYTRMEDWLTAKLAYEGLPSKTYLSKTLAQYTSKTCSNCGFTITSADYDRVLEKLKKTATGWMTTINGKELKVEGQITYYNRYKRQNVVKDLSVELDRLSEESVNNDISSWTKGRSGEALSLLKKRFSHRPVQEKFVCLNCGFETHADEQAALNIARSWLFLRSQEYKKYQTNKTTGNTDKRAFVETWQSFYRKKLKEVWKPAV

SEQ ID NO: 30467 - protein, 979 aa, synthetic construct
  REGION 1..979: note = engineered CasX variant
QEIGKRINKIRRRLVKDSNTKKAGKTGPMKTLLVRVMTPDLRERLENLRKKPENIPQPISNTSRANLNKLLTDYTEMKKAILHVYWEEFQKDPVGLMSRVAQPASKKIDQNKLKPEMDEKGNLTTAGFACSQCGQPLFVYKLEQVSEKGKAYTNYFGRCNVAEHEKLIKLAQLKPEKDSDEAVTYSLGKFGQRALDFYSIHVTKESTHPVKPLAQIAGNRYASSPVGKALSDACMGTIASFLSKYQDIIIEHQKVVKGNQKRLESLRELAGKENLEYPSVTLPPQPHTKEGVDAYNEVIARVRMWVNLNLWQKLKLSRDDAKPLLRLKGFPSFPLVERQANEVDWWDMVCNVKKLINEKKEDGKVFWQNLAGYKRQEALRPYLSSEEDRKKGKKFARYQLGDLLLHLEKKHGEDWGKVYDEAWERIDKKVEGLSKHIKLEEERRSEDAQSKAALTDWLRAKASFVIEGLKEADKDEFCRCELKLQKWYGDLRGKPFAIEAENSILDISGFSKQYNCAFIWQKDGVKKLNLYLIINYFKGGKLRFKKIKPEAFEANRFYTVINKKSGEIVPMEVNFNFDDPNLIILPLAFGKRQGREFIWNDLLSLETGSLKLANGRVIEKTLYNRRTRQDEPALFVALTFERREVLDSSNIKPMNLIGVDRGENIPAVIALTDPEGCPLSRFKDSLGNPTHILRIGESYKEKQRTIQAKKEVEQRRAGGYSRKYASKAKNLADDMVRNTARDLLYYAVTQDAMLIFENLSRGFGRQGKRTFMAERQYTRMEDWLTAKLAYEGLPSKTYLSKTLAQYTSKTCSNCGFTITSADYDRVLEKLKKTATGWMTTINGKELKVEGQITYYNRYKRQNVVKDLSVELDRLSEESVNNDISSWTKGRSGEALSLLKKRFSHRPVQEKFVCLNCGFETHADEQAALNIARSWLFLRSQEYKKYQTNKTTGNTDKRAFVETWQSFYRKKLKEVWKPAV

SEQ ID NO: 30468 - protein, 979 aa, synthetic construct
  REGION 1..979: note = engineered CasX variant
QEIGRINKIRRRLVKDSNTKKAGKTGPMKTLLVRVMTPDLRERLENLRKKPENIPQPISNTSRANLNKLLTDYTEMKKAILHVYWEEFQKDPVGLMSRVAQPASKKIDQNKLKPEMDEKGNLTTAGFACSQCGQPLFVYKLEQVSEKGKAYTNYFGRCNVAEHEKLILLAQLKPEKDSDEAVTYSLGKFGQRALDFYSIHVTKESTHPVKPLAQIAGNRYASSYPVGKALSDACMGTIASFLSKYQDIIIEHQKVVKGNQKRLESLRELAGKENLEYPSVTLPPQPHTKEGVDAYNEVIARVRMWVNLNLWQKLKLSRDDAKPLLRLKGFPSFPLVERQANEVDWWDMVCNVKKLINEKKEDGKVFWQNLAGYKRQEALRPYLSSEEDRKKGKKFARYQLGDLLLHLEKKHGEDWGKVYDEAWERIDKKVEGLSKHIKLEEERRSEDAQSKAALTDWLRAKASFVIEGLKEADKDEFCRCELKLQKWYGDLRGKPFAIEAENSILDISGFSKQYNCAFIWQKDGVKKLNLYLIINYFKGGKLRFKKIKPEAFEANRFYTVINKKSGEIVPMEVNFNFDDPNLIILPLAFGKRQGREFIWNDLLSLETGSLKLANGRVIEKTLYNRRTRQDEPALFVALTFERREVLDSSNIKPMNLIGVDRGENIPAVIALTDPEGCPLSRFKDSLGNPTHILRIGESYKEKQRTIQAKKEVEQRRAGGYSRKYASKAKNLADDMVRNTARDLLYYAVTQDAMLIFENLSRGFGRQGKRTFMAERQYTRMEDWLTAKLAYEGLPSKTYLSKTLAQYTSKTCSNCGFTITSADYDRVLEKLKKTATGWMTTINGKELKVEGQITYYNRYKRQNVVKDLSVELDRLSEESVNNDISSWTKGRSGEALSLLKKRFSHRPVQEKFVCLNCGFETHADEQAALNIARSWLFLRSQEYKKYQTNKTTGNTDKRAFVETWQSFYRKKLKEVWKPAV

SEQ ID NO: 30469 - protein, 979 aa, synthetic construct
  REGION 1..979: note = engineered CasX variant
QEIGRINKIRRRLVKDSNTKKAGKTGPMKTLLVRVMTPDLRERLENLRKKPENIPQPISNTSRANLNKLLTDYTEMKKAILHVYWEEFQKDPVGLMSRVAQPASKKIDQNKLKPEMDEKGNLTTAGFACSQCGQPLFVYKLEQVSEKGKAYTNYFGRCNVAEHEKLILLAQLKPEKDSDEAVTYSLGKFGQRALDFYSIHVTKESTHPVKPLAQIAGNRYASSHPVGKALSDACMGTIASFLSKYQDIIIEHQKVVKGNQKRLESLRELAGKENLEYPSVTLPPQPHTKEGVDAYNEVIARVRMWVNLNLWQKLKLSRDDAKPLLRLKGFPSFPLVERQANEVDWWDMVCNVKKLINEKKEDGKVFWQNLAGYKRQEALRPYLSSEEDRKKGKKFARYQLGDLLLHLEKKHGEDWGKVYDEAWERIDKKVEGLSKHIKLEEERRSEDAQSKAALTDWLRAKASFVIEGLKEADKDEFCRCELKLQKWYGDLRGKPFAIEAENSILDISGFSKQYNCAFIWQKDGVKKLNLYLIINYFKGGKLRFKKIKPEAFEANRFYTVINKKSGEIVPMEVNFNFDDPNLIILPLAFGKRQGREFIWNDLLSLETGSLKLANGRVIEKTLYNRRTRQDEPALFVALTFERREVLDSSNIKPMNLIGVDRGENIPAVIALTDPEGCPLSRFKDSLGNPTHILRIGESYKEKQRTIQAKKEVEQRRAGGYSRKYASKAKNLADDMVRNTARDLLYYAVTQDAMLIFENLSRGFGRQGKRTFMAERQYTRMEDWLTAKLAYEGLPSKTYLSKTLAQYTSKTCSNCGFTITSADYDRVLEKLKKTATGWMTTINGKELKVEGQITYYNRYKRQNVVKDLSVELDRLSEESVNNDISSWTKGRSGEALSLLKKRFSHRPVQEKFVCLNCGFETHADEQAALNIARSWLFLRSQEYKKYQTNKTTGNTDKRAFVETWQSFYRKKLKEVWKPAV

SEQ ID NO: 30470 - protein, 979 aa, synthetic construct
  REGION 1..979: note = engineered CasX variant
QEIGRINKIRRRLVKDSNTKKAGKTGPMKTLLVRVMTPDLRERLENLRKKPENIPQPISNTSRANLNKLLTDYTEMKKAILHVYWEEFQKDPVGLMSRVAQPASKKIDQNKLKPEMDEKGNLTTAGFACSQCGQPLFVYKLEQVSEKGKAYTNYFGRCNVAEHEKLILLAQLKPEKDSDEAVTYSLGKFGQRALDFYSIHVTKESTHPVKPLAQIAGNRYASSSPVGKALSDACMGTIASFLSKYQDIIIEHQKVVKGNQKRLESLRELAGKENLEYPSVTLPPQPHTKEGVDAYNEVIARVRMWVNLNLWQKLKLSRDDAKPLLRLKGFPSFPLVERQANEVDWWDMVCNVKKLINEKKEDGKVFWQNLAGYKRQEALRPYLSSEEDRKKGKKFARYQLGDLLLHLEKKHGEDWGKVYDEAWERIDKKVEGLSKHIKLEEERRSEDAQSKAALTDWLRAKASFVIEGLKEADKDEFCRCELKLQKWYGDLRGKPFAIEAENSILDISGFSKQYNCAFIWQKDGVKKLNLYLIINYFKGGKLRFKKIKPEAFEANRFYTVINKKSGEIVPMEVNFNFDDPNLIILPLAFGKRQGREFIWNDLLSLETGSLKLANGRVIEKTLYNRRTRQDEPALFVALTFERREVLDSSNIKPMNLIGVDRGENIPAVIALTDPEGCPLSRFKDSLGNPTHILRIGESYKEKQRTIQAKKEVEQRRAGGYSRKYASKAKNLADDMVRNTARDLLYYAVTQDAMLIFENLSRGFGRQGKRTFMAERQYTRMEDWLTAKLAYEGLPSKTYLSKTLAQYTSKTCSNCGFTITSADYDRVLEKLKKTATGWMTTINGKELKVEGQITYYNRYKRQNVVKDLSVELDRLSEESVNNDISSWTKGRSGEALSLLKKRFSHRPVQEKFVCLNCGFETHADEQAALNIARSWLFLRSQEYKKYQTNKTTGNTDKRAFVETWQSFYRKKLKEVWKPAV

SEQ ID NO: 30471 - protein, 979 aa, synthetic construct
  REGION 1..979: note = engineered CasX variant
QEIGRINKIRRRLVKDSNTKKAGKTGPMKTLLVRVMTPDLRERLENLRKKPENIPQPISNTSRANLNKLLTDYTEMKKAILHVYWEEFQKDPVGLMSRVAQPASKKIDQNKLKPEMDEKGNLTTAGFACSQCGQPLFVYKLEQVSEKGKAYTNYFGRCNVAEHEKLILLAQLKPEKDSDEAVTYSLGKFGQRALDFYSIHVTKESTHPVKPLAQIAGNRYASSTPVGKALSDACMGTIASFLSKYQDIIIEHQKVVKGNQKRLESLRELAGKENLEYPSVTLPPQPHTKEGVDAYNEVIARVRMWVNLNLWQKLKLSRDDAKPLLRLKGFPSFPLVERQANEVDWWDMVCNVKKLINEKKEDGKVFWQNLAGYKRQEALRPYLSSEEDRKKGKKFARYQLGDLLLHLEKKHGEDWGKVYDEAWERIDKKVEGLSKHIKLEEERRSEDAQSKAALTDWLRAKASFVIEGLKEADKDEFCRCELKLQKWYGDLRGKPFAIEAENSILDISGFSKQYNCAFIWQKDGVKKLNLYLIINYFKGGKLRFKKIKPEAFEANRFYTVINKKSGEIVPMEVNFNFDDPNLIILPLAFGKRQGREFIWNDLLSLETGSLKLANGRVIEKTLYNRRTRQDEPALFVALTFERREVLDSSNIKPMNLIGVDRGENIPAVIALTDPEGCPLSRFKDSLGNPTHILRIGESYKEKQRTIQAKKEVEQRRAGGYSRKYASKAKNLADDMVRNTARDLLYYAVTQDAMLIFENLSRGFGRQGKRTFMAERQYTRMEDWLTAKLAYEGLPSKTYLSKTLAQYTSKTCSNCGFTITSADYDRVLEKLKKTATGWMTTINGKELKVEGQITYYNRYKRQNVVKDLSVELDRLSEESVNNDISSWTKGRSGEALSLLKKRFSHRPVQEKFVCLNCGFETHADEQAALNIARSWLFLRSQEYKKYQTNKTTGNTDKRAFVETWQSFYRKKLKEVWKPAV

SEQ ID NO: 30472 - protein, 979 aa, synthetic construct
  REGION 1..979: note = engineered CasX variant
QEIGRINKIRRRLVKDSNTKKAGKTGPMKTLLVRVMTPDLRERLENLRKKPENIPQPISNTSRANLNKLLTDYTEMKKAILHVYWEEFQKDPVGLMSRVAQPASKKIDQNKLKPEMDEKGNLTTAGFACSQCGQPLFVYKLEQVSEKGKAYTNYFGRCNVAEHEKLILLAQLKPEKDSDEAVTYSLGKFGQRALDFYSIHVTKESTHPVKPLAQIAGNRYASSAPVGKALSDACMGTIASFLSKYQDIIIEHQKVVKGNQKRLESLRELAGKENLEYPSVTLPPQPHTKEGVDAYNEVIARVRMWVNLNLWQKLKLSRDDAKPLLRLKGFPSFPLVERQANEVDWWDMVCNVKKLINEKKEDGKVFWQNLAGYKRQEALRPYLSSEEDRKKGKKFARYQLGDLLLHLEKKHGEDWGKVYDEAWERIDKKVEGLSKHIKLEEERRSEDAQSKAALTDWLRAKASFVIEGLKEADKDEFCRCELKLQKWYGDLRGKPFAIEAENSILDISGFSKQYNCAFIWQKDGVKKLNLYLIINYFKGGKLRFKKIKPEAFEANRFYTVINKKSGEIVPMEVNFNFDDPNLIILPLAFGKRQGREFIWNDLLSLETGSLKLANGRVIEKTLYNRRTRQDEPALFVALTFERREVLDSSNIKPMNLIGVDRGENIPAVIALTDPEGCPLSRFKDSLGNPTHILRIGESYKEKQRTIQAKKEVEQRRAGGYSRKYASKAKNLADDMVRNTARDLLYYAVTQDAMLIFENLSRGFGRQGKRTFMAERQYTRMEDWLTAKLAYEGLPSKTYLSKTLAQYTSKTCSNCGFTITSADYDRVLEKLKKTATGWMTTINGKELKVEGQITYYNRYKRQNVVKDLSVELDRLSEESVNNDISSWTKGRSGEALSLLKKRFSHRPVQEKFVCLNCGFETHADEQAALNIARSWLFLRSQEYKKYQTNKTTGNTDKRAFVETWQSFYRKKLKEVWKPAV

SEQ ID NO: 30473 - protein, 979 aa, synthetic construct
  REGION 1..979: note = engineered CasX variant
QEIGRINKIRRRLVKDSNTKKAGKTGPMKTLLVRVMTPDLRERLENLRKKPENIPQPISNTSRANLNKLLTDYTEMKKAILHVYWEEFQKDPVGLMSRVAQPASKKIDQNKLKPEMDEKGNLTTAGFACSQCGQPLFVYKLEQVSEKGKAYTNYFGRCNVAEHEKLILLAQLKPEKDSDEAVTYSLGKFGQRALDFYSIHVTKESTHPVKPLAQIAGNRYASSVPVGKALSDACMGTIASFLSKYQDIIIEHQKVVKGNQKRLESLRELAGKENLEYPSVTLPPQPHTKEGVDAYNEVIARVRMWVNLNLWQKLKLSRDDAKPLLRLKGFPSFPLVERQANEVDWWDMVCNVKKLINEKKEDGKVFWQNLAGYKRQEALRPYLSSEEDRKKGKKFARYQLGDLLLHLEKKHGEDWGKVYDEAWERIDKKVEGLSKHIKLEEERRSEDAQSKAALTDWLRAKASFVIEGLKEADKDEFCRCELKLQKWYGDLRGKPFAIEAENSILDISGFSKQYNCAFIWQKDGVKKLNLYLIINYFKGGKLRFKKIKPEAFEANRFYTVINKKSGEIVPMEVNFNFDDPNLIILPLAFGKRQGREFIWNDLLSLETGSLKLANGRVIEKTLYNRRTRQDEPALFVALTFERREVLDSSNIKPMNLIGVDRGENIPAVIALTDPEGCPLSRFKDSLGNPTHILRIGESYKEKQRTIQAKKEVEQRRAGGYSRKYASKAKNLADDMVRNTARDLLYYAVTQDAMLIFENLSRGFGRQGKRTFMAERQYTRMEDWLTAKLAYEGLPSKTYLSKTLAQYTSKTCSNCGFTITSADYDRVLEKLKKTATGWMTTINGKELKVEGQITYYNRYKRQNVVKDLSVELDRLSEESVNNDISSWTKGRSGEALSLLKKRFSHRPVQEKFVCLNCGFETHADEQAALNIARSWLFLRSQEYKKYQTNKTTGNTDKRAFVETWQSFYRKKLKEVWKPAV

SEQ ID NO: 30474 - protein, 978 aa, synthetic construct
  REGION 1..978: note = engineered CasX variant
QEIGRINKIRRRLVKDSNTKKAGKTGPMKTLLVRVMTPDLRERLENLRKKPENIPQPISNTSRANLNKLLTDYTEMKKAILHVYWEEFQKDPVGLMSRVAQPASKKIDQNKLKPEMDEKGNLTTAGFACSQCGQPLFVYKLEQVSEKGKAYTNYFGRCNVAEHEKLIKLAQLKPEKDSDEAVTYSLGKFGQRALDFYSIHVTKESTHPVKPLAQIAGNRYASSPVGKALSDACMGTIASFLSKYQDIIIEHQKVVKGNQKRLESLRELAGKENLEYPSVTLPPQPHTKEGVDAYNEVIARVRMWVNLNLWQKLKLSRDDAKPLLRLKGFPSFPLVERQANEVDWWDMVCNVKKLINEKKEDGKVFWQNLAGYKRQEALRPYLSSEEDRKKGKKFARYQLGDLLLHLEKKHGEDWGKVYDEAWERIDKKVEGLSKHIKLEEERRSEDAQSKAALTDWLRAKASFVIEGLKEADKDEFCRCELKLQKWYGDLRGKPFAIEAENSILDISGFSKQYNCAFIWQKDGVKKLNLYLIINYFKGGKLRFKKIKPEAFEANRFYTVINKKSGEIVPMEVNFNFDDPNLIILPLAFGKRQGREFIWNDLLSLETGSLKLANGRVIEKTLYNRRTRQDEPALFVALTFERREVLDSSNIKPMNLIGVDRGENIPAVIALTDPEGCPLSRFKDSLGNPTHILRIGESYKEKQRTIQAKKEVEQRRAGGYSRKYASKAKNLADDMVRNTARDLLYYAVTQDAMLIFENLSRGFGRQGKRTFMAERQYTRMEDWLTAKLAYEGLPSKTYLSKTLAQYTSKTCSNCGFTITSADYDRVLEKLKKTATGWMTTINGKELKVEGQITYYNRYKRQNVVKDLSVELDRLSEESVNNDISSWTKGRSGEALSLLKKRFSHRPVQEKFVCLNCGFETHADEQAALNIARSWLFLRSQEYKKYQTNKTTGNTDKRAFVETWQSFYRKKLKEVWKPAV

SEQ ID NO: 30475 - protein, 980 aa, synthetic construct
  REGION 1..980: note = engineered CasX variant
QEIKGRINKIRRRLVKDSNTKKAGKTGPMKTLLVRVMTPDLRERLENLRKKPENIPQPISNTSRANLNKLLTDYTEMKKAILHVYWEEFQKDPVGLMSRVAQPASKKIDQNKLKPEMDEKGNLTTAGFACSQCGQPLFVYKLEQVSEKGKAYTNYFGRCNVAEHEKLILLAQLKPEKDSDEAVTYSLGKFGQRALDFYSIHVTKESTHPVKPLAQIAGNRYASSYPVGKALSDACMGTIASFLSKYQDIIIEHQKVVKGNQKRLESLRELAGKENLEYPSVTLPPQPHTKEGVDAYNEVIARVRMWVNLNLWQKLKLSRDDAKPLLRLKGFPSFPLVERQANEVDWWDMVCNVKKLINEKKEDGKVFWQNLAGYKRQEALRPYLSSEEDRKKGKKFARYQLGDLLLHLEKKHGEDWGKVYDEAWERIDKKVEGLSKHIKLEEERRSEDAQSKAALTDWLRAKASFVIEGLKEADKDEFCRCELKLQKWYGDLRGKPFAIEAENSILDISGFSKQYNCAFIWQKDGVKKLNLYLIINYFKGGKLRFKKIKPEAFEANRFYTVINKKSGEIVPMEVNFNFDDPNLIILPLAFGKRQGREFIWNDLLSLETGSLKLANGRVIEKTLYNRRTRQDEPALFVALTFERREVLDSSNIKPMNLIGVDRGENIPAVIALTDPEGCPLSRFKDSLGNPTHILRIGESYKEKQRTIQAKKEVEQRRAGGYSRKYASKAKNLADDMVRNTARDLLYYAVTQDAMLIFENLSRGFGRQGKRTFMAERQYTRMEDWLTAKLAYEGLPSKTYLSKTLAQYTSKTCSNCGFTITSADYDRVLEKLKKTATGWMTTINGKELKVEGQITYYNRYKRQNVVKDLSVELDRLSEESVNNDISSWTKGRSGEALSLLKKRFSHRPVQEKFVCLNCGFETHADEQAALNIARSWLFLRSQEYKKYQTNKTTGNTDKRAFVETWQSFYRKKLKEVWKPAV

SEQ ID NO: 30476 - protein, 980 aa, synthetic construct
  REGION 1..980: note = engineered CasX variant
QEIKGRINKIRRRLVKDSNTKKAGKTGPMKTLLVRVMTPDLRERLENLRKKPENIPQPISNTSRANLNKLLTDYTEMKKAILHVYWEEFQKDPVGLMSRVAQPASKKIDQNKLKPEMDEKGNLTTAGFACSQCGQPLFVYKLEQVSEKGKAYTNYFGRCNVAEHEKLILLAQLKPEKDSDEAVTYSLGKFGQRALDFYSIHVTKESTHPVKPLAQIAGNRYASSHPVGKALSDACMGTIASFLSKYQDIIIEHQKVVKGNQKRLESLRELAGKENLEYPSVTLPPQPHTKEGVDAYNEVIARVRMWVNLNLWQKLKLSRDDAKPLLRLKGFPSFPLVERQANEVDWWDMVCNVKKLINEKKEDGKVFWQNLAGYKRQEALRPYLSSEEDRKKGKKFARYQLGDLLLHLEKKHGEDWGKVYDEAWERIDKKVEGLSKHIKLEEERRSEDAQSKAALTDWLRAKASFVIEGLKEADKDEFCRCELKLQKWYGDLRGKPFAIEAENSILDISGFSKQYNCAFIWQKDGVKKLNLYLIINYFKGGKLRFKKIKPEAFEANRFYTVINKKSGEIVPMEVNFNFDDPNLIILPLAFGKRQGREFIWNDLLSLETGSLKLANGRVIEKTLYNRRTRQDEPALFVALTFERREVLDSSNIKPMNLIGVDRGENIPAVIALTDPEGCPLSRFKDSLGNPTHILRIGESYKEKQRTIQAKKEVEQRRAGGYSRKYASKAKNLADDMVRNTARDLLYYAVTQDAMLIFENLSRGFGRQGKRTFMAERQYTRMEDWLTAKLAYEGLPSKTYLSKTLAQYTSKTCSNCGFTITSADYDRVLEKLKKTATGWMTTINGKELKVEGQITYYNRYKRQNVVKDLSVELDRLSEESVNNDISSWTKGRSGEALSLLKKRFSHRPVQEKFVCLNCGFETHADEQAALNIARSWLFLRSQEYKKYQTNKTTGNTDKRAFVETWQSFYRKKLKEVWKPAV

SEQ ID NO: 30477 - protein, 980 aa, synthetic construct
  REGION 1..980: note = engineered CasX variant
QEIKGRINKIRRRLVKDSNTKKAGKTGPMKTLLVRVMTPDLRERLENLRKKPENIPQPISNTSRANLNKLLTDYTEMKKAILHVYWEEFQKDPVGLMSRVAQPASKKIDQNKLKPEMDEKGNLTTAGFACSQCGQPLFVYKLEQVSEKGKAYTNYFGRCNVAEHEKLILLAQLKPEKDSDEAVTYSLGKFGQRALDFYSIHVTKESTHPVKPLAQIAGNRYASSSPVGKALSDACMGTIASFLSKYQDIIIEHQKVVKGNQKRLESLRELAGKENLEYPSVTLPPQPHTKEGVDAYNEVIARVRMWVNLNLWQKLKLSRDDAKPLLRLKGFPSFPLVERQANEVDWWDMVCNVKKLINEKKEDGKVFWQNLAGYKRQEALRPYLSSEEDRKKGKKFARYQLGDLLLHLEKKHGEDWGKVYDEAWERIDKKVEGLSKHIKLEEERRSEDAQSKAALTDWLRAKASFVIEGLKEADKDEFCRCELKLQKWYGDLRGKPFAIEAENSILDISGFSKQYNCAFIWQKDGVKKLNLYLIINYFKGGKLRFKKIKPEAFEANRFYTVINKKSGEIVPMEVNFNFDDPNLIILPLAFGKRQGREFIWNDLLSLETGSLKLANGRVIEKTLYNRRTRQDEPALFVALTFERREVLDSSNIKPMNLIGVDRGENIPAVIALTDPEGCPLSRFKDSLGNPTHILRIGESYKEKQRTIQAKKEVEQRRAGGYSRKYASKAKNLADDMVRNTARDLLYYAVTQDAMLIFENLSRGFGRQGKRTFMAERQYTRMEDWLTAKLAYEGLPSKTYLSKTLAQYTSKTCSNCGFTITSADYDRVLEKLKKTATGWMTTINGKELKVEGQITYYNRYKRQNVVKDLSVELDRLSEESVNNDISSWTKGRSGEALSLLKKRFSHRPVQEKFVCLNCGFETHADEQAALNIARSWLFLRSQEYKKYQTNKTTGNTDKRAFVETWQSFYRKKLKEVWKPAV

SEQ ID NO: 30478 - protein, 980 aa, synthetic construct
  REGION 1..980: note = engineered CasX variant
QEIKGRINKIRRRLVKDSNTKKAGKTGPMKTLLVRVMTPDLRERLENLRKKPENIPQPISNTSRANLNKLLTDYTEMKKAILHVYWEEFQKDPVGLMSRVAQPASKKIDQNKLKPEMDEKGNLTTAGFACSQCGQPLFVYKLEQVSEKGKAYTNYFGRCNVAEHEKLILLAQLKPEKDSDEAVTYSLGKFGQRALDFYSIHVTKESTHPVKPLAQIAGNRYASSTPVGKALSDACMGTIASFLSKYQDIIIEHQKVVKGNQKRLESLRELAGKENLEYPSVTLPPQPHTKEGVDAYNEVIARVRMWVNLNLWQKLKLSRDDAKPLLRLKGFPSFPLVERQANEVDWWDMVCNVKKLINEKKEDGKVFWQNLAGYKRQEALRPYLSSEEDRKKGKKFARYQLGDLLLHLEKKHGEDWGKVYDEAWERIDKKVEGLSKHIKLEEERRSEDAQSKAALTDWLRAKASFVIEGLKEADKDEFCRCELKLQKWYGDLRGKPFAIEAENSILDISGFSKQYNCAFIWQKDGVKKLNLYLIINYFKGGKLRFKKIKPEAFEANRFYTVINKKSGEIVPMEVNFNFDDPNLIILPLAFGKRQGREFIWNDLLSLETGSLKLANGRVIEKTLYNRRTRQDEPALFVALTFERREVLDSSNIKPMNLIGVDRGENIPAVIALTDPEGCPLSRFKDSLGNPTHILRIGESYKEKQRTIQAKKEVEQRRAGGYSRKYASKAKNLADDMVRNTARDLLYYAVTQDAMLIFENLSRGFGRQGKRTFMAERQYTRMEDWLTAKLAYEGLPSKTYLSKTLAQYTSKTCSNCGFTITSADYDRVLEKLKKTATGWMTTINGKELKVEGQITYYNRYKRQNVVKDLSVELDRLSEESVNNDISSWTKGRSGEALSLLKKRFSHRPVQEKFVCLNCGFETHADEQAALNIARSWLFLRSQEYKKYQTNKTTGNTDKRAFVETWQSFYRKKLKEVWKPAV

SEQ ID NO: 30479 - protein, 980 aa, synthetic construct
  REGION 1..980: note = engineered CasX variant
QEIKGRINKIRRRLVKDSNTKKAGKTGPMKTLLVRVMTPDLRERLENLRKKPENIPQPISNTSRANLNKLLTDYTEMKKAILHVYWEEFQKDPVGLMSRVAQPASKKIDQNKLKPEMDEKGNLTTAGFACSQCGQPLFVYKLEQVSEKGKAYTNYFGRCNVAEHEKLILLAQLKPEKDSDEAVTYSLGKFGQRALDFYSIHVTKESTHPVKPLAQIAGNRYASSAPVGKALSDACMGTIASFLSKYQDIIIEHQKVVKGNQKRLESLRELAGKENLEYPSVTLPPQPHTKEGVDAYNEVIARVRMWVNLNLWQKLKLSRDDAKPLLRLKGFPSFPLVERQANEVDWWDMVCNVKKLINEKKEDGKVFWQNLAGYKRQEALRPYLSSEEDRKKGKKFARYQLGDLLLHLEKKHGEDWGKVYDEAWERIDKKVEGLSKHIKLEEERRSEDAQSKAALTDWLRAKASFVIEGLKEADKDEFCRCELKLQKWYGDLRGKPFAIEAENSILDISGFSKQYNCAFIWQKDGVKKLNLYLIINYFKGGKLRFKKIKPEAFEANRFYTVINKKSGEIVPMEVNFNFDDPNLIILPLAFGKRQGREFIWNDLLSLETGSLKLANGRVIEKTLYNRRTRQDEPALFVALTFERREVLDSSNIKPMNLIGVDRGENIPAVIALTDPEGCPLSRFKDSLGNPTHILRIGESYKEKQRTIQAKKEVEQRRAGGYSRKYASKAKNLADDMVRNTARDLLYYAVTQDAMLIFENLSRGFGRQGKRTFMAERQYTRMEDWLTAKLAYEGLPSKTYLSKTLAQYTSKTCSNCGFTITSADYDRVLEKLKKTATGWMTTINGKELKVEGQITYYNRYKRQNVVKDLSVELDRLSEESVNNDISSWTKGRSGEALSLLKKRFSHRPVQEKFVCLNCGFETHADEQAALNIARSWLFLRSQEYKKYQTNKTTGNTDKRAFVETWQSFYRKKLKEVWKPAV

SEQ ID NO: 30480 - protein, 980 aa, synthetic construct
  REGION 1..980: note = engineered CasX variant
QEIKGRINKIRRRLVKDSNTKKAGKTGPMKTLLVRVMTPDLRERLENLRKKPENIPQPISNTSRANLNKLLTDYTEMKKAILHVYWEEFQKDPVGLMSRVAQPASKKIDQNKLKPEMDEKGNLTTAGFACSQCGQPLFVYKLEQVSEKGKAYTNYFGRCNVAEHEKLILLAQLKPEKDSDEAVTYSLGKFGQRALDFYSIHVTKESTHPVKPLAQIAGNRYASSVPVGKALSDACMGTIASFLSKYQDIIIEHQKVVKGNQKRLESLRELAGKENLEYPSVTLPPQPHTKEGVDAYNEVIARVRMWVNLNLWQKLKLSRDDAKPLLRLKGFPSFPLVERQANEVDWWDMVCNVKKLINEKKEDGKVFWQNLAGYKRQEALRPYLSSEEDRKKGKKFARYQLGDLLLHLEKKHGEDWGKVYDEAWERIDKKVEGLSKHIKLEEERRSEDAQSKAALTDWLRAKASFVIEGLKEADKDEFCRCELKLQKWYGDLRGKPFAIEAENSILDISGFSKQYNCAFIWQKDGVKKLNLYLIINYFKGGKLRFKKIKPEAFEANRFYTVINKKSGEIVPMEVNFNFDDPNLIILPLAFGKRQGREFIWNDLLSLETGSLKLANGRVIEKTLYNRRTRQDEPALFVALTFERREVLDSSNIKPMNLIGVDRGENIPAVIALTDPEGCPLSRFKDSLGNPTHILRIGESYKEKQRTIQAKKEVEQRRAGGYSRKYASKAKNLADDMVRNTARDLLYYAVTQDAMLIFENLSRGFGRQGKRTFMAERQYTRMEDWLTAKLAYEGLPSKTYLSKTLAQYTSKTCSNCGFTITSADYDRVLEKLKKTATGWMTTINGKELKVEGQITYYNRYKRQNVVKDLSVELDRLSEESVNNDISSWTKGRSGEALSLLKKRFSHRPVQEKFVCLNCGFETHADEQAALNIARSWLFLRSQEYKKYQTNKTTGNTDKRAFVETWQSFYRKKLKEVWKPAV

SEQ ID NO: 30481 - protein, 979 aa, synthetic construct
  REGION 1..979: note = engineered CasX variant
QEIKGRINKIRRRLVKDSNTKKAGKTGPMKTLLVRVMTPDLRERLENLRKKPENIPQPISNTSRANLNKLLTDYTEMKKAILHVYWEEFQKDPVGLMSRVAQPASKKIDQNKLKPEMDEKGNLTTAGFACSQCGQPLFVYKLEQVSEKGKAYTNYFGRCNVAEHEKLIKLAQLKPEKDSDEAVTYSLGKFGQRALDFYSIHVTKESTHPVKPLAQIAGNRYASSPVGKALSDACMGTIASFLSKYQDIIIEHQKVVKGNQKRLESLRELAGKENLEYPSVTLPPQPHTKEGVDAYNEVIARVRMWVNLNLWQKLKLSRDDAKPLLRLKGFPSFPLVERQANEVDWWDMVCNVKKLINEKKEDGKVFWQNLAGYKRQEALRPYLSSEEDRKKGKKFARYQLGDLLLHLEKKHGEDWGKVYDEAWERIDKKVEGLSKHIKLEEERRSEDAQSKAALTDWLRAKASFVIEGLKEADKDEFCRCELKLQKWYGDLRGKPFAIEAENSILDISGFSKQYNCAFIWQKDGVKKLNLYLIINYFKGGKLRFKKIKPEAFEANRFYTVINKKSGEIVPMEVNFNFDDPNLIILPLAFGKRQGREFIWNDLLSLETGSLKLANGRVIEKTLYNRRTRQDEPALFVALTFERREVLDSSNIKPMNLIGVDRGENIPAVIALTDPEGCPLSRFKDSLGNPTHILRIGESYKEKQRTIQAKKEVEQRRAGGYSRKYASKAKNLADDMVRNTARDLLYYAVTQDAMLIFENLSRGFGRQGKRTFMAERQYTRMEDWLTAKLAYEGLPSKTYLSKTLAQYTSKTCSNCGFTITSADYDRVLEKLKKTATGWMTTINGKELKVEGQITYYNRYKRQNVVKDLSVELDRLSEESVNNDISSWTKGRSGEALSLLKKRFSHRPVQEKFVCLNCGFETHADEQAALNIARSWLFLRSQEYKKYQTNKTTGNTDKRAFVETWQSFYRKKLKEVWKPAV

SEQ ID NO: 30482 - protein, 979 aa, synthetic construct
  REGION 1..979: note = engineered CasX variant
QEIKRANKIRRRLVKDSNTKKAGKTGPMKTLLVRVMTPDLRERLENLRKKPENIPQPISNTSRANLNKLLTDYTEMKKAILHVYWEEFQKDPVGLMSRVAQPASKKIDQNKLKPEMDEKGNLTTAGFACSQCGQPLFVYKLEQVSEKGKAYTNYFGRCNVAEHEKLILLAQLKPEKDSDEAVTYSLGKFGQRALDFYSIHVTKESTHPVKPLAQIAGNRYASSYPVGKALSDACMGTIASFLSKYQDIIIEHQKVVKGNQKRLESLRELAGKENLEYPSVTLPPQPHTKEGVDAYNEVIARVRMWVNLNLWQKLKLSRDDAKPLLRLKGFPSFPLVERQANEVDWWDMVCNVKKLINEKKEDGKVFWQNLAGYKRQEALRPYLSSEEDRKKGKKFARYQLGDLLLHLEKKHGEDWGKVYDEAWERIDKKVEGLSKHIKLEEERRSEDAQSKAALTDWLRAKASFVIEGLKEADKDEFCRCELKLQKWYGDLRGKPFAIEAENSILDISGFSKQYNCAFIWQKDGVKKLNLYLIINYFKGGKLRFKKIKPEAFEANRFYTVINKKSGEIVPMEVNFNFDDPNLIILPLAFGKRQGREFIWNDLLSLETGSLKLANGRVIEKTLYNRRTRQDEPALFVALTFERREVLDSSNIKPMNLIGVDRGENIPAVIALTDPEGCPLSRFKDSLGNPTHILRIGESYKEKQRTIQAKKEVEQRRAGGYSRKYASKAKNLADDMVRNTARDLLYYAVTQDAMLIFENLSRGFGRQGKRTFMAERQYTRMEDWLTAKLAYEGLPSKTYLSKTLAQYTSKTCSNCGFTITSADYDRVLEKLKKTATGWMTTINGKELKVEGQITYYNRYKRQNVVKDLSVELDRLSEESVNNDISSWTKGRSGEALSLLKKRFSHRPVQEKFVCLNCGFETHADEQAALNIARSWLFLRSQEYKKYQTNKTTGNTDKRAFVETWQSFYRKKLKEVWKPAV

SEQ ID NO: 30483 - protein, 979 aa, synthetic construct
  REGION 1..979: note = engineered CasX variant
QEIKRANKIRRRLVKDSNTKKAGKTGPMKTLLVRVMTPDLRERLENLRKKPENIPQPISNTSRANLNKLLTDYTEMKKAILHVYWEEFQKDPVGLMSRVAQPASKKIDQNKLKPEMDEKGNLTTAGFACSQCGQPLFVYKLEQVSEKGKAYTNYFGRCNVAEHEKLILLAQLKPEKDSDEAVTYSLGKFGQRALDFYSIHVTKESTHPVKPLAQIAGNRYASSHPVGKALSDACMGTIASFLSKYQDIIIEHQKVVKGNQKRLESLRELAGKENLEYPSVTLPPQPHTKEGVDAYNEVIARVRMWVNLNLWQKLKLSRDDAKPLLRLKGFPSFPLVERQANEVDWWDMVCNVKKLINEKKEDGKVFWQNLAGYKRQEALRPYLSSEEDRKKGKKFARYQLGDLLLHLEKKHGEDWGKVYDEAWERIDKKVEGLSKHIKLEEERRSEDAQSKAALTDWLRAKASFVIEGLKEADKDEFCRCELKLQKWYGDLRGKPFAIEAENSILDISGFSKQYNCAFIWQKDGVKKLNLYLIINYFKGGKLRFKKIKPEAFEANRFYTVINKKSGEIVPMEVNFNFDDPNLIILPLAFGKRQGREFIWNDLLSLETGSLKLANGRVIEKTLYNRRTRQDEPALFVALTFERREVLDSSNIKPMNLIGVDRGENIPAVIALTDPEGCPLSRFKDSLGNPTHILRIGESYKEKQRTIQAKKEVEQRRAGGYSRKYASKAKNLADDMVRNTARDLLYYAVTQDAMLIFENLSRGFGRQGKRTFMAERQYTRMEDWLTAKLAYEGLPSKTYLSKTLAQYTSKTCSNCGFTITSADYDRVLEKLKKTATGWMTTINGKELKVEGQITYYNRYKRQNVVKDLSVELDRLSEESVNNDISSWTKGRSGEALSLLKKRFSHRPVQEKFVCLNCGFETHADEQAALNIARSWLFLRSQEYKKYQTNKTTGNTDKRAFVETWQSFYRKKLKEVWKPAV

SEQ ID NO: 30484 - protein, 979 aa, synthetic construct
  REGION 1..979: note = engineered CasX variant
QEIKRANKIRRRLVKDSNTKKAGKTGPMKTLLVRVMTPDLRERLENLRKKPENIPQPISNTSRANLNKLLTDYTEMKKAILHVYWEEFQKDPVGLMSRVAQPASKKIDQNKLKPEMDEKGNLTTAGFACSQCGQPLFVYKLEQVSEKGKAYTNYFGRCNVAEHEKLILLAQLKPEKDSDEAVTYSLGKFGQRALDFYSIHVTKESTHPVKPLAQIAGNRYASSSPVGKALSDACMGTIASFLSKYQDIIIEHQKVVKGNQKRLESLRELAGKENLEYPSVTLPPQPHTKEGVDAYNEVIARVRMWVNLNLWQKLKLSRDDAKPLLRLKGFPSFPLVERQANEVDWWDMVCNVKKLINEKKEDGKVFWQNLAGYKRQEALRPYLSSEEDRKKGKKFARYQLGDLLLHLEKKHGEDWGKVYDEAWERIDKKVEGLSKHIKLEEERRSEDAQSKAALTDWLRAKASFVIEGLKEADKDEFCRCELKLQKWYGDLRGKPFAIEAENSILDISGFSKQYNCAFIWQKDGVKKLNLYLIINYFKGGKLRFKKIKPEAFEANRFYTVINKKSGEIVPMEVNFNFDDPNLIILPLAFGKRQGREFIWNDLLSLETGSLKLANGRVIEKTLYNRRTRQDEPALFVALTFERREVLDSSNIKPMNLIGVDRGENIPAVIALTDPEGCPLSRFKDSLGNPTHILRIGESYKEKQRTIQAKKEVEQRRAGGYSRKYASKAKNLADDMVRNTARDLLYYAVTQDAMLIFENLSRGFGRQGKRTFMAERQYTRMEDWLTAKLAYEGLPSKTYLSKTLAQYTSKTCSNCGFTITSADYDRVLEKLKKTATGWMTTINGKELKVEGQITYYNRYKRQNVVKDLSVELDRLSEESVNNDISSWTKGRSGEALSLLKKRFSHRPVQEKFVCLNCGFETHADEQAALNIARSWLFLRSQEYKKYQTNKTTGNTDKRAFVETWQSFYRKKLKEVWKPAV

SEQ ID NO: 30485 - protein, 979 aa, synthetic construct
  REGION 1..979: note = engineered CasX variant
QEIKRANKIRRRLVKDSNTKKAGKTGPMKTLLVRVMTPDLRERLENLRKKPENIPQPISNTSRANLNKLLTDYTEMKKAILHVYWEEFQKDPVGLMSRVAQPASKKIDQNKLKPEMDEKGNLTTAGFACSQCGQPLFVYKLEQVSEKGKAYTNYFGRCNVAEHEKLILLAQLKPEKDSDEAVTYSLGKFGQRALDFYSIHVTKESTHPVKPLAQIAGNRYASSTPVGKALSDACMGTIASFLSKYQDIIIEHQKVVKGNQKRLESLRELAGKENLEYPSVTLPPQPHTKEGVDAYNEVIARVRMWVNLNLWQKLKLSRDDAKPLLRLKGFPSFPLVERQANEVDWWDMVCNVKKLINEKKEDGKVFWQNLAGYKRQEALRPYLSSEEDRKKGKKFARYQLGDLLLHLEKKHGEDWGKVYDEAWERIDKKVEGLSKHIKLEEERRSEDAQSKAALTDWLRAKASFVIEGLKEADKDEFCRCELKLQKWYGDLRGKPFAIEAENSILDISGFSKQYNCAFIWQKDGVKKLNLYLIINYFKGGKLRFKKIKPEAFEANRFYTVINKKSGEIVPMEVNFNFDDPNLIILPLAFGKRQGREFIWNDLLSLETGSLKLANGRVIEKTLYNRRTRQDEPALFVALTFERREVLDSSNIKPMNLIGVDRGENIPAVIALTDPEGCPLSRFKDSLGNPTHILRIGESYKEKQRTIQAKKEVEQRRAGGYSRKYASKAKNLADDMVRNTARDLLYYAVTQDAMLIFENLSRGFGRQGKRTFMAERQYTRMEDWLTAKLAYEGLPSKTYLSKTLAQYTSKTCSNCGFTITSADYDRVLEKLKKTATGWMTTINGKELKVEGQITYYNRYKRQNVVKDLSVELDRLSEESVNNDISSWTKGRSGEALSLLKKRFSHRPVQEKFVCLNCGFETHADEQAALNIARSWLFLRSQEYKKYQTNKTTGNTDKRAFVETWQSFYRKKLKEVWKPAV

SEQ ID NO: 30486 - protein, 979 aa, synthetic construct
  REGION 1..979: note = engineered CasX variant
QEIKRANKIRRRLVKDSNTKKAGKTGPMKTLLVRVMTPDLRERLENLRKKPENIPQPISNTSRANLNKLLTDYTEMKKAILHVYWEEFQKDPVGLMSRVAQPASKKIDQNKLKPEMDEKGNLTTAGFACSQCGQPLFVYKLEQVSEKGKAYTNYFGRCNVAEHEKLILLAQLKPEKDSDEAVTYSLGKFGQRALDFYSIHVTKESTHPVKPLAQIAGNRYASSAPVGKALSDACMGTIASFLSKYQDIIIEHQKVVKGNQKRLESLRELAGKENLEYPSVTLPPQPHTKEGVDAYNEVIARVRMWVNLNLWQKLKLSRDDAKPLLRLKGFPSFPLVERQANEVDWWDMVCNVKKLINEKKEDGKVFWQNLAGYKRQEALRPYLSSEEDRKKGKKFARYQLGDLLLHLEKKHGEDWGKVYDEAWERIDKKVEGLSKHIKLEEERRSEDAQSKAALTDWLRAKASFVIEGLKEADKDEFCRCELKLQKWYGDLRGKPFAIEAENSILDISGFSKQYNCAFIWQKDGVKKLNLYLIINYFKGGKLRFKKIKPEAFEANRFYTVINKKSGEIVPMEVNFNFDDPNLIILPLAFGKRQGREFIWNDLLSLETGSLKLANGRVIEKTLYNRRTRQDEPALFVALTFERREVLDSSNIKPMNLIGVDRGENIPAVIALTDPEGCPLSRFKDSLGNPTHILRIGESYKEKQRTIQAKKEVEQRRAGGYSRKYASKAKNLADDMVRNTARDLLYYAVTQDAMLIFENLSRGFGRQGKRTFMAERQYTRMEDWLTAKLAYEGLPSKTYLSKTLAQYTSKTCSNCGFTITSADYDRVLEKLKKTATGWMTTINGKELKVEGQITYYNRYKRQNVVKDLSVELDRLSEESVNNDISSWTKGRSGEALSLLKKRFSHRPVQEKFVCLNCGFETHADEQAALNIARSWLFLRSQEYKKYQTNKTTGNTDKRAFVETWQSFYRKKLKEVWKPAV

SEQ ID NO: 30487 - protein, 979 aa, synthetic construct
  REGION 1..979: note = engineered CasX variant
QEIKRANKIRRRLVKDSNTKKAGKTGPMKTLLVRVMTPDLRERLENLRKKPENIPQPISNTSRANLNKLLTDYTEMKKAILHVYWEEFQKDPVGLMSRVAQPASKKIDQNKLKPEMDEKGNLTTAGFACSQCGQPLFVYKLEQVSEKGKAYTNYFGRCNVAEHEKLILLAQLKPEKDSDEAVTYSLGKFGQRALDFYSIHVTKESTHPVKPLAQIAGNRYASSVPVGKALSDACMGTIASFLSKYQDIIIEHQKVVKGNQKRLESLRELAGKENLEYPSVTLPPQPHTKEGVDAYNEVIARVRMWVNLNLWQKLKLSRDDAKPLLRLKGFPSFPLVERQANEVDWWDMVCNVKKLINEKKEDGKVFWQNLAGYKRQEALRPYLSSEEDRKKGKKFARYQLGDLLLHLEKKHGEDWGKVYDEAWERIDKKVEGLSKHIKLEEERRSEDAQSKAALTDWLRAKASFVIEGLKEADKDEFCRCELKLQKWYGDLRGKPFAIEAENSILDISGFSKQYNCAFIWQKDGVKKLNLYLIINYFKGGKLRFKKIKPEAFEANRFYTVINKKSGEIVPMEVNFNFDDPNLIILPLAFGKRQGREFIWNDLLSLETGSLKLANGRVIEKTLYNRRTRQDEPALFVALTFERREVLDSSNIKPMNLIGVDRGENIPAVIALTDPEGCPLSRFKDSLGNPTHILRIGESYKEKQRTIQAKKEVEQRRAGGYSRKYASKAKNLADDMVRNTARDLLYYAVTQDAMLIFENLSRGFGRQGKRTFMAERQYTRMEDWLTAKLAYEGLPSKTYLSKTLAQYTSKTCSNCGFTITSADYDRVLEKLKKTATGWMTTINGKELKVEGQITYYNRYKRQNVVKDLSVELDRLSEESVNNDISSWTKGRSGEALSLLKKRFSHRPVQEKFVCLNCGFETHADEQAALNIARSWLFLRSQEYKKYQTNKTTGNTDKRAFVETWQSFYRKKLKEVWKPAV

SEQ ID NO: 30488 - protein, 978 aa, synthetic construct
  REGION 1..978: note = engineered CasX variant
QEIKRANKIRRRLVKDSNTKKAGKTGPMKTLLVRVMTPDLRERLENLRKKPENIPQPISNTSRANLNKLLTDYTEMKKAILHVYWEEFQKDPVGLMSRVAQPASKKIDQNKLKPEMDEKGNLTTAGFACSQCGQPLFVYKLEQVSEKGKAYTNYFGRCNVAEHEKLIKLAQLKPEKDSDEAVTYSLGKFGQRALDFYSIHVTKESTHPVKPLAQIAGNRYASSPVGKALSDACMGTIASFLSKYQDIIIEHQKVVKGNQKRLESLRELAGKENLEYPSVTLPPQPHTKEGVDAYNEVIARVRMWVNLNLWQKLKLSRDDAKPLLRLKGFPSFPLVERQANEVDWWDMVCNVKKLINEKKEDGKVFWQNLAGYKRQEALRPYLSSEEDRKKGKKFARYQLGDLLLHLEKKHGEDWGKVYDEAWERIDKKVEGLSKHIKLEEERRSEDAQSKAALTDWLRAKASFVIEGLKEADKDEFCRCELKLQKWYGDLRGKPFAIEAENSILDISGFSKQYNCAFIWQKDGVKKLNLYLIINYFKGGKLRFKKIKPEAFEANRFYTVINKKSGEIVPMEVNFNFDDPNLIILPLAFGKRQGREFIWNDLLSLETGSLKLANGRVIEKTLYNRRTRQDEPALFVALTFERREVLDSSNIKPMNLIGVDRGENIPAVIALTDPEGCPLSRFKDSLGNPTHILRIGESYKEKQRTIQAKKEVEQRRAGGYSRKYASKAKNLADDMVRNTARDLLYYAVTQDAMLIFENLSRGFGRQGKRTFMAERQYTRMEDWLTAKLAYEGLPSKTYLSKTLAQYTSKTCSNCGFTITSADYDRVLEKLKKTATGWMTTINGKELKVEGQITYYNRYKRQNVVKDLSVELDRLSEESVNNDISSWTKGRSGEALSLLKKRFSHRPVQEKFVCLNCGFETHADEQAALNIARSWLFLRSQEYKKYQTNKTTGNTDKRAFVETWQSFYRKKLKEVWKPAV

SEQ ID NO: 30489 - protein, 979 aa, synthetic construct
  REGION 1..979: note = engineered CasX variant
QEIKRISKIRRRLVKDSNTKKAGKTGPMKTLLVRVMTPDLRERLENLRKKPENIPQPISNTSRANLNKLLTDYTEMKKAILHVYWEEFQKDPVGLMSRVAQPASKKIDQNKLKPEMDEKGNLTTAGFACSQCGQPLFVYKLEQVSEKGKAYTNYFGRCNVAEHEKLILLAQLKPEKDSDEAVTYSLGKFGQRALDFYSIHVTKESTHPVKPLAQIAGNRYASSYPVGKALSDACMGTIASFLSKYQDIIIEHQKVVKGNQKRLESLRELAGKENLEYPSVTLPPQPHTKEGVDAYNEVIARVRMWVNLNLWQKLKLSRDDAKPLLRLKGFPSFPLVERQANEVDWWDMVCNVKKLINEKKEDGKVFWQNLAGYKRQEALRPYLSSEEDRKKGKKFARYQLGDLLLHLEKKHGEDWGKVYDEAWERIDKKVEGLSKHIKLEEERRSEDAQSKAALTDWLRAKASFVIEGLKEADKDEFCRCELKLQKWYGDLRGKPFAIEAENSILDISGFSKQYNCAFIWQKDGVKKLNLYLIINYFKGGKLRFKKIKPEAFEANRFYTVINKKSGEIVPMEVNFNFDDPNLIILPLAFGKRQGREFIWNDLLSLETGSLKLANGRVIEKTLYNRRTRQDEPALFVALTFERREVLDSSNIKPMNLIGVDRGENIPAVIALTDPEGCPLSRFKDSLGNPTHILRIGESYKEKQRTIQAKKEVEQRRAGGYSRKYASKAKNLADDMVRNTARDLLYYAVTQDAMLIFENLSRGFGRQGKRTFMAERQYTRMEDWLTAKLAYEGLPSKTYLSKTLAQYTSKTCSNCGFTITSADYDRVLEKLKKTATGWMTTINGKELKVEGQITYYNRYKRQNVVKDLSVELDRLSEESVNNDISSWTKGRSGEALSLLKKRFSHRPVQEKFVCLNCGFETHADEQAALNIARSWLFLRSQEYKKYQTNKTTGNTDKRAFVETWQSFYRKKLKEVWKPAV

SEQ ID NO: 30490 - protein, 979 aa, synthetic construct
  REGION 1..979: note = engineered CasX variant
QEIKRISKIRRRLVKDSNTKKAGKTGPMKTLLVRVMTPDLRERLENLRKKPENIPQPISNTSRANLNKLLTDYTEMKKAILHVYWEEFQKDPVGLMSRVAQPASKKIDQNKLKPEMDEKGNLTTAGFACSQCGQPLFVYKLEQVSEKGKAYTNYFGRCNVAEHEKLILLAQLKPEKDSDEAVTYSLGKFGQRALDFYSIHVTKESTHPVKPLAQIAGNRYASSHPVGKALSDACMGTIASFLSKYQDIIIEHQKVVKGNQKRLESLRELAGKENLEYPSVTLPPQPHTKEGVDAYNEVIARVRMWVNLNLWQKLKLSRDDAKPLLRLKGFPSFPLVERQANEVDWWDMVCNVKKLINEKKEDGKVFWQNLAGYKRQEALRPYLSSEEDRKKGKKFARYQLGDLLLHLEKKHGEDWGKVYDEAWERIDKKVEGLSKHIKLEEERRSEDAQSKAALTDWLRAKASFVIEGLKEADKDEFCRCELKLQKWYGDLRGKPFAIEAENSILDISGFSKQYNCAFIWQKDGVKKLNLYLIINYFKGGKLRFKKIKPEAFEANRFYTVINKKSGEIVPMEVNFNFDDPNLIILPLAFGKRQGREFIWNDLLSLETGSLKLANGRVIEKTLYNRRTRQDEPALFVALTFERREVLDSSNIKPMNLIGVDRGENIPAVIALTDPEGCPLSRFKDSLGNPTHILRIGESYKEKQRTIQAKKEVEQRRAGGYSRKYASKAKNLADDMVRNTARDLLYYAVTQDAMLIFENLSRGFGRQGKRTFMAERQYTRMEDWLTAKLAYEGLPSKTYLSKTLAQYTSKTCSNCGFTITSADYDRVLEKLKKTATGWMTTINGKELKVEGQITYYNRYKRQNVVKDLSVELDRLSEESVNNDISSWTKGRSGEALSLLKKRFSHRPVQEKFVCLNCGFETHADEQAALNIARSWLFLRSQEYKKYQTNKTTGNTDKRAFVETWQSFYRKKLKEVWKPAV

SEQ ID NO: 30491 - protein, 979 aa, synthetic construct
  REGION 1..979: note = engineered CasX variant
QEIKRISKIRRRLVKDSNTKKAGKTGPMKTLLVRVMTPDLRERLENLRKKPENIPQPISNTSRANLNKLLTDYTEMKKAILHVYWEEFQKDPVGLMSRVAQPASKKIDQNKLKPEMDEKGNLTTAGFACSQCGQPLFVYKLEQVSEKGKAYTNYFGRCNVAEHEKLILLAQLKPEKDSDEAVTYSLGKFGQRALDFYSIHVTKESTHPVKPLAQIAGNRYASSSPVGKALSDACMGTIASFLSKYQDIIIEHQKVVKGNQKRLESLRELAGKENLEYPSVTLPPQPHTKEGVDAYNEVIARVRMWVNLNLWQKLKLSRDDAKPLLRLKGFPSFPLVERQANEVDWWDMVCNVKKLINEKKEDGKVFWQNLAGYKRQEALRPYLSSEEDRKKGKKFARYQLGDLLLHLEKKHGEDWGKVYDEAWERIDKKVEGLSKHIKLEEERRSEDAQSKAALTDWLRAKASFVIEGLKEADKDEFCRCELKLQKWYGDLRGKPFAIEAENSILDISGFSKQYNCAFIWQKDGVKKLNLYLIINYFKGGKLRFKKIKPEAFEANRFYTVINKKSGEIVPMEVNFNFDDPNLIILPLAFGKRQGREFIWNDLLSLETGSLKLANGRVIEKTLYNRRTRQDEPALFVALTFERREVLDSSNIKPMNLIGVDRGENIPAVIALTDPEGCPLSRFKDSLGNPTHILRIGESYKEKQRTIQAKKEVEQRRAGGYSRKYASKAKNLADDMVRNTARDLLYYAVTQDAMLIFENLSRGFGRQGKRTFMAERQYTRMEDWLTAKLAYEGLPSKTYLSKTLAQYTSKTCSNCGFTITSADYDRVLEKLKKTATGWMTTINGKELKVEGQITYYNRYKRQNVVKDLSVELDRLSEESVNNDISSWTKGRSGEALSLLKKRFSHRPVQEKFVCLNCGFETHADEQAALNIARSWLFLRSQEYKKYQTNKTTGNTDKRAFVETWQSFYRKKLKEVWKPAV

SEQ ID NO: 30492 - protein, 979 aa, synthetic construct
  REGION 1..979: note = engineered CasX variant
QEIKRISKIRRRLVKDSNTKKAGKTGPMKTLLVRVMTPDLRERLENLRKKPENIPQPISNTSRANLNKLLTDYTEMKKAILHVYWEEFQKDPVGLMSRVAQPASKKIDQNKLKPEMDEKGNLTTAGFACSQCGQPLFVYKLEQVSEKGKAYTNYFGRCNVAEHEKLILLAQLKPEKDSDEAVTYSLGKFGQRALDFYSIHVTKESTHPVKPLAQIAGNRYASSTPVGKALSDACMGTIASFLSKYQDIIIEHQKVVKGNQKRLESLRELAGKENLEYPSVTLPPQPHTKEGVDAYNEVIARVRMWVNLNLWQKLKLSRDDAKPLLRLKGFPSFPLVERQANEVDWWDMVCNVKKLINEKKEDGKVFWQNLAGYKRQEALRPYLSSEEDRKKGKKFARYQLGDLLLHLEKKHGEDWGKVYDEAWERIDKKVEGLSKHIKLEEERRSEDAQSKAALTDWLRAKASFVIEGLKEADKDEFCRCELKLQKWYGDLRGKPFAIEAENSILDISGFSKQYNCAFIWQKDGVKKLNLYLIINYFKGGKLRFKKIKPEAFEANRFYTVINKKSGEIVPMEVNFNFDDPNLIILPLAFGKRQGREFIWNDLLSLETGSLKLANGRVIEKTLYNRRTRQDEPALFVALTFERREVLDSSNIKPMNLIGVDRGENIPAVIALTDPEGCPLSRFKDSLGNPTHILRIGESYKEKQRTIQAKKEVEQRRAGGYSRKYASKAKNLADDMVRNTARDLLYYAVTQDAMLIFENLSRGFGRQGKRTFMAERQYTRMEDWLTAKLAYEGLPSKTYLSKTLAQYTSKTCSNCGFTITSADYDRVLEKLKKTATGWMTTINGKELKVEGQITYYNRYKRQNVVKDLSVELDRLSEESVNNDISSWTKGRSGEALSLLKKRFSHRPVQEKFVCLNCGFETHADEQAALNIARSWLFLRSQEYKKYQTNKTTGNTDKRAFVETWQSFYRKKLKEVWKPAV

SEQ ID NO: 30493 - protein, 979 aa, synthetic construct
  REGION 1..979: note = engineered CasX variant
QEIKRISKIRRRLVKDSNTKKAGKTGPMKTLLVRVMTPDLRERLENLRKKPENIPQPISNTSRANLNKLLTDYTEMKKAILHVYWEEFQKDPVGLMSRVAQPASKKIDQNKLKPEMDEKGNLTTAGFACSQCGQPLFVYKLEQVSEKGKAYTNYFGRCNVAEHEKLILLAQLKPEKDSDEAVTYSLGKFGQRALDFYSIHVTKESTHPVKPLAQIAGNRYASSAPVGKALSDACMGTIASFLSKYQDIIIEHQKVVKGNQKRLESLRELAGKENLEYPSVTLPPQPHTKEGVDAYNEVIARVRMWVNLNLWQKLKLSRDDAKPLLRLKGFPSFPLVERQANEVDWWDMVCNVKKLINEKKEDGKVFWQNLAGYKRQEALRPYLSSEEDRKKGKKFARYQLGDLLLHLEKKHGEDWGKVYDEAWERIDKKVEGLSKHIKLEEERRSEDAQSKAALTDWLRAKASFVIEGLKEADKDEFCRCELKLQKWYGDLRGKPFAIEAENSILDISGFSKQYNCAFIWQKDGVKKLNLYLIINYFKGGKLRFKKIKPEAFEANRFYTVINKKSGEIVPMEVNFNFDDPNLIILPLAFGKRQGREFIWNDLLSLETGSLKLANGRVIEKTLYNRRTRQDEPALFVALTFERREVLDSSNIKPMNLIGVDRGENIPAVIALTDPEGCPLSRFKDSLGNPTHILRIGESYKEKQRTIQAKKEVEQRRAGGYSRKYASKAKNLADDMVRNTARDLLYYAVTQDAMLIFENLSRGFGRQGKRTFMAERQYTRMEDWLTAKLAYEGLPSKTYLSKTLAQYTSKTCSNCGFTITSADYDRVLEKLKKTATGWMTTINGKELKVEGQITYYNRYKRQNVVKDLSVELDRLSEESVNNDISSWTKGRSGEALSLLKKRFSHRPVQEKFVCLNCGFETHADEQAALNIARSWLFLRSQEYKKYQTNKTTGNTDKRAFVETWQSFYRKKLKEVWKPAV

SEQ ID NO: 30494 - protein, 979 aa, synthetic construct
  REGION 1..979: note = engineered CasX variant
QEIKRISKIRRRLVKDSNTKKAGKTGPMKTLLVRVMTPDLRERLENLRKKPENIPQPISNTSRANLNKLLTDYTEMKKAILHVYWEEFQKDPVGLMSRVAQPASKKIDQNKLKPEMDEKGNLTTAGFACSQCGQPLFVYKLEQVSEKGKAYTNYFGRCNVAEHEKLILLAQLKPEKDSDEAVTYSLGKFGQRALDFYSIHVTKESTHPVKPLAQIAGNRYASSVPVGKALSDACMGTIASFLSKYQDIIIEHQKVVKGNQKRLESLRELAGKENLEYPSVTLPPQPHTKEGVDAYNEVIARVRMWVNLNLWQKLKLSRDDAKPLLRLKGFPSFPLVERQANEVDWWDMVCNVKKLINEKKEDGKVFWQNLAGYKRQEALRPYLSSEEDRKKGKKFARYQLGDLLLHLEKKHGEDWGKVYDEAWERIDKKVEGLSKHIKLEEERRSEDAQSKAALTDWLRAKASFVIEGLKEADKDEFCRCELKLQKWYGDLRGKPFAIEAENSILDISGFSKQYNCAFIWQKDGVKKLNLYLIINYFKGGKLRFKKIKPEAFEANRFYTVINKKSGEIVPMEVNFNFDDPNLIILPLAFGKRQGREFIWNDLLSLETGSLKLANGRVIEKTLYNRRTRQDEPALFVALTFERREVLDSSNIKPMNLIGVDRGENIPAVIALTDPEGCPLSRFKDSLGNPTHILRIGESYKEKQRTIQAKKEVEQRRAGGYSRKYASKAKNLADDMVRNTARDLLYYAVTQDAMLIFENLSRGFGRQGKRTFMAERQYTRMEDWLTAKLAYEGLPSKTYLSKTLAQYTSKTCSNCGFTITSADYDRVLEKLKKTATGWMTTINGKELKVEGQITYYNRYKRQNVVKDLSVELDRLSEESVNNDISSWTKGRSGEALSLLKKRFSHRPVQEKFVCLNCGFETHADEQAALNIARSWLFLRSQEYKKYQTNKTTGNTDKRAFVETWQSFYRKKLKEVWKPAV

SEQ ID NO: 30495 - protein, 978 aa, synthetic construct
  REGION 1..978: note = engineered CasX variant
QEIKRISKIRRRLVKDSNTKKAGKTGPMKTLLVRVMTPDLRERLENLRKKPENIPQPISNTSRANLNKLLTDYTEMKKAILHVYWEEFQKDPVGLMSRVAQPASKKIDQNKLKPEMDEKGNLTTAGFACSQCGQPLFVYKLEQVSEKGKAYTNYFGRCNVAEHEKLIKLAQLKPEKDSDEAVTYSLGKFGQRALDFYSIHVTKESTHPVKPLAQIAGNRYASSPVGKALSDACMGTIASFLSKYQDIIIEHQKVVKGNQKRLESLRELAGKENLEYPSVTLPPQPHTKEGVDAYNEVIARVRMWVNLNLWQKLKLSRDDAKPLLRLKGFPSFPLVERQANEVDWWDMVCNVKKLINEKKEDGKVFWQNLAGYKRQEALRPYLSSEEDRKKGKKFARYQLGDLLLHLEKKHGEDWGKVYDEAWERIDKKVEGLSKHIKLEEERRSEDAQSKAALTDWLRAKASFVIEGLKEADKDEFCRCELKLQKWYGDLRGKPFAIEAENSILDISGFSKQYNCAFIWQKDGVKKLNLYLIINYFKGGKLRFKKIKPEAFEANRFYTVINKKSGEIVPMEVNFNFDDPNLIILPLAFGKRQGREFIWNDLLSLETGSLKLANGRVIEKTLYNRRTRQDEPALFVALTFERREVLDSSNIKPMNLIGVDRGENIPAVIALTDPEGCPLSRFKDSLGNPTHILRIGESYKEKQRTIQAKKEVEQRRAGGYSRKYASKAKNLADDMVRNTARDLLYYAVTQDAMLIFENLSRGFGRQGKRTFMAERQYTRMEDWLTAKLAYEGLPSKTYLSKTLAQYTSKTCSNCGFTITSADYDRVLEKLKKTATGWMTTINGKELKVEGQITYYNRYKRQNVVKDLSVELDRLSEESVNNDISSWTKGRSGEALSLLKKRFSHRPVQEKFVCLNCGFETHADEQAALNIARSWLFLRSQEYKKYQTNKTTGNTDKRAFVETWQSFYRKKLKEVWKPAV

SEQ ID NO: 30496 - protein, 979 aa, synthetic construct
  REGION 1..979: note = engineered CasX variant
QEIKRINGIRRRLVKDSNTKKAGKTGPMKTLLVRVMTPDLRERLENLRKKPENIPQPISNTSRANLNKLLTDYTEMKKAILHVYWEEFQKDPVGLMSRVAQPASKKIDQNKLKPEMDEKGNLTTAGFACSQCGQPLFVYKLEQVSEKGKAYTNYFGRCNVAEHEKLILLAQLKPEKDSDEAVTYSLGKFGQRALDFYSIHVTKESTHPVKPLAQIAGNRYASSYPVGKALSDACMGTIASFLSKYQDIIIEHQKVVKGNQKRLESLRELAGKENLEYPSVTLPPQPHTKEGVDAYNEVIARVRMWVNLNLWQKLKLSRDDAKPLLRLKGFPSFPLVERQANEVDWWDMVCNVKKLINEKKEDGKVFWQNLAGYKRQEALRPYLSSEEDRKKGKKFARYQLGDLLLHLEKKHGEDWGKVYDEAWERIDKKVEGLSKHIKLEEERRSEDAQSKAALTDWLRAKASFVIEGLKEADKDEFCRCELKLQKWYGDLRGKPFAIEAENSILDISGFSKQYNCAFIWQKDGVKKLNLYLIINYFKGGKLRFKKIKPEAFEANRFYTVINKKSGEIVPMEVNFNFDDPNLIILPLAFGKRQGREFIWNDLLSLETGSLKLANGRVIEKTLYNRRTRQDEPALFVALTFERREVLDSSNIKPMNLIGVDRGENIPAVIALTDPEGCPLSRFKDSLGNPTHILRIGESYKEKQRTIQAKKEVEQRRAGGYSRKYASKAKNLADDMVRNTARDLLYYAVTQDAMLIFENLSRGFGRQGKRTFMAERQYTRMEDWLTAKLAYEGLPSKTYLSKTLAQYTSKTCSNCGFTITSADYDRVLEKLKKTATGWMTTINGKELKVEGQITYYNRYKRQNVVKDLSVELDRLSEESVNNDISSWTKGRSGEALSLLKKRFSHRPVQEKFVCLNCGFETHADEQAALNIARSWLFLRSQEYKKYQTNKTTGNTDKRAFVETWQSFYRKKLKEVWKPAV

SEQ ID NO: 30497 - protein, 979 aa, synthetic construct
  REGION 1..979: note = engineered CasX variant
QEIKRINGIRRRLVKDSNTKKAGKTGPMKTLLVRVMTPDLRERLENLRKKPENIPQPISNTSRANLNKLLTDYTEMKKAILHVYWEEFQKDPVGLMSRVAQPASKKIDQNKLKPEMDEKGNLTTAGFACSQCGQPLFVYKLEQVSEKGKAYTNYFGRCNVAEHEKLILLAQLKPEKDSDEAVTYSLGKFGQRALDFYSIHVTKESTHPVKPLAQIAGNRYASSHPVGKALSDACMGTIASFLSKYQDIIIEHQKVVKGNQKRLESLRELAGKENLEYPSVTLPPQPHTKEGVDAYNEVIARVRMWVNLNLWQKLKLSRDDAKPLLRLKGFPSFPLVERQANEVDWWDMVCNVKKLINEKKEDGKVFWQNLAGYKRQEALRPYLSSEEDRKKGKKFARYQLGDLLLHLEKKHGEDWGKVYDEAWERIDKKVEGLSKHIKLEEERRSEDAQSKAALTDWLRAKASFVIEGLKEADKDEFCRCELKLQKWYGDLRGKPFAIEAENSILDISGFSKQYNCAFIWQKDGVKKLNLYLIINYFKGGKLRFKKIKPEAFEANRFYTVINKKSGEIVPMEVNFNFDDPNLIILPLAFGKRQGREFIWNDLLSLETGSLKLANGRVIEKTLYNRRTRQDEPALFVALTFERREVLDSSNIKPMNLIGVDRGENIPAVIALTDPEGCPLSRFKDSLGNPTHILRIGESYKEKQRTIQAKKEVEQRRAGGYSRKYASKAKNLADDMVRNTARDLLYYAVTQDAMLIFENLSRGFGRQGKRTFMAERQYTRMEDWLTAKLAYEGLPSKTYLSKTLAQYTSKTCSNCGFTITSADYDRVLEKLKKTATGWMTTINGKELKVEGQITYYNRYKRQNVVKDLSVELDRLSEESVNNDISSWTKGRSGEALSLLKKRFSHRPVQEKFVCLNCGFETHADEQAALNIARSWLFLRSQEYKKYQTNKTTGNTDKRAFVETWQSFYRKKLKEVWKPAV

SEQ ID NO: 30498 - protein, 979 aa, synthetic construct
  REGION 1..979: note = engineered CasX variant
QEIKRINGIRRRLVKDSNTKKAGKTGPMKTLLVRVMTPDLRERLENLRKKPENIPQPISNTSRANLNKLLTDYTEMKKAILHVYWEEFQKDPVGLMSRVAQPASKKIDQNKLKPEMDEKGNLTTAGFACSQCGQPLFVYKLEQVSEKGKAYTNYFGRCNVAEHEKLILLAQLKPEKDSDEAVTYSLGKFGQRALDFYSIHVTKESTHPVKPLAQIAGNRYASSSPVGKALSDACMGTIASFLSKYQDIIIEHQKVVKGNQKRLESLRELAGKENLEYPSVTLPPQPHTKEGVDAYNEVIARVRMWVNLNLWQKLKLSRDDAKPLLRLKGFPSFPLVERQANEVDWWDMVCNVKKLINEKKEDGKVFWQNLAGYKRQEALRPYLSSEEDRKKGKKFARYQLGDLLLHLEKKHGEDWGKVYDEAWERIDKKVEGLSKHIKLEEERRSEDAQSKAALTDWLRAKASFVIEGLKEADKDEFCRCELKLQKWYGDLRGKPFAIEAENSILDISGFSKQYNCAFIWQKDGVKKLNLYLIINYFKGGKLRFKKIKPEAFEANRFYTVINKKSGEIVPMEVNFNFDDPNLIILPLAFGKRQGREFIWNDLLSLETGSLKLANGRVIEKTLYNRRTRQDEPALFVALTFERREVLDSSNIKPMNLIGVDRGENIPAVIALTDPEGCPLSRFKDSLGNPTHILRIGESYKEKQRTIQAKKEVEQRRAGGYSRKYASKAKNLADDMVRNTARDLLYYAVTQDAMLIFENLSRGFGRQGKRTFMAERQYTRMEDWLTAKLAYEGLPSKTYLSKTLAQYTSKTCSNCGFTITSADYDRVLEKLKKTATGWMTTINGKELKVEGQITYYNRYKRQNVVKDLSVELDRLSEESVNNDISSWTKGRSGEALSLLKKRFSHRPVQEKFVCLNCGFETHADEQAALNIARSWLFLRSQEYKKYQTNKTTGNTDKRAFVETWQSFYRKKLKEVWKPAV

SEQ ID NO: 30499 - protein, 979 aa, synthetic construct
  REGION 1..979: note = engineered CasX variant
QEIKRINGIRRRLVKDSNTKKAGKTGPMKTLLVRVMTPDLRERLENLRKKPENIPQPISNTSRANLNKLLTDYTEMKKAILHVYWEEFQKDPVGLMSRVAQPASKKIDQNKLKPEMDEKGNLTTAGFACSQCGQPLFVYKLEQVSEKGKAYTNYFGRCNVAEHEKLILLAQLKPEKDSDEAVTYSLGKFGQRALDFYSIHVTKESTHPVKPLAQIAGNRYASSTPVGKALSDACMGTIASFLSKYQDIIIEHQKVVKGNQKRLESLRELAGKENLEYPSVTLPPQPHTKEGVDAYNEVIARVRMWVNLNLWQKLKLSRDDAKPLLRLKGFPSFPLVERQANEVDWWDMVCNVKKLINEKKEDGKVFWQNLAGYKRQEALRPYLSSEEDRKKGKKFARYQLGDLLLHLEKKHGEDWGKVYDEAWERIDKKVEGLSKHIKLEEERRSEDAQSKAALTDWLRAKASFVIEGLKEADKDEFCRCELKLQKWYGDLRGKPFAIEAENSILDISGFSKQYNCAFIWQKDGVKKLNLYLIINYFKGGKLRFKKIKPEAFEANRFYTVINKKSGEIVPMEVNFNFDDPNLIILPLAFGKRQGREFIWNDLLSLETGSLKLANGRVIEKTLYNRRTRQDEPALFVALTFERREVLDSSNIKPMNLIGVDRGENIPAVIALTDPEGCPLSRFKDSLGNPTHILRIGESYKEKQRTIQAKKEVEQRRAGGYSRKYASKAKNLADDMVRNTARDLLYYAVTQDAMLIFENLSRGFGRQGKRTFMAERQYTRMEDWLTAKLAYEGLPSKTYLSKTLAQYTSKTCSNCGFTITSADYDRVLEKLKKTATGWMTTINGKELKVEGQITYYNRYKRQNVVKDLSVELDRLSEESVNNDISSWTKGRSGEALSLLKKRFSHRPVQEKFVCLNCGFETHADEQAALNIARSWLFLRSQEYKKYQTNKTTGNTDKRAFVETWQSFYRKKLKEVWKPAV

SEQ ID NO: 30500 - protein, 979 aa, synthetic construct
  REGION 1..979: note = engineered CasX variant
QEIKRINGIRRRLVKDSNTKKAGKTGPMKTLLVRVMTPDLRERLENLRKKPENIPQPISNTSRANLNKLLTDYTEMKKAILHVYWEEFQKDPVGLMSRVAQPASKKIDQNKLKPEMDEKGNLTTAGFACSQCGQPLFVYKLEQVSEKGKAYTNYFGRCNVAEHEKLILLAQLKPEKDSDEAVTYSLGKFGQRALDFYSIHVTKESTHPVKPLAQIAGNRYASSAPVGKALSDACMGTIASFLSKYQDIIIEHQKVVKGNQKRLESLRELAGKENLEYPSVTLPPQPHTKEGVDAYNEVIARVRMWVNLNLWQKLKLSRDDAKPLLRLKGFPSFPLVERQANEVDWWDMVCNVKKLINEKKEDGKVFWQNLAGYKRQEALRPYLSSEEDRKKGKKFARYQLGDLLLHLEKKHGEDWGKVYDEAWERIDKKVEGLSKHIKLEEERRSEDAQSKAALTDWLRAKASFVIEGLKEADKDEFCRCELKLQKWYGDLRGKPFAIEAENSILDISGFSKQYNCAFIWQKDGVKKLNLYLIINYFKGGKLRFKKIKPEAFEANRFYTVINKKSGEIVPMEVNFNFDDPNLIILPLAFGKRQGREFIWNDLLSLETGSLKLANGRVIEKTLYNRRTRQDEPALFVALTFERREVLDSSNIKPMNLIGVDRGENIPAVIALTDPEGCPLSRFKDSLGNPTHILRIGESYKEKQRTIQAKKEVEQRRAGGYSRKYASKAKNLADDMVRNTARDLLYYAVTQDAMLIFENLSRGFGRQGKRTFMAERQYTRMEDWLTAKLAYEGLPSKTYLSKTLAQYTSKTCSNCGFTITSADYDRVLEKLKKTATGWMTTINGKELKVEGQITYYNRYKRQNVVKDLSVELDRLSEESVNNDISSWTKGRSGEALSLLKKRFSHRPVQEKFVCLNCGFETHADEQAALNIARSWLFLRSQEYKKYQTNKTTGNTDKRAFVETWQSFYRKKLKEVWKPAV

SEQ ID NO: 30501 - protein, 979 aa, synthetic construct
  REGION 1..979: note = engineered CasX variant
QEIKRINGIRRRLVKDSNTKKAGKTGPMKTLLVRVMTPDLRERLENLRKKPENIPQPISNTSRANLNKLLTDYTEMKKAILHVYWEEFQKDPVGLMSRVAQPASKKIDQNKLKPEMDEKGNLTTAGFACSQCGQPLFVYKLEQVSEKGKAYTNYFGRCNVAEHEKLILLAQLKPEKDSDEAVTYSLGKFGQRALDFYSIHVTKESTHPVKPLAQIAGNRYASSVPVGKALSDACMGTIASFLSKYQDIIIEHQKVVKGNQKRLESLRELAGKENLEYPSVTLPPQPHTKEGVDAYNEVIARVRMWVNLNLWQKLKLSRDDAKPLLRLKGFPSFPLVERQANEVDWWDMVCNVKKLINEKKEDGKVFWQNLAGYKRQEALRPYLSSEEDRKKGKKFARYQLGDLLLHLEKKHGEDWGKVYDEAWERIDKKVEGLSKHIKLEEERRSEDAQSKAALTDWLRAKASFVIEGLKEADKDEFCRCELKLQKWYGDLRGKPFAIEAENSILDISGFSKQYNCAFIWQKDGVKKLNLYLIINYFKGGKLRFKKIKPEAFEANRFYTVINKKSGEIVPMEVNFNFDDPNLIILPLAFGKRQGREFIWNDLLSLETGSLKLANGRVIEKTLYNRRTRQDEPALFVALTFERREVLDSSNIKPMNLIGVDRGENIPAVIALTDPEGCPLSRFKDSLGNPTHILRIGESYKEKQRTIQAKKEVEQRRAGGYSRKYASKAKNLADDMVRNTARDLLYYAVTQDAMLIFENLSRGFGRQGKRTFMAERQYTRMEDWLTAKLAYEGLPSKTYLSKTLAQYTSKTCSNCGFTITSADYDRVLEKLKKTATGWMTTINGKELKVEGQITYYNRYKRQNVVKDLSVELDRLSEESVNNDISSWTKGRSGEALSLLKKRFSHRPVQEKFVCLNCGFETHADEQAALNIARSWLFLRSQEYKKYQTNKTTGNTDKRAFVETWQSFYRKKLKEVWKPAV

SEQ ID NO: 30502 - protein, 978 aa, synthetic construct
  REGION 1..978: note = engineered CasX variant
QEIKRINGIRRRLVKDSNTKKAGKTGPMKTLLVRVMTPDLRERLENLRKKPENIPQPISNTSRANLNKLLTDYTEMKKAILHVYWEEFQKDPVGLMSRVAQPASKKIDQNKLKPEMDEKGNLTTAGFACSQCGQPLFVYKLEQVSEKGKAYTNYFGRCNVAEHEKLIKLAQLKPEKDSDEAVTYSLGKFGQRALDFYSIHVTKESTHPVKPLAQIAGNRYASSPVGKALSDACMGTIASFLSKYQDIIIEHQKVVKGNQKRLESLRELAGKENLEYPSVTLPPQPHTKEGVDAYNEVIARVRMWVNLNLWQKLKLSRDDAKPLLRLKGFPSFPLVERQANEVDWWDMVCNVKKLINEKKEDGKVFWQNLAGYKRQEALRPYLSSEEDRKKGKKFARYQLGDLLLHLEKKHGEDWGKVYDEAWERIDKKVEGLSKHIKLEEERRSEDAQSKAALTDWLRAKASFVIEGLKEADKDEFCRCELKLQKWYGDLRGKPFAIEAENSILDISGFSKQYNCAFIWQKDGVKKLNLYLIINYFKGGKLRFKKIKPEAFEANRFYTVINKKSGEIVPMEVNFNFDDPNLIILPLAFGKRQGREFIWNDLLSLETGSLKLANGRVIEKTLYNRRTRQDEPALFVALTFERREVLDSSNIKPMNLIGVDRGENIPAVIALTDPEGCPLSRFKDSLGNPTHILRIGESYKEKQRTIQAKKEVEQRRAGGYSRKYASKAKNLADDMVRNTARDLLYYAVTQDAMLIFENLSRGFGRQGKRTFMAERQYTRMEDWLTAKLAYEGLPSKTYLSKTLAQYTSKTCSNCGFTITSADYDRVLEKLKKTATGWMTTINGKELKVEGQITYYNRYKRQNVVKDLSVELDRLSEESVNNDISSWTKGRSGEALSLLKKRFSHRPVQEKFVCLNCGFETHADEQAALNIARSWLFLRSQEYKKYQTNKTTGNTDKRAFVETWQSFYRKKLKEVWKPAV

SEQ ID NO: 30503 - protein, 979 aa, synthetic construct
  REGION 1..979: note = engineered CasX variant
QEIKRINKIRRRLVKDSNTKKAGKTGPMKTLLVPVMTPDLRERLENLRKKPENIPQPISNTSRANLNKLLTDYTEMKKAILHVYWEEFQKDPVGLMSRVAQPASKKIDQNKLKPEMDEKGNLTTAGFACSQCGQPLFVYKLEQVSEKGKAYTNYFGRCNVAEHEKLILLAQLKPEKDSDEAVTYSLGKFGQRALDFYSIHVTKESTHPVKPLAQIAGNRYASSYPVGKALSDACMGTIASFLSKYQDIIIEHQKVVKGNQKRLESLRELAGKENLEYPSVTLPPQPHTKEGVDAYNEVIARVRMWVNLNLWQKLKLSRDDAKPLLRLKGFPSFPLVERQANEVDWWDMVCNVKKLINEKKEDGKVFWQNLAGYKRQEALRPYLSSEEDRKKGKKFARYQLGDLLLHLEKKHGEDWGKVYDEAWERIDKKVEGLSKHIKLEEERRSEDAQSKAALTDWLRAKASFVIEGLKEADKDEFCRCELKLQKWYGDLRGKPFAIEAENSILDISGFSKQYNCAFIWQKDGVKKLNLYLIINYFKGGKLRFKKIKPEAFEANRFYTVINKKSGEIVPMEVNFNFDDPNLIILPLAFGKRQGREFIWNDLLSLETGSLKLANGRVIEKTLYNRRTRQDEPALFVALTFERREVLDSSNIKPMNLIGVDRGENIPAVIALTDPEGCPLSRFKDSLGNPTHILRIGESYKEKQRTIQAKKEVEQRRAGGYSRKYASKAKNLADDMVRNTARDLLYYAVTQDAMLIFENLSRGFGRQGKRTFMAERQYTRMEDWLTAKLAYEGLPSKTYLSKTLAQYTSKTCSNCGFTITSADYDRVLEKLKKTATGWMTTINGKELKVEGQITYYNRYKRQNVVKDLSVELDRLSEESVNNDISSWTKGRSGEALSLLKKRFSHRPVQEKFVCLNCGFETHADEQAALNIARSWLFLRSQEYKKYQTNKTTGNTDKRAFVETWQSFYRKKLKEVWKPAV

SEQ ID NO: 30504 - protein, 979 aa, synthetic construct
  REGION 1..979: note = engineered CasX variant
QEIKRINKIRRRLVKDSNTKKAGKTGPMKTLLVPVMTPDLRERLENLRKKPENIPQPISNTSRANLNKLLTDYTEMKKAILHVYWEEFQKDPVGLMSRVAQPASKKIDQNKLKPEMDEKGNLTTAGFACSQCGQPLFVYKLEQVSEKGKAYTNYFGRCNVAEHEKLILLAQLKPEKDSDEAVTYSLGKFGQRALDFYSIHVTKESTHPVKPLAQIAGNRYASSHPVGKALSDACMGTIASFLSKYQDIIIEHQKVVKGNQKRLESLRELAGKENLEYPSVTLPPQPHTKEGVDAYNEVIARVRMWVNLNLWQKLKLSRDDAKPLLRLKGFPSFPLVERQANEVDWWDMVCNVKKLINEKKEDGKVFWQNLAGYKRQEALRPYLSSEEDRKKGKKFARYQLGDLLLHLEKKHGEDWGKVYDEAWERIDKKVEGLSKHIKLEEERRSEDAQSKAALTDWLRAKASFVIEGLKEADKDEFCRCELKLQKWYGDLRGKPFAIEAENSILDISGFSKQYNCAFIWQKDGVKKLNLYLIINYFKGGKLRFKKIKPEAFEANRFYTVINKKSGEIVPMEVNFNFDDPNLIILPLAFGKRQGREFIWNDLLSLETGSLKLANGRVIEKTLYNRRTRQDEPALFVALTFERREVLDSSNIKPMNLIGVDRGENIPAVIALTDPEGCPLSRFKDSLGNPTHILRIGESYKEKQRTIQAKKEVEQRRAGGYSRKYASKAKNLADDMVRNTARDLLYYAVTQDAMLIFENLSRGFGRQGKRTFMAERQYTRMEDWLTAKLAYEGLPSKTYLSKTLAQYTSKTCSNCGFTITSADYDRVLEKLKKTATGWMTTINGKELKVEGQITYYNRYKRQNVVKDLSVELDRLSEESVNNDISSWTKGRSGEALSLLKKRFSHRPVQEKFVCLNCGFETHADEQAALNIARSWLFLRSQEYKKYQTNKTTGNTDKRAFVETWQSFYRKKLKEVWKPAV

SEQ ID NO: 30505 - protein, 979 aa, synthetic construct
  REGION 1..979: note = engineered CasX variant
QEIKRINKIRRRLVKDSNTKKAGKTGPMKTLLVPVMTPDLRERLENLRKKPENIPQPISNTSRANLNKLLTDYTEMKKAILHVYWEEFQKDPVGLMSRVAQPASKKIDQNKLKPEMDEKGNLTTAGFACSQCGQPLFVYKLEQVSEKGKAYTNYFGRCNVAEHEKLILLAQLKPEKDSDEAVTYSLGKFGQRALDFYSIHVTKESTHPVKPLAQIAGNRYASSSPVGKALSDACMGTIASFLSKYQDIIIEHQKVVKGNQKRLESLRELAGKENLEYPSVTLPPQPHTKEGVDAYNEVIARVRMWVNLNLWQKLKLSRDDAKPLLRLKGFPSFPLVERQANEVDWWDMVCNVKKLINEKKEDGKVFWQNLAGYKRQEALRPYLSSEEDRKKGKKFARYQLGDLLLHLEKKHGEDWGKVYDEAWERIDKKVEGLSKHIKLEEERRSEDAQSKAALTDWLRAKASFVIEGLKEADKDEFCRCELKLQKWYGDLRGKPFAIEAENSILDISGFSKQYNCAFIWQKDGVKKLNLYLIINYFKGGKLRFKKIKPEAFEANRFYTVINKKSGEIVPMEVNFNFDDPNLIILPLAFGKRQGREFIWNDLLSLETGSLKLANGRVIEKTLYNRRTRQDEPALFVALTFERREVLDSSNIKPMNLIGVDRGENIPAVIALTDPEGCPLSRFKDSLGNPTHILRIGESYKEKQRTIQAKKEVEQRRAGGYSRKYASKAKNLADDMVRNTARDLLYYAVTQDAMLIFENLSRGFGRQGKRTFMAERQYTRMEDWLTAKLAYEGLPSKTYLSKTLAQYTSKTCSNCGFTITSADYDRVLEKLKKTATGWMTTINGKELKVEGQITYYNRYKRQNVVKDLSVELDRLSEESVNNDISSWTKGRSGEALSLLKKRFSHRPVQEKFVCLNCGFETHADEQAALNIARSWLFLRSQEYKKYQTNKTTGNTDKRAFVETWQSFYRKKLKEVWKPAV

SEQ ID NO: 30506 - protein, 979 aa, synthetic construct
  REGION 1..979: note = engineered CasX variant
QEIKRINKIRRRLVKDSNTKKAGKTGPMKTLLVPVMTPDLRERLENLRKKPENIPQPISNTSRANLNKLLTDYTEMKKAILHVYWEEFQKDPVGLMSRVAQPASKKIDQNKLKPEMDEKGNLTTAGFACSQCGQPLFVYKLEQVSEKGKAYTNYFGRCNVAEHEKLILLAQLKPEKDSDEAVTYSLGKFGQRALDFYSIHVTKESTHPVKPLAQIAGNRYASSTPVGKALSDACMGTIASFLSKYQDIIIEHQKVVKGNQKRLESLRELAGKENLEYPSVTLPPQPHTKEGVDAYNEVIARVRMWVNLNLWQKLKLSRDDAKPLLRLKGFPSFPLVERQANEVDWWDMVCNVKKLINEKKEDGKVFWQNLAGYKRQEALRPYLSSEEDRKKGKKFARYQLGDLLLHLEKKHGEDWGKVYDEAWERIDKKVEGLSKHIKLEEERRSEDAQSKAALTDWLRAKASFVIEGLKEADKDEFCRCELKLQKWYGDLRGKPFAIEAENSILDISGFSKQYNCAFIWQKDGVKKLNLYLIINYFKGGKLRFKKIKPEAFEANRFYTVINKKSGEIVPMEVNFNFDDPNLIILPLAFGKRQGREFIWNDLLSLETGSLKLANGRVIEKTLYNRRTRQDEPALFVALTFERREVLDSSNIKPMNLIGVDRGENIPAVIALTDPEGCPLSRFKDSLGNPTHILRIGESYKEKQRTIQAKKEVEQRRAGGYSRKYASKAKNLADDMVRNTARDLLYYAVTQDAMLIFENLSRGFGRQGKRTFMAERQYTRMEDWLTAKLAYEGLPSKTYLSKTLAQYTSKTCSNCGFTITSADYDRVLEKLKKTATGWMTTINGKELKVEGQITYYNRYKRQNVVKDLSVELDRLSEESVNNDISSWTKGRSGEALSLLKKRFSHRPVQEKFVCLNCGFETHADEQAALNIARSWLFLRSQEYKKYQTNKTTGNTDKRAFVETWQSFYRKKLKEVWKPAV

SEQ ID NO: 30507 - protein, 979 aa, synthetic construct
  REGION 1..979: note = engineered CasX variant
QEIKRINKIRRRLVKDSNTKKAGKTGPMKTLLVPVMTPDLRERLENLRKKPENIPQPISNTSRANLNKLLTDYTEMKKAILHVYWEEFQKDPVGLMSRVAQPASKKIDQNKLKPEMDEKGNLTTAGFACSQCGQPLFVYKLEQVSEKGKAYTNYFGRCNVAEHEKLILLAQLKPEKDSDEAVTYSLGKFGQRALDFYSIHVTKESTHPVKPLAQIAGNRYASSAPVGKALSDACMGTIASFLSKYQDIIIEHQKVVKGNQKRLESLRELAGKENLEYPSVTLPPQPHTKEGVDAYNEVIARVRMWVNLNLWQKLKLSRDDAKPLLRLKGFPSFPLVERQANEVDWWDMVCNVKKLINEKKEDGKVFWQNLAGYKRQEALRPYLSSEEDRKKGKKFARYQLGDLLLHLEKKHGEDWGKVYDEAWERIDKKVEGLSKHIKLEEERRSEDAQSKAALTDWLRAKASFVIEGLKEADKDEFCRCELKLQKWYGDLRGKPFAIEAENSILDISGFSKQYNCAFIWQKDGVKKLNLYLIINYFKGGKLRFKKIKPEAFEANRFYTVINKKSGEIVPMEVNFNFDDPNLIILPLAFGKRQGREFIWNDLLSLETGSLKLANGRVIEKTLYNRRTRQDEPALFVALTFERREVLDSSNIKPMNLIGVDRGENIPAVIALTDPEGCPLSRFKDSLGNPTHILRIGESYKEKQRTIQAKKEVEQRRAGGYSRKYASKAKNLADDMVRNTARDLLYYAVTQDAMLIFENLSRGFGRQGKRTFMAERQYTRMEDWLTAKLAYEGLPSKTYLSKTLAQYTSKTCSNCGFTITSADYDRVLEKLKKTATGWMTTINGKELKVEGQITYYNRYKRQNVVKDLSVELDRLSEESVNNDISSWTKGRSGEALSLLKKRFSHRPVQEKFVCLNCGFETHADEQAALNIARSWLFLRSQEYKKYQTNKTTGNTDKRAFVETWQSFYRKKLKEVWKPAV

SEQ ID NO: 30508 - protein, 979 aa, synthetic construct
  REGION 1..979: note = engineered CasX variant
QEIKRINKIRRRLVKDSNTKKAGKTGPMKTLLVPVMTPDLRERLENLRKKPENIPQPISNTSRANLNKLLTDYTEMKKAILHVYWEEFQKDPVGLMSRVAQPASKKIDQNKLKPEMDEKGNLTTAGFACSQCGQPLFVYKLEQVSEKGKAYTNYFGRCNVAEHEKLILLAQLKPEKDSDEAVTYSLGKFGQRALDFYSIHVTKESTHPVKPLAQIAGNRYASSVPVGKALSDACMGTIASFLSKYQDIIIEHQKVVKGNQKRLESLRELAGKENLEYPSVTLPPQPHTKEGVDAYNEVIARVRMWVNLNLWQKLKLSRDDAKPLLRLKGFPSFPLVERQANEVDWWDMVCNVKKLINEKKEDGKVFWQNLAGYKRQEALRPYLSSEEDRKKGKKFARYQLGDLLLHLEKKHGEDWGKVYDEAWERIDKKVEGLSKHIKLEEERRSEDAQSKAALTDWLRAKASFVIEGLKEADKDEFCRCELKLQKWYGDLRGKPFAIEAENSILDISGFSKQYNCAFIWQKDGVKKLNLYLIINYFKGGKLRFKKIKPEAFEANRFYTVINKKSGEIVPMEVNFNFDDPNLIILPLAFGKRQGREFIWNDLLSLETGSLKLANGRVIEKTLYNRRTRQDEPALFVALTFERREVLDSSNIKPMNLIGVDRGENIPAVIALTDPEGCPLSRFKDSLGNPTHILRIGESYKEKQRTIQAKKEVEQRRAGGYSRKYASKAKNLADDMVRNTARDLLYYAVTQDAMLIFENLSRGFGRQGKRTFMAERQYTRMEDWLTAKLAYEGLPSKTYLSKTLAQYTSKTCSNCGFTITSADYDRVLEKLKKTATGWMTTINGKELKVEGQITYYNRYKRQNVVKDLSVELDRLSEESVNNDISSWTKGRSGEALSLLKKRFSHRPVQEKFVCLNCGFETHADEQAALNIARSWLFLRSQEYKKYQTNKTTGNTDKRAFVETWQSFYRKKLKEVWKPAV

SEQ ID NO: 30509 - protein, 978 aa, synthetic construct
  REGION 1..978: note = engineered CasX variant
QEIKRINKIRRRLVKDSNTKKAGKTGPMKTLLVPVMTPDLRERLENLRKKPENIPQPISNTSRANLNKLLTDYTEMKKAILHVYWEEFQKDPVGLMSRVAQPASKKIDQNKLKPEMDEKGNLTTAGFACSQCGQPLFVYKLEQVSEKGKAYTNYFGRCNVAEHEKLIKLAQLKPEKDSDEAVTYSLGKFGQRALDFYSIHVTKESTHPVKPLAQIAGNRYASSPVGKALSDACMGTIASFLSKYQDIIIEHQKVVKGNQKRLESLRELAGKENLEYPSVTLPPQPHTKEGVDAYNEVIARVRMWVNLNLWQKLKLSRDDAKPLLRLKGFPSFPLVERQANEVDWWDMVCNVKKLINEKKEDGKVFWQNLAGYKRQEALRPYLSSEEDRKKGKKFARYQLGDLLLHLEKKHGEDWGKVYDEAWERIDKKVEGLSKHIKLEEERRSEDAQSKAALTDWLRAKASFVIEGLKEADKDEFCRCELKLQKWYGDLRGKPFAIEAENSILDISGFSKQYNCAFIWQKDGVKKLNLYLIINYFKGGKLRFKKIKPEAFEANRFYTVINKKSGEIVPMEVNFNFDDPNLIILPLAFGKRQGREFIWNDLLSLETGSLKLANGRVIEKTLYNRRTRQDEPALFVALTFERREVLDSSNIKPMNLIGVDRGENIPAVIALTDPEGCPLSRFKDSLGNPTHILRIGESYKEKQRTIQAKKEVEQRRAGGYSRKYASKAKNLADDMVRNTARDLLYYAVTQDAMLIFENLSRGFGRQGKRTFMAERQYTRMEDWLTAKLAYEGLPSKTYLSKTLAQYTSKTCSNCGFTITSADYDRVLEKLKKTATGWMTTINGKELKVEGQITYYNRYKRQNVVKDLSVELDRLSEESVNNDISSWTKGRSGEALSLLKKRFSHRPVQEKFVCLNCGFETHADEQAALNIARSWLFLRSQEYKKYQTNKTTGNTDKRAFVETWQSFYRKKLKEVWKPAV

SEQ ID NO: 30510 - protein, 979 aa, synthetic construct
  REGION 1..979: note = engineered CasX variant
QEIKRINKIRRRLVKDSNTKKAGKTGPMKTLLVRVMTPDLRERLENLRKKPPNIPQPISNTSRANLNKLLTDYTEMKKAILHVYWEEFQKDPVGLMSRVAQPASKKIDQNKLKPEMDEKGNLTTAGFACSQCGQPLFVYKLEQVSEKGKAYTNYFGRCNVAEHEKLILLAQLKPEKDSDEAVTYSLGKFGQRALDFYSIHVTKESTHPVKPLAQIAGNRYASSYPVGKALSDACMGTIASFLSKYQDIIIEHQKVVKGNQKRLESLRELAGKENLEYPSVTLPPQPHTKEGVDAYNEVIARVRMWVNLNLWQKLKLSRDDAKPLLRLKGFPSFPLVERQANEVDWWDMVCNVKKLINEKKEDGKVFWQNLAGYKRQEALRPYLSSEEDRKKGKKFARYQLGDLLLHLEKKHGEDWGKVYDEAWERIDKKVEGLSKHIKLEEERRSEDAQSKAALTDWLRAKASFVIEGLKEADKDEFCRCELKLQKWYGDLRGKPFAIEAENSILDISGFSKQYNCAFIWQKDGVKKLNLYLIINYFKGGKLRFKKIKPEAFEANRFYTVINKKSGEIVPMEVNFNFDDPNLIILPLAFGKRQGREFIWNDLLSLETGSLKLANGRVIEKTLYNRRTRQDEPALFVALTFERREVLDSSNIKPMNLIGVDRGENIPAVIALTDPEGCPLSRFKDSLGNPTHILRIGESYKEKQRTIQAKKEVEQRRAGGYSRKYASKAKNLADDMVRNTARDLLYYAVTQDAMLIFENLSRGFGRQGKRTFMAERQYTRMEDWLTAKLAYEGLPSKTYLSKTLAQYTSKTCSNCGFTITSADYDRVLEKLKKTATGWMTTINGKELKVEGQITYYNRYKRQNVVKDLSVELDRLSEESVNNDISSWTKGRSGEALSLLKKRFSHRPVQEKFVCLNCGFETHADEQAALNIARSWLFLRSQEYKKYQTNKTTGNTDKRAFVETWQSFYRKKLKEVWKPAV

SEQ ID NO: 30511 - protein, 979 aa, synthetic construct
  REGION 1..979: note = engineered CasX variant
QEIKRINKIRRRLVKDSNTKKAGKTGPMKTLLVRVMTPDLRERLENLRKKPPNIPQPISNTSRANLNKLLTDYTEMKKAILHVYWEEFQKDPVGLMSRVAQPASKKIDQNKLKPEMDEKGNLTTAGFACSQCGQPLFVYKLEQVSEKGKAYTNYFGRCNVAEHEKLILLAQLKPEKDSDEAVTYSLGKFGQRALDFYSIHVTKESTHPVKPLAQIAGNRYASSHPVGKALSDACMGTIASFLSKYQDIIIEHQKVVKGNQKRLESLRELAGKENLEYPSVTLPPQPHTKEGVDAYNEVIARVRMWVNLNLWQKLKLSRDDAKPLLRLKGFPSFPLVERQANEVDWWDMVCNVKKLINEKKEDGKVFWQNLAGYKRQEALRPYLSSEEDRKKGKKFARYQLGDLLLHLEKKHGEDWGKVYDEAWERIDKKVEGLSKHIKLEEERRSEDAQSKAALTDWLRAKASFVIEGLKEADKDEFCRCELKLQKWYGDLRGKPFAIEAENSILDISGFSKQYNCAFIWQKDGVKKLNLYLIINYFKGGKLRFKKIKPEAFEANRFYTVINKKSGEIVPMEVNFNFDDPNLIILPLAFGKRQGREFIWNDLLSLETGSLKLANGRVIEKTLYNRRTRQDEPALFVALTFERREVLDSSNIKPMNLIGVDRGENIPAVIALTDPEGCPLSRFKDSLGNPTHILRIGESYKEKQRTIQAKKEVEQRRAGGYSRKYASKAKNLADDMVRNTARDLLYYAVTQDAMLIFENLSRGFGRQGKRTFMAERQYTRMEDWLTAKLAYEGLPSKTYLSKTLAQYTSKTCSNCGFTITSADYDRVLEKLKKTATGWMTTINGKELKVEGQITYYNRYKRQNVVKDLSVELDRLSEESVNNDISSWTKGRSGEALSLLKKRFSHRPVQEKFVCLNCGFETHADEQAALNIARSWLFLRSQEYKKYQTNKTTGNTDKRAFVETWQSFYRKKLKEVWKPAV

SEQ ID NO: 30512 - protein, 979 aa, synthetic construct
  REGION 1..979: note = engineered CasX variant
QEIKRINKIRRRLVKDSNTKKAGKTGPMKTLLVRVMTPDLRERLENLRKKPPNIPQPISNTSRANLNKLLTDYTEMKKAILHVYWEEFQKDPVGLMSRVAQPASKKIDQNKLKPEMDEKGNLTTAGFACSQCGQPLFVYKLEQVSEKGKAYTNYFGRCNVAEHEKLILLAQLKPEKDSDEAVTYSLGKFGQRALDFYSIHVTKESTHPVKPLAQIAGNRYASSSPVGKALSDACMGTIASFLSKYQDIIIEHQKVVKGNQKRLESLRELAGKENLEYPSVTLPPQPHTKEGVDAYNEVIARVRMWVNLNLWQKLKLSRDDAKPLLRLKGFPSFPLVERQANEVDWWDMVCNVKKLINEKKEDGKVFWQNLAGYKRQEALRPYLSSEEDRKKGKKFARYQLGDLLLHLEKKHGEDWGKVYDEAWERIDKKVEGLSKHIKLEEERRSEDAQSKAALTDWLRAKASFVIEGLKEADKDEFCRCELKLQKWYGDLRGKPFAIEAENSILDISGFSKQYNCAFIWQKDGVKKLNLYLIINYFKGGKLRFKKIKPEAFEANRFYTVINKKSGEIVPMEVNFNFDDPNLIILPLAFGKRQGREFIWNDLLSLETGSLKLANGRVIEKTLYNRRTRQDEPALFVALTFERREVLDSSNIKPMNLIGVDRGENIPAVIALTDPEGCPLSRFKDSLGNPTHILRIGESYKEKQRTIQAKKEVEQRRAGGYSRKYASKAKNLADDMVRNTARDLLYYAVTQDAMLIFENLSRGFGRQGKRTFMAERQYTRMEDWLTAKLAYEGLPSKTYLSKTLAQYTSKTCSNCGFTITSADYDRVLEKLKKTATGWMTTINGKELKVEGQITYYNRYKRQNVVKDLSVELDRLSEESVNNDISSWTKGRSGEALSLLKKRFSHRPVQEKFVCLNCGFETHADEQAALNIARSWLFLRSQEYKKYQTNKTTGNTDKRAFVETWQSFYRKKLKEVWKPAV

SEQ ID NO: 30513 - protein, 979 aa, synthetic construct
  REGION 1..979: note = engineered CasX variant
QEIKRINKIRRRLVKDSNTKKAGKTGPMKTLLVRVMTPDLRERLENLRKKPPNIPQPISNTSRANLNKLLTDYTEMKKAILHVYWEEFQKDPVGLMSRVAQPASKKIDQNKLKPEMDEKGNLTTAGFACSQCGQPLFVYKLEQVSEKGKAYTNYFGRCNVAEHEKLILLAQLKPEKDSDEAVTYSLGKFGQRALDFYSIHVTKESTHPVKPLAQIAGNRYASSTPVGKALSDACMGTIASFLSKYQDIIIEHQKVVKGNQKRLESLRELAGKENLEYPSVTLPPQPHTKEGVDAYNEVIARVRMWVNLNLWQKLKLSRDDAKPLLRLKGFPSFPLVERQANEVDWWDMVCNVKKLINEKKEDGKVFWQNLAGYKRQEALRPYLSSEEDRKKGKKFARYQLGDLLLHLEKKHGEDWGKVYDEAWERIDKKVEGLSKHIKLEEERRSEDAQSKAALTDWLRAKASFVIEGLKEADKDEFCRCELKLQKWYGDLRGKPFAIEAENSILDISGFSKQYNCAFIWQKDGVKKLNLYLIINYFKGGKLRFKKIKPEAFEANRFYTVINKKSGEIVPMEVNFNFDDPNLIILPLAFGKRQGREFIWNDLLSLETGSLKLANGRVIEKTLYNRRTRQDEPALFVALTFERREVLDSSNIKPMNLIGVDRGENIPAVIALTDPEGCPLSRFKDSLGNPTHILRIGESYKEKQRTIQAKKEVEQRRAGGYSRKYASKAKNLADDMVRNTARDLLYYAVTQDAMLIFENLSRGFGRQGKRTFMAERQYTRMEDWLTAKLAYEGLPSKTYLSKTLAQYTSKTCSNCGFTITSADYDRVLEKLKKTATGWMTTINGKELKVEGQITYYNRYKRQNVVKDLSVELDRLSEESVNNDISSWTKGRSGEALSLLKKRFSHRPVQEKFVCLNCGFETHADEQAALNIARSWLFLRSQEYKKYQTNKTTGNTDKRAFVETWQSFYRKKLKEVWKPAV

SEQ ID NO: 30514 - protein, 979 aa, synthetic construct
  REGION 1..979: note = engineered CasX variant
QEIKRINKIRRRLVKDSNTKKAGKTGPMKTLLVRVMTPDLRERLENLRKKPPNIPQPISNTSRANLNKLLTDYTEMKKAILHVYWEEFQKDPVGLMSRVAQPASKKIDQNKLKPEMDEKGNLTTAGFACSQCGQPLFVYKLEQVSEKGKAYTNYFGRCNVAEHEKLILLAQLKPEKDSDEAVTYSLGKFGQRALDFYSIHVTKESTHPVKPLAQIAGNRYASSAPVGKALSDACMGTIASFLSKYQDIIIEHQKVVKGNQKRLESLRELAGKENLEYPSVTLPPQPHTKEGVDAYNEVIARVRMWVNLNLWQKLKLSRDDAKPLLRLKGFPSFPLVERQANEVDWWDMVCNVKKLINEKKEDGKVFWQNLAGYKRQEALRPYLSSEEDRKKGKKFARYQLGDLLLHLEKKHGEDWGKVYDEAWERIDKKVEGLSKHIKLEEERRSEDAQSKAALTDWLRAKASFVIEGLKEADKDEFCRCELKLQKWYGDLRGKPFAIEAENSILDISGFSKQYNCAFIWQKDGVKKLNLYLIINYFKGGKLRFKKIKPEAFEANRFYTVINKKSGEIVPMEVNFNFDDPNLIILPLAFGKRQGREFIWNDLLSLETGSLKLANGRVIEKTLYNRRTRQDEPALFVALTFERREVLDSSNIKPMNLIGVDRGENIPAVIALTDPEGCPLSRFKDSLGNPTHILRIGESYKEKQRTIQAKKEVEQRRAGGYSRKYASKAKNLADDMVRNTARDLLYYAVTQDAMLIFENLSRGFGRQGKRTFMAERQYTRMEDWLTAKLAYEGLPSKTYLSKTLAQYTSKTCSNCGFTITSADYDRVLEKLKKTATGWMTTINGKELKVEGQITYYNRYKRQNVVKDLSVELDRLSEESVNNDISSWTKGRSGEALSLLKKRFSHRPVQEKFVCLNCGFETHADEQAALNIARSWLFLRSQEYKKYQTNKTTGNTDKRAFVETWQSFYRKKLKEVWKPAV

SEQ ID NO: 30515 - protein, 979 aa, synthetic construct
  REGION 1..979: note = engineered CasX variant
QEIKRINKIRRRLVKDSNTKKAGKTGPMKTLLVRVMTPDLRERLENLRKKPPNIPQPISNTSRANLNKLLTDYTEMKKAILHVYWEEFQKDPVGLMSRVAQPASKKIDQNKLKPEMDEKGNLTTAGFACSQCGQPLFVYKLEQVSEKGKAYTNYFGRCNVAEHEKLILLAQLKPEKDSDEAVTYSLGKFGQRALDFYSIHVTKESTHPVKPLAQIAGNRYASSVPVGKALSDACMGTIASFLSKYQDIIIEHQKVVKGNQKRLESLRELAGKENLEYPSVTLPPQPHTKEGVDAYNEVIARVRMWVNLNLWQKLKLSRDDAKPLLRLKGFPSFPLVERQANEVDWWDMVCNVKKLINEKKEDGKVFWQNLAGYKRQEALRPYLSSEEDRKKGKKFARYQLGDLLLHLEKKHGEDWGKVYDEAWERIDKKVEGLSKHIKLEEERRSEDAQSKAALTDWLRAKASFVIEGLKEADKDEFCRCELKLQKWYGDLRGKPFAIEAENSILDISGFSKQYNCAFIWQKDGVKKLNLYLIINYFKGGKLRFKKIKPEAFEANRFYTVINKKSGEIVPMEVNFNFDDPNLIILPLAFGKRQGREFIWNDLLSLETGSLKLANGRVIEKTLYNRRTRQDEPALFVALTFERREVLDSSNIKPMNLIGVDRGENIPAVIALTDPEGCPLSRFKDSLGNPTHILRIGESYKEKQRTIQAKKEVEQRRAGGYSRKYASKAKNLADDMVRNTARDLLYYAVTQDAMLIFENLSRGFGRQGKRTFMAERQYTRMEDWLTAKLAYEGLPSKTYLSKTLAQYTSKTCSNCGFTITSADYDRVLEKLKKTATGWMTTINGKELKVEGQITYYNRYKRQNVVKDLSVELDRLSEESVNNDISSWTKGRSGEALSLLKKRFSHRPVQEKFVCLNCGFETHADEQAALNIARSWLFLRSQEYKKYQTNKTTGNTDKRAFVETWQSFYRKKLKEVWKPAV

SEQ ID NO: 30516 - protein, 978 aa, synthetic construct
  REGION 1..978: note = engineered CasX variant
QEIKRINKIRRRLVKDSNTKKAGKTGPMKTLLVRVMTPDLRERLENLRKKPPNIPQPISNTSRANLNKLLTDYTEMKKAILHVYWEEFQKDPVGLMSRVAQPASKKIDQNKLKPEMDEKGNLTTAGFACSQCGQPLFVYKLEQVSEKGKAYTNYFGRCNVAEHEKLIKLAQLKPEKDSDEAVTYSLGKFGQRALDFYSIHVTKESTHPVKPLAQIAGNRYASSPVGKALSDACMGTIASFLSKYQDIIIEHQKVVKGNQKRLESLRELAGKENLEYPSVTLPPQPHTKEGVDAYNEVIARVRMWVNLNLWQKLKLSRDDAKPLLRLKGFPSFPLVERQANEVDWWDMVCNVKKLINEKKEDGKVFWQNLAGYKRQEALRPYLSSEEDRKKGKKFARYQLGDLLLHLEKKHGEDWGKVYDEAWERIDKKVEGLSKHIKLEEERRSEDAQSKAALTDWLRAKASFVIEGLKEADKDEFCRCELKLQKWYGDLRGKPFAIEAENSILDISGFSKQYNCAFIWQKDGVKKLNLYLIINYFKGGKLRFKKIKPEAFEANRFYTVINKKSGEIVPMEVNFNFDDPNLIILPLAFGKRQGREFIWNDLLSLETGSLKLANGRVIEKTLYNRRTRQDEPALFVALTFERREVLDSSNIKPMNLIGVDRGENIPAVIALTDPEGCPLSRFKDSLGNPTHILRIGESYKEKQRTIQAKKEVEQRRAGGYSRKYASKAKNLADDMVRNTARDLLYYAVTQDAMLIFENLSRGFGRQGKRTFMAERQYTRMEDWLTAKLAYEGLPSKTYLSKTLAQYTSKTCSNCGFTITSADYDRVLEKLKKTATGWMTTINGKELKVEGQITYYNRYKRQNVVKDLSVELDRLSEESVNNDISSWTKGRSGEALSLLKKRFSHRPVQEKFVCLNCGFETHADEQAALNIARSWLFLRSQEYKKYQTNKTTGNTDKRAFVETWQSFYRKKLKEVWKPAV

SEQ ID NO: 30517 - protein, 979 aa, synthetic construct
  REGION 1..979: note = engineered CasX variant
QEIKRINKIRRRLVKDSNTKKAGKTGPMKTLLVRVMTPDLRERLENLRKKPENIPQPISNTSQANLNKLLTDYTEMKKAILHVYWEEFQKDPVGLMSRVAQPASKKIDQNKLKPEMDEKGNLTTAGFACSQCGQPLFVYKLEQVSEKGKAYTNYFGRCNVAEHEKLILLAQLKPEKDSDEAVTYSLGKFGQRALDFYSIHVTKESTHPVKPLAQIAGNRYASSYPVGKALSDACMGTIASFLSKYQDIIIEHQKVVKGNQKRLESLRELAGKENLEYPSVTLPPQPHTKEGVDAYNEVIARVRMWVNLNLWQKLKLSRDDAKPLLRLKGFPSFPLVERQANEVDWWDMVCNVKKLINEKKEDGKVFWQNLAGYKRQEALRPYLSSEEDRKKGKKFARYQLGDLLLHLEKKHGEDWGKVYDEAWERIDKKVEGLSKHIKLEEERRSEDAQSKAALTDWLRAKASFVIEGLKEADKDEFCRCELKLQKWYGDLRGKPFAIEAENSILDISGFSKQYNCAFIWQKDGVKKLNLYLIINYFKGGKLRFKKIKPEAFEANRFYTVINKKSGEIVPMEVNFNFDDPNLIILPLAFGKRQGREFIWNDLLSLETGSLKLANGRVIEKTLYNRRTRQDEPALFVALTFERREVLDSSNIKPMNLIGVDRGENIPAVIALTDPEGCPLSRFKDSLGNPTHILRIGESYKEKQRTIQAKKEVEQRRAGGYSRKYASKAKNLADDMVRNTARDLLYYAVTQDAMLIFENLSRGFGRQGKRTFMAERQYTRMEDWLTAKLAYEGLPSKTYLSKTLAQYTSKTCSNCGFTITSADYDRVLEKLKKTATGWMTTINGKELKVEGQITYYNRYKRQNVVKDLSVELDRLSEESVNNDISSWTKGRSGEALSLLKKRFSHRPVQEKFVCLNCGFETHADEQAALNIARSWLFLRSQEYKKYQTNKTTGNTDKRAFVETWQSFYRKKLKEVWKPAV

SEQ ID NO: 30518 - protein, 979 aa, synthetic construct
  REGION 1..979: note = engineered CasX variant
QEIKRINKIRRRLVKDSNTKKAGKTGPMKTLLVRVMTPDLRERLENLRKKPENIPQPISNTSQANLNKLLTDYTEMKKAILHVYWEEFQKDPVGLMSRVAQPASKKIDQNKLKPEMDEKGNLTTAGFACSQCGQPLFVYKLEQVSEKGKAYTNYFGRCNVAEHEKLILLAQLKPEKDSDEAVTYSLGKFGQRALDFYSIHVTKESTHPVKPLAQIAGNRYASSHPVGKALSDACMGTIASFLSKYQDIIIEHQKVVKGNQKRLESLRELAGKENLEYPSVTLPPQPHTKEGVDAYNEVIARVRMWVNLNLWQKLKLSRDDAKPLLRLKGFPSFPLVERQANEVDWWDMVCNVKKLINEKKEDGKVFWQNLAGYKRQEALRPYLSSEEDRKKGKKFARYQLGDLLLHLEKKHGEDWGKVYDEAWERIDKKVEGLSKHIKLEEERRSEDAQSKAALTDWLRAKASFVIEGLKEADKDEFCRCELKLQKWYGDLRGKPFAIEAENSILDISGFSKQYNCAFIWQKDGVKKLNLYLIINYFKGGKLRFKKIKPEAFEANRFYTVINKKSGEIVPMEVNFNFDDPNLIILPLAFGKRQGREFIWNDLLSLETGSLKLANGRVIEKTLYNRRTRQDEPALFVALTFERREVLDSSNIKPMNLIGVDRGENIPAVIALTDPEGCPLSRFKDSLGNPTHILRIGESYKEKQRTIQAKKEVEQRRAGGYSRKYASKAKNLADDMVRNTARDLLYYAVTQDAMLIFENLSRGFGRQGKRTFMAERQYTRMEDWLTAKLAYEGLPSKTYLSKTLAQYTSKTCSNCGFTITSADYDRVLEKLKKTATGWMTTINGKELKVEGQITYYNRYKRQNVVKDLSVELDRLSEESVNNDISSWTKGRSGEALSLLKKRFSHRPVQEKFVCLNCGFETHADEQAALNIARSWLFLRSQEYKKYQTNKTTGNTDKRAFVETWQSFYRKKLKEVWKPAV

SEQ ID NO: 30519 - protein, 979 aa, synthetic construct
  REGION 1..979: note = engineered CasX variant
QEIKRINKIRRRLVKDSNTKKAGKTGPMKTLLVRVMTPDLRERLENLRKKPENIPQPISNTSQANLNKLLTDYTEMKKAILHVYWEEFQKDPVGLMSRVAQPASKKIDQNKLKPEMDEKGNLTTAGFACSQCGQPLFVYKLEQVSEKGKAYTNYFGRCNVAEHEKLILLAQLKPEKDSDEAVTYSLGKFGQRALDFYSIHVTKESTHPVKPLAQIAGNRYASSSPVGKALSDACMGTIASFLSKYQDIIIEHQKVVKGNQKRLESLRELAGKENLEYPSVTLPPQPHTKEGVDAYNEVIARVRMWVNLNLWQKLKLSRDDAKPLLRLKGFPSFPLVERQANEVDWWDMVCNVKKLINEKKEDGKVFWQNLAGYKRQEALRPYLSSEEDRKKGKKFARYQLGDLLLHLEKKHGEDWGKVYDEAWERIDKKVEGLSKHIKLEEERRSEDAQSKAALTDWLRAKASFVIEGLKEADKDEFCRCELKLQKWYGDLRGKPFAIEAENSILDISGFSKQYNCAFIWQKDGVKKLNLYLIINYFKGGKLRFKKIKPEAFEANRFYTVINKKSGEIVPMEVNFNFDDPNLIILPLAFGKRQGREFIWNDLLSLETGSLKLANGRVIEKTLYNRRTRQDEPALFVALTFERREVLDSSNIKPMNLIGVDRGENIPAVIALTDPEGCPLSRFKDSLGNPTHILRIGESYKEKQRTIQAKKEVEQRRAGGYSRKYASKAKNLADDMVRNTARDLLYYAVTQDAMLIFENLSRGFGRQGKRTFMAERQYTRMEDWLTAKLAYEGLPSKTYLSKTLAQYTSKTCSNCGFTITSADYDRVLEKLKKTATGWMTTINGKELKVEGQITYYNRYKRQNVVKDLSVELDRLSEESVNNDISSWTKGRSGEALSLLKKRFSHRPVQEKFVCLNCGFETHADEQAALNIARSWLFLRSQEYKKYQTNKTTGNTDKRAFVETWQSFYRKKLKEVWKPAV

SEQ ID NO: 30520 - protein, 979 aa, synthetic construct
  REGION 1..979: note = engineered CasX variant
QEIKRINKIRRRLVKDSNTKKAGKTGPMKTLLVRVMTPDLRERLENLRKKPENIPQPISNTSQANLNKLLTDYTEMKKAILHVYWEEFQKDPVGLMSRVAQPASKKIDQNKLKPEMDEKGNLTTAGFACSQCGQPLFVYKLEQVSEKGKAYTNYFGRCNVAEHEKLILLAQLKPEKDSDEAVTYSLGKFGQRALDFYSIHVTKESTHPVKPLAQIAGNRYASSTPVGKALSDACMGTIASFLSKYQDIIIEHQKVVKGNQKRLESLRELAGKENLEYPSVTLPPQPHTKEGVDAYNEVIARVRMWVNLNLWQKLKLSRDDAKPLLRLKGFPSFPLVERQANEVDWWDMVCNVKKLINEKKEDGKVFWQNLAGYKRQEALRPYLSSEEDRKKGKKFARYQLGDLLLHLEKKHGEDWGKVYDEAWERIDKKVEGLSKHIKLEEERRSEDAQSKAALTDWLRAKASFVIEGLKEADKDEFCRCELKLQKWYGDLRGKPFAIEAENSILDISGFSKQYNCAFIWQKDGVKKLNLYLIINYFKGGKLRFKKIKPEAFEANRFYTVINKKSGEIVPMEVNFNFDDPNLIILPLAFGKRQGREFIWNDLLSLETGSLKLANGRVIEKTLYNRRTRQDEPALFVALTFERREVLDSSNIKPMNLIGVDRGENIPAVIALTDPEGCPLSRFKDSLGNPTHILRIGESYKEKQRTIQAKKEVEQRRAGGYSRKYASKAKNLADDMVRNTARDLLYYAVTQDAMLIFENLSRGFGRQGKRTFMAERQYTRMEDWLTAKLAYEGLPSKTYLSKTLAQYTSKTCSNCGFTITSADYDRVLEKLKKTATGWMTTINGKELKVEGQITYYNRYKRQNVVKDLSVELDRLSEESVNNDISSWTKGRSGEALSLLKKRFSHRPVQEKFVCLNCGFETHADEQAALNIARSWLFLRSQEYKKYQTNKTTGNTDKRAFVETWQSFYRKKLKEVWKPAV

SEQ ID NO: 30521 - protein, 979 aa, synthetic construct
  REGION 1..979: note = engineered CasX variant
QEIKRINKIRRRLVKDSNTKKAGKTGPMKTLLVRVMTPDLRERLENLRKKPENIPQPISNTSQANLNKLLTDYTEMKKAILHVYWEEFQKDPVGLMSRVAQPASKKIDQNKLKPEMDEKGNLTTAGFACSQCGQPLFVYKLEQVSEKGKAYTNYFGRCNVAEHEKLILLAQLKPEKDSDEAVTYSLGKFGQRALDFYSIHVTKESTHPVKPLAQIAGNRYASSAPVGKALSDACMGTIASFLSKYQDIIIEHQKVVKGNQKRLESLRELAGKENLEYPSVTLPPQPHTKEGVDAYNEVIARVRMWVNLNLWQKLKLSRDDAKPLLRLKGFPSFPLVERQANEVDWWDMVCNVKKLINEKKEDGKVFWQNLAGYKRQEALRPYLSSEEDRKKGKKFARYQLGDLLLHLEKKHGEDWGKVYDEAWERIDKKVEGLSKHIKLEEERRSEDAQSKAALTDWLRAKASFVIEGLKEADKDEFCRCELKLQKWYGDLRGKPFAIEAENSILDISGFSKQYNCAFIWQKDGVKKLNLYLIINYFKGGKLRFKKIKPEAFEANRFYTVINKKSGEIVPMEVNFNFDDPNLIILPLAFGKRQGREFIWNDLLSLETGSLKLANGRVIEKTLYNRRTRQDEPALFVALTFERREVLDSSNIKPMNLIGVDRGENIPAVIALTDPEGCPLSRFKDSLGNPTHILRIGESYKEKQRTIQAKKEVEQRRAGGYSRKYASKAKNLADDMVRNTARDLLYYAVTQDAMLIFENLSRGFGRQGKRTFMAERQYTRMEDWLTAKLAYEGLPSKTYLSKTLAQYTSKTCSNCGFTITSADYDRVLEKLKKTATGWMTTINGKELKVEGQITYYNRYKRQNVVKDLSVELDRLSEESVNNDISSWTKGRSGEALSLLKKRFSHRPVQEKFVCLNCGFETHADEQAALNIARSWLFLRSQEYKKYQTNKTTGNTDKRAFVETWQSFYRKKLKEVWKPAV

SEQ ID NO: 30522 - protein, 979 aa, synthetic construct
  REGION 1..979: note = engineered CasX variant
QEIKRINKIRRRLVKDSNTKKAGKTGPMKTLLVRVMTPDLRERLENLRKKPENIPQPISNTSQANLNKLLTDYTEMKKAILHVYWEEFQKDPVGLMSRVAQPASKKIDQNKLKPEMDEKGNLTTAGFACSQCGQPLFVYKLEQVSEKGKAYTNYFGRCNVAEHEKLILLAQLKPEKDSDEAVTYSLGKFGQRALDFYSIHVTKESTHPVKPLAQIAGNRYASSVPVGKALSDACMGTIASFLSKYQDIIIEHQKVVKGNQKRLESLRELAGKENLEYPSVTLPPQPHTKEGVDAYNEVIARVRMWVNLNLWQKLKLSRDDAKPLLRLKGFPSFPLVERQANEVDWWDMVCNVKKLINEKKEDGKVFWQNLAGYKRQEALRPYLSSEEDRKKGKKFARYQLGDLLLHLEKKHGEDWGKVYDEAWERIDKKVEGLSKHIKLEEERRSEDAQSKAALTDWLRAKASFVIEGLKEADKDEFCRCELKLQKWYGDLRGKPFAIEAENSILDISGFSKQYNCAFIWQKDGVKKLNLYLIINYFKGGKLRFKKIKPEAFEANRFYTVINKKSGEIVPMEVNFNFDDPNLIILPLAFGKRQGREFIWNDLLSLETGSLKLANGRVIEKTLYNRRTRQDEPALFVALTFERREVLDSSNIKPMNLIGVDRGENIPAVIALTDPEGCPLSRFKDSLGNPTHILRIGESYKEKQRTIQAKKEVEQRRAGGYSRKYASKAKNLADDMVRNTARDLLYYAVTQDAMLIFENLSRGFGRQGKRTFMAERQYTRMEDWLTAKLAYEGLPSKTYLSKTLAQYTSKTCSNCGFTITSADYDRVLEKLKKTATGWMTTINGKELKVEGQITYYNRYKRQNVVKDLSVELDRLSEESVNNDISSWTKGRSGEALSLLKKRFSHRPVQEKFVCLNCGFETHADEQAALNIARSWLFLRSQEYKKYQTNKTTGNTDKRAFVETWQSFYRKKLKEVWKPAV

SEQ ID NO: 30523 - protein, 978 aa, synthetic construct
  REGION 1..978: note = engineered CasX variant
QEIKRINKIRRRLVKDSNTKKAGKTGPMKTLLVRVMTPDLRERLENLRKKPENIPQPISNTSQANLNKLLTDYTEMKKAILHVYWEEFQKDPVGLMSRVAQPASKKIDQNKLKPEMDEKGNLTTAGFACSQCGQPLFVYKLEQVSEKGKAYTNYFGRCNVAEHEKLIKLAQLKPEKDSDEAVTYSLGKFGQRALDFYSIHVTKESTHPVKPLAQIAGNRYASSPVGKALSDACMGTIASFLSKYQDIIIEHQKVVKGNQKRLESLRELAGKENLEYPSVTLPPQPHTKEGVDAYNEVIARVRMWVNLNLWQKLKLSRDDAKPLLRLKGFPSFPLVERQANEVDWWDMVCNVKKLINEKKEDGKVFWQNLAGYKRQEALRPYLSSEEDRKKGKKFARYQLGDLLLHLEKKHGEDWGKVYDEAWERIDKKVEGLSKHIKLEEERRSEDAQSKAALTDWLRAKASFVIEGLKEADKDEFCRCELKLQKWYGDLRGKPFAIEAENSILDISGFSKQYNCAFIWQKDGVKKLNLYLIINYFKGGKLRFKKIKPEAFEANRFYTVINKKSGEIVPMEVNFNFDDPNLIILPLAFGKRQGREFIWNDLLSLETGSLKLANGRVIEKTLYNRRTRQDEPALFVALTFERREVLDSSNIKPMNLIGVDRGENIPAVIALTDPEGCPLSRFKDSLGNPTHILRIGESYKEKQRTIQAKKEVEQRRAGGYSRKYASKAKNLADDMVRNTARDLLYYAVTQDAMLIFENLSRGFGRQGKRTFMAERQYTRMEDWLTAKLAYEGLPSKTYLSKTLAQYTSKTCSNCGFTITSADYDRVLEKLKKTATGWMTTINGKELKVEGQITYYNRYKRQNVVKDLSVELDRLSEESVNNDISSWTKGRSGEALSLLKKRFSHRPVQEKFVCLNCGFETHADEQAALNIARSWLFLRSQEYKKYQTNKTTGNTDKRAFVETWQSFYRKKLKEVWKPAV

SEQ ID NO: 30524 - protein, 979 aa, synthetic construct
  REGION 1..979: note = engineered CasX variant
QEIKRINKIRRRLVKDSNTKKAGKTGPMKTLLVRVMTPDLRERLENLRKKPENIPQPISNTSRANLNKLLTDYTEMKKAILHVYDEEFQKDPVGLMSRVAQPASKKIDQNKLKPEMDEKGNLTTAGFACSQCGQPLFVYKLEQVSEKGKAYTNYFGRCNVAEHEKLILLAQLKPEKDSDEAVTYSLGKFGQRALDFYSIHVTKESTHPVKPLAQIAGNRYASSYPVGKALSDACMGTIASFLSKYQDIIIEHQKVVKGNQKRLESLRELAGKENLEYPSVTLPPQPHTKEGVDAYNEVIARVRMWVNLNLWQKLKLSRDDAKPLLRLKGFPSFPLVERQANEVDWWDMVCNVKKLINEKKEDGKVFWQNLAGYKRQEALRPYLSSEEDRKKGKKFARYQLGDLLLHLEKKHGEDWGKVYDEAWERIDKKVEGLSKHIKLEEERRSEDAQSKAALTDWLRAKASFVIEGLKEADKDEFCRCELKLQKWYGDLRGKPFAIEAENSILDISGFSKQYNCAFIWQKDGVKKLNLYLIINYFKGGKLRFKKIKPEAFEANRFYTVINKKSGEIVPMEVNFNFDDPNLIILPLAFGKRQGREFIWNDLLSLETGSLKLANGRVIEKTLYNRRTRQDEPALFVALTFERREVLDSSNIKPMNLIGVDRGENIPAVIALTDPEGCPLSRFKDSLGNPTHILRIGESYKEKQRTIQAKKEVEQRRAGGYSRKYASKAKNLADDMVRNTARDLLYYAVTQDAMLIFENLSRGFGRQGKRTFMAERQYTRMEDWLTAKLAYEGLPSKTYLSKTLAQYTSKTCSNCGFTITSADYDRVLEKLKKTATGWMTTINGKELKVEGQITYYNRYKRQNVVKDLSVELDRLSEESVNNDISSWTKGRSGEALSLLKKRFSHRPVQEKFVCLNCGFETHADEQAALNIARSWLFLRSQEYKKYQTNKTTGNTDKRAFVETWQSFYRKKLKEVWKPAV

SEQ ID NO: 30525 - protein, 979 aa, synthetic construct
  REGION 1..979: note = engineered CasX variant
QEIKRINKIRRRLVKDSNTKKAGKTGPMKTLLVRVMTPDLRERLENLRKKPENIPQPISNTSRANLNKLLTDYTEMKKAILHVYDEEFQKDPVGLMSRVAQPASKKIDQNKLKPEMDEKGNLTTAGFACSQCGQPLFVYKLEQVSEKGKAYTNYFGRCNVAEHEKLILLAQLKPEKDSDEAVTYSLGKFGQRALDFYSIHVTKESTHPVKPLAQIAGNRYASSHPVGKALSDACMGTIASFLSKYQDIIIEHQKVVKGNQKRLESLRELAGKENLEYPSVTLPPQPHTKEGVDAYNEVIARVRMWVNLNLWQKLKLSRDDAKPLLRLKGFPSFPLVERQANEVDWWDMVCNVKKLINEKKEDGKVFWQNLAGYKRQEALRPYLSSEEDRKKGKKFARYQLGDLLLHLEKKHGEDWGKVYDEAWERIDKKVEGLSKHIKLEEERRSEDAQSKAALTDWLRAKASFVIEGLKEADKDEFCRCELKLQKWYGDLRGKPFAIEAENSILDISGFSKQYNCAFIWQKDGVKKLNLYLIINYFKGGKLRFKKIKPEAFEANRFYTVINKKSGEIVPMEVNFNFDDPNLIILPLAFGKRQGREFIWNDLLSLETGSLKLANGRVIEKTLYNRRTRQDEPALFVALTFERREVLDSSNIKPMNLIGVDRGENIPAVIALTDPEGCPLSRFKDSLGNPTHILRIGESYKEKQRTIQAKKEVEQRRAGGYSRKYASKAKNLADDMVRNTARDLLYYAVTQDAMLIFENLSRGFGRQGKRTFMAERQYTRMEDWLTAKLAYEGLPSKTYLSKTLAQYTSKTCSNCGFTITSADYDRVLEKLKKTATGWMTTINGKELKVEGQITYYNRYKRQNVVKDLSVELDRLSEESVNNDISSWTKGRSGEALSLLKKRFSHRPVQEKFVCLNCGFETHADEQAALNIARSWLFLRSQEYKKYQTNKTTGNTDKRAFVETWQSFYRKKLKEVWKPAV

SEQ ID NO: 30526 - protein, 979 aa, synthetic construct
  REGION 1..979: note = engineered CasX variant
QEIKRINKIRRRLVKDSNTKKAGKTGPMKTLLVRVMTPDLRERLENLRKKPENIPQPISNTSRANLNKLLTDYTEMKKAILHVYDEEFQKDPVGLMSRVAQPASKKIDQNKLKPEMDEKGNLTTAGFACSQCGQPLFVYKLEQVSEKGKAYTNYFGRCNVAEHEKLILLAQLKPEKDSDEAVTYSLGKFGQRALDFYSIHVTKESTHPVKPLAQIAGNRYASSSPVGKALSDACMGTIASFLSKYQDIIIEHQKVVKGNQKRLESLRELAGKENLEYPSVTLPPQPHTKEGVDAYNEVIARVRMWVNLNLWQKLKLSRDDAKPLLRLKGFPSFPLVERQANEVDWWDMVCNVKKLINEKKEDGKVFWQNLAGYKRQEALRPYLSSEEDRKKGKKFARYQLGDLLLHLEKKHGEDWGKVYDEAWERIDKKVEGLSKHIKLEEERRSEDAQSKAALTDWLRAKASFVIEGLKEADKDEFCRCELKLQKWYGDLRGKPFAIEAENSILDISGFSKQYNCAFIWQKDGVKKLNLYLIINYFKGGKLRFKKIKPEAFEANRFYTVINKKSGEIVPMEVNFNFDDPNLIILPLAFGKRQGREFIWNDLLSLETGSLKLANGRVIEKTLYNRRTRQDEPALFVALTFERREVLDSSNIKPMNLIGVDRGENIPAVIALTDPEGCPLSRFKDSLGNPTHILRIGESYKEKQRTIQAKKEVEQRRAGGYSRKYASKAKNLADDMVRNTARDLLYYAVTQDAMLIFENLSRGFGRQGKRTFMAERQYTRMEDWLTAKLAYEGLPSKTYLSKTLAQYTSKTCSNCGFTITSADYDRVLEKLKKTATGWMTTINGKELKVEGQITYYNRYKRQNVVKDLSVELDRLSEESVNNDISSWTKGRSGEALSLLKKRFSHRPVQEKFVCLNCGFETHADEQAALNIARSWLFLRSQEYKKYQTNKTTGNTDKRAFVETWQSFYRKKLKEVWKPAV

SEQ ID NO: 30527 - protein, 979 aa, synthetic construct
  REGION 1..979: note = engineered CasX variant
QEIKRINKIRRRLVKDSNTKKAGKTGPMKTLLVRVMTPDLRERLENLRKKPENIPQPISNTSRANLNKLLTDYTEMKKAILHVYDEEFQKDPVGLMSRVAQPASKKIDQNKLKPEMDEKGNLTTAGFACSQCGQPLFVYKLEQVSEKGKAYTNYFGRCNVAEHEKLILLAQLKPEKDSDEAVTYSLGKFGQRALDFYSIHVTKESTHPVKPLAQIAGNRYASSTPVGKALSDACMGTIASFLSKYQDIIIEHQKVVKGNQKRLESLRELAGKENLEYPSVTLPPQPHTKEGVDAYNEVIARVRMWVNLNLWQKLKLSRDDAKPLLRLKGFPSFPLVERQANEVDWWDMVCNVKKLINEKKEDGKVFWQNLAGYKRQEALRPYLSSEEDRKKGKKFARYQLGDLLLHLEKKHGEDWGKVYDEAWERIDKKVEGLSKHIKLEEERRSEDAQSKAALTDWLRAKASFVIEGLKEADKDEFCRCELKLQKWYGDLRGKPFAIEAENSILDISGFSKQYNCAFIWQKDGVKKLNLYLIINYFKGGKLRFKKIKPEAFEANRFYTVINKKSGEIVPMEVNFNFDDPNLIILPLAFGKRQGREFIWNDLLSLETGSLKLANGRVIEKTLYNRRTRQDEPALFVALTFERREVLDSSNIKPMNLIGVDRGENIPAVIALTDPEGCPLSRFKDSLGNPTHILRIGESYKEKQRTIQAKKEVEQRRAGGYSRKYASKAKNLADDMVRNTARDLLYYAVTQDAMLIFENLSRGFGRQGKRTFMAERQYTRMEDWLTAKLAYEGLPSKTYLSKTLAQYTSKTCSNCGFTITSADYDRVLEKLKKTATGWMTTINGKELKVEGQITYYNRYKRQNVVKDLSVELDRLSEESVNNDISSWTKGRSGEALSLLKKRFSHRPVQEKFVCLNCGFETHADEQAALNIARSWLFLRSQEYKKYQTNKTTGNTDKRAFVETWQSFYRKKLKEVWKPAV

SEQ ID NO: 30528 - protein, 979 aa, synthetic construct
  REGION 1..979: note = engineered CasX variant
QEIKRINKIRRRLVKDSNTKKAGKTGPMKTLLVRVMTPDLRERLENLRKKPENIPQPISNTSRANLNKLLTDYTEMKKAILHVYDEEFQKDPVGLMSRVAQPASKKIDQNKLKPEMDEKGNLTTAGFACSQCGQPLFVYKLEQVSEKGKAYTNYFGRCNVAEHEKLILLAQLKPEKDSDEAVTYSLGKFGQRALDFYSIHVTKESTHPVKPLAQIAGNRYASSAPVGKALSDACMGTIASFLSKYQDIIIEHQKVVKGNQKRLESLRELAGKENLEYPSVTLPPQPHTKEGVDAYNEVIARVRMWVNLNLWQKLKLSRDDAKPLLRLKGFPSFPLVERQANEVDWWDMVCNVKKLINEKKEDGKVFWQNLAGYKRQEALRPYLSSEEDRKKGKKFARYQLGDLLLHLEKKHGEDWGKVYDEAWERIDKKVEGLSKHIKLEEERRSEDAQSKAALTDWLRAKASFVIEGLKEADKDEFCRCELKLQKWYGDLRGKPFAIEAENSILDISGFSKQYNCAFIWQKDGVKKLNLYLIINYFKGGKLRFKKIKPEAFEANRFYTVINKKSGEIVPMEVNFNFDDPNLIILPLAFGKRQGREFIWNDLLSLETGSLKLANGRVIEKTLYNRRTRQDEPALFVALTFERREVLDSSNIKPMNLIGVDRGENIPAVIALTDPEGCPLSRFKDSLGNPTHILRIGESYKEKQRTIQAKKEVEQRRAGGYSRKYASKAKNLADDMVRNTARDLLYYAVTQDAMLIFENLSRGFGRQGKRTFMAERQYTRMEDWLTAKLAYEGLPSKTYLSKTLAQYTSKTCSNCGFTITSADYDRVLEKLKKTATGWMTTINGKELKVEGQITYYNRYKRQNVVKDLSVELDRLSEESVNNDISSWTKGRSGEALSLLKKRFSHRPVQEKFVCLNCGFETHADEQAALNIARSWLFLRSQEYKKYQTNKTTGNTDKRAFVETWQSFYRKKLKEVWKPAV

SEQ ID NO: 30529 - protein, 979 aa, synthetic construct
  REGION 1..979: note = engineered CasX variant
QEIKRINKIRRRLVKDSNTKKAGKTGPMKTLLVRVMTPDLRERLENLRKKPENIPQPISNTSRANLNKLLTDYTEMKKAILHVYDEEFQKDPVGLMSRVAQPASKKIDQNKLKPEMDEKGNLTTAGFACSQCGQPLFVYKLEQVSEKGKAYTNYFGRCNVAEHEKLILLAQLKPEKDSDEAVTYSLGKFGQRALDFYSIHVTKESTHPVKPLAQIAGNRYASSVPVGKALSDACMGTIASFLSKYQDIIIEHQKVVKGNQKRLESLRELAGKENLEYPSVTLPPQPHTKEGVDAYNEVIARVRMWVNLNLWQKLKLSRDDAKPLLRLKGFPSFPLVERQANEVDWWDMVCNVKKLINEKKEDGKVFWQNLAGYKRQEALRPYLSSEEDRKKGKKFARYQLGDLLLHLEKKHGEDWGKVYDEAWERIDKKVEGLSKHIKLEEERRSEDAQSKAALTDWLRAKASFVIEGLKEADKDEFCRCELKLQKWYGDLRGKPFAIEAENSILDISGFSKQYNCAFIWQKDGVKKLNLYLIINYFKGGKLRFKKIKPEAFEANRFYTVINKKSGEIVPMEVNFNFDDPNLIILPLAFGKRQGREFIWNDLLSLETGSLKLANGRVIEKTLYNRRTRQDEPALFVALTFERREVLDSSNIKPMNLIGVDRGENIPAVIALTDPEGCPLSRFKDSLGNPTHILRIGESYKEKQRTIQAKKEVEQRRAGGYSRKYASKAKNLADDMVRNTARDLLYYAVTQDAMLIFENLSRGFGRQGKRTFMAERQYTRMEDWLTAKLAYEGLPSKTYLSKTLAQYTSKTCSNCGFTITSADYDRVLEKLKKTATGWMTTINGKELKVEGQITYYNRYKRQNVVKDLSVELDRLSEESVNNDISSWTKGRSGEALSLLKKRFSHRPVQEKFVCLNCGFETHADEQAALNIARSWLFLRSQEYKKYQTNKTTGNTDKRAFVETWQSFYRKKLKEVWKPAV

SEQ ID NO: 30530 - protein, 978 aa, synthetic construct
  REGION 1..978: note = engineered CasX variant
QEIKRINKIRRRLVKDSNTKKAGKTGPMKTLLVRVMTPDLRERLENLRKKPENIPQPISNTSRANLNKLLTDYTEMKKAILHVYDEEFQKDPVGLMSRVAQPASKKIDQNKLKPEMDEKGNLTTAGFACSQCGQPLFVYKLEQVSEKGKAYTNYFGRCNVAEHEKLIKLAQLKPEKDSDEAVTYSLGKFGQRALDFYSIHVTKESTHPVKPLAQIAGNRYASSPVGKALSDACMGTIASFLSKYQDIIIEHQKVVKGNQKRLESLRELAGKENLEYPSVTLPPQPHTKEGVDAYNEVIARVRMWVNLNLWQKLKLSRDDAKPLLRLKGFPSFPLVERQANEVDWWDMVCNVKKLINEKKEDGKVFWQNLAGYKRQEALRPYLSSEEDRKKGKKFARYQLGDLLLHLEKKHGEDWGKVYDEAWERIDKKVEGLSKHIKLEEERRSEDAQSKAALTDWLRAKASFVIEGLKEADKDEFCRCELKLQKWYGDLRGKPFAIEAENSILDISGFSKQYNCAFIWQKDGVKKLNLYLIINYFKGGKLRFKKIKPEAFEANRFYTVINKKSGEIVPMEVNFNFDDPNLIILPLAFGKRQGREFIWNDLLSLETGSLKLANGRVIEKTLYNRRTRQDEPALFVALTFERREVLDSSNIKPMNLIGVDRGENIPAVIALTDPEGCPLSRFKDSLGNPTHILRIGESYKEKQRTIQAKKEVEQRRAGGYSRKYASKAKNLADDMVRNTARDLLYYAVTQDAMLIFENLSRGFGRQGKRTFMAERQYTRMEDWLTAKLAYEGLPSKTYLSKTLAQYTSKTCSNCGFTITSADYDRVLEKLKKTATGWMTTINGKELKVEGQITYYNRYKRQNVVKDLSVELDRLSEESVNNDISSWTKGRSGEALSLLKKRFSHRPVQEKFVCLNCGFETHADEQAALNIARSWLFLRSQEYKKYQTNKTTGNTDKRAFVETWQSFYRKKLKEVWKPAV

SEQ ID NO: 30531 - protein, 979 aa, synthetic construct
  REGION 1..979: note = engineered CasX variant
QEIKRINKIRRRLVKDSNTKKAGKTGPMKTLLVRVMTPDLRERLENLRKKPENIPQPISNTSRANLNKLLTDYTEMKKAILHVYWEEFQKDPVGLMSRVAQPASKKIDQNKLKPEMDEKGNLTTAGFACSQCGQPLFVYKLEQVSEKGKAYTNYFGRCNVAEHEKLIKLAQLKPEKDSDEAVTYSLGKFGQRALDFYSIHVTKESTHPVKPLAQIAGNRYASSYPVGKALSDACMGTIASFLSKYQDIIIEHQKVVKGNQKRLESLRELAGKENLEYPSVTLPPQPHTKEGVDAYNEVIARVRMWVNLNLWQKLKLSRDDAKPLLRLKGFPSFPLVERQANEVDWWDMVCNVKKLINEKKEDGKVFWQNLAGYKRQEALRPYLSSEEDRKKGKKFARYQLGDLLLHLEKKHGEDWGKVYDEAWERIDKKVEGLSKHIKLEEERRSEDAQSKAALTDWLRAKASFVIEGLKEADKDEFCRCELKLQKWYGDLRGKPFAIEAENSILDISGFSKQYNCAFIWQKDGVKKLNLYLIINYFKGGKLRFKKIKPEAFEANRFYTVINKKSGEIVPMEVNFNFDDPNLIILPLAFGKRQGREFIWNDLLSLETGSLKLANGRVIEKTLYNRRTRQDEPALFVALTFERREVLDSSNIKPMNLIGVDRGENIPAVIALTDPEGCPLSRFKDSLGNPTHILRIGESYKEKQRTIQAKKEVEQRRAGGYSRKYASKAKNLADDMVRNTARDLLYYAVTQDAMLIFENLSRGFGRQGKRTFMAERQYTRMEDWLTAKLAYEGLPSKTYLSKTLAQYTSKTCSNCGFTITSADYDRVLEKLKKTATGWMTTINGKELKVEGQITYYNRYKRQNVVKDLSVELDRLSEESVNNDISSWTKGRSGEALSLLKKRFSHRPVQEKFVCLNCGFETHADEQAALNIARSWLFLRSQEYKKYQTNKTTGNTDKRAFVETWQSFYRKKLKEVWKPAV

SEQ ID NO: 30532 - protein, 979 aa, synthetic construct
  REGION 1..979: note = engineered CasX variant
QEIKRINKIRRRLVKDSNTKKAGKTGPMKTLLVRVMTPDLRERLENLRKKPENIPQPISNTSRANLNKLLTDYTEMKKAILHVYWEEFQKDPVGLMSRVAQPASKKIDQNKLKPEMDEKGNLTTAGFACSQCGQPLFVYKLEQVSEKGKAYTNYFGRCNVAEHEKLIKLAQLKPEKDSDEAVTYSLGKFGQRALDFYSIHVTKESTHPVKPLAQIAGNRYASSHPVGKALSDACMGTIASFLSKYQDIIIEHQKVVKGNQKRLESLRELAGKENLEYPSVTLPPQPHTKEGVDAYNEVIARVRMWVNLNLWQKLKLSRDDAKPLLRLKGFPSFPLVERQANEVDWWDMVCNVKKLINEKKEDGKVFWQNLAGYKRQEALRPYLSSEEDRKKGKKFARYQLGDLLLHLEKKHGEDWGKVYDEAWERIDKKVEGLSKHIKLEEERRSEDAQSKAALTDWLRAKASFVIEGLKEADKDEFCRCELKLQKWYGDLRGKPFAIEAENSILDISGFSKQYNCAFIWQKDGVKKLNLYLIINYFKGGKLRFKKIKPEAFEANRFYTVINKKSGEIVPMEVNFNFDDPNLIILPLAFGKRQGREFIWNDLLSLETGSLKLANGRVIEKTLYNRRTRQDEPALFVALTFERREVLDSSNIKPMNLIGVDRGENIPAVIALTDPEGCPLSRFKDSLGNPTHILRIGESYKEKQRTIQAKKEVEQRRAGGYSRKYASKAKNLADDMVRNTARDLLYYAVTQDAMLIFENLSRGFGRQGKRTFMAERQYTRMEDWLTAKLAYEGLPSKTYLSKTLAQYTSKTCSNCGFTITSADYDRVLEKLKKTATGWMTTINGKELKVEGQITYYNRYKRQNVVKDLSVELDRLSEESVNNDISSWTKGRSGEALSLLKKRFSHRPVQEKFVCLNCGFETHADEQAALNIARSWLFLRSQEYKKYQTNKTTGNTDKRAFVETWQSFYRKKLKEVWKPAV

SEQ ID NO: 30533 - protein, 979 aa, synthetic construct
  REGION 1..979: note = engineered CasX variant
QEIKRINKIRRRLVKDSNTKKAGKTGPMKTLLVRVMTPDLRERLENLRKKPENIPQPISNTSRANLNKLLTDYTEMKKAILHVYWEEFQKDPVGLMSRVAQPASKKIDQNKLKPEMDEKGNLTTAGFACSQCGQPLFVYKLEQVSEKGKAYTNYFGRCNVAEHEKLIKLAQLKPEKDSDEAVTYSLGKFGQRALDFYSIHVTKESTHPVKPLAQIAGNRYASSSPVGKALSDACMGTIASFLSKYQDIIIEHQKVVKGNQKRLESLRELAGKENLEYPSVTLPPQPHTKEGVDAYNEVIARVRMWVNLNLWQKLKLSRDDAKPLLRLKGFPSFPLVERQANEVDWWDMVCNVKKLINEKKEDGKVFWQNLAGYKRQEALRPYLSSEEDRKKGKKFARYQLGDLLLHLEKKHGEDWGKVYDEAWERIDKKVEGLSKHIKLEEERRSEDAQSKAALTDWLRAKASFVIEGLKEADKDEFCRCELKLQKWYGDLRGKPFAIEAENSILDISGFSKQYNCAFIWQKDGVKKLNLYLIINYFKGGKLRFKKIKPEAFEANRFYTVINKKSGEIVPMEVNFNFDDPNLIILPLAFGKRQGREFIWNDLLSLETGSLKLANGRVIEKTLYNRRTRQDEPALFVALTFERREVLDSSNIKPMNLIGVDRGENIPAVIALTDPEGCPLSRFKDSLGNPTHILRIGESYKEKQRTIQAKKEVEQRRAGGYSRKYASKAKNLADDMVRNTARDLLYYAVTQDAMLIFENLSRGFGRQGKRTFMAERQYTRMEDWLTAKLAYEGLPSKTYLSKTLAQYTSKTCSNCGFTITSADYDRVLEKLKKTATGWMTTINGKELKVEGQITYYNRYKRQNVVKDLSVELDRLSEESVNNDISSWTKGRSGEALSLLKKRFSHRPVQEKFVCLNCGFETHADEQAALNIARSWLFLRSQEYKKYQTNKTTGNTDKRAFVETWQSFYRKKLKEVWKPAV

SEQ ID NO: 30534 - protein, 979 aa, synthetic construct
  REGION 1..979: note = engineered CasX variant
QEIKRINKIRRRLVKDSNTKKAGKTGPMKTLLVRVMTPDLRERLENLRKKPENIPQPISNTSRANLNKLLTDYTEMKKAILHVYWEEFQKDPVGLMSRVAQPASKKIDQNKLKPEMDEKGNLTTAGFACSQCGQPLFVYKLEQVSEKGKAYTNYFGRCNVAEHEKLIKLAQLKPEKDSDEAVTYSLGKFGQRALDFYSIHVTKESTHPVKPLAQIAGNRYASSTPVGKALSDACMGTIASFLSKYQDIIIEHQKVVKGNQKRLESLRELAGKENLEYPSVTLPPQPHTKEGVDAYNEVIARVRMWVNLNLWQKLKLSRDDAKPLLRLKGFPSFPLVERQANEVDWWDMVCNVKKLINEKKEDGKVFWQNLAGYKRQEALRPYLSSEEDRKKGKKFARYQLGDLLLHLEKKHGEDWGKVYDEAWERIDKKVEGLSKHIKLEEERRSEDAQSKAALTDWLRAKASFVIEGLKEADKDEFCRCELKLQKWYGDLRGKPFAIEAENSILDISGFSKQYNCAFIWQKDGVKKLNLYLIINYFKGGKLRFKKIKPEAFEANRFYTVINKKSGEIVPMEVNFNFDDPNLIILPLAFGKRQGREFIWNDLLSLETGSLKLANGRVIEKTLYNRRTRQDEPALFVALTFERREVLDSSNIKPMNLIGVDRGENIPAVIALTDPEGCPLSRFKDSLGNPTHILRIGESYKEKQRTIQAKKEVEQRRAGGYSRKYASKAKNLADDMVRNTARDLLYYAVTQDAMLIFENLSRGFGRQGKRTFMAERQYTRMEDWLTAKLAYEGLPSKTYLSKTLAQYTSKTCSNCGFTITSADYDRVLEKLKKTATGWMTTINGKELKVEGQITYYNRYKRQNVVKDLSVELDRLSEESVNNDISSWTKGRSGEALSLLKKRFSHRPVQEKFVCLNCGFETHADEQAALNIARSWLFLRSQEYKKYQTNKTTGNTDKRAFVETWQSFYRKKLKEVWKPAV

SEQ ID NO: 30535 - protein, 979 aa, synthetic construct
  REGION 1..979: note = engineered CasX variant
QEIKRINKIRRRLVKDSNTKKAGKTGPMKTLLVRVMTPDLRERLENLRKKPENIPQPISNTSRANLNKLLTDYTEMKKAILHVYWEEFQKDPVGLMSRVAQPASKKIDQNKLKPEMDEKGNLTTAGFACSQCGQPLFVYKLEQVSEKGKAYTNYFGRCNVAEHEKLIKLAQLKPEKDSDEAVTYSLGKFGQRALDFYSIHVTKESTHPVKPLAQIAGNRYASSAPVGKALSDACMGTIASFLSKYQDIIIEHQKVVKGNQKRLESLRELAGKENLEYPSVTLPPQPHTKEGVDAYNEVIARVRMWVNLNLWQKLKLSRDDAKPLLRLKGFPSFPLVERQANEVDWWDMVCNVKKLINEKKEDGKVFWQNLAGYKRQEALRPYLSSEEDRKKGKKFARYQLGDLLLHLEKKHGEDWGKVYDEAWERIDKKVEGLSKHIKLEEERRSEDAQSKAALTDWLRAKASFVIEGLKEADKDEFCRCELKLQKWYGDLRGKPFAIEAENSILDISGFSKQYNCAFIWQKDGVKKLNLYLIINYFKGGKLRFKKIKPEAFEANRFYTVINKKSGEIVPMEVNFNFDDPNLIILPLAFGKRQGREFIWNDLLSLETGSLKLANGRVIEKTLYNRRTRQDEPALFVALTFERREVLDSSNIKPMNLIGVDRGENIPAVIALTDPEGCPLSRFKDSLGNPTHILRIGESYKEKQRTIQAKKEVEQRRAGGYSRKYASKAKNLADDMVRNTARDLLYYAVTQDAMLIFENLSRGFGRQGKRTFMAERQYTRMEDWLTAKLAYEGLPSKTYLSKTLAQYTSKTCSNCGFTITSADYDRVLEKLKKTATGWMTTINGKELKVEGQITYYNRYKRQNVVKDLSVELDRLSEESVNNDISSWTKGRSGEALSLLKKRFSHRPVQEKFVCLNCGFETHADEQAALNIARSWLFLRSQEYKKYQTNKTTGNTDKRAFVETWQSFYRKKLKEVWKPAV

SEQ ID NO: 30536 - protein, 979 aa, synthetic construct
  REGION 1..979: note = engineered CasX variant
QEIKRINKIRRRLVKDSNTKKAGKTGPMKTLLVRVMTPDLRERLENLRKKPENIPQPISNTSRANLNKLLTDYTEMKKAILHVYWEEFQKDPVGLMSRVAQPASKKIDQNKLKPEMDEKGNLTTAGFACSQCGQPLFVYKLEQVSEKGKAYTNYFGRCNVAEHEKLIKLAQLKPEKDSDEAVTYSLGKFGQRALDFYSIHVTKESTHPVKPLAQIAGNRYASSVPVGKALSDACMGTIASFLSKYQDIIIEHQKVVKGNQKRLESLRELAGKENLEYPSVTLPPQPHTKEGVDAYNEVIARVRMWVNLNLWQKLKLSRDDAKPLLRLKGFPSFPLVERQANEVDWWDMVCNVKKLINEKKEDGKVFWQNLAGYKRQEALRPYLSSEEDRKKGKKFARYQLGDLLLHLEKKHGEDWGKVYDEAWERIDKKVEGLSKHIKLEEERRSEDAQSKAALTDWLRAKASFVIEGLKEADKDEFCRCELKLQKWYGDLRGKPFAIEAENSILDISGFSKQYNCAFIWQKDGVKKLNLYLIINYFKGGKLRFKKIKPEAFEANRFYTVINKKSGEIVPMEVNFNFDDPNLIILPLAFGKRQGREFIWNDLLSLETGSLKLANGRVIEKTLYNRRTRQDEPALFVALTFERREVLDSSNIKPMNLIGVDRGENIPAVIALTDPEGCPLSRFKDSLGNPTHILRIGESYKEKQRTIQAKKEVEQRRAGGYSRKYASKAKNLADDMVRNTARDLLYYAVTQDAMLIFENLSRGFGRQGKRTFMAERQYTRMEDWLTAKLAYEGLPSKTYLSKTLAQYTSKTCSNCGFTITSADYDRVLEKLKKTATGWMTTINGKELKVEGQITYYNRYKRQNVVKDLSVELDRLSEESVNNDISSWTKGRSGEALSLLKKRFSHRPVQEKFVCLNCGFETHADEQAALNIARSWLFLRSQEYKKYQTNKTTGNTDKRAFVETWQSFYRKKLKEVWKPAV

SEQ ID NO: 30537 - protein, 979 aa, synthetic construct
  REGION 1..979: note = engineered CasX variant
QEIKRINKIRRRLVKDSNTKKAGKTGPMKTLLVRVMTPDLRERLENLRKKPENIPQPISNTSRANLNKLLTDYTEMKKAILHVYWEEFQKDPVGLMSRVAQPASKKIDQNKLKPEMDEKGNLTTAGFACSQCGQPLFVYKLEQVSEKGKAYTNYFGRCNVAEHEKLIKKLAQLKPEKDSDEAVTYSLGKFGQRALDFYSIHVTKESTHPVKPLAQIAGNRYASSPVGKALSDACMGTIASFLSKYQDIIIEHQKVVKGNQKRLESLRELAGKENLEYPSVTLPPQPHTKEGVDAYNEVIARVRMWVNLNLWQKLKLSRDDAKPLLRLKGFPSFPLVERQANEVDWWDMVCNVKKLINEKKEDGKVFWQNLAGYKRQEALRPYLSSEEDRKKGKKFARYQLGDLLLHLEKKHGEDWGKVYDEAWERIDKKVEGLSKHIKLEEERRSEDAQSKAALTDWLRAKASFVIEGLKEADKDEFCRCELKLQKWYGDLRGKPFAIEAENSILDISGFSKQYNCAFIWQKDGVKKLNLYLIINYFKGGKLRFKKIKPEAFEANRFYTVINKKSGEIVPMEVNFNFDDPNLIILPLAFGKRQGREFIWNDLLSLETGSLKLANGRVIEKTLYNRRTRQDEPALFVALTFERREVLDSSNIKPMNLIGVDRGENIPAVIALTDPEGCPLSRFKDSLGNPTHILRIGESYKEKQRTIQAKKEVEQRRAGGYSRKYASKAKNLADDMVRNTARDLLYYAVTQDAMLIFENLSRGFGRQGKRTFMAERQYTRMEDWLTAKLAYEGLPSKTYLSKTLAQYTSKTCSNCGFTITSADYDRVLEKLKKTATGWMTTINGKELKVEGQITYYNRYKRQNVVKDLSVELDRLSEESVNNDISSWTKGRSGEALSLLKKRFSHRPVQEKFVCLNCGFETHADEQAALNIARSWLFLRSQEYKKYQTNKTTGNTDKRAFVETWQSFYRKKLKEVWKPAV

SEQ ID NO: 30538 - protein, 979 aa, synthetic construct
  REGION 1..979: note = engineered CasX variant
QEIKRINKIRRRLVKDSNTKKAGKTGPMKTLLVRVMTPDLRERLENLRKKPENIPQPISNTSRANLNKLLTDYTEMKKAILHVYWEEFQKDPVGLMSRVAQPASKKIDQNKLKPEMDEKGNLTTAGFACSQCGQPLFVYKLEQVSEKGKAYTNYFGRCNVAEHEKLILLYQLKPEKDSDEAVTYSLGKFGQRALDFYSIHVTKESTHPVKPLAQIAGNRYASSYPVGKALSDACMGTIASFLSKYQDIIIEHQKVVKGNQKRLESLRELAGKENLEYPSVTLPPQPHTKEGVDAYNEVIARVRMWVNLNLWQKLKLSRDDAKPLLRLKGFPSFPLVERQANEVDWWDMVCNVKKLINEKKEDGKVFWQNLAGYKRQEALRPYLSSEEDRKKGKKFARYQLGDLLLHLEKKHGEDWGKVYDEAWERIDKKVEGLSKHIKLEEERRSEDAQSKAALTDWLRAKASFVIEGLKEADKDEFCRCELKLQKWYGDLRGKPFAIEAENSILDISGFSKQYNCAFIWQKDGVKKLNLYLIINYFKGGKLRFKKIKPEAFEANRFYTVINKKSGEIVPMEVNFNFDDPNLIILPLAFGKRQGREFIWNDLLSLETGSLKLANGRVIEKTLYNRRTRQDEPALFVALTFERREVLDSSNIKPMNLIGVDRGENIPAVIALTDPEGCPLSRFKDSLGNPTHILRIGESYKEKQRTIQAKKEVEQRRAGGYSRKYASKAKNLADDMVRNTARDLLYYAVTQDAMLIFENLSRGFGRQGKRTFMAERQYTRMEDWLTAKLAYEGLPSKTYLSKTLAQYTSKTCSNCGFTITSADYDRVLEKLKKTATGWMTTINGKELKVEGQITYYNRYKRQNVVKDLSVELDRLSEESVNNDISSWTKGRSGEALSLLKKRFSHRPVQEKFVCLNCGFETHADEQAALNIARSWLFLRSQEYKKYQTNKTTGNTDKRAFVETWQSFYRKKLKEVWKPAV

SEQ ID NO: 30539 - protein, 979 aa, synthetic construct
  REGION 1..979: note = engineered CasX variant
QEIKRINKIRRRLVKDSNTKKAGKTGPMKTLLVRVMTPDLRERLENLRKKPENIPQPISNTSRANLNKLLTDYTEMKKAILHVYWEEFQKDPVGLMSRVAQPASKKIDQNKLKPEMDEKGNLTTAGFACSQCGQPLFVYKLEQVSEKGKAYTNYFGRCNVAEHEKLILLYQLKPEKDSDEAVTYSLGKFGQRALDFYSIHVTKESTHPVKPLAQIAGNRYASSHPVGKALSDACMGTIASFLSKYQDIIIEHQKVVKGNQKRLESLRELAGKENLEYPSVTLPPQPHTKEGVDAYNEVIARVRMWVNLNLWQKLKLSRDDAKPLLRLKGFPSFPLVERQANEVDWWDMVCNVKKLINEKKEDGKVFWQNLAGYKRQEALRPYLSSEEDRKKGKKFARYQLGDLLLHLEKKHGEDWGKVYDEAWERIDKKVEGLSKHIKLEEERRSEDAQSKAALTDWLRAKASFVIEGLKEADKDEFCRCELKLQKWYGDLRGKPFAIEAENSILDISGFSKQYNCAFIWQKDGVKKLNLYLIINYFKGGKLRFKKIKPEAFEANRFYTVINKKSGEIVPMEVNFNFDDPNLIILPLAFGKRQGREFIWNDLLSLETGSLKLANGRVIEKTLYNRRTRQDEPALFVALTFERREVLDSSNIKPMNLIGVDRGENIPAVIALTDPEGCPLSRFKDSLGNPTHILRIGESYKEKQRTIQAKKEVEQRRAGGYSRKYASKAKNLADDMVRNTARDLLYYAVTQDAMLIFENLSRGFGRQGKRTFMAERQYTRMEDWLTAKLAYEGLPSKTYLSKTLAQYTSKTCSNCGFTITSADYDRVLEKLKKTATGWMTTINGKELKVEGQITYYNRYKRQNVVKDLSVELDRLSEESVNNDISSWTKGRSGEALSLLKKRFSHRPVQEKFVCLNCGFETHADEQAALNIARSWLFLRSQEYKKYQTNKTTGNTDKRAFVETWQSFYRKKLKEVWKPAV

SEQ ID NO: 30540 - protein, 979 aa, synthetic construct
  REGION 1..979: note = engineered CasX variant
QEIKRINKIRRRLVKDSNTKKAGKTGPMKTLLVRVMTPDLRERLENLRKKPENIPQPISNTSRANLNKLLTDYTEMKKAILHVYWEEFQKDPVGLMSRVAQPASKKIDQNKLKPEMDEKGNLTTAGFACSQCGQPLFVYKLEQVSEKGKAYTNYFGRCNVAEHEKLILLYQLKPEKDSDEAVTYSLGKFGQRALDFYSIHVTKESTHPVKPLAQIAGNRYASSSPVGKALSDACMGTIASFLSKYQDIIIEHQKVVKGNQKRLESLRELAGKENLEYPSVTLPPQPHTKEGVDAYNEVIARVRMWVNLNLWQKLKLSRDDAKPLLRLKGFPSFPLVERQANEVDWWDMVCNVKKLINEKKEDGKVFWQNLAGYKRQEALRPYLSSEEDRKKGKKFARYQLGDLLLHLEKKHGEDWGKVYDEAWERIDKKVEGLSKHIKLEEERRSEDAQSKAALTDWLRAKASFVIEGLKEADKDEFCRCELKLQKWYGDLRGKPFAIEAENSILDISGFSKQYNCAFIWQKDGVKKLNLYLIINYFKGGKLRFKKIKPEAFEANRFYTVINKKSGEIVPMEVNFNFDDPNLIILPLAFGKRQGREFIWNDLLSLETGSLKLANGRVIEKTLYNRRTRQDEPALFVALTFERREVLDSSNIKPMNLIGVDRGENIPAVIALTDPEGCPLSRFKDSLGNPTHILRIGESYKEKQRTIQAKKEVEQRRAGGYSRKYASKAKNLADDMVRNTARDLLYYAVTQDAMLIFENLSRGFGRQGKRTFMAERQYTRMEDWLTAKLAYEGLPSKTYLSKTLAQYTSKTCSNCGFTITSADYDRVLEKLKKTATGWMTTINGKELKVEGQITYYNRYKRQNVVKDLSVELDRLSEESVNNDISSWTKGRSGEALSLLKKRFSHRPVQEKFVCLNCGFETHADEQAALNIARSWLFLRSQEYKKYQTNKTTGNTDKRAFVETWQSFYRKKLKEVWKPAV

SEQ ID NO: 30541 - protein, 979 aa, synthetic construct
  REGION 1..979: note = engineered CasX variant
QEIKRINKIRRRLVKDSNTKKAGKTGPMKTLLVRVMTPDLRERLENLRKKPENIPQPISNTSRANLNKLLTDYTEMKKAILHVYWEEFQKDPVGLMSRVAQPASKKIDQNKLKPEMDEKGNLTTAGFACSQCGQPLFVYKLEQVSEKGKAYTNYFGRCNVAEHEKLILLYQLKPEKDSDEAVTYSLGKFGQRALDFYSIHVTKESTHPVKPLAQIAGNRYASSTPVGKALSDACMGTIASFLSKYQDIIIEHQKVVKGNQKRLESLRELAGKENLEYPSVTLPPQPHTKEGVDAYNEVIARVRMWVNLNLWQKLKLSRDDAKPLLRLKGFPSFPLVERQANEVDWWDMVCNVKKLINEKKEDGKVFWQNLAGYKRQEALRPYLSSEEDRKKGKKFARYQLGDLLLHLEKKHGEDWGKVYDEAWERIDKKVEGLSKHIKLEEERRSEDAQSKAALTDWLRAKASFVIEGLKEADKDEFCRCELKLQKWYGDLRGKPFAIEAENSILDISGFSKQYNCAFIWQKDGVKKLNLYLIINYFKGGKLRFKKIKPEAFEANRFYTVINKKSGEIVPMEVNFNFDDPNLIILPLAFGKRQGREFIWNDLLSLETGSLKLANGRVIEKTLYNRRTRQDEPALFVALTFERREVLDSSNIKPMNLIGVDRGENIPAVIALTDPEGCPLSRFKDSLGNPTHILRIGESYKEKQRTIQAKKEVEQRRAGGYSRKYASKAKNLADDMVRNTARDLLYYAVTQDAMLIFENLSRGFGRQGKRTFMAERQYTRMEDWLTAKLAYEGLPSKTYLSKTLAQYTSKTCSNCGFTITSADYDRVLEKLKKTATGWMTTINGKELKVEGQITYYNRYKRQNVVKDLSVELDRLSEESVNNDISSWTKGRSGEALSLLKKRFSHRPVQEKFVCLNCGFETHADEQAALNIARSWLFLRSQEYKKYQTNKTTGNTDKRAFVETWQSFYRKKLKEVWKPAV

SEQ ID NO: 30542 - protein, 979 aa, synthetic construct
  REGION 1..979: note = engineered CasX variant
QEIKRINKIRRRLVKDSNTKKAGKTGPMKTLLVRVMTPDLRERLENLRKKPENIPQPISNTSRANLNKLLTDYTEMKKAILHVYWEEFQKDPVGLMSRVAQPASKKIDQNKLKPEMDEKGNLTTAGFACSQCGQPLFVYKLEQVSEKGKAYTNYFGRCNVAEHEKLILLYQLKPEKDSDEAVTYSLGKFGQRALDFYSIHVTKESTHPVKPLAQIAGNRYASSAPVGKALSDACMGTIASFLSKYQDIIIEHQKVVKGNQKRLESLRELAGKENLEYPSVTLPPQPHTKEGVDAYNEVIARVRMWVNLNLWQKLKLSRDDAKPLLRLKGFPSFPLVERQANEVDWWDMVCNVKKLINEKKEDGKVFWQNLAGYKRQEALRPYLSSEEDRKKGKKFARYQLGDLLLHLEKKHGEDWGKVYDEAWERIDKKVEGLSKHIKLEEERRSEDAQSKAALTDWLRAKASFVIEGLKEADKDEFCRCELKLQKWYGDLRGKPFAIEAENSILDISGFSKQYNCAFIWQKDGVKKLNLYLIINYFKGGKLRFKKIKPEAFEANRFYTVINKKSGEIVPMEVNFNFDDPNLIILPLAFGKRQGREFIWNDLLSLETGSLKLANGRVIEKTLYNRRTRQDEPALFVALTFERREVLDSSNIKPMNLIGVDRGENIPAVIALTDPEGCPLSRFKDSLGNPTHILRIGESYKEKQRTIQAKKEVEQRRAGGYSRKYASKAKNLADDMVRNTARDLLYYAVTQDAMLIFENLSRGFGRQGKRTFMAERQYTRMEDWLTAKLAYEGLPSKTYLSKTLAQYTSKTCSNCGFTITSADYDRVLEKLKKTATGWMTTINGKELKVEGQITYYNRYKRQNVVKDLSVELDRLSEESVNNDISSWTKGRSGEALSLLKKRFSHRPVQEKFVCLNCGFETHADEQAALNIARSWLFLRSQEYKKYQTNKTTGNTDKRAFVETWQSFYRKKLKEVWKPAV

SEQ ID NO: 30543 - protein, 979 aa, synthetic construct
  REGION 1..979: note = engineered CasX variant
QEIKRINKIRRRLVKDSNTKKAGKTGPMKTLLVRVMTPDLRERLENLRKKPENIPQPISNTSRANLNKLLTDYTEMKKAILHVYWEEFQKDPVGLMSRVAQPASKKIDQNKLKPEMDEKGNLTTAGFACSQCGQPLFVYKLEQVSEKGKAYTNYFGRCNVAEHEKLILLYQLKPEKDSDEAVTYSLGKFGQRALDFYSIHVTKESTHPVKPLAQIAGNRYASSVPVGKALSDACMGTIASFLSKYQDIIIEHQKVVKGNQKRLESLRELAGKENLEYPSVTLPPQPHTKEGVDAYNEVIARVRMWVNLNLWQKLKLSRDDAKPLLRLKGFPSFPLVERQANEVDWWDMVCNVKKLINEKKEDGKVFWQNLAGYKRQEALRPYLSSEEDRKKGKKFARYQLGDLLLHLEKKHGEDWGKVYDEAWERIDKKVEGLSKHIKLEEERRSEDAQSKAALTDWLRAKASFVIEGLKEADKDEFCRCELKLQKWYGDLRGKPFAIEAENSILDISGFSKQYNCAFIWQKDGVKKLNLYLIINYFKGGKLRFKKIKPEAFEANRFYTVINKKSGEIVPMEVNFNFDDPNLIILPLAFGKRQGREFIWNDLLSLETGSLKLANGRVIEKTLYNRRTRQDEPALFVALTFERREVLDSSNIKPMNLIGVDRGENIPAVIALTDPEGCPLSRFKDSLGNPTHILRIGESYKEKQRTIQAKKEVEQRRAGGYSRKYASKAKNLADDMVRNTARDLLYYAVTQDAMLIFENLSRGFGRQGKRTFMAERQYTRMEDWLTAKLAYEGLPSKTYLSKTLAQYTSKTCSNCGFTITSADYDRVLEKLKKTATGWMTTINGKELKVEGQITYYNRYKRQNVVKDLSVELDRLSEESVNNDISSWTKGRSGEALSLLKKRFSHRPVQEKFVCLNCGFETHADEQAALNIARSWLFLRSQEYKKYQTNKTTGNTDKRAFVETWQSFYRKKLKEVWKPAV

SEQ ID NO: 30544 - protein, 978 aa, synthetic construct
  REGION 1..978: note = engineered CasX variant
QEIKRINKIRRRLVKDSNTKKAGKTGPMKTLLVRVMTPDLRERLENLRKKPENIPQPISNTSRANLNKLLTDYTEMKKAILHVYWEEFQKDPVGLMSRVAQPASKKIDQNKLKPEMDEKGNLTTAGFACSQCGQPLFVYKLEQVSEKGKAYTNYFGRCNVAEHEKLIKLYQLKPEKDSDEAVTYSLGKFGQRALDFYSIHVTKESTHPVKPLAQIAGNRYASSPVGKALSDACMGTIASFLSKYQDIIIEHQKVVKGNQKRLESLRELAGKENLEYPSVTLPPQPHTKEGVDAYNEVIARVRMWVNLNLWQKLKLSRDDAKPLLRLKGFPSFPLVERQANEVDWWDMVCNVKKLINEKKEDGKVFWQNLAGYKRQEALRPYLSSEEDRKKGKKFARYQLGDLLLHLEKKHGEDWGKVYDEAWERIDKKVEGLSKHIKLEEERRSEDAQSKAALTDWLRAKASFVIEGLKEADKDEFCRCELKLQKWYGDLRGKPFAIEAENSILDISGFSKQYNCAFIWQKDGVKKLNLYLIINYFKGGKLRFKKIKPEAFEANRFYTVINKKSGEIVPMEVNFNFDDPNLIILPLAFGKRQGREFIWNDLLSLETGSLKLANGRVIEKTLYNRRTRQDEPALFVALTFERREVLDSSNIKPMNLIGVDRGENIPAVIALTDPEGCPLSRFKDSLGNPTHILRIGESYKEKQRTIQAKKEVEQRRAGGYSRKYASKAKNLADDMVRNTARDLLYYAVTQDAMLIFENLSRGFGRQGKRTFMAERQYTRMEDWLTAKLAYEGLPSKTYLSKTLAQYTSKTCSNCGFTITSADYDRVLEKLKKTATGWMTTINGKELKVEGQITYYNRYKRQNVVKDLSVELDRLSEESVNNDISSWTKGRSGEALSLLKKRFSHRPVQEKFVCLNCGFETHADEQAALNIARSWLFLRSQEYKKYQTNKTTGNTDKRAFVETWQSFYRKKLKEVWKPAV

SEQ ID NO: 30545 - protein, 979 aa, synthetic construct
  REGION 1..979: note = engineered CasX variant
QEIKRINKIRRRLVKDSNTKKAGKTGPMKTLLVRVMTPDLRERLENLRKKPENIPQPISNTSRANLNKLLTDYTEMKKAILHVYWEEFQKDPVGLMSRVAQPASKKIDQNKLKPEMDEKGNLTTAGFACSQCGQPLFVYKLEQVSEKGKAYTNYFGRCNVAEHEKLILLSQLKPEKDSDEAVTYSLGKFGQRALDFYSIHVTKESTHPVKPLAQIAGNRYASSYPVGKALSDACMGTIASFLSKYQDIIIEHQKVVKGNQKRLESLRELAGKENLEYPSVTLPPQPHTKEGVDAYNEVIARVRMWVNLNLWQKLKLSRDDAKPLLRLKGFPSFPLVERQANEVDWWDMVCNVKKLINEKKEDGKVFWQNLAGYKRQEALRPYLSSEEDRKKGKKFARYQLGDLLLHLEKKHGEDWGKVYDEAWERIDKKVEGLSKHIKLEEERRSEDAQSKAALTDWLRAKASFVIEGLKEADKDEFCRCELKLQKWYGDLRGKPFAIEAENSILDISGFSKQYNCAFIWQKDGVKKLNLYLIINYFKGGKLRFKKIKPEAFEANRFYTVINKKSGEIVPMEVNFNFDDPNLIILPLAFGKRQGREFIWNDLLSLETGSLKLANGRVIEKTLYNRRTRQDEPALFVALTFERREVLDSSNIKPMNLIGVDRGENIPAVIALTDPEGCPLSRFKDSLGNPTHILRIGESYKEKQRTIQAKKEVEQRRAGGYSRKYASKAKNLADDMVRNTARDLLYYAVTQDAMLIFENLSRGFGRQGKRTFMAERQYTRMEDWLTAKLAYEGLPSKTYLSKTLAQYTSKTCSNCGFTITSADYDRVLEKLKKTATGWMTTINGKELKVEGQITYYNRYKRQNVVKDLSVELDRLSEESVNNDISSWTKGRSGEALSLLKKRFSHRPVQEKFVCLNCGFETHADEQAALNIARSWLFLRSQEYKKYQTNKTTGNTDKRAFVETWQSFYRKKLKEVWKPAV

SEQ ID NO: 30546 - protein, 979 aa, synthetic construct
  REGION 1..979: note = engineered CasX variant
QEIKRINKIRRRLVKDSNTKKAGKTGPMKTLLVRVMTPDLRERLENLRKKPENIPQPISNTSRANLNKLLTDYTEMKKAILHVYWEEFQKDPVGLMSRVAQPASKKIDQNKLKPEMDEKGNLTTAGFACSQCGQPLFVYKLEQVSEKGKAYTNYFGRCNVAEHEKLILLSQLKPEKDSDEAVTYSLGKFGQRALDFYSIHVTKESTHPVKPLAQIAGNRYASSHPVGKALSDACMGTIASFLSKYQDIIIEHQKVVKGNQKRLESLRELAGKENLEYPSVTLPPQPHTKEGVDAYNEVIARVRMWVNLNLWQKLKLSRDDAKPLLRLKGFPSFPLVERQANEVDWWDMVCNVKKLINEKKEDGKVFWQNLAGYKRQEALRPYLSSEEDRKKGKKFARYQLGDLLLHLEKKHGEDWGKVYDEAWERIDKKVEGLSKHIKLEEERRSEDAQSKAALTDWLRAKASFVIEGLKEADKDEFCRCELKLQKWYGDLRGKPFAIEAENSILDISGFSKQYNCAFIWQKDGVKKLNLYLIINYFKGGKLRFKKIKPEAFEANRFYTVINKKSGEIVPMEVNFNFDDPNLIILPLAFGKRQGREFIWNDLLSLETGSLKLANGRVIEKTLYNRRTRQDEPALFVALTFERREVLDSSNIKPMNLIGVDRGENIPAVIALTDPEGCPLSRFKDSLGNPTHILRIGESYKEKQRTIQAKKEVEQRRAGGYSRKYASKAKNLADDMVRNTARDLLYYAVTQDAMLIFENLSRGFGRQGKRTFMAERQYTRMEDWLTAKLAYEGLPSKTYLSKTLAQYTSKTCSNCGFTITSADYDRVLEKLKKTATGWMTTINGKELKVEGQITYYNRYKRQNVVKDLSVELDRLSEESVNNDISSWTKGRSGEALSLLKKRFSHRPVQEKFVCLNCGFETHADEQAALNIARSWLFLRSQEYKKYQTNKTTGNTDKRAFVETWQSFYRKKLKEVWKPAV

SEQ ID NO: 30547 - protein, 979 aa, synthetic construct
  REGION 1..979: note = engineered CasX variant
QEIKRINKIRRRLVKDSNTKKAGKTGPMKTLLVRVMTPDLRERLENLRKKPENIPQPISNTSRANLNKLLTDYTEMKKAILHVYWEEFQKDPVGLMSRVAQPASKKIDQNKLKPEMDEKGNLTTAGFACSQCGQPLFVYKLEQVSEKGKAYTNYFGRCNVAEHEKLILLSQLKPEKDSDEAVTYSLGKFGQRALDFYSIHVTKESTHPVKPLAQIAGNRYASSSPVGKALSDACMGTIASFLSKYQDIIIEHQKVVKGNQKRLESLRELAGKENLEYPSVTLPPQPHTKEGVDAYNEVIARVRMWVNLNLWQKLKLSRDDAKPLLRLKGFPSFPLVERQANEVDWWDMVCNVKKLINEKKEDGKVFWQNLAGYKRQEALRPYLSSEEDRKKGKKFARYQLGDLLLHLEKKHGEDWGKVYDEAWERIDKKVEGLSKHIKLEEERRSEDAQSKAALTDWLRAKASFVIEGLKEADKDEFCRCELKLQKWYGDLRGKPFAIEAENSILDISGFSKQYNCAFIWQKDGVKKLNLYLIINYFKGGKLRFKKIKPEAFEANRFYTVINKKSGEIVPMEVNFNFDDPNLIILPLAFGKRQGREFIWNDLLSLETGSLKLANGRVIEKTLYNRRTRQDEPALFVALTFERREVLDSSNIKPMNLIGVDRGENIPAVIALTDPEGCPLSRFKDSLGNPTHILRIGESYKEKQRTIQAKKEVEQRRAGGYSRKYASKAKNLADDMVRNTARDLLYYAVTQDAMLIFENLSRGFGRQGKRTFMAERQYTRMEDWLTAKLAYEGLPSKTYLSKTLAQYTSKTCSNCGFTITSADYDRVLEKLKKTATGWMTTINGKELKVEGQITYYNRYKRQNVVKDLSVELDRLSEESVNNDISSWTKGRSGEALSLLKKRFSHRPVQEKFVCLNCGFETHADEQAALNIARSWLFLRSQEYKKYQTNKTTGNTDKRAFVETWQSFYRKKLKEVWKPAV

SEQ ID NO: 30548 - protein, 979 aa, synthetic construct
  REGION 1..979: note = engineered CasX variant
QEIKRINKIRRRLVKDSNTKKAGKTGPMKTLLVRVMTPDLRERLENLRKKPENIPQPISNTSRANLNKLLTDYTEMKKAILHVYWEEFQKDPVGLMSRVAQPASKKIDQNKLKPEMDEKGNLTTAGFACSQCGQPLFVYKLEQVSEKGKAYTNYFGRCNVAEHEKLILLSQLKPEKDSDEAVTYSLGKFGQRALDFYSIHVTKESTHPVKPLAQIAGNRYASSTPVGKALSDACMGTIASFLSKYQDIIIEHQKVVKGNQKRLESLRELAGKENLEYPSVTLPPQPHTKEGVDAYNEVIARVRMWVNLNLWQKLKLSRDDAKPLLRLKGFPSFPLVERQANEVDWWDMVCNVKKLINEKKEDGKVFWQNLAGYKRQEALRPYLSSEEDRKKGKKFARYQLGDLLLHLEKKHGEDWGKVYDEAWERIDKKVEGLSKHIKLEEERRSEDAQSKAALTDWLRAKASFVIEGLKEADKDEFCRCELKLQKWYGDLRGKPFAIEAENSILDISGFSKQYNCAFIWQKDGVKKLNLYLIINYFKGGKLRFKKIKPEAFEANRFYTVINKKSGEIVPMEVNFNFDDPNLIILPLAFGKRQGREFIWNDLLSLETGSLKLANGRVIEKTLYNRRTRQDEPALFVALTFERREVLDSSNIKPMNLIGVDRGENIPAVIALTDPEGCPLSRFKDSLGNPTHILRIGESYKEKQRTIQAKKEVEQRRAGGYSRKYASKAKNLADDMVRNTARDLLYYAVTQDAMLIFENLSRGFGRQGKRTFMAERQYTRMEDWLTAKLAYEGLPSKTYLSKTLAQYTSKTCSNCGFTITSADYDRVLEKLKKTATGWMTTINGKELKVEGQITYYNRYKRQNVVKDLSVELDRLSEESVNNDISSWTKGRSGEALSLLKKRFSHRPVQEKFVCLNCGFETHADEQAALNIARSWLFLRSQEYKKYQTNKTTGNTDKRAFVETWQSFYRKKLKEVWKPAV

SEQ ID NO: 30549 - protein, 979 aa, synthetic construct
  REGION 1..979: note = engineered CasX variant
QEIKRINKIRRRLVKDSNTKKAGKTGPMKTLLVRVMTPDLRERLENLRKKPENIPQPISNTSRANLNKLLTDYTEMKKAILHVYWEEFQKDPVGLMSRVAQPASKKIDQNKLKPEMDEKGNLTTAGFACSQCGQPLFVYKLEQVSEKGKAYTNYFGRCNVAEHEKLILLSQLKPEKDSDEAVTYSLGKFGQRALDFYSIHVTKESTHPVKPLAQIAGNRYASSAPVGKALSDACMGTIASFLSKYQDIIIEHQKVVKGNQKRLESLRELAGKENLEYPSVTLPPQPHTKEGVDAYNEVIARVRMWVNLNLWQKLKLSRDDAKPLLRLKGFPSFPLVERQANEVDWWDMVCNVKKLINEKKEDGKVFWQNLAGYKRQEALRPYLSSEEDRKKGKKFARYQLGDLLLHLEKKHGEDWGKVYDEAWERIDKKVEGLSKHIKLEEERRSEDAQSKAALTDWLRAKASFVIEGLKEADKDEFCRCELKLQKWYGDLRGKPFAIEAENSILDISGFSKQYNCAFIWQKDGVKKLNLYLIINYFKGGKLRFKKIKPEAFEANRFYTVINKKSGEIVPMEVNFNFDDPNLIILPLAFGKRQGREFIWNDLLSLETGSLKLANGRVIEKTLYNRRTRQDEPALFVALTFERREVLDSSNIKPMNLIGVDRGENIPAVIALTDPEGCPLSRFKDSLGNPTHILRIGESYKEKQRTIQAKKEVEQRRAGGYSRKYASKAKNLADDMVRNTARDLLYYAVTQDAMLIFENLSRGFGRQGKRTFMAERQYTRMEDWLTAKLAYEGLPSKTYLSKTLAQYTSKTCSNCGFTITSADYDRVLEKLKKTATGWMTTINGKELKVEGQITYYNRYKRQNVVKDLSVELDRLSEESVNNDISSWTKGRSGEALSLLKKRFSHRPVQEKFVCLNCGFETHADEQAALNIARSWLFLRSQEYKKYQTNKTTGNTDKRAFVETWQSFYRKKLKEVWKPAV

SEQ ID NO: 30550 - protein, 979 aa, synthetic construct
  REGION 1..979: note = engineered CasX variant
QEIKRINKIRRRLVKDSNTKKAGKTGPMKTLLVRVMTPDLRERLENLRKKPENIPQPISNTSRANLNKLLTDYTEMKKAILHVYWEEFQKDPVGLMSRVAQPASKKIDQNKLKPEMDEKGNLTTAGFACSQCGQPLFVYKLEQVSEKGKAYTNYFGRCNVAEHEKLILLSQLKPEKDSDEAVTYSLGKFGQRALDFYSIHVTKESTHPVKPLAQIAGNRYASSVPVGKALSDACMGTIASFLSKYQDIIIEHQKVVKGNQKRLESLRELAGKENLEYPSVTLPPQPHTKEGVDAYNEVIARVRMWVNLNLWQKLKLSRDDAKPLLRLKGFPSFPLVERQANEVDWWDMVCNVKKLINEKKEDGKVFWQNLAGYKRQEALRPYLSSEEDRKKGKKFARYQLGDLLLHLEKKHGEDWGKVYDEAWERIDKKVEGLSKHIKLEEERRSEDAQSKAALTDWLRAKASFVIEGLKEADKDEFCRCELKLQKWYGDLRGKPFAIEAENSILDISGFSKQYNCAFIWQKDGVKKLNLYLIINYFKGGKLRFKKIKPEAFEANRFYTVINKKSGEIVPMEVNFNFDDPNLIILPLAFGKRQGREFIWNDLLSLETGSLKLANGRVIEKTLYNRRTRQDEPALFVALTFERREVLDSSNIKPMNLIGVDRGENIPAVIALTDPEGCPLSRFKDSLGNPTHILRIGESYKEKQRTIQAKKEVEQRRAGGYSRKYASKAKNLADDMVRNTARDLLYYAVTQDAMLIFENLSRGFGRQGKRTFMAERQYTRMEDWLTAKLAYEGLPSKTYLSKTLAQYTSKTCSNCGFTITSADYDRVLEKLKKTATGWMTTINGKELKVEGQITYYNRYKRQNVVKDLSVELDRLSEESVNNDISSWTKGRSGEALSLLKKRFSHRPVQEKFVCLNCGFETHADEQAALNIARSWLFLRSQEYKKYQTNKTTGNTDKRAFVETWQSFYRKKLKEVWKPAV

SEQ ID NO: 30551 - protein, 978 aa, synthetic construct
  REGION 1..978: note = engineered CasX variant
QEIKRINKIRRRLVKDSNTKKAGKTGPMKTLLVRVMTPDLRERLENLRKKPENIPQPISNTSRANLNKLLTDYTEMKKAILHVYWEEFQKDPVGLMSRVAQPASKKIDQNKLKPEMDEKGNLTTAGFACSQCGQPLFVYKLEQVSEKGKAYTNYFGRCNVAEHEKLIKLSQLKPEKDSDEAVTYSLGKFGQRALDFYSIHVTKESTHPVKPLAQIAGNRYASSPVGKALSDACMGTIASFLSKYQDIIIEHQKVVKGNQKRLESLRELAGKENLEYPSVTLPPQPHTKEGVDAYNEVIARVRMWVNLNLWQKLKLSRDDAKPLLRLKGFPSFPLVERQANEVDWWDMVCNVKKLINEKKEDGKVFWQNLAGYKRQEALRPYLSSEEDRKKGKKFARYQLGDLLLHLEKKHGEDWGKVYDEAWERIDKKVEGLSKHIKLEEERRSEDAQSKAALTDWLRAKASFVIEGLKEADKDEFCRCELKLQKWYGDLRGKPFAIEAENSILDISGFSKQYNCAFIWQKDGVKKLNLYLIINYFKGGKLRFKKIKPEAFEANRFYTVINKKSGEIVPMEVNFNFDDPNLIILPLAFGKRQGREFIWNDLLSLETGSLKLANGRVIEKTLYNRRTRQDEPALFVALTFERREVLDSSNIKPMNLIGVDRGENIPAVIALTDPEGCPLSRFKDSLGNPTHILRIGESYKEKQRTIQAKKEVEQRRAGGYSRKYASKAKNLADDMVRNTARDLLYYAVTQDAMLIFENLSRGFGRQGKRTFMAERQYTRMEDWLTAKLAYEGLPSKTYLSKTLAQYTSKTCSNCGFTITSADYDRVLEKLKKTATGWMTTINGKELKVEGQITYYNRYKRQNVVKDLSVELDRLSEESVNNDISSWTKGRSGEALSLLKKRFSHRPVQEKFVCLNCGFETHADEQAALNIARSWLFLRSQEYKKYQTNKTTGNTDKRAFVETWQSFYRKKLKEVWKPAV

SEQ ID NO: 30552 - protein, 979 aa, synthetic construct
  REGION 1..979: note = engineered CasX variant
QEIKRINKIRRRLVKDSNTKKAGKTGPMKTLLVRVMTPDLRERLENLRKKPENIPQPISNTSRANLNKLLTDYTEMKKAILHVYWEEFQKDPVGLMSRVAQPASKKIDQNKLKPEMDEKGNLTTAGFACSQCGQPLFVYKLEQVSEKGKAYTNYFGRCNVAEHEKLILLAQLKPEKDSDEAVTYSLGKFGQRALDFYSIHVTKESTHPVKPLAQIAGNRYASSYPVGKALSDACMGTIASFLSKYQDIIIEHQKVVKGNQKRLESLRELAGKENLEYPSVTLPPQPHTKEGVDAYNEVIARVRMWVNLNLWQKLKLSRDDAKPLLRLKGFPSFPLVERQANEVDWWDMVCNVKKLINEKKEDGKVFWQNLAGYKRQEALRPYLSSEEDRKKGKKFARYQLGDLLLHLEKKHGEDWGKVYDEAWERIDKKVEGLSKHIKLEEERRSEDAQSKAALTDWLRAKASFVIEGLKEADKDEFCRCELKLQKWYGDLRGKPFAIEAENSILDISGFSKQYNCAFIWQKDGVKKLNLYLIINYFKGGKLRFKKIKPEAFEANRFYTVINKKSGEIVPMEVNFNFDDPNLIILPLAFGKRQGREFIWNDLLSLETGSLKLANGRVIEKTLYNRRTRQDEPALFVALTFERREVLDSSNIKPMNLIGVDRGENIPAVIALTDPEGCPLSRFKDSLGNPTHILRIGESYKEKQRTIQAKKEVEQRRAGGYSRKYASKAKNLADDMVRNTARDLLYYAVTQDAMLIFENLSRGFGRQGKRTFMAERQYTRMEDWLTAKLAYEGLPSKTYLSKTLAQYTSKTCSNCGFTITSADYDRVLEKLKKTATGWMTTINGKELKVEGQITYYNRYKRQNVVKDLSVELDRLSEESVNNDISSWTKGRSGEALSLLKKRFSHRPVQEKFVCLNCGFETHADEQAALNIARSWLFLRSQEYKKYQTNKTTGNTDKRAFVETWQSFYRKKLKEVWKPAV

SEQ ID NO: 30553 - protein, 979 aa, synthetic construct
  REGION 1..979: note = engineered CasX variant
QEIKRINKIRRRLVKDSNTKKAGKTGPMKTLLVRVMTPDLRERLENLRKKPENIPQPISNTSRANLNKLLTDYTEMKKAILHVYWEEFQKDPVGLMSRVAQPASKKIDQNKLKPEMDEKGNLTTAGFACSQCGQPLFVYKLEQVSEKGKAYTNYFGRCNVAEHEKLILLAQLKPEKDSDEAVTYSLGKFGQRALDFYSIHVTKESTHPVKPLAQIAGNRYASSHPVGKALSDACMGTIASFLSKYQDIIIEHQKVVKGNQKRLESLRELAGKENLEYPSVTLPPQPHTKEGVDAYNEVIARVRMWVNLNLWQKLKLSRDDAKPLLRLKGFPSFPLVERQANEVDWWDMVCNVKKLINEKKEDGKVFWQNLAGYKRQEALRPYLSSEEDRKKGKKFARYQLGDLLLHLEKKHGEDWGKVYDEAWERIDKKVEGLSKHIKLEEERRSEDAQSKAALTDWLRAKASFVIEGLKEADKDEFCRCELKLQKWYGDLRGKPFAIEAENSILDISGFSKQYNCAFIWQKDGVKKLNLYLIINYFKGGKLRFKKIKPEAFEANRFYTVINKKSGEIVPMEVNFNFDDPNLIILPLAFGKRQGREFIWNDLLSLETGSLKLANGRVIEKTLYNRRTRQDEPALFVALTFERREVLDSSNIKPMNLIGVDRGENIPAVIALTDPEGCPLSRFKDSLGNPTHILRIGESYKEKQRTIQAKKEVEQRRAGGYSRKYASKAKNLADDMVRNTARDLLYYAVTQDAMLIFENLSRGFGRQGKRTFMAERQYTRMEDWLTAKLAYEGLPSKTYLSKTLAQYTSKTCSNCGFTITSADYDRVLEKLKKTATGWMTTINGKELKVEGQITYYNRYKRQNVVKDLSVELDRLSEESVNNDISSWTKGRSGEALSLLKKRFSHRPVQEKFVCLNCGFETHADEQAALNIARSWLFLRSQEYKKYQTNKTTGNTDKRAFVETWQSFYRKKLKEVWKPAV

SEQ ID NO: 30554 - protein, 979 aa, synthetic construct
  REGION 1..979: note = engineered CasX variant
QEIKRINKIRRRLVKDSNTKKAGKTGPMKTLLVRVMTPDLRERLENLRKKPENIPQPISNTSRANLNKLLTDYTEMKKAILHVYWEEFQKDPVGLMSRVAQPASKKIDQNKLKPEMDEKGNLTTAGFACSQCGQPLFVYKLEQVSEKGKAYTNYFGRCNVAEHEKLILLAQLKPEKDSDEAVTYSLGKFGQRALDFYSIHVTKESTHPVKPLAQIAGNRYASSSPVGKALSDACMGTIASFLSKYQDIIIEHQKVVKGNQKRLESLRELAGKENLEYPSVTLPPQPHTKEGVDAYNEVIARVRMWVNLNLWQKLKLSRDDAKPLLRLKGFPSFPLVERQANEVDWWDMVCNVKKLINEKKEDGKVFWQNLAGYKRQEALRPYLSSEEDRKKGKKFARYQLGDLLLHLEKKHGEDWGKVYDEAWERIDKKVEGLSKHIKLEEERRSEDAQSKAALTDWLRAKASFVIEGLKEADKDEFCRCELKLQKWYGDLRGKPFAIEAENSILDISGFSKQYNCAFIWQKDGVKKLNLYLIINYFKGGKLRFKKIKPEAFEANRFYTVINKKSGEIVPMEVNFNFDDPNLIILPLAFGKRQGREFIWNDLLSLETGSLKLANGRVIEKTLYNRRTRQDEPALFVALTFERREVLDSSNIKPMNLIGVDRGENIPAVIALTDPEGCPLSRFKDSLGNPTHILRIGESYKEKQRTIQAKKEVEQRRAGGYSRKYASKAKNLADDMVRNTARDLLYYAVTQDAMLIFENLSRGFGRQGKRTFMAERQYTRMEDWLTAKLAYEGLPSKTYLSKTLAQYTSKTCSNCGFTITSADYDRVLEKLKKTATGWMTTINGKELKVEGQITYYNRYKRQNVVKDLSVELDRLSEESVNNDISSWTKGRSGEALSLLKKRFSHRPVQEKFVCLNCGFETHADEQAALNIARSWLFLRSQEYKKYQTNKTTGNTDKRAFVETWQSFYRKKLKEVWKPAV

SEQ ID NO: 30555 - protein, 979 aa, synthetic construct
  REGION 1..979: note = engineered CasX variant
QEIKRINKIRRRLVKDSNTKKAGKTGPMKTLLVRVMTPDLRERLENLRKKPENIPQPISNTSRANLNKLLTDYTEMKKAILHVYWEEFQKDPVGLMSRVAQPASKKIDQNKLKPEMDEKGNLTTAGFACSQCGQPLFVYKLEQVSEKGKAYTNYFGRCNVAEHEKLILLAQLKPEKDSDEAVTYSLGKFGQRALDFYSIHVTKESTHPVKPLAQIAGNRYASSTPVGKALSDACMGTIASFLSKYQDIIIEHQKVVKGNQKRLESLRELAGKENLEYPSVTLPPQPHTKEGVDAYNEVIARVRMWVNLNLWQKLKLSRDDAKPLLRLKGFPSFPLVERQANEVDWWDMVCNVKKLINEKKEDGKVFWQNLAGYKRQEALRPYLSSEEDRKKGKKFARYQLGDLLLHLEKKHGEDWGKVYDEAWERIDKKVEGLSKHIKLEEERRSEDAQSKAALTDWLRAKASFVIEGLKEADKDEFCRCELKLQKWYGDLRGKPFAIEAENSILDISGFSKQYNCAFIWQKDGVKKLNLYLIINYFKGGKLRFKKIKPEAFEANRFYTVINKKSGEIVPMEVNFNFDDPNLIILPLAFGKRQGREFIWNDLLSLETGSLKLANGRVIEKTLYNRRTRQDEPALFVALTFERREVLDSSNIKPMNLIGVDRGENIPAVIALTDPEGCPLSRFKDSLGNPTHILRIGESYKEKQRTIQAKKEVEQRRAGGYSRKYASKAKNLADDMVRNTARDLLYYAVTQDAMLIFENLSRGFGRQGKRTFMAERQYTRMEDWLTAKLAYEGLPSKTYLSKTLAQYTSKTCSNCGFTITSADYDRVLEKLKKTATGWMTTINGKELKVEGQITYYNRYKRQNVVKDLSVELDRLSEESVNNDISSWTKGRSGEALSLLKKRFSHRPVQEKFVCLNCGFETHADEQAALNIARSWLFLRSQEYKKYQTNKTTGNTDKRAFVETWQSFYRKKLKEVWKPAV

SEQ ID NO: 30556 - protein, 979 aa, synthetic construct
  REGION 1..979: note = engineered CasX variant
QEIKRINKIRRRLVKDSNTKKAGKTGPMKTLLVRVMTPDLRERLENLRKKPENIPQPISNTSRANLNKLLTDYTEMKKAILHVYWEEFQKDPVGLMSRVAQPASKKIDQNKLKPEMDEKGNLTTAGFACSQCGQPLFVYKLEQVSEKGKAYTNYFGRCNVAEHEKLILLAQLKPEKDSDEAVTYSLGKFGQRALDFYSIHVTKESTHPVKPLAQIAGNRYASSAPVGKALSDACMGTIASFLSKYQDIIIEHQKVVKGNQKRLESLRELAGKENLEYPSVTLPPQPHTKEGVDAYNEVIARVRMWVNLNLWQKLKLSRDDAKPLLRLKGFPSFPLVERQANEVDWWDMVCNVKKLINEKKEDGKVFWQNLAGYKRQEALRPYLSSEEDRKKGKKFARYQLGDLLLHLEKKHGEDWGKVYDEAWERIDKKVEGLSKHIKLEEERRSEDAQSKAALTDWLRAKASFVIEGLKEADKDEFCRCELKLQKWYGDLRGKPFAIEAENSILDISGFSKQYNCAFIWQKDGVKKLNLYLIINYFKGGKLRFKKIKPEAFEANRFYTVINKKSGEIVPMEVNFNFDDPNLIILPLAFGKRQGREFIWNDLLSLETGSLKLANGRVIEKTLYNRRTRQDEPALFVALTFERREVLDSSNIKPMNLIGVDRGENIPAVIALTDPEGCPLSRFKDSLGNPTHILRIGESYKEKQRTIQAKKEVEQRRAGGYSRKYASKAKNLADDMVRNTARDLLYYAVTQDAMLIFENLSRGFGRQGKRTFMAERQYTRMEDWLTAKLAYEGLPSKTYLSKTLAQYTSKTCSNCGFTITSADYDRVLEKLKKTATGWMTTINGKELKVEGQITYYNRYKRQNVVKDLSVELDRLSEESVNNDISSWTKGRSGEALSLLKKRFSHRPVQEKFVCLNCGFETHADEQAALNIARSWLFLRSQEYKKYQTNKTTGNTDKRAFVETWQSFYRKKLKEVWKPAV

SEQ ID NO: 30557 - protein, 979 aa, synthetic construct
  REGION 1..979: note = engineered CasX variant
QEIKRINKIRRRLVKDSNTKKAGKTGPMKTLLVRVMTPDLRERLENLRKKPENIPQPISNTSRANLNKLLTDYTEMKKAILHVYWEEFQKDPVGLMSRVAQPASKKIDQNKLKPEMDEKGNLTTAGFACSQCGQPLFVYKLEQVSEKGKAYTNYFGRCNVAEHEKLILLAQLKPEKDSDEAVTYSLGKFGQRALDFYSIHVTKESTHPVKPLAQIAGNRYASSVPVGKALSDACMGTIASFLSKYQDIIIEHQKVVKGNQKRLESLRELAGKENLEYPSVTLPPQPHTKEGVDAYNEVIARVRMWVNLNLWQKLKLSRDDAKPLLRLKGFPSFPLVERQANEVDWWDMVCNVKKLINEKKEDGKVFWQNLAGYKRQEALRPYLSSEEDRKKGKKFARYQLGDLLLHLEKKHGEDWGKVYDEAWERIDKKVEGLSKHIKLEEERRSEDAQSKAALTDWLRAKASFVIEGLKEADKDEFCRCELKLQKWYGDLRGKPFAIEAENSILDISGFSKQYNCAFIWQKDGVKKLNLYLIINYFKGGKLRFKKIKPEAFEANRFYTVINKKSGEIVPMEVNFNFDDPNLIILPLAFGKRQGREFIWNDLLSLETGSLKLANGRVIEKTLYNRRTRQDEPALFVALTFERREVLDSSNIKPMNLIGVDRGENIPAVIALTDPEGCPLSRFKDSLGNPTHILRIGESYKEKQRTIQAKKEVEQRRAGGYSRKYASKAKNLADDMVRNTARDLLYYAVTQDAMLIFENLSRGFGRQGKRTFMAERQYTRMEDWLTAKLAYEGLPSKTYLSKTLAQYTSKTCSNCGFTITSADYDRVLEKLKKTATGWMTTINGKELKVEGQITYYNRYKRQNVVKDLSVELDRLSEESVNNDISSWTKGRSGEALSLLKKRFSHRPVQEKFVCLNCGFETHADEQAALNIARSWLFLRSQEYKKYQTNKTTGNTDKRAFVETWQSFYRKKLKEVWKPAV

SEQ ID NO: 30558 - protein, 979 aa, synthetic construct
  REGION 1..979: note = engineered CasX variant
QEIKRINKIRRRLVKDSNTKKAGKTGPMKTLLVRVMTPDLRERLENLRKKPENIPQPISNTSRANLNKLLTDYTEMKKAILHVYWEEFQKDPVGLMSRVAQPASKKIDQNKLKPEMDEKGNLTTAGFACSQCGQPLFVYKLEQVSEKGKAYTNYFGRCNVAEHEKLILLAQLKPEKDSDEAVTYSLGKFGQRALDFYSIHVTKESTHPVKPLAQIAGNRYASSYPVGKALSDACMGTIASFLSKYQDIIIEHQKVVKGNQKRLESLRELAGKENLEYPSVTLPPQPHTSEGVDAYNEVIARVRMWVNLNLWQKLKLSRDDAKPLLRLKGFPSFPLVERQANEVDWWDMVCNVKKLINEKKEDGKVFWQNLAGYKRQEALRPYLSSEEDRKKGKKFARYQLGDLLLHLEKKHGEDWGKVYDEAWERIDKKVEGLSKHIKLEEERRSEDAQSKAALTDWLRAKASFVIEGLKEADKDEFCRCELKLQKWYGDLRGKPFAIEAENSILDISGFSKQYNCAFIWQKDGVKKLNLYLIINYFKGGKLRFKKIKPEAFEANRFYTVINKKSGEIVPMEVNFNFDDPNLIILPLAFGKRQGREFIWNDLLSLETGSLKLANGRVIEKTLYNRRTRQDEPALFVALTFERREVLDSSNIKPMNLIGVDRGENIPAVIALTDPEGCPLSRFKDSLGNPTHILRIGESYKEKQRTIQAKKEVEQRRAGGYSRKYASKAKNLADDMVRNTARDLLYYAVTQDAMLIFENLSRGFGRQGKRTFMAERQYTRMEDWLTAKLAYEGLPSKTYLSKTLAQYTSKTCSNCGFTITSADYDRVLEKLKKTATGWMTTINGKELKVEGQITYYNRYKRQNVVKDLSVELDRLSEESVNNDISSWTKGRSGEALSLLKKRFSHRPVQEKFVCLNCGFETHADEQAALNIARSWLFLRSQEYKKYQTNKTTGNTDKRAFVETWQSFYRKKLKEVWKPAV

SEQ ID NO: 30559 - protein, 979 aa, synthetic construct
  REGION 1..979: note = engineered CasX variant
QEIKRINKIRRRLVKDSNTKKAGKTGPMKTLLVRVMTPDLRERLENLRKKPENIPQPISNTSRANLNKLLTDYTEMKKAILHVYWEEFQKDPVGLMSRVAQPASKKIDQNKLKPEMDEKGNLTTAGFACSQCGQPLFVYKLEQVSEKGKAYTNYFGRCNVAEHEKLILLAQLKPEKDSDEAVTYSLGKFGQRALDFYSIHVTKESTHPVKPLAQIAGNRYASSHPVGKALSDACMGTIASFLSKYQDIIIEHQKVVKGNQKRLESLRELAGKENLEYPSVTLPPQPHTSEGVDAYNEVIARVRMWVNLNLWQKLKLSRDDAKPLLRLKGFPSFPLVERQANEVDWWDMVCNVKKLINEKKEDGKVFWQNLAGYKRQEALRPYLSSEEDRKKGKKFARYQLGDLLLHLEKKHGEDWGKVYDEAWERIDKKVEGLSKHIKLEEERRSEDAQSKAALTDWLRAKASFVIEGLKEADKDEFCRCELKLQKWYGDLRGKPFAIEAENSILDISGFSKQYNCAFIWQKDGVKKLNLYLIINYFKGGKLRFKKIKPEAFEANRFYTVINKKSGEIVPMEVNFNFDDPNLIILPLAFGKRQGREFIWNDLLSLETGSLKLANGRVIEKTLYNRRTRQDEPALFVALTFERREVLDSSNIKPMNLIGVDRGENIPAVIALTDPEGCPLSRFKDSLGNPTHILRIGESYKEKQRTIQAKKEVEQRRAGGYSRKYASKAKNLADDMVRNTARDLLYYAVTQDAMLIFENLSRGFGRQGKRTFMAERQYTRMEDWLTAKLAYEGLPSKTYLSKTLAQYTSKTCSNCGFTITSADYDRVLEKLKKTATGWMTTINGKELKVEGQITYYNRYKRQNVVKDLSVELDRLSEESVNNDISSWTKGRSGEALSLLKKRFSHRPVQEKFVCLNCGFETHADEQAALNIARSWLFLRSQEYKKYQTNKTTGNTDKRAFVETWQSFYRKKLKEVWKPAV

SEQ ID NO: 30560 - protein, 979 aa, synthetic construct
  REGION 1..979: note = engineered CasX variant
QEIKRINKIRRRLVKDSNTKKAGKTGPMKTLLVRVMTPDLRERLENLRKKPENIPQPISNTSRANLNKLLTDYTEMKKAILHVYWEEFQKDPVGLMSRVAQPASKKIDQNKLKPEMDEKGNLTTAGFACSQCGQPLFVYKLEQVSEKGKAYTNYFGRCNVAEHEKLILLAQLKPEKDSDEAVTYSLGKFGQRALDFYSIHVTKESTHPVKPLAQIAGNRYASSSPVGKALSDACMGTIASFLSKYQDIIIEHQKVVKGNQKRLESLRELAGKENLEYPSVTLPPQPHTSEGVDAYNEVIARVRMWVNLNLWQKLKLSRDDAKPLLRLKGFPSFPLVERQANEVDWWDMVCNVKKLINEKKEDGKVFWQNLAGYKRQEALRPYLSSEEDRKKGKKFARYQLGDLLLHLEKKHGEDWGKVYDEAWERIDKKVEGLSKHIKLEEERRSEDAQSKAALTDWLRAKASFVIEGLKEADKDEFCRCELKLQKWYGDLRGKPFAIEAENSILDISGFSKQYNCAFIWQKDGVKKLNLYLIINYFKGGKLRFKKIKPEAFEANRFYTVINKKSGEIVPMEVNFNFDDPNLIILPLAFGKRQGREFIWNDLLSLETGSLKLANGRVIEKTLYNRRTRQDEPALFVALTFERREVLDSSNIKPMNLIGVDRGENIPAVIALTDPEGCPLSRFKDSLGNPTHILRIGESYKEKQRTIQAKKEVEQRRAGGYSRKYASKAKNLADDMVRNTARDLLYYAVTQDAMLIFENLSRGFGRQGKRTFMAERQYTRMEDWLTAKLAYEGLPSKTYLSKTLAQYTSKTCSNCGFTITSADYDRVLEKLKKTATGWMTTINGKELKVEGQITYYNRYKRQNVVKDLSVELDRLSEESVNNDISSWTKGRSGEALSLLKKRFSHRPVQEKFVCLNCGFETHADEQAALNIARSWLFLRSQEYKKYQTNKTTGNTDKRAFVETWQSFYRKKLKEVWKPAV

SEQ ID NO: 30561 - protein, 979 aa, synthetic construct
  REGION 1..979: note = engineered CasX variant
QEIKRINKIRRRLVKDSNTKKAGKTGPMKTLLVRVMTPDLRERLENLRKKPENIPQPISNTSRANLNKLLTDYTEMKKAILHVYWEEFQKDPVGLMSRVAQPASKKIDQNKLKPEMDEKGNLTTAGFACSQCGQPLFVYKLEQVSEKGKAYTNYFGRCNVAEHEKLILLAQLKPEKDSDEAVTYSLGKFGQRALDFYSIHVTKESTHPVKPLAQIAGNRYASSTPVGKALSDACMGTIASFLSKYQDIIIEHQKVVKGNQKRLESLRELAGKENLEYPSVTLPPQPHTSEGVDAYNEVIARVRMWVNLNLWQKLKLSRDDAKPLLRLKGFPSFPLVERQANEVDWWDMVCNVKKLINEKKEDGKVFWQNLAGYKRQEALRPYLSSEEDRKKGKKFARYQLGDLLLHLEKKHGEDWGKVYDEAWERIDKKVEGLSKHIKLEEERRSEDAQSKAALTDWLRAKASFVIEGLKEADKDEFCRCELKLQKWYGDLRGKPFAIEAENSILDISGFSKQYNCAFIWQKDGVKKLNLYLIINYFKGGKLRFKKIKPEAFEANRFYTVINKKSGEIVPMEVNFNFDDPNLIILPLAFGKRQGREFIWNDLLSLETGSLKLANGRVIEKTLYNRRTRQDEPALFVALTFERREVLDSSNIKPMNLIGVDRGENIPAVIALTDPEGCPLSRFKDSLGNPTHILRIGESYKEKQRTIQAKKEVEQRRAGGYSRKYASKAKNLADDMVRNTARDLLYYAVTQDAMLIFENLSRGFGRQGKRTFMAERQYTRMEDWLTAKLAYEGLPSKTYLSKTLAQYTSKTCSNCGFTITSADYDRVLEKLKKTATGWMTTINGKELKVEGQITYYNRYKRQNVVKDLSVELDRLSEESVNNDISSWTKGRSGEALSLLKKRFSHRPVQEKFVCLNCGFETHADEQAALNIARSWLFLRSQEYKKYQTNKTTGNTDKRAFVETWQSFYRKKLKEVWKPAV

SEQ ID NO: 30562 - protein, 979 aa, synthetic construct
  REGION 1..979: note = engineered CasX variant
QEIKRINKIRRRLVKDSNTKKAGKTGPMKTLLVRVMTPDLRERLENLRKKPENIPQPISNTSRANLNKLLTDYTEMKKAILHVYWEEFQKDPVGLMSRVAQPASKKIDQNKLKPEMDEKGNLTTAGFACSQCGQPLFVYKLEQVSEKGKAYTNYFGRCNVAEHEKLILLAQLKPEKDSDEAVTYSLGKFGQRALDFYSIHVTKESTHPVKPLAQIAGNRYASSAPVGKALSDACMGTIASFLSKYQDIIIEHQKVVKGNQKRLESLRELAGKENLEYPSVTLPPQPHTSEGVDAYNEVIARVRMWVNLNLWQKLKLSRDDAKPLLRLKGFPSFPLVERQANEVDWWDMVCNVKKLINEKKEDGKVFWQNLAGYKRQEALRPYLSSEEDRKKGKKFARYQLGDLLLHLEKKHGEDWGKVYDEAWERIDKKVEGLSKHIKLEEERRSEDAQSKAALTDWLRAKASFVIEGLKEADKDEFCRCELKLQKWYGDLRGKPFAIEAENSILDISGFSKQYNCAFIWQKDGVKKLNLYLIINYFKGGKLRFKKIKPEAFEANRFYTVINKKSGEIVPMEVNFNFDDPNLIILPLAFGKRQGREFIWNDLLSLETGSLKLANGRVIEKTLYNRRTRQDEPALFVALTFERREVLDSSNIKPMNLIGVDRGENIPAVIALTDPEGCPLSRFKDSLGNPTHILRIGESYKEKQRTIQAKKEVEQRRAGGYSRKYASKAKNLADDMVRNTARDLLYYAVTQDAMLIFENLSRGFGRQGKRTFMAERQYTRMEDWLTAKLAYEGLPSKTYLSKTLAQYTSKTCSNCGFTITSADYDRVLEKLKKTATGWMTTINGKELKVEGQITYYNRYKRQNVVKDLSVELDRLSEESVNNDISSWTKGRSGEALSLLKKRFSHRPVQEKFVCLNCGFETHADEQAALNIARSWLFLRSQEYKKYQTNKTTGNTDKRAFVETWQSFYRKKLKEVWKPAV

SEQ ID NO: 30563 - protein, 979 aa, synthetic construct
  REGION 1..979: note = engineered CasX variant
QEIKRINKIRRRLVKDSNTKKAGKTGPMKTLLVRVMTPDLRERLENLRKKPENIPQPISNTSRANLNKLLTDYTEMKKAILHVYWEEFQKDPVGLMSRVAQPASKKIDQNKLKPEMDEKGNLTTAGFACSQCGQPLFVYKLEQVSEKGKAYTNYFGRCNVAEHEKLILLAQLKPEKDSDEAVTYSLGKFGQRALDFYSIHVTKESTHPVKPLAQIAGNRYASSVPVGKALSDACMGTIASFLSKYQDIIIEHQKVVKGNQKRLESLRELAGKENLEYPSVTLPPQPHTSEGVDAYNEVIARVRMWVNLNLWQKLKLSRDDAKPLLRLKGFPSFPLVERQANEVDWWDMVCNVKKLINEKKEDGKVFWQNLAGYKRQEALRPYLSSEEDRKKGKKFARYQLGDLLLHLEKKHGEDWGKVYDEAWERIDKKVEGLSKHIKLEEERRSEDAQSKAALTDWLRAKASFVIEGLKEADKDEFCRCELKLQKWYGDLRGKPFAIEAENSILDISGFSKQYNCAFIWQKDGVKKLNLYLIINYFKGGKLRFKKIKPEAFEANRFYTVINKKSGEIVPMEVNFNFDDPNLIILPLAFGKRQGREFIWNDLLSLETGSLKLANGRVIEKTLYNRRTRQDEPALFVALTFERREVLDSSNIKPMNLIGVDRGENIPAVIALTDPEGCPLSRFKDSLGNPTHILRIGESYKEKQRTIQAKKEVEQRRAGGYSRKYASKAKNLADDMVRNTARDLLYYAVTQDAMLIFENLSRGFGRQGKRTFMAERQYTRMEDWLTAKLAYEGLPSKTYLSKTLAQYTSKTCSNCGFTITSADYDRVLEKLKKTATGWMTTINGKELKVEGQITYYNRYKRQNVVKDLSVELDRLSEESVNNDISSWTKGRSGEALSLLKKRFSHRPVQEKFVCLNCGFETHADEQAALNIARSWLFLRSQEYKKYQTNKTTGNTDKRAFVETWQSFYRKKLKEVWKPAV

SEQ ID NO: 30564 - protein, 978 aa, synthetic construct
  REGION 1..978: note = engineered CasX variant
QEIKRINKIRRRLVKDSNTKKAGKTGPMKTLLVRVMTPDLRERLENLRKKPENIPQPISNTSRANLNKLLTDYTEMKKAILHVYWEEFQKDPVGLMSRVAQPASKKIDQNKLKPEMDEKGNLTTAGFACSQCGQPLFVYKLEQVSEKGKAYTNYFGRCNVAEHEKLIKLAQLKPEKDSDEAVTYSLGKFGQRALDFYSIHVTKESTHPVKPLAQIAGNRYASSPVGKALSDACMGTIASFLSKYQDIIIEHQKVVKGNQKRLESLRELAGKENLEYPSVTLPPQPHTSEGVDAYNEVIARVRMWVNLNLWQKLKLSRDDAKPLLRLKGFPSFPLVERQANEVDWWDMVCNVKKLINEKKEDGKVFWQNLAGYKRQEALRPYLSSEEDRKKGKKFARYQLGDLLLHLEKKHGEDWGKVYDEAWERIDKKVEGLSKHIKLEEERRSEDAQSKAALTDWLRAKASFVIEGLKEADKDEFCRCELKLQKWYGDLRGKPFAIEAENSILDISGFSKQYNCAFIWQKDGVKKLNLYLIINYFKGGKLRFKKIKPEAFEANRFYTVINKKSGEIVPMEVNFNFDDPNLIILPLAFGKRQGREFIWNDLLSLETGSLKLANGRVIEKTLYNRRTRQDEPALFVALTFERREVLDSSNIKPMNLIGVDRGENIPAVIALTDPEGCPLSRFKDSLGNPTHILRIGESYKEKQRTIQAKKEVEQRRAGGYSRKYASKAKNLADDMVRNTARDLLYYAVTQDAMLIFENLSRGFGRQGKRTFMAERQYTRMEDWLTAKLAYEGLPSKTYLSKTLAQYTSKTCSNCGFTITSADYDRVLEKLKKTATGWMTTINGKELKVEGQITYYNRYKRQNVVKDLSVELDRLSEESVNNDISSWTKGRSGEALSLLKKRFSHRPVQEKFVCLNCGFETHADEQAALNIARSWLFLRSQEYKKYQTNKTTGNTDKRAFVETWQSFYRKKLKEVWKPAV

SEQ ID NO: 30565 - protein, 979 aa, synthetic construct
  REGION 1..979: note = engineered CasX variant
QEIKRINKIRRRLVKDSNTKKAGKTGPMKTLLVRVMTPDLRERLENLRKKPENIPQPISNTSRANLNKLLTDYTEMKKAILHVYWEEFQKDPVGLMSRVAQPASKKIDQNKLKPEMDEKGNLTTAGFACSQCGQPLFVYKLEQVSEKGKAYTNYFGRCNVAEHEKLILLAQLKPEKDSDEAVTYSLGKFGQRALDFYSIHVTKESTHPVKPLAQIAGNRYASSYPVGKALSDACMGTIASFLSKYQDIIIEHQKVVKGNQKRLESLRELAGKENLEYPSVTLPPQPHTKEGLDAYNEVIARVRMWVNLNLWQKLKLSRDDAKPLLRLKGFPSFPLVERQANEVDWWDMVCNVKKLINEKKEDGKVFWQNLAGYKRQEALRPYLSSEEDRKKGKKFARYQLGDLLLHLEKKHGEDWGKVYDEAWERIDKKVEGLSKHIKLEEERRSEDAQSKAALTDWLRAKASFVIEGLKEADKDEFCRCELKLQKWYGDLRGKPFAIEAENSILDISGFSKQYNCAFIWQKDGVKKLNLYLIINYFKGGKLRFKKIKPEAFEANRFYTVINKKSGEIVPMEVNFNFDDPNLIILPLAFGKRQGREFIWNDLLSLETGSLKLANGRVIEKTLYNRRTRQDEPALFVALTFERREVLDSSNIKPMNLIGVDRGENIPAVIALTDPEGCPLSRFKDSLGNPTHILRIGESYKEKQRTIQAKKEVEQRRAGGYSRKYASKAKNLADDMVRNTARDLLYYAVTQDAMLIFENLSRGFGRQGKRTFMAERQYTRMEDWLTAKLAYEGLPSKTYLSKTLAQYTSKTCSNCGFTITSADYDRVLEKLKKTATGWMTTINGKELKVEGQITYYNRYKRQNVVKDLSVELDRLSEESVNNDISSWTKGRSGEALSLLKKRFSHRPVQEKFVCLNCGFETHADEQAALNIARSWLFLRSQEYKKYQTNKTTGNTDKRAFVETWQSFYRKKLKEVWKPAV

SEQ ID NO: 30566 - protein, 979 aa, synthetic construct
  REGION 1..979: note = engineered CasX variant
QEIKRINKIRRRLVKDSNTKKAGKTGPMKTLLVRVMTPDLRERLENLRKKPENIPQPISNTSRANLNKLLTDYTEMKKAILHVYWEEFQKDPVGLMSRVAQPASKKIDQNKLKPEMDEKGNLTTAGFACSQCGQPLFVYKLEQVSEKGKAYTNYFGRCNVAEHEKLILLAQLKPEKDSDEAVTYSLGKFGQRALDFYSIHVTKESTHPVKPLAQIAGNRYASSHPVGKALSDACMGTIASFLSKYQDIIIEHQKVVKGNQKRLESLRELAGKENLEYPSVTLPPQPHTKEGLDAYNEVIARVRMWVNLNLWQKLKLSRDDAKPLLRLKGFPSFPLVERQANEVDWWDMVCNVKKLINEKKEDGKVFWQNLAGYKRQEALRPYLSSEEDRKKGKKFARYQLGDLLLHLEKKHGEDWGKVYDEAWERIDKKVEGLSKHIKLEEERRSEDAQSKAALTDWLRAKASFVIEGLKEADKDEFCRCELKLQKWYGDLRGKPFAIEAENSILDISGFSKQYNCAFIWQKDGVKKLNLYLIINYFKGGKLRFKKIKPEAFEANRFYTVINKKSGEIVPMEVNFNFDDPNLIILPLAFGKRQGREFIWNDLLSLETGSLKLANGRVIEKTLYNRRTRQDEPALFVALTFERREVLDSSNIKPMNLIGVDRGENIPAVIALTDPEGCPLSRFKDSLGNPTHILRIGESYKEKQRTIQAKKEVEQRRAGGYSRKYASKAKNLADDMVRNTARDLLYYAVTQDAMLIFENLSRGFGRQGKRTFMAERQYTRMEDWLTAKLAYEGLPSKTYLSKTLAQYTSKTCSNCGFTITSADYDRVLEKLKKTATGWMTTINGKELKVEGQITYYNRYKRQNVVKDLSVELDRLSEESVNNDISSWTKGRSGEALSLLKKRFSHRPVQEKFVCLNCGFETHADEQAALNIARSWLFLRSQEYKKYQTNKTTGNTDKRAFVETWQSFYRKKLKEVWKPAV

SEQ ID NO: 30567 - protein, 979 aa, synthetic construct
  REGION 1..979: note = engineered CasX variant
QEIKRINKIRRRLVKDSNTKKAGKTGPMKTLLVRVMTPDLRERLENLRKKPENIPQPISNTSRANLNKLLTDYTEMKKAILHVYWEEFQKDPVGLMSRVAQPASKKIDQNKLKPEMDEKGNLTTAGFACSQCGQPLFVYKLEQVSEKGKAYTNYFGRCNVAEHEKLILLAQLKPEKDSDEAVTYSLGKFGQRALDFYSIHVTKESTHPVKPLAQIAGNRYASSSPVGKALSDACMGTIASFLSKYQDIIIEHQKVVKGNQKRLESLRELAGKENLEYPSVTLPPQPHTKEGLDAYNEVIARVRMWVNLNLWQKLKLSRDDAKPLLRLKGFPSFPLVERQANEVDWWDMVCNVKKLINEKKEDGKVFWQNLAGYKRQEALRPYLSSEEDRKKGKKFARYQLGDLLLHLEKKHGEDWGKVYDEAWERIDKKVEGLSKHIKLEEERRSEDAQSKAALTDWLRAKASFVIEGLKEADKDEFCRCELKLQKWYGDLRGKPFAIEAENSILDISGFSKQYNCAFIWQKDGVKKLNLYLIINYFKGGKLRFKKIKPEAFEANRFYTVINKKSGEIVPMEVNFNFDDPNLIILPLAFGKRQGREFIWNDLLSLETGSLKLANGRVIEKTLYNRRTRQDEPALFVALTFERREVLDSSNIKPMNLIGVDRGENIPAVIALTDPEGCPLSRFKDSLGNPTHILRIGESYKEKQRTIQAKKEVEQRRAGGYSRKYASKAKNLADDMVRNTARDLLYYAVTQDAMLIFENLSRGFGRQGKRTFMAERQYTRMEDWLTAKLAYEGLPSKTYLSKTLAQYTSKTCSNCGFTITSADYDRVLEKLKKTATGWMTTINGKELKVEGQITYYNRYKRQNVVKDLSVELDRLSEESVNNDISSWTKGRSGEALSLLKKRFSHRPVQEKFVCLNCGFETHADEQAALNIARSWLFLRSQEYKKYQTNKTTGNTDKRAFVETWQSFYRKKLKEVWKPAV

SEQ ID NO: 30568 - protein, 979 aa, synthetic construct
  REGION 1..979: note = engineered CasX variant
QEIKRINKIRRRLVKDSNTKKAGKTGPMKTLLVRVMTPDLRERLENLRKKPENIPQPISNTSRANLNKLLTDYTEMKKAILHVYWEEFQKDPVGLMSRVAQPASKKIDQNKLKPEMDEKGNLTTAGFACSQCGQPLFVYKLEQVSEKGKAYTNYFGRCNVAEHEKLILLAQLKPEKDSDEAVTYSLGKFGQRALDFYSIHVTKESTHPVKPLAQIAGNRYASSTPVGKALSDACMGTIASFLSKYQDIIIEHQKVVKGNQKRLESLRELAGKENLEYPSVTLPPQPHTKEGLDAYNEVIARVRMWVNLNLWQKLKLSRDDAKPLLRLKGFPSFPLVERQANEVDWWDMVCNVKKLINEKKEDGKVFWQNLAGYKRQEALRPYLSSEEDRKKGKKFARYQLGDLLLHLEKKHGEDWGKVYDEAWERIDKKVEGLSKHIKLEEERRSEDAQSKAALTDWLRAKASFVIEGLKEADKDEFCRCELKLQKWYGDLRGKPFAIEAENSILDISGFSKQYNCAFIWQKDGVKKLNLYLIINYFKGGKLRFKKIKPEAFEANRFYTVINKKSGEIVPMEVNFNFDDPNLIILPLAFGKRQGREFIWNDLLSLETGSLKLANGRVIEKTLYNRRTRQDEPALFVALTFERREVLDSSNIKPMNLIGVDRGENIPAVIALTDPEGCPLSRFKDSLGNPTHILRIGESYKEKQRTIQAKKEVEQRRAGGYSRKYASKAKNLADDMVRNTARDLLYYAVTQDAMLIFENLSRGFGRQGKRTFMAERQYTRMEDWLTAKLAYEGLPSKTYLSKTLAQYTSKTCSNCGFTITSADYDRVLEKLKKTATGWMTTINGKELKVEGQITYYNRYKRQNVVKDLSVELDRLSEESVNNDISSWTKGRSGEALSLLKKRFSHRPVQEKFVCLNCGFETHADEQAALNIARSWLFLRSQEYKKYQTNKTTGNTDKRAFVETWQSFYRKKLKEVWKPAV

SEQ ID NO: 30569 - protein, 979 aa, synthetic construct
  REGION 1..979: note = engineered CasX variant
QEIKRINKIRRRLVKDSNTKKAGKTGPMKTLLVRVMTPDLRERLENLRKKPENIPQPISNTSRANLNKLLTDYTEMKKAILHVYWEEFQKDPVGLMSRVAQPASKKIDQNKLKPEMDEKGNLTTAGFACSQCGQPLFVYKLEQVSEKGKAYTNYFGRCNVAEHEKLILLAQLKPEKDSDEAVTYSLGKFGQRALDFYSIHVTKESTHPVKPLAQIAGNRYASSAPVGKALSDACMGTIASFLSKYQDIIIEHQKVVKGNQKRLESLRELAGKENLEYPSVTLPPQPHTKEGLDAYNEVIARVRMWVNLNLWQKLKLSRDDAKPLLRLKGFPSFPLVERQANEVDWWDMVCNVKKLINEKKEDGKVFWQNLAGYKRQEALRPYLSSEEDRKKGKKFARYQLGDLLLHLEKKHGEDWGKVYDEAWERIDKKVEGLSKHIKLEEERRSEDAQSKAALTDWLRAKASFVIEGLKEADKDEFCRCELKLQKWYGDLRGKPFAIEAENSILDISGFSKQYNCAFIWQKDGVKKLNLYLIINYFKGGKLRFKKIKPEAFEANRFYTVINKKSGEIVPMEVNFNFDDPNLIILPLAFGKRQGREFIWNDLLSLETGSLKLANGRVIEKTLYNRRTRQDEPALFVALTFERREVLDSSNIKPMNLIGVDRGENIPAVIALTDPEGCPLSRFKDSLGNPTHILRIGESYKEKQRTIQAKKEVEQRRAGGYSRKYASKAKNLADDMVRNTARDLLYYAVTQDAMLIFENLSRGFGRQGKRTFMAERQYTRMEDWLTAKLAYEGLPSKTYLSKTLAQYTSKTCSNCGFTITSADYDRVLEKLKKTATGWMTTINGKELKVEGQITYYNRYKRQNVVKDLSVELDRLSEESVNNDISSWTKGRSGEALSLLKKRFSHRPVQEKFVCLNCGFETHADEQAALNIARSWLFLRSQEYKKYQTNKTTGNTDKRAFVETWQSFYRKKLKEVWKPAV

SEQ ID NO: 30570 - protein, 979 aa, synthetic construct
  REGION 1..979: note = engineered CasX variant
QEIKRINKIRRRLVKDSNTKKAGKTGPMKTLLVRVMTPDLRERLENLRKKPENIPQPISNTSRANLNKLLTDYTEMKKAILHVYWEEFQKDPVGLMSRVAQPASKKIDQNKLKPEMDEKGNLTTAGFACSQCGQPLFVYKLEQVSEKGKAYTNYFGRCNVAEHEKLILLAQLKPEKDSDEAVTYSLGKFGQRALDFYSIHVTKESTHPVKPLAQIAGNRYASSVPVGKALSDACMGTIASFLSKYQDIIIEHQKVVKGNQKRLESLRELAGKENLEYPSVTLPPQPHTKEGLDAYNEVIARVRMWVNLNLWQKLKLSRDDAKPLLRLKGFPSFPLVERQANEVDWWDMVCNVKKLINEKKEDGKVFWQNLAGYKRQEALRPYLSSEEDRKKGKKFARYQLGDLLLHLEKKHGEDWGKVYDEAWERIDKKVEGLSKHIKLEEERRSEDAQSKAALTDWLRAKASFVIEGLKEADKDEFCRCELKLQKWYGDLRGKPFAIEAENSILDISGFSKQYNCAFIWQKDGVKKLNLYLIINYFKGGKLRFKKIKPEAFEANRFYTVINKKSGEIVPMEVNFNFDDPNLIILPLAFGKRQGREFIWNDLLSLETGSLKLANGRVIEKTLYNRRTRQDEPALFVALTFERREVLDSSNIKPMNLIGVDRGENIPAVIALTDPEGCPLSRFKDSLGNPTHILRIGESYKEKQRTIQAKKEVEQRRAGGYSRKYASKAKNLADDMVRNTARDLLYYAVTQDAMLIFENLSRGFGRQGKRTFMAERQYTRMEDWLTAKLAYEGLPSKTYLSKTLAQYTSKTCSNCGFTITSADYDRVLEKLKKTATGWMTTINGKELKVEGQITYYNRYKRQNVVKDLSVELDRLSEESVNNDISSWTKGRSGEALSLLKKRFSHRPVQEKFVCLNCGFETHADEQAALNIARSWLFLRSQEYKKYQTNKTTGNTDKRAFVETWQSFYRKKLKEVWKPAV

SEQ ID NO: 30571 - protein, 978 aa, synthetic construct
  REGION 1..978: note = engineered CasX variant
QEIKRINKIRRRLVKDSNTKKAGKTGPMKTLLVRVMTPDLRERLENLRKKPENIPQPISNTSRANLNKLLTDYTEMKKAILHVYWEEFQKDPVGLMSRVAQPASKKIDQNKLKPEMDEKGNLTTAGFACSQCGQPLFVYKLEQVSEKGKAYTNYFGRCNVAEHEKLIKLAQLKPEKDSDEAVTYSLGKFGQRALDFYSIHVTKESTHPVKPLAQIAGNRYASSPVGKALSDACMGTIASFLSKYQDIIIEHQKVVKGNQKRLESLRELAGKENLEYPSVTLPPQPHTKEGLDAYNEVIARVRMWVNLNLWQKLKLSRDDAKPLLRLKGFPSFPLVERQANEVDWWDMVCNVKKLINEKKEDGKVFWQNLAGYKRQEALRPYLSSEEDRKKGKKFARYQLGDLLLHLEKKHGEDWGKVYDEAWERIDKKVEGLSKHIKLEEERRSEDAQSKAALTDWLRAKASFVIEGLKEADKDEFCRCELKLQKWYGDLRGKPFAIEAENSILDISGFSKQYNCAFIWQKDGVKKLNLYLIINYFKGGKLRFKKIKPEAFEANRFYTVINKKSGEIVPMEVNFNFDDPNLIILPLAFGKRQGREFIWNDLLSLETGSLKLANGRVIEKTLYNRRTRQDEPALFVALTFERREVLDSSNIKPMNLIGVDRGENIPAVIALTDPEGCPLSRFKDSLGNPTHILRIGESYKEKQRTIQAKKEVEQRRAGGYSRKYASKAKNLADDMVRNTARDLLYYAVTQDAMLIFENLSRGFGRQGKRTFMAERQYTRMEDWLTAKLAYEGLPSKTYLSKTLAQYTSKTCSNCGFTITSADYDRVLEKLKKTATGWMTTINGKELKVEGQITYYNRYKRQNVVKDLSVELDRLSEESVNNDISSWTKGRSGEALSLLKKRFSHRPVQEKFVCLNCGFETHADEQAALNIARSWLFLRSQEYKKYQTNKTTGNTDKRAFVETWQSFYRKKLKEVWKPAV

SEQ ID NO: 30572 - protein, 979 aa, synthetic construct
  REGION 1..979: note = engineered CasX variant
QEIKRINKIRRRLVKDSNTKKAGKTGPMKTLLVRVMTPDLRERLENLRKKPENIPQPISNTSRANLNKLLTDYTEMKKAILHVYWEEFQKDPVGLMSRVAQPASKKIDQNKLKPEMDEKGNLTTAGFACSQCGQPLFVYKLEQVSEKGKAYTNYFGRCNVAEHEKLILLAQLKPEKDSDEAVTYSLGKFGQRALDFYSIHVTKESTHPVKPLAQIAGNRYASSYPVGKALSDACMGTIASFLSKYQDIIIEHQKVVKGNQKRLESLRELAGKENLEYPSVTLPPQPHTKEGVDAYNEVIARVRTWVNLNLWQKLKLSRDDAKPLLRLKGFPSFPLVERQANEVDWWDMVCNVKKLINEKKEDGKVFWQNLAGYKRQEALRPYLSSEEDRKKGKKFARYQLGDLLLHLEKKHGEDWGKVYDEAWERIDKKVEGLSKHIKLEEERRSEDAQSKAALTDWLRAKASFVIEGLKEADKDEFCRCELKLQKWYGDLRGKPFAIEAENSILDISGFSKQYNCAFIWQKDGVKKLNLYLIINYFKGGKLRFKKIKPEAFEANRFYTVINKKSGEIVPMEVNFNFDDPNLIILPLAFGKRQGREFIWNDLLSLETGSLKLANGRVIEKTLYNRRTRQDEPALFVALTFERREVLDSSNIKPMNLIGVDRGENIPAVIALTDPEGCPLSRFKDSLGNPTHILRIGESYKEKQRTIQAKKEVEQRRAGGYSRKYASKAKNLADDMVRNTARDLLYYAVTQDAMLIFENLSRGFGRQGKRTFMAERQYTRMEDWLTAKLAYEGLPSKTYLSKTLAQYTSKTCSNCGFTITSADYDRVLEKLKKTATGWMTTINGKELKVEGQITYYNRYKRQNVVKDLSVELDRLSEESVNNDISSWTKGRSGEALSLLKKRFSHRPVQEKFVCLNCGFETHADEQAALNIARSWLFLRSQEYKKYQTNKTTGNTDKRAFVETWQSFYRKKLKEVWKPAV

SEQ ID NO: 30573 - protein, 979 aa, synthetic construct
  REGION 1..979: note = engineered CasX variant
QEIKRINKIRRRLVKDSNTKKAGKTGPMKTLLVRVMTPDLRERLENLRKKPENIPQPISNTSRANLNKLLTDYTEMKKAILHVYWEEFQKDPVGLMSRVAQPASKKIDQNKLKPEMDEKGNLTTAGFACSQCGQPLFVYKLEQVSEKGKAYTNYFGRCNVAEHEKLILLAQLKPEKDSDEAVTYSLGKFGQRALDFYSIHVTKESTHPVKPLAQIAGNRYASSHPVGKALSDACMGTIASFLSKYQDIIIEHQKVVKGNQKRLESLRELAGKENLEYPSVTLPPQPHTKEGVDAYNEVIARVRTWVNLNLWQKLKLSRDDAKPLLRLKGFPSFPLVERQANEVDWWDMVCNVKKLINEKKEDGKVFWQNLAGYKRQEALRPYLSSEEDRKKGKKFARYQLGDLLLHLEKKHGEDWGKVYDEAWERIDKKVEGLSKHIKLEEERRSEDAQSKAALTDWLRAKASFVIEGLKEADKDEFCRCELKLQKWYGDLRGKPFAIEAENSILDISGFSKQYNCAFIWQKDGVKKLNLYLIINYFKGGKLRFKKIKPEAFEANRFYTVINKKSGEIVPMEVNFNFDDPNLIILPLAFGKRQGREFIWNDLLSLETGSLKLANGRVIEKTLYNRRTRQDEPALFVALTFERREVLDSSNIKPMNLIGVDRGENIPAVIALTDPEGCPLSRFKDSLGNPTHILRIGESYKEKQRTIQAKKEVEQRRAGGYSRKYASKAKNLADDMVRNTARDLLYYAVTQDAMLIFENLSRGFGRQGKRTFMAERQYTRMEDWLTAKLAYEGLPSKTYLSKTLAQYTSKTCSNCGFTITSADYDRVLEKLKKTATGWMTTINGKELKVEGQITYYNRYKRQNVVKDLSVELDRLSEESVNNDISSWTKGRSGEALSLLKKRFSHRPVQEKFVCLNCGFETHADEQAALNIARSWLFLRSQEYKKYQTNKTTGNTDKRAFVETWQSFYRKKLKEVWKPAV

SEQ ID NO: 30574 - protein, 979 aa, synthetic construct
  REGION 1..979: note = engineered CasX variant
QEIKRINKIRRRLVKDSNTKKAGKTGPMKTLLVRVMTPDLRERLENLRKKPENIPQPISNTSRANLNKLLTDYTEMKKAILHVYWEEFQKDPVGLMSRVAQPASKKIDQNKLKPEMDEKGNLTTAGFACSQCGQPLFVYKLEQVSEKGKAYTNYFGRCNVAEHEKLILLAQLKPEKDSDEAVTYSLGKFGQRALDFYSIHVTKESTHPVKPLAQIAGNRYASSSPVGKALSDACMGTIASFLSKYQDIIIEHQKVVKGNQKRLESLRELAGKENLEYPSVTLPPQPHTKEGVDAYNEVIARVRTWVNLNLWQKLKLSRDDAKPLLRLKGFPSFPLVERQANEVDWWDMVCNVKKLINEKKEDGKVFWQNLAGYKRQEALRPYLSSEEDRKKGKKFARYQLGDLLLHLEKKHGEDWGKVYDEAWERIDKKVEGLSKHIKLEEERRSEDAQSKAALTDWLRAKASFVIEGLKEADKDEFCRCELKLQKWYGDLRGKPFAIEAENSILDISGFSKQYNCAFIWQKDGVKKLNLYLIINYFKGGKLRFKKIKPEAFEANRFYTVINKKSGEIVPMEVNFNFDDPNLIILPLAFGKRQGREFIWNDLLSLETGSLKLANGRVIEKTLYNRRTRQDEPALFVALTFERREVLDSSNIKPMNLIGVDRGENIPAVIALTDPEGCPLSRFKDSLGNPTHILRIGESYKEKQRTIQAKKEVEQRRAGGYSRKYASKAKNLADDMVRNTARDLLYYAVTQDAMLIFENLSRGFGRQGKRTFMAERQYTRMEDWLTAKLAYEGLPSKTYLSKTLAQYTSKTCSNCGFTITSADYDRVLEKLKKTATGWMTTINGKELKVEGQITYYNRYKRQNVVKDLSVELDRLSEESVNNDISSWTKGRSGEALSLLKKRFSHRPVQEKFVCLNCGFETHADEQAALNIARSWLFLRSQEYKKYQTNKTTGNTDKRAFVETWQSFYRKKLKEVWKPAV

SEQ ID NO: 30575 - protein, 979 aa, synthetic construct
  REGION 1..979: note = engineered CasX variant
QEIKRINKIRRRLVKDSNTKKAGKTGPMKTLLVRVMTPDLRERLENLRKKPENIPQPISNTSRANLNKLLTDYTEMKKAILHVYWEEFQKDPVGLMSRVAQPASKKIDQNKLKPEMDEKGNLTTAGFACSQCGQPLFVYKLEQVSEKGKAYTNYFGRCNVAEHEKLILLAQLKPEKDSDEAVTYSLGKFGQRALDFYSIHVTKESTHPVKPLAQIAGNRYASSTPVGKALSDACMGTIASFLSKYQDIIIEHQKVVKGNQKRLESLRELAGKENLEYPSVTLPPQPHTKEGVDAYNEVIARVRTWVNLNLWQKLKLSRDDAKPLLRLKGFPSFPLVERQANEVDWWDMVCNVKKLINEKKEDGKVFWQNLAGYKRQEALRPYLSSEEDRKKGKKFARYQLGDLLLHLEKKHGEDWGKVYDEAWERIDKKVEGLSKHIKLEEERRSEDAQSKAALTDWLRAKASFVIEGLKEADKDEFCRCELKLQKWYGDLRGKPFAIEAENSILDISGFSKQYNCAFIWQKDGVKKLNLYLIINYFKGGKLRFKKIKPEAFEANRFYTVINKKSGEIVPMEVNFNFDDPNLIILPLAFGKRQGREFIWNDLLSLETGSLKLANGRVIEKTLYNRRTRQDEPALFVALTFERREVLDSSNIKPMNLIGVDRGENIPAVIALTDPEGCPLSRFKDSLGNPTHILRIGESYKEKQRTIQAKKEVEQRRAGGYSRKYASKAKNLADDMVRNTARDLLYYAVTQDAMLIFENLSRGFGRQGKRTFMAERQYTRMEDWLTAKLAYEGLPSKTYLSKTLAQYTSKTCSNCGFTITSADYDRVLEKLKKTATGWMTTINGKELKVEGQITYYNRYKRQNVVKDLSVELDRLSEESVNNDISSWTKGRSGEALSLLKKRFSHRPVQEKFVCLNCGFETHADEQAALNIARSWLFLRSQEYKKYQTNKTTGNTDKRAFVETWQSFYRKKLKEVWKPAV

SEQ ID NO: 30576 - protein, 979 aa, synthetic construct
  REGION 1..979: note = engineered CasX variant
QEIKRINKIRRRLVKDSNTKKAGKTGPMKTLLVRVMTPDLRERLENLRKKPENIPQPISNTSRANLNKLLTDYTEMKKAILHVYWEEFQKDPVGLMSRVAQPASKKIDQNKLKPEMDEKGNLTTAGFACSQCGQPLFVYKLEQVSEKGKAYTNYFGRCNVAEHEKLILLAQLKPEKDSDEAVTYSLGKFGQRALDFYSIHVTKESTHPVKPLAQIAGNRYASSAPVGKALSDACMGTIASFLSKYQDIIIEHQKVVKGNQKRLESLRELAGKENLEYPSVTLPPQPHTKEGVDAYNEVIARVRTWVNLNLWQKLKLSRDDAKPLLRLKGFPSFPLVERQANEVDWWDMVCNVKKLINEKKEDGKVFWQNLAGYKRQEALRPYLSSEEDRKKGKKFARYQLGDLLLHLEKKHGEDWGKVYDEAWERIDKKVEGLSKHIKLEEERRSEDAQSKAALTDWLRAKASFVIEGLKEADKDEFCRCELKLQKWYGDLRGKPFAIEAENSILDISGFSKQYNCAFIWQKDGVKKLNLYLIINYFKGGKLRFKKIKPEAFEANRFYTVINKKSGEIVPMEVNFNFDDPNLIILPLAFGKRQGREFIWNDLLSLETGSLKLANGRVIEKTLYNRRTRQDEPALFVALTFERREVLDSSNIKPMNLIGVDRGENIPAVIALTDPEGCPLSRFKDSLGNPTHILRIGESYKEKQRTIQAKKEVEQRRAGGYSRKYASKAKNLADDMVRNTARDLLYYAVTQDAMLIFENLSRGFGRQGKRTFMAERQYTRMEDWLTAKLAYEGLPSKTYLSKTLAQYTSKTCSNCGFTITSADYDRVLEKLKKTATGWMTTINGKELKVEGQITYYNRYKRQNVVKDLSVELDRLSEESVNNDISSWTKGRSGEALSLLKKRFSHRPVQEKFVCLNCGFETHADEQAALNIARSWLFLRSQEYKKYQTNKTTGNTDKRAFVETWQSFYRKKLKEVWKPAV

SEQ ID NO: 30577 - protein, 979 aa, synthetic construct
  REGION 1..979: note = engineered CasX variant
QEIKRINKIRRRLVKDSNTKKAGKTGPMKTLLVRVMTPDLRERLENLRKKPENIPQPISNTSRANLNKLLTDYTEMKKAILHVYWEEFQKDPVGLMSRVAQPASKKIDQNKLKPEMDEKGNLTTAGFACSQCGQPLFVYKLEQVSEKGKAYTNYFGRCNVAEHEKLILLAQLKPEKDSDEAVTYSLGKFGQRALDFYSIHVTKESTHPVKPLAQIAGNRYASSVPVGKALSDACMGTIASFLSKYQDIIIEHQKVVKGNQKRLESLRELAGKENLEYPSVTLPPQPHTKEGVDAYNEVIARVRTWVNLNLWQKLKLSRDDAKPLLRLKGFPSFPLVERQANEVDWWDMVCNVKKLINEKKEDGKVFWQNLAGYKRQEALRPYLSSEEDRKKGKKFARYQLGDLLLHLEKKHGEDWGKVYDEAWERIDKKVEGLSKHIKLEEERRSEDAQSKAALTDWLRAKASFVIEGLKEADKDEFCRCELKLQKWYGDLRGKPFAIEAENSILDISGFSKQYNCAFIWQKDGVKKLNLYLIINYFKGGKLRFKKIKPEAFEANRFYTVINKKSGEIVPMEVNFNFDDPNLIILPLAFGKRQGREFIWNDLLSLETGSLKLANGRVIEKTLYNRRTRQDEPALFVALTFERREVLDSSNIKPMNLIGVDRGENIPAVIALTDPEGCPLSRFKDSLGNPTHILRIGESYKEKQRTIQAKKEVEQRRAGGYSRKYASKAKNLADDMVRNTARDLLYYAVTQDAMLIFENLSRGFGRQGKRTFMAERQYTRMEDWLTAKLAYEGLPSKTYLSKTLAQYTSKTCSNCGFTITSADYDRVLEKLKKTATGWMTTINGKELKVEGQITYYNRYKRQNVVKDLSVELDRLSEESVNNDISSWTKGRSGEALSLLKKRFSHRPVQEKFVCLNCGFETHADEQAALNIARSWLFLRSQEYKKYQTNKTTGNTDKRAFVETWQSFYRKKLKEVWKPAV

SEQ ID NO: 30578 - protein, 978 aa, synthetic construct
  REGION 1..978: note = engineered CasX variant
QEIKRINKIRRRLVKDSNTKKAGKTGPMKTLLVRVMTPDLRERLENLRKKPENIPQPISNTSRANLNKLLTDYTEMKKAILHVYWEEFQKDPVGLMSRVAQPASKKIDQNKLKPEMDEKGNLTTAGFACSQCGQPLFVYKLEQVSEKGKAYTNYFGRCNVAEHEKLIKLAQLKPEKDSDEAVTYSLGKFGQRALDFYSIHVTKESTHPVKPLAQIAGNRYASSPVGKALSDACMGTIASFLSKYQDIIIEHQKVVKGNQKRLESLRELAGKENLEYPSVTLPPQPHTKEGVDAYNEVIARVRTWVNLNLWQKLKLSRDDAKPLLRLKGFPSFPLVERQANEVDWWDMVCNVKKLINEKKEDGKVFWQNLAGYKRQEALRPYLSSEEDRKKGKKFARYQLGDLLLHLEKKHGEDWGKVYDEAWERIDKKVEGLSKHIKLEEERRSEDAQSKAALTDWLRAKASFVIEGLKEADKDEFCRCELKLQKWYGDLRGKPFAIEAENSILDISGFSKQYNCAFIWQKDGVKKLNLYLIINYFKGGKLRFKKIKPEAFEANRFYTVINKKSGEIVPMEVNFNFDDPNLIILPLAFGKRQGREFIWNDLLSLETGSLKLANGRVIEKTLYNRRTRQDEPALFVALTFERREVLDSSNIKPMNLIGVDRGENIPAVIALTDPEGCPLSRFKDSLGNPTHILRIGESYKEKQRTIQAKKEVEQRRAGGYSRKYASKAKNLADDMVRNTARDLLYYAVTQDAMLIFENLSRGFGRQGKRTFMAERQYTRMEDWLTAKLAYEGLPSKTYLSKTLAQYTSKTCSNCGFTITSADYDRVLEKLKKTATGWMTTINGKELKVEGQITYYNRYKRQNVVKDLSVELDRLSEESVNNDISSWTKGRSGEALSLLKKRFSHRPVQEKFVCLNCGFETHADEQAALNIARSWLFLRSQEYKKYQTNKTTGNTDKRAFVETWQSFYRKKLKEVWKPAV

SEQ ID NO: 30579 - protein, 979 aa, synthetic construct
  REGION 1..979: note = engineered CasX variant
QEIKRINKIRRRLVKDSNTKKAGKTGPMKTLLVRVMTPDLRERLENLRKKPENIPQPISNTSRANLNKLLTDYTEMKKAILHVYWEEFQKDPVGLMSRVAQPASKKIDQNKLKPEMDEKGNLTTAGFACSQCGQPLFVYKLEQVSEKGKAYTNYFGRCNVAEHEKLILLAQLKPEKDSDEAVTYSLGKFGQRALDFYSIHVTKESTHPVKPLAQIAGNRYASSYPVGKALSDACMGTIASFLSKYQDIIIEHQKVVKGNQKRLESLRELAGKENLEYPSVTLPPQPHTKEGVDAYNEVIARVRWWVNLNLWQKLKLSRDDAKPLLRLKGFPSFPLVERQANEVDWWDMVCNVKKLINEKKEDGKVFWQNLAGYKRQEALRPYLSSEEDRKKGKKFARYQLGDLLLHLEKKHGEDWGKVYDEAWERIDKKVEGLSKHIKLEEERRSEDAQSKAALTDWLRAKASFVIEGLKEADKDEFCRCELKLQKWYGDLRGKPFAIEAENSILDISGFSKQYNCAFIWQKDGVKKLNLYLIINYFKGGKLRFKKIKPEAFEANRFYTVINKKSGEIVPMEVNFNFDDPNLIILPLAFGKRQGREFIWNDLLSLETGSLKLANGRVIEKTLYNRRTRQDEPALFVALTFERREVLDSSNIKPMNLIGVDRGENIPAVIALTDPEGCPLSRFKDSLGNPTHILRIGESYKEKQRTIQAKKEVEQRRAGGYSRKYASKAKNLADDMVRNTARDLLYYAVTQDAMLIFENLSRGFGRQGKRTFMAERQYTRMEDWLTAKLAYEGLPSKTYLSKTLAQYTSKTCSNCGFTITSADYDRVLEKLKKTATGWMTTINGKELKVEGQITYYNRYKRQNVVKDLSVELDRLSEESVNNDISSWTKGRSGEALSLLKKRFSHRPVQEKFVCLNCGFETHADEQAALNIARSWLFLRSQEYKKYQTNKTTGNTDKRAFVETWQSFYRKKLKEVWKPAV

SEQ ID NO: 30580 - protein, 979 aa, synthetic construct
  REGION 1..979: note = engineered CasX variant
QEIKRINKIRRRLVKDSNTKKAGKTGPMKTLLVRVMTPDLRERLENLRKKPENIPQPISNTSRANLNKLLTDYTEMKKAILHVYWEEFQKDPVGLMSRVAQPASKKIDQNKLKPEMDEKGNLTTAGFACSQCGQPLFVYKLEQVSEKGKAYTNYFGRCNVAEHEKLILLAQLKPEKDSDEAVTYSLGKFGQRALDFYSIHVTKESTHPVKPLAQIAGNRYASSHPVGKALSDACMGTIASFLSKYQDIIIEHQKVVKGNQKRLESLRELAGKENLEYPSVTLPPQPHTKEGVDAYNEVIARVRWWVNLNLWQKLKLSRDDAKPLLRLKGFPSFPLVERQANEVDWWDMVCNVKKLINEKKEDGKVFWQNLAGYKRQEALRPYLSSEEDRKKGKKFARYQLGDLLLHLEKKHGEDWGKVYDEAWERIDKKVEGLSKHIKLEEERRSEDAQSKAALTDWLRAKASFVIEGLKEADKDEFCRCELKLQKWYGDLRGKPFAIEAENSILDISGFSKQYNCAFIWQKDGVKKLNLYLIINYFKGGKLRFKKIKPEAFEANRFYTVINKKSGEIVPMEVNFNFDDPNLIILPLAFGKRQGREFIWNDLLSLETGSLKLANGRVIEKTLYNRRTRQDEPALFVALTFERREVLDSSNIKPMNLIGVDRGENIPAVIALTDPEGCPLSRFKDSLGNPTHILRIGESYKEKQRTIQAKKEVEQRRAGGYSRKYASKAKNLADDMVRNTARDLLYYAVTQDAMLIFENLSRGFGRQGKRTFMAERQYTRMEDWLTAKLAYEGLPSKTYLSKTLAQYTSKTCSNCGFTITSADYDRVLEKLKKTATGWMTTINGKELKVEGQITYYNRYKRQNVVKDLSVELDRLSEESVNNDISSWTKGRSGEALSLLKKRFSHRPVQEKFVCLNCGFETHADEQAALNIARSWLFLRSQEYKKYQTNKTTGNTDKRAFVETWQSFYRKKLKEVWKPAV

SEQ ID NO: 30581 - protein, 979 aa, synthetic construct
  REGION 1..979: note = engineered CasX variant
QEIKRINKIRRRLVKDSNTKKAGKTGPMKTLLVRVMTPDLRERLENLRKKPENIPQPISNTSRANLNKLLTDYTEMKKAILHVYWEEFQKDPVGLMSRVAQPASKKIDQNKLKPEMDEKGNLTTAGFACSQCGQPLFVYKLEQVSEKGKAYTNYFGRCNVAEHEKLILLAQLKPEKDSDEAVTYSLGKFGQRALDFYSIHVTKESTHPVKPLAQIAGNRYASSSPVGKALSDACMGTIASFLSKYQDIIIEHQKVVKGNQKRLESLRELAGKENLEYPSVTLPPQPHTKEGVDAYNEVIARVRWWVNLNLWQKLKLSRDDAKPLLRLKGFPSFPLVERQANEVDWWDMVCNVKKLINEKKEDGKVFWQNLAGYKRQEALRPYLSSEEDRKKGKKFARYQLGDLLLHLEKKHGEDWGKVYDEAWERIDKKVEGLSKHIKLEEERRSEDAQSKAALTDWLRAKASFVIEGLKEADKDEFCRCELKLQKWYGDLRGKPFAIEAENSILDISGFSKQYNCAFIWQKDGVKKLNLYLIINYFKGGKLRFKKIKPEAFEANRFYTVINKKSGEIVPMEVNFNFDDPNLIILPLAFGKRQGREFIWNDLLSLETGSLKLANGRVIEKTLYNRRTRQDEPALFVALTFERREVLDSSNIKPMNLIGVDRGENIPAVIALTDPEGCPLSRFKDSLGNPTHILRIGESYKEKQRTIQAKKEVEQRRAGGYSRKYASKAKNLADDMVRNTARDLLYYAVTQDAMLIFENLSRGFGRQGKRTFMAERQYTRMEDWLTAKLAYEGLPSKTYLSKTLAQYTSKTCSNCGFTITSADYDRVLEKLKKTATGWMTTINGKELKVEGQITYYNRYKRQNVVKDLSVELDRLSEESVNNDISSWTKGRSGEALSLLKKRFSHRPVQEKFVCLNCGFETHADEQAALNIARSWLFLRSQEYKKYQTNKTTGNTDKRAFVETWQSFYRKKLKEVWKPAV

SEQ ID NO: 30582 - protein, 979 aa, synthetic construct
  REGION 1..979: note = engineered CasX variant
QEIKRINKIRRRLVKDSNTKKAGKTGPMKTLLVRVMTPDLRERLENLRKKPENIPQPISNTSRANLNKLLTDYTEMKKAILHVYWEEFQKDPVGLMSRVAQPASKKIDQNKLKPEMDEKGNLTTAGFACSQCGQPLFVYKLEQVSEKGKAYTNYFGRCNVAEHEKLILLAQLKPEKDSDEAVTYSLGKFGQRALDFYSIHVTKESTHPVKPLAQIAGNRYASSTPVGKALSDACMGTIASFLSKYQDIIIEHQKVVKGNQKRLESLRELAGKENLEYPSVTLPPQPHTKEGVDAYNEVIARVRWWVNLNLWQKLKLSRDDAKPLLRLKGFPSFPLVERQANEVDWWDMVCNVKKLINEKKEDGKVFWQNLAGYKRQEALRPYLSSEEDRKKGKKFARYQLGDLLLHLEKKHGEDWGKVYDEAWERIDKKVEGLSKHIKLEEERRSEDAQSKAALTDWLRAKASFVIEGLKEADKDEFCRCELKLQKWYGDLRGKPFAIEAENSILDISGFSKQYNCAFIWQKDGVKKLNLYLIINYFKGGKLRFKKIKPEAFEANRFYTVINKKSGEIVPMEVNFNFDDPNLIILPLAFGKRQGREFIWNDLLSLETGSLKLANGRVIEKTLYNRRTRQDEPALFVALTFERREVLDSSNIKPMNLIGVDRGENIPAVIALTDPEGCPLSRFKDSLGNPTHILRIGESYKEKQRTIQAKKEVEQRRAGGYSRKYASKAKNLADDMVRNTARDLLYYAVTQDAMLIFENLSRGFGRQGKRTFMAERQYTRMEDWLTAKLAYEGLPSKTYLSKTLAQYTSKTCSNCGFTITSADYDRVLEKLKKTATGWMTTINGKELKVEGQITYYNRYKRQNVVKDLSVELDRLSEESVNNDISSWTKGRSGEALSLLKKRFSHRPVQEKFVCLNCGFETHADEQAALNIARSWLFLRSQEYKKYQTNKTTGNTDKRAFVETWQSFYRKKLKEVWKPAV

SEQ ID NO: 30583 - protein, 979 aa, synthetic construct
  REGION 1..979: note = engineered CasX variant
QEIKRINKIRRRLVKDSNTKKAGKTGPMKTLLVRVMTPDLRERLENLRKKPENIPQPISNTSRANLNKLLTDYTEMKKAILHVYWEEFQKDPVGLMSRVAQPASKKIDQNKLKPEMDEKGNLTTAGFACSQCGQPLFVYKLEQVSEKGKAYTNYFGRCNVAEHEKLILLAQLKPEKDSDEAVTYSLGKFGQRALDFYSIHVTKESTHPVKPLAQIAGNRYASSAPVGKALSDACMGTIASFLSKYQDIIIEHQKVVKGNQKRLESLRELAGKENLEYPSVTLPPQPHTKEGVDAYNEVIARVRWWVNLNLWQKLKLSRDDAKPLLRLKGFPSFPLVERQANEVDWWDMVCNVKKLINEKKEDGKVFWQNLAGYKRQEALRPYLSSEEDRKKGKKFARYQLGDLLLHLEKKHGEDWGKVYDEAWERIDKKVEGLSKHIKLEEERRSEDAQSKAALTDWLRAKASFVIEGLKEADKDEFCRCELKLQKWYGDLRGKPFAIEAENSILDISGFSKQYNCAFIWQKDGVKKLNLYLIINYFKGGKLRFKKIKPEAFEANRFYTVINKKSGEIVPMEVNFNFDDPNLIILPLAFGKRQGREFIWNDLLSLETGSLKLANGRVIEKTLYNRRTRQDEPALFVALTFERREVLDSSNIKPMNLIGVDRGENIPAVIALTDPEGCPLSRFKDSLGNPTHILRIGESYKEKQRTIQAKKEVEQRRAGGYSRKYASKAKNLADDMVRNTARDLLYYAVTQDAMLIFENLSRGFGRQGKRTFMAERQYTRMEDWLTAKLAYEGLPSKTYLSKTLAQYTSKTCSNCGFTITSADYDRVLEKLKKTATGWMTTINGKELKVEGQITYYNRYKRQNVVKDLSVELDRLSEESVNNDISSWTKGRSGEALSLLKKRFSHRPVQEKFVCLNCGFETHADEQAALNIARSWLFLRSQEYKKYQTNKTTGNTDKRAFVETWQSFYRKKLKEVWKPAV

SEQ ID NO: 30584 - protein, 979 aa, synthetic construct
  REGION 1..979: note = engineered CasX variant
QEIKRINKIRRRLVKDSNTKKAGKTGPMKTLLVRVMTPDLRERLENLRKKPENIPQPISNTSRANLNKLLTDYTEMKKAILHVYWEEFQKDPVGLMSRVAQPASKKIDQNKLKPEMDEKGNLTTAGFACSQCGQPLFVYKLEQVSEKGKAYTNYFGRCNVAEHEKLILLAQLKPEKDSDEAVTYSLGKFGQRALDFYSIHVTKESTHPVKPLAQIAGNRYASSVPVGKALSDACMGTIASFLSKYQDIIIEHQKVVKGNQKRLESLRELAGKENLEYPSVTLPPQPHTKEGVDAYNEVIARVRWWVNLNLWQKLKLSRDDAKPLLRLKGFPSFPLVERQANEVDWWDMVCNVKKLINEKKEDGKVFWQNLAGYKRQEALRPYLSSEEDRKKGKKFARYQLGDLLLHLEKKHGEDWGKVYDEAWERIDKKVEGLSKHIKLEEERRSEDAQSKAALTDWLRAKASFVIEGLKEADKDEFCRCELKLQKWYGDLRGKPFAIEAENSILDISGFSKQYNCAFIWQKDGVKKLNLYLIINYFKGGKLRFKKIKPEAFEANRFYTVINKKSGEIVPMEVNFNFDDPNLIILPLAFGKRQGREFIWNDLLSLETGSLKLANGRVIEKTLYNRRTRQDEPALFVALTFERREVLDSSNIKPMNLIGVDRGENIPAVIALTDPEGCPLSRFKDSLGNPTHILRIGESYKEKQRTIQAKKEVEQRRAGGYSRKYASKAKNLADDMVRNTARDLLYYAVTQDAMLIFENLSRGFGRQGKRTFMAERQYTRMEDWLTAKLAYEGLPSKTYLSKTLAQYTSKTCSNCGFTITSADYDRVLEKLKKTATGWMTTINGKELKVEGQITYYNRYKRQNVVKDLSVELDRLSEESVNNDISSWTKGRSGEALSLLKKRFSHRPVQEKFVCLNCGFETHADEQAALNIARSWLFLRSQEYKKYQTNKTTGNTDKRAFVETWQSFYRKKLKEVWKPAV

SEQ ID NO: 30585 - protein, 978 aa, synthetic construct
  REGION 1..978: note = engineered CasX variant
QEIKRINKIRRRLVKDSNTKKAGKTGPMKTLLVRVMTPDLRERLENLRKKPENIPQPISNTSRANLNKLLTDYTEMKKAILHVYWEEFQKDPVGLMSRVAQPASKKIDQNKLKPEMDEKGNLTTAGFACSQCGQPLFVYKLEQVSEKGKAYTNYFGRCNVAEHEKLIKLAQLKPEKDSDEAVTYSLGKFGQRALDFYSIHVTKESTHPVKPLAQIAGNRYASSPVGKALSDACMGTIASFLSKYQDIIIEHQKVVKGNQKRLESLRELAGKENLEYPSVTLPPQPHTKEGVDAYNEVIARVRWWVNLNLWQKLKLSRDDAKPLLRLKGFPSFPLVERQANEVDWWDMVCNVKKLINEKKEDGKVFWQNLAGYKRQEALRPYLSSEEDRKKGKKFARYQLGDLLLHLEKKHGEDWGKVYDEAWERIDKKVEGLSKHIKLEEERRSEDAQSKAALTDWLRAKASFVIEGLKEADKDEFCRCELKLQKWYGDLRGKPFAIEAENSILDISGFSKQYNCAFIWQKDGVKKLNLYLIINYFKGGKLRFKKIKPEAFEANRFYTVINKKSGEIVPMEVNFNFDDPNLIILPLAFGKRQGREFIWNDLLSLETGSLKLANGRVIEKTLYNRRTRQDEPALFVALTFERREVLDSSNIKPMNLIGVDRGENIPAVIALTDPEGCPLSRFKDSLGNPTHILRIGESYKEKQRTIQAKKEVEQRRAGGYSRKYASKAKNLADDMVRNTARDLLYYAVTQDAMLIFENLSRGFGRQGKRTFMAERQYTRMEDWLTAKLAYEGLPSKTYLSKTLAQYTSKTCSNCGFTITSADYDRVLEKLKKTATGWMTTINGKELKVEGQITYYNRYKRQNVVKDLSVELDRLSEESVNNDISSWTKGRSGEALSLLKKRFSHRPVQEKFVCLNCGFETHADEQAALNIARSWLFLRSQEYKKYQTNKTTGNTDKRAFVETWQSFYRKKLKEVWKPAV

SEQ ID NO: 30586 - protein, 980 aa, synthetic construct
  REGION 1..980: note = engineered CasX variant
QEIKRINKIRRRLVKDSNTKKAGKTGPMKTLLVRVMTPDLRERLENLRKKPENIPQPISNTSRANLNKLLTDYTEMKKAILHVYWEEFQKDPVGLMSRVAQPASKKIDQNKLKPEMDEKGNLTTAGFACSQCGQPLFVYKLEQVSEKGKAYTNYFGRCNVAEHEKLILLAQLKPEKDSDEAVTYSLGKFGQRALDFYSIHVTKESTHPVKPLAQIAGNRYASSYPVGKALSDACMGTIASFLSKYQDIIIEHQKVVKGNQKRLESLRELAGKENLEYPSVTLPPQPHTKEGVDAYNEVIARVRMWVNLNLWQKLKLSRDDAKPLLRLKGFPSFPLVERQQANEVDWWDMVCNVKKLINEKKEDGKVFWQNLAGYKRQEALRPYLSSEEDRKKGKKFARYQLGDLLLHLEKKHGEDWGKVYDEAWERIDKKVEGLSKHIKLEEERRSEDAQSKAALTDWLRAKASFVIEGLKEADKDEFCRCELKLQKWYGDLRGKPFAIEAENSILDISGFSKQYNCAFIWQKDGVKKLNLYLIINYFKGGKLRFKKIKPEAFEANRFYTVINKKSGEIVPMEVNFNFDDPNLIILPLAFGKRQGREFIWNDLLSLETGSLKLANGRVIEKTLYNRRTRQDEPALFVALTFERREVLDSSNIKPMNLIGVDRGENIPAVIALTDPEGCPLSRFKDSLGNPTHILRIGESYKEKQRTIQAKKEVEQRRAGGYSRKYASKAKNLADDMVRNTARDLLYYAVTQDAMLIFENLSRGFGRQGKRTFMAERQYTRMEDWLTAKLAYEGLPSKTYLSKTLAQYTSKTCSNCGFTITSADYDRVLEKLKKTATGWMTTINGKELKVEGQITYYNRYKRQNVVKDLSVELDRLSEESVNNDISSWTKGRSGEALSLLKKRFSHRPVQEKFVCLNCGFETHADEQAALNIARSWLFLRSQEYKKYQTNKTTGNTDKRAFVETWQSFYRKKLKEVWKPAV

SEQ ID NO: 30587 - protein, 980 aa, synthetic construct
  REGION 1..980: note = engineered CasX variant
QEIKRINKIRRRLVKDSNTKKAGKTGPMKTLLVRVMTPDLRERLENLRKKPENIPQPISNTSRANLNKLLTDYTEMKKAILHVYWEEFQKDPVGLMSRVAQPASKKIDQNKLKPEMDEKGNLTTAGFACSQCGQPLFVYKLEQVSEKGKAYTNYFGRCNVAEHEKLILLAQLKPEKDSDEAVTYSLGKFGQRALDFYSIHVTKESTHPVKPLAQIAGNRYASSHPVGKALSDACMGTIASFLSKYQDIIIEHQKVVKGNQKRLESLRELAGKENLEYPSVTLPPQPHTKEGVDAYNEVIARVRMWVNLNLWQKLKLSRDDAKPLLRLKGFPSFPLVERQQANEVDWWDMVCNVKKLINEKKEDGKVFWQNLAGYKRQEALRPYLSSEEDRKKGKKFARYQLGDLLLHLEKKHGEDWGKVYDEAWERIDKKVEGLSKHIKLEEERRSEDAQSKAALTDWLRAKASFVIEGLKEADKDEFCRCELKLQKWYGDLRGKPFAIEAENSILDISGFSKQYNCAFIWQKDGVKKLNLYLIINYFKGGKLRFKKIKPEAFEANRFYTVINKKSGEIVPMEVNFNFDDPNLIILPLAFGKRQGREFIWNDLLSLETGSLKLANGRVIEKTLYNRRTRQDEPALFVALTFERREVLDSSNIKPMNLIGVDRGENIPAVIALTDPEGCPLSRFKDSLGNPTHILRIGESYKEKQRTIQAKKEVEQRRAGGYSRKYASKAKNLADDMVRNTARDLLYYAVTQDAMLIFENLSRGFGRQGKRTFMAERQYTRMEDWLTAKLAYEGLPSKTYLSKTLAQYTSKTCSNCGFTITSADYDRVLEKLKKTATGWMTTINGKELKVEGQITYYNRYKRQNVVKDLSVELDRLSEESVNNDISSWTKGRSGEALSLLKKRFSHRPVQEKFVCLNCGFETHADEQAALNIARSWLFLRSQEYKKYQTNKTTGNTDKRAFVETWQSFYRKKLKEVWKPAV

SEQ ID NO: 30588 - protein, 980 aa, synthetic construct
  REGION 1..980: note = engineered CasX variant
QEIKRINKIRRRLVKDSNTKKAGKTGPMKTLLVRVMTPDLRERLENLRKKPENIPQPISNTSRANLNKLLTDYTEMKKAILHVYWEEFQKDPVGLMSRVAQPASKKIDQNKLKPEMDEKGNLTTAGFACSQCGQPLFVYKLEQVSEKGKAYTNYFGRCNVAEHEKLILLAQLKPEKDSDEAVTYSLGKFGQRALDFYSIHVTKESTHPVKPLAQIAGNRYASSSPVGKALSDACMGTIASFLSKYQDIIIEHQKVVKGNQKRLESLRELAGKENLEYPSVTLPPQPHTKEGVDAYNEVIARVRMWVNLNLWQKLKLSRDDAKPLLRLKGFPSFPLVERQQANEVDWWDMVCNVKKLINEKKEDGKVFWQNLAGYKRQEALRPYLSSEEDRKKGKKFARYQLGDLLLHLEKKHGEDWGKVYDEAWERIDKKVEGLSKHIKLEEERRSEDAQSKAALTDWLRAKASFVIEGLKEADKDEFCRCELKLQKWYGDLRGKPFAIEAENSILDISGFSKQYNCAFIWQKDGVKKLNLYLIINYFKGGKLRFKKIKPEAFEANRFYTVINKKSGEIVPMEVNFNFDDPNLIILPLAFGKRQGREFIWNDLLSLETGSLKLANGRVIEKTLYNRRTRQDEPALFVALTFERREVLDSSNIKPMNLIGVDRGENIPAVIALTDPEGCPLSRFKDSLGNPTHILRIGESYKEKQRTIQAKKEVEQRRAGGYSRKYASKAKNLADDMVRNTARDLLYYAVTQDAMLIFENLSRGFGRQGKRTFMAERQYTRMEDWLTAKLAYEGLPSKTYLSKTLAQYTSKTCSNCGFTITSADYDRVLEKLKKTATGWMTTINGKELKVEGQITYYNRYKRQNVVKDLSVELDRLSEESVNNDISSWTKGRSGEALSLLKKRFSHRPVQEKFVCLNCGFETHADEQAALNIARSWLFLRSQEYKKYQTNKTTGNTDKRAFVETWQSFYRKKLKEVWKPAV

SEQ ID NO: 30589 - protein, 980 aa, synthetic construct
  REGION 1..980: note = engineered CasX variant
QEIKRINKIRRRLVKDSNTKKAGKTGPMKTLLVRVMTPDLRERLENLRKKPENIPQPISNTSRANLNKLLTDYTEMKKAILHVYWEEFQKDPVGLMSRVAQPASKKIDQNKLKPEMDEKGNLTTAGFACSQCGQPLFVYKLEQVSEKGKAYTNYFGRCNVAEHEKLILLAQLKPEKDSDEAVTYSLGKFGQRALDFYSIHVTKESTHPVKPLAQIAGNRYASSTPVGKALSDACMGTIASFLSKYQDIIIEHQKVVKGNQKRLESLRELAGKENLEYPSVTLPPQPHTKEGVDAYNEVIARVRMWVNLNLWQKLKLSRDDAKPLLRLKGFPSFPLVERQQANEVDWWDMVCNVKKLINEKKEDGKVFWQNLAGYKRQEALRPYLSSEEDRKKGKKFARYQLGDLLLHLEKKHGEDWGKVYDEAWERIDKKVEGLSKHIKLEEERRSEDAQSKAALTDWLRAKASFVIEGLKEADKDEFCRCELKLQKWYGDLRGKPFAIEAENSILDISGFSKQYNCAFIWQKDGVKKLNLYLIINYFKGGKLRFKKIKPEAFEANRFYTVINKKSGEIVPMEVNFNFDDPNLIILPLAFGKRQGREFIWNDLLSLETGSLKLANGRVIEKTLYNRRTRQDEPALFVALTFERREVLDSSNIKPMNLIGVDRGENIPAVIALTDPEGCPLSRFKDSLGNPTHILRIGESYKEKQRTIQAKKEVEQRRAGGYSRKYASKAKNLADDMVRNTARDLLYYAVTQDAMLIFENLSRGFGRQGKRTFMAERQYTRMEDWLTAKLAYEGLPSKTYLSKTLAQYTSKTCSNCGFTITSADYDRVLEKLKKTATGWMTTINGKELKVEGQITYYNRYKRQNVVKDLSVELDRLSEESVNNDISSWTKGRSGEALSLLKKRFSHRPVQEKFVCLNCGFETHADEQAALNIARSWLFLRSQEYKKYQTNKTTGNTDKRAFVETWQSFYRKKLKEVWKPAV

SEQ ID NO: 30590 - protein, 980 aa, synthetic construct
  REGION 1..980: note = engineered CasX variant
QEIKRINKIRRRLVKDSNTKKAGKTGPMKTLLVRVMTPDLRERLENLRKKPENIPQPISNTSRANLNKLLTDYTEMKKAILHVYWEEFQKDPVGLMSRVAQPASKKIDQNKLKPEMDEKGNLTTAGFACSQCGQPLFVYKLEQVSEKGKAYTNYFGRCNVAEHEKLILLAQLKPEKDSDEAVTYSLGKFGQRALDFYSIHVTKESTHPVKPLAQIAGNRYASSAPVGKALSDACMGTIASFLSKYQDIIIEHQKVVKGNQKRLESLRELAGKENLEYPSVTLPPQPHTKEGVDAYNEVIARVRMWVNLNLWQKLKLSRDDAKPLLRLKGFPSFPLVERQQANEVDWWDMVCNVKKLINEKKEDGKVFWQNLAGYKRQEALRPYLSSEEDRKKGKKFARYQLGDLLLHLEKKHGEDWGKVYDEAWERIDKKVEGLSKHIKLEEERRSEDAQSKAALTDWLRAKASFVIEGLKEADKDEFCRCELKLQKWYGDLRGKPFAIEAENSILDISGFSKQYNCAFIWQKDGVKKLNLYLIINYFKGGKLRFKKIKPEAFEANRFYTVINKKSGEIVPMEVNFNFDDPNLIILPLAFGKRQGREFIWNDLLSLETGSLKLANGRVIEKTLYNRRTRQDEPALFVALTFERREVLDSSNIKPMNLIGVDRGENIPAVIALTDPEGCPLSRFKDSLGNPTHILRIGESYKEKQRTIQAKKEVEQRRAGGYSRKYASKAKNLADDMVRNTARDLLYYAVTQDAMLIFENLSRGFGRQGKRTFMAERQYTRMEDWLTAKLAYEGLPSKTYLSKTLAQYTSKTCSNCGFTITSADYDRVLEKLKKTATGWMTTINGKELKVEGQITYYNRYKRQNVVKDLSVELDRLSEESVNNDISSWTKGRSGEALSLLKKRFSHRPVQEKFVCLNCGFETHADEQAALNIARSWLFLRSQEYKKYQTNKTTGNTDKRAFVETWQSFYRKKLKEVWKPAV

SEQ ID NO: 30591 - protein, 980 aa, synthetic construct
  REGION 1..980: note = engineered CasX variant
QEIKRINKIRRRLVKDSNTKKAGKTGPMKTLLVRVMTPDLRERLENLRKKPENIPQPISNTSRANLNKLLTDYTEMKKAILHVYWEEFQKDPVGLMSRVAQPASKKIDQNKLKPEMDEKGNLTTAGFACSQCGQPLFVYKLEQVSEKGKAYTNYFGRCNVAEHEKLILLAQLKPEKDSDEAVTYSLGKFGQRALDFYSIHVTKESTHPVKPLAQIAGNRYASSVPVGKALSDACMGTIASFLSKYQDIIIEHQKVVKGNQKRLESLRELAGKENLEYPSVTLPPQPHTKEGVDAYNEVIARVRMWVNLNLWQKLKLSRDDAKPLLRLKGFPSFPLVERQQANEVDWWDMVCNVKKLINEKKEDGKVFWQNLAGYKRQEALRPYLSSEEDRKKGKKFARYQLGDLLLHLEKKHGEDWGKVYDEAWERIDKKVEGLSKHIKLEEERRSEDAQSKAALTDWLRAKASFVIEGLKEADKDEFCRCELKLQKWYGDLRGKPFAIEAENSILDISGFSKQYNCAFIWQKDGVKKLNLYLIINYFKGGKLRFKKIKPEAFEANRFYTVINKKSGEIVPMEVNFNFDDPNLIILPLAFGKRQGREFIWNDLLSLETGSLKLANGRVIEKTLYNRRTRQDEPALFVALTFERREVLDSSNIKPMNLIGVDRGENIPAVIALTDPEGCPLSRFKDSLGNPTHILRIGESYKEKQRTIQAKKEVEQRRAGGYSRKYASKAKNLADDMVRNTARDLLYYAVTQDAMLIFENLSRGFGRQGKRTFMAERQYTRMEDWLTAKLAYEGLPSKTYLSKTLAQYTSKTCSNCGFTITSADYDRVLEKLKKTATGWMTTINGKELKVEGQITYYNRYKRQNVVKDLSVELDRLSEESVNNDISSWTKGRSGEALSLLKKRFSHRPVQEKFVCLNCGFETHADEQAALNIARSWLFLRSQEYKKYQTNKTTGNTDKRAFVETWQSFYRKKLKEVWKPAV

SEQ ID NO: 30592 - protein, 979 aa, synthetic construct
  REGION 1..979: note = engineered CasX variant
QEIKRINKIRRRLVKDSNTKKAGKTGPMKTLLVRVMTPDLRERLENLRKKPENIPQPISNTSRANLNKLLTDYTEMKKAILHVYWEEFQKDPVGLMSRVAQPASKKIDQNKLKPEMDEKGNLTTAGFACSQCGQPLFVYKLEQVSEKGKAYTNYFGRCNVAEHEKLIKLAQLKPEKDSDEAVTYSLGKFGQRALDFYSIHVTKESTHPVKPLAQIAGNRYASSPVGKALSDACMGTIASFLSKYQDIIIEHQKVVKGNQKRLESLRELAGKENLEYPSVTLPPQPHTKEGVDAYNEVIARVRMWVNLNLWQKLKLSRDDAKPLLRLKGFPSFPLVERQQANEVDWWDMVCNVKKLINEKKEDGKVFWQNLAGYKRQEALRPYLSSEEDRKKGKKFARYQLGDLLLHLEKKHGEDWGKVYDEAWERIDKKVEGLSKHIKLEEERRSEDAQSKAALTDWLRAKASFVIEGLKEADKDEFCRCELKLQKWYGDLRGKPFAIEAENSILDISGFSKQYNCAFIWQKDGVKKLNLYLIINYFKGGKLRFKKIKPEAFEANRFYTVINKKSGEIVPMEVNFNFDDPNLIILPLAFGKRQGREFIWNDLLSLETGSLKLANGRVIEKTLYNRRTRQDEPALFVALTFERREVLDSSNIKPMNLIGVDRGENIPAVIALTDPEGCPLSRFKDSLGNPTHILRIGESYKEKQRTIQAKKEVEQRRAGGYSRKYASKAKNLADDMVRNTARDLLYYAVTQDAMLIFENLSRGFGRQGKRTFMAERQYTRMEDWLTAKLAYEGLPSKTYLSKTLAQYTSKTCSNCGFTITSADYDRVLEKLKKTATGWMTTINGKELKVEGQITYYNRYKRQNVVKDLSVELDRLSEESVNNDISSWTKGRSGEALSLLKKRFSHRPVQEKFVCLNCGFETHADEQAALNIARSWLFLRSQEYKKYQTNKTTGNTDKRAFVETWQSFYRKKLKEVWKPAV

SEQ ID NO: 30593 - protein, 980 aa, synthetic construct
  REGION 1..980: note = engineered CasX variant
QEIKRINKIRRRLVKDSNTKKAGKTGPMKTLLVRVMTPDLRERLENLRKKPENIPQPISNTSRANLNKLLTDYTEMKKAILHVYWEEFQKDPVGLMSRVAQPASKKIDQNKLKPEMDEKGNLTTAGFACSQCGQPLFVYKLEQVSEKGKAYTNYFGRCNVAEHEKLILLAQLKPEKDSDEAVTYSLGKFGQRALDFYSIHVTKESTHPVKPLAQIAGNRYASSYPVGKALSDACMGTIASFLSKYQDIIIEHQKVVKGNQKRLESLRELAGKENLEYPSVTLPPQPHTKEGVDAYNEVIARVRMWVNLNLWQKLKLSRDDAKPLLRLKGFPSFPLVERQANAEVDWWDMVCNVKKLINEKKEDGKVFWQNLAGYKRQEALRPYLSSEEDRKKGKKFARYQLGDLLLHLEKKHGEDWGKVYDEAWERIDKKVEGLSKHIKLEEERRSEDAQSKAALTDWLRAKASFVIEGLKEADKDEFCRCELKLQKWYGDLRGKPFAIEAENSILDISGFSKQYNCAFIWQKDGVKKLNLYLIINYFKGGKLRFKKIKPEAFEANRFYTVINKKSGEIVPMEVNFNFDDPNLIILPLAFGKRQGREFIWNDLLSLETGSLKLANGRVIEKTLYNRRTRQDEPALFVALTFERREVLDSSNIKPMNLIGVDRGENIPAVIALTDPEGCPLSRFKDSLGNPTHILRIGESYKEKQRTIQAKKEVEQRRAGGYSRKYASKAKNLADDMVRNTARDLLYYAVTQDAMLIFENLSRGFGRQGKRTFMAERQYTRMEDWLTAKLAYEGLPSKTYLSKTLAQYTSKTCSNCGFTITSADYDRVLEKLKKTATGWMTTINGKELKVEGQITYYNRYKRQNVVKDLSVELDRLSEESVNNDISSWTKGRSGEALSLLKKRFSHRPVQEKFVCLNCGFETHADEQAALNIARSWLFLRSQEYKKYQTNKTTGNTDKRAFVETWQSFYRKKLKEVWKPAV

SEQ ID NO: 30594 - protein, 980 aa, synthetic construct
  REGION 1..980: note = engineered CasX variant
QEIKRINKIRRRLVKDSNTKKAGKTGPMKTLLVRVMTPDLRERLENLRKKPENIPQPISNTSRANLNKLLTDYTEMKKAILHVYWEEFQKDPVGLMSRVAQPASKKIDQNKLKPEMDEKGNLTTAGFACSQCGQPLFVYKLEQVSEKGKAYTNYFGRCNVAEHEKLILLAQLKPEKDSDEAVTYSLGKFGQRALDFYSIHVTKESTHPVKPLAQIAGNRYASSHPVGKALSDACMGTIASFLSKYQDIIIEHQKVVKGNQKRLESLRELAGKENLEYPSVTLPPQPHTKEGVDAYNEVIARVRMWVNLNLWQKLKLSRDDAKPLLRLKGFPSFPLVERQANAEVDWWDMVCNVKKLINEKKEDGKVFWQNLAGYKRQEALRPYLSSEEDRKKGKKFARYQLGDLLLHLEKKHGEDWGKVYDEAWERIDKKVEGLSKHIKLEEERRSEDAQSKAALTDWLRAKASFVIEGLKEADKDEFCRCELKLQKWYGDLRGKPFAIEAENSILDISGFSKQYNCAFIWQKDGVKKLNLYLIINYFKGGKLRFKKIKPEAFEANRFYTVINKKSGEIVPMEVNFNFDDPNLIILPLAFGKRQGREFIWNDLLSLETGSLKLANGRVIEKTLYNRRTRQDEPALFVALTFERREVLDSSNIKPMNLIGVDRGENIPAVIALTDPEGCPLSRFKDSLGNPTHILRIGESYKEKQRTIQAKKEVEQRRAGGYSRKYASKAKNLADDMVRNTARDLLYYAVTQDAMLIFENLSRGFGRQGKRTFMAERQYTRMEDWLTAKLAYEGLPSKTYLSKTLAQYTSKTCSNCGFTITSADYDRVLEKLKKTATGWMTTINGKELKVEGQITYYNRYKRQNVVKDLSVELDRLSEESVNNDISSWTKGRSGEALSLLKKRFSHRPVQEKFVCLNCGFETHADEQAALNIARSWLFLRSQEYKKYQTNKTTGNTDKRAFVETWQSFYRKKLKEVWKPAV

SEQ ID NO: 30595 - protein, 980 aa, synthetic construct
  REGION 1..980: note = engineered CasX variant
QEIKRINKIRRRLVKDSNTKKAGKTGPMKTLLVRVMTPDLRERLENLRKKPENIPQPISNTSRANLNKLLTDYTEMKKAILHVYWEEFQKDPVGLMSRVAQPASKKIDQNKLKPEMDEKGNLTTAGFACSQCGQPLFVYKLEQVSEKGKAYTNYFGRCNVAEHEKLILLAQLKPEKDSDEAVTYSLGKFGQRALDFYSIHVTKESTHPVKPLAQIAGNRYASSSPVGKALSDACMGTIASFLSKYQDIIIEHQKVVKGNQKRLESLRELAGKENLEYPSVTLPPQPHTKEGVDAYNEVIARVRMWVNLNLWQKLKLSRDDAKPLLRLKGFPSFPLVERQANAEVDWWDMVCNVKKLINEKKEDGKVFWQNLAGYKRQEALRPYLSSEEDRKKGKKFARYQLGDLLLHLEKKHGEDWGKVYDEAWERIDKKVEGLSKHIKLEEERRSEDAQSKAALTDWLRAKASFVIEGLKEADKDEFCRCELKLQKWYGDLRGKPFAIEAENSILDISGFSKQYNCAFIWQKDGVKKLNLYLIINYFKGGKLRFKKIKPEAFEANRFYTVINKKSGEIVPMEVNFNFDDPNLIILPLAFGKRQGREFIWNDLLSLETGSLKLANGRVIEKTLYNRRTRQDEPALFVALTFERREVLDSSNIKPMNLIGVDRGENIPAVIALTDPEGCPLSRFKDSLGNPTHILRIGESYKEKQRTIQAKKEVEQRRAGGYSRKYASKAKNLADDMVRNTARDLLYYAVTQDAMLIFENLSRGFGRQGKRTFMAERQYTRMEDWLTAKLAYEGLPSKTYLSKTLAQYTSKTCSNCGFTITSADYDRVLEKLKKTATGWMTTINGKELKVEGQITYYNRYKRQNVVKDLSVELDRLSEESVNNDISSWTKGRSGEALSLLKKRFSHRPVQEKFVCLNCGFETHADEQAALNIARSWLFLRSQEYKKYQTNKTTGNTDKRAFVETWQSFYRKKLKEVWKPAV

SEQ ID NO: 30596 - protein, 980 aa, synthetic construct
  REGION 1..980: note = engineered CasX variant
QEIKRINKIRRRLVKDSNTKKAGKTGPMKTLLVRVMTPDLRERLENLRKKPENIPQPISNTSRANLNKLLTDYTEMKKAILHVYWEEFQKDPVGLMSRVAQPASKKIDQNKLKPEMDEKGNLTTAGFACSQCGQPLFVYKLEQVSEKGKAYTNYFGRCNVAEHEKLILLAQLKPEKDSDEAVTYSLGKFGQRALDFYSIHVTKESTHPVKPLAQIAGNRYASSTPVGKALSDACMGTIASFLSKYQDIIIEHQKVVKGNQKRLESLRELAGKENLEYPSVTLPPQPHTKEGVDAYNEVIARVRMWVNLNLWQKLKLSRDDAKPLLRLKGFPSFPLVERQANAEVDWWDMVCNVKKLINEKKEDGKVFWQNLAGYKRQEALRPYLSSEEDRKKGKKFARYQLGDLLLHLEKKHGEDWGKVYDEAWERIDKKVEGLSKHIKLEEERRSEDAQSKAALTDWLRAKASFVIEGLKEADKDEFCRCELKLQKWYGDLRGKPFAIEAENSILDISGFSKQYNCAFIWQKDGVKKLNLYLIINYFKGGKLRFKKIKPEAFEANRFYTVINKKSGEIVPMEVNFNFDDPNLIILPLAFGKRQGREFIWNDLLSLETGSLKLANGRVIEKTLYNRRTRQDEPALFVALTFERREVLDSSNIKPMNLIGVDRGENIPAVIALTDPEGCPLSRFKDSLGNPTHILRIGESYKEKQRTIQAKKEVEQRRAGGYSRKYASKAKNLADDMVRNTARDLLYYAVTQDAMLIFENLSRGFGRQGKRTFMAERQYTRMEDWLTAKLAYEGLPSKTYLSKTLAQYTSKTCSNCGFTITSADYDRVLEKLKKTATGWMTTINGKELKVEGQITYYNRYKRQNVVKDLSVELDRLSEESVNNDISSWTKGRSGEALSLLKKRFSHRPVQEKFVCLNCGFETHADEQAALNIARSWLFLRSQEYKKYQTNKTTGNTDKRAFVETWQSFYRKKLKEVWKPAV

SEQ ID NO: 30597 - protein, 980 aa, synthetic construct
  REGION 1..980: note = engineered CasX variant
QEIKRINKIRRRLVKDSNTKKAGKTGPMKTLLVRVMTPDLRERLENLRKKPENIPQPISNTSRANLNKLLTDYTEMKKAILHVYWEEFQKDPVGLMSRVAQPASKKIDQNKLKPEMDEKGNLTTAGFACSQCGQPLFVYKLEQVSEKGKAYTNYFGRCNVAEHEKLILLAQLKPEKDSDEAVTYSLGKFGQRALDFYSIHVTKESTHPVKPLAQIAGNRYASSAPVGKALSDACMGTIASFLSKYQDIIIEHQKVVKGNQKRLESLRELAGKENLEYPSVTLPPQPHTKEGVDAYNEVIARVRMWVNLNLWQKLKLSRDDAKPLLRLKGFPSFPLVERQANAEVDWWDMVCNVKKLINEKKEDGKVFWQNLAGYKRQEALRPYLSSEEDRKKGKKFARYQLGDLLLHLEKKHGEDWGKVYDEAWERIDKKVEGLSKHIKLEEERRSEDAQSKAALTDWLRAKASFVIEGLKEADKDEFCRCELKLQKWYGDLRGKPFAIEAENSILDISGFSKQYNCAFIWQKDGVKKLNLYLIINYFKGGKLRFKKIKPEAFEANRFYTVINKKSGEIVPMEVNFNFDDPNLIILPLAFGKRQGREFIWNDLLSLETGSLKLANGRVIEKTLYNRRTRQDEPALFVALTFERREVLDSSNIKPMNLIGVDRGENIPAVIALTDPEGCPLSRFKDSLGNPTHILRIGESYKEKQRTIQAKKEVEQRRAGGYSRKYASKAKNLADDMVRNTARDLLYYAVTQDAMLIFENLSRGFGRQGKRTFMAERQYTRMEDWLTAKLAYEGLPSKTYLSKTLAQYTSKTCSNCGFTITSADYDRVLEKLKKTATGWMTTINGKELKVEGQITYYNRYKRQNVVKDLSVELDRLSEESVNNDISSWTKGRSGEALSLLKKRFSHRPVQEKFVCLNCGFETHADEQAALNIARSWLFLRSQEYKKYQTNKTTGNTDKRAFVETWQSFYRKKLKEVWKPAV

SEQ ID NO: 30598 - protein, 980 aa, synthetic construct
  REGION 1..980: note = engineered CasX variant
QEIKRINKIRRRLVKDSNTKKAGKTGPMKTLLVRVMTPDLRERLENLRKKPENIPQPISNTSRANLNKLLTDYTEMKKAILHVYWEEFQKDPVGLMSRVAQPASKKIDQNKLKPEMDEKGNLTTAGFACSQCGQPLFVYKLEQVSEKGKAYTNYFGRCNVAEHEKLILLAQLKPEKDSDEAVTYSLGKFGQRALDFYSIHVTKESTHPVKPLAQIAGNRYASSVPVGKALSDACMGTIASFLSKYQDIIIEHQKVVKGNQKRLESLRELAGKENLEYPSVTLPPQPHTKEGVDAYNEVIARVRMWVNLNLWQKLKLSRDDAKPLLRLKGFPSFPLVERQANAEVDWWDMVCNVKKLINEKKEDGKVFWQNLAGYKRQEALRPYLSSEEDRKKGKKFARYQLGDLLLHLEKKHGEDWGKVYDEAWERIDKKVEGLSKHIKLEEERRSEDAQSKAALTDWLRAKASFVIEGLKEADKDEFCRCELKLQKWYGDLRGKPFAIEAENSILDISGFSKQYNCAFIWQKDGVKKLNLYLIINYFKGGKLRFKKIKPEAFEANRFYTVINKKSGEIVPMEVNFNFDDPNLIILPLAFGKRQGREFIWNDLLSLETGSLKLANGRVIEKTLYNRRTRQDEPALFVALTFERREVLDSSNIKPMNLIGVDRGENIPAVIALTDPEGCPLSRFKDSLGNPTHILRIGESYKEKQRTIQAKKEVEQRRAGGYSRKYASKAKNLADDMVRNTARDLLYYAVTQDAMLIFENLSRGFGRQGKRTFMAERQYTRMEDWLTAKLAYEGLPSKTYLSKTLAQYTSKTCSNCGFTITSADYDRVLEKLKKTATGWMTTINGKELKVEGQITYYNRYKRQNVVKDLSVELDRLSEESVNNDISSWTKGRSGEALSLLKKRFSHRPVQEKFVCLNCGFETHADEQAALNIARSWLFLRSQEYKKYQTNKTTGNTDKRAFVETWQSFYRKKLKEVWKPAV

SEQ ID NO: 30599 - protein, 979 aa, synthetic construct
  REGION 1..979: note = engineered CasX variant
QEIKRINKIRRRLVKDSNTKKAGKTGPMKTLLVRVMTPDLRERLENLRKKPENIPQPISNTSRANLNKLLTDYTEMKKAILHVYWEEFQKDPVGLMSRVAQPASKKIDQNKLKPEMDEKGNLTTAGFACSQCGQPLFVYKLEQVSEKGKAYTNYFGRCNVAEHEKLIKLAQLKPEKDSDEAVTYSLGKFGQRALDFYSIHVTKESTHPVKPLAQIAGNRYASSPVGKALSDACMGTIASFLSKYQDIIIEHQKVVKGNQKRLESLRELAGKENLEYPSVTLPPQPHTKEGVDAYNEVIARVRMWVNLNLWQKLKLSRDDAKPLLRLKGFPSFPLVERQANAEVDWWDMVCNVKKLINEKKEDGKVFWQNLAGYKRQEALRPYLSSEEDRKKGKKFARYQLGDLLLHLEKKHGEDWGKVYDEAWERIDKKVEGLSKHIKLEEERRSEDAQSKAALTDWLRAKASFVIEGLKEADKDEFCRCELKLQKWYGDLRGKPFAIEAENSILDISGFSKQYNCAFIWQKDGVKKLNLYLIINYFKGGKLRFKKIKPEAFEANRFYTVINKKSGEIVPMEVNFNFDDPNLIILPLAFGKRQGREFIWNDLLSLETGSLKLANGRVIEKTLYNRRTRQDEPALFVALTFERREVLDSSNIKPMNLIGVDRGENIPAVIALTDPEGCPLSRFKDSLGNPTHILRIGESYKEKQRTIQAKKEVEQRRAGGYSRKYASKAKNLADDMVRNTARDLLYYAVTQDAMLIFENLSRGFGRQGKRTFMAERQYTRMEDWLTAKLAYEGLPSKTYLSKTLAQYTSKTCSNCGFTITSADYDRVLEKLKKTATGWMTTINGKELKVEGQITYYNRYKRQNVVKDLSVELDRLSEESVNNDISSWTKGRSGEALSLLKKRFSHRPVQEKFVCLNCGFETHADEQAALNIARSWLFLRSQEYKKYQTNKTTGNTDKRAFVETWQSFYRKKLKEVWKPAV

SEQ ID NO: 30600 - protein, 979 aa, synthetic construct
  REGION 1..979: note = engineered CasX variant
QEIKRINKIRRRLVKDSNTKKAGKTGPMKTLLVRVMTPDLRERLENLRKKPENIPQPISNTSRANLNKLLTDYTEMKKAILHVYWEEFQKDPVGLMSRVAQPASKKIDQNKLKPEMDEKGNLTTAGFACSQCGQPLFVYKLEQVSEKGKAYTNYFGRCNVAEHEKLILLAQLKPEKDSDEAVTYSLGKFGQRALDFYSIHVTKESTHPVKPLAQIAGNRYASSYPVGKALSDACMGTIASFLSKYQDIIIEHQKVVKGNQKRLESLRELAGKENLEYPSVTLPPQPHTKEGVDAYNEVIARVRMWVNLNLWQKLKLSRDDAKPLLRLKGFPSFPLVERQANEVDWWDMVCNVKKLINEKKEDGKVFWQNLAGYKRQEALRPYLSSEEDRKKGKKFARTQLGDLLLHLEKKHGEDWGKVYDEAWERIDKKVEGLSKHIKLEEERRSEDAQSKAALTDWLRAKASFVIEGLKEADKDEFCRCELKLQKWYGDLRGKPFAIEAENSILDISGFSKQYNCAFIWQKDGVKKLNLYLIINYFKGGKLRFKKIKPEAFEANRFYTVINKKSGEIVPMEVNFNFDDPNLIILPLAFGKRQGREFIWNDLLSLETGSLKLANGRVIEKTLYNRRTRQDEPALFVALTFERREVLDSSNIKPMNLIGVDRGENIPAVIALTDPEGCPLSRFKDSLGNPTHILRIGESYKEKQRTIQAKKEVEQRRAGGYSRKYASKAKNLADDMVRNTARDLLYYAVTQDAMLIFENLSRGFGRQGKRTFMAERQYTRMEDWLTAKLAYEGLPSKTYLSKTLAQYTSKTCSNCGFTITSADYDRVLEKLKKTATGWMTTINGKELKVEGQITYYNRYKRQNVVKDLSVELDRLSEESVNNDISSWTKGRSGEALSLLKKRFSHRPVQEKFVCLNCGFETHADEQAALNIARSWLFLRSQEYKKYQTNKTTGNTDKRAFVETWQSFYRKKLKEVWKPAV

SEQ ID NO: 30601 - protein, 979 aa, synthetic construct
  REGION 1..979: note = engineered CasX variant
QEIKRINKIRRRLVKDSNTKKAGKTGPMKTLLVRVMTPDLRERLENLRKKPENIPQPISNTSRANLNKLLTDYTEMKKAILHVYWEEFQKDPVGLMSRVAQPASKKIDQNKLKPEMDEKGNLTTAGFACSQCGQPLFVYKLEQVSEKGKAYTNYFGRCNVAEHEKLILLAQLKPEKDSDEAVTYSLGKFGQRALDFYSIHVTKESTHPVKPLAQIAGNRYASSHPVGKALSDACMGTIASFLSKYQDIIIEHQKVVKGNQKRLESLRELAGKENLEYPSVTLPPQPHTKEGVDAYNEVIARVRMWVNLNLWQKLKLSRDDAKPLLRLKGFPSFPLVERQANEVDWWDMVCNVKKLINEKKEDGKVFWQNLAGYKRQEALRPYLSSEEDRKKGKKFARTQLGDLLLHLEKKHGEDWGKVYDEAWERIDKKVEGLSKHIKLEEERRSEDAQSKAALTDWLRAKASFVIEGLKEADKDEFCRCELKLQKWYGDLRGKPFAIEAENSILDISGFSKQYNCAFIWQKDGVKKLNLYLIINYFKGGKLRFKKIKPEAFEANRFYTVINKKSGEIVPMEVNFNFDDPNLIILPLAFGKRQGREFIWNDLLSLETGSLKLANGRVIEKTLYNRRTRQDEPALFVALTFERREVLDSSNIKPMNLIGVDRGENIPAVIALTDPEGCPLSRFKDSLGNPTHILRIGESYKEKQRTIQAKKEVEQRRAGGYSRKYASKAKNLADDMVRNTARDLLYYAVTQDAMLIFENLSRGFGRQGKRTFMAERQYTRMEDWLTAKLAYEGLPSKTYLSKTLAQYTSKTCSNCGFTITSADYDRVLEKLKKTATGWMTTINGKELKVEGQITYYNRYKRQNVVKDLSVELDRLSEESVNNDISSWTKGRSGEALSLLKKRFSHRPVQEKFVCLNCGFETHADEQAALNIARSWLFLRSQEYKKYQTNKTTGNTDKRAFVETWQSFYRKKLKEVWKPAV

SEQ ID NO: 30602 - protein, 979 aa, synthetic construct
  REGION 1..979: note = engineered CasX variant
QEIKRINKIRRRLVKDSNTKKAGKTGPMKTLLVRVMTPDLRERLENLRKKPENIPQPISNTSRANLNKLLTDYTEMKKAILHVYWEEFQKDPVGLMSRVAQPASKKIDQNKLKPEMDEKGNLTTAGFACSQCGQPLFVYKLEQVSEKGKAYTNYFGRCNVAEHEKLILLAQLKPEKDSDEAVTYSLGKFGQRALDFYSIHVTKESTHPVKPLAQIAGNRYASSSPVGKALSDACMGTIASFLSKYQDIIIEHQKVVKGNQKRLESLRELAGKENLEYPSVTLPPQPHTKEGVDAYNEVIARVRMWVNLNLWQKLKLSRDDAKPLLRLKGFPSFPLVERQANEVDWWDMVCNVKKLINEKKEDGKVFWQNLAGYKRQEALRPYLSSEEDRKKGKKFARTQLGDLLLHLEKKHGEDWGKVYDEAWERIDKKVEGLSKHIKLEEERRSEDAQSKAALTDWLRAKASFVIEGLKEADKDEFCRCELKLQKWYGDLRGKPFAIEAENSILDISGFSKQYNCAFIWQKDGVKKLNLYLIINYFKGGKLRFKKIKPEAFEANRFYTVINKKSGEIVPMEVNFNFDDPNLIILPLAFGKRQGREFIWNDLLSLETGSLKLANGRVIEKTLYNRRTRQDEPALFVALTFERREVLDSSNIKPMNLIGVDRGENIPAVIALTDPEGCPLSRFKDSLGNPTHILRIGESYKEKQRTIQAKKEVEQRRAGGYSRKYASKAKNLADDMVRNTARDLLYYAVTQDAMLIFENLSRGFGRQGKRTFMAERQYTRMEDWLTAKLAYEGLPSKTYLSKTLAQYTSKTCSNCGFTITSADYDRVLEKLKKTATGWMTTINGKELKVEGQITYYNRYKRQNVVKDLSVELDRLSEESVNNDISSWTKGRSGEALSLLKKRFSHRPVQEKFVCLNCGFETHADEQAALNIARSWLFLRSQEYKKYQTNKTTGNTDKRAFVETWQSFYRKKLKEVWKPAV

SEQ ID NO: 30603 - protein, 979 aa, synthetic construct
  REGION 1..979: note = engineered CasX variant
QEIKRINKIRRRLVKDSNTKKAGKTGPMKTLLVRVMTPDLRERLENLRKKPENIPQPISNTSRANLNKLLTDYTEMKKAILHVYWEEFQKDPVGLMSRVAQPASKKIDQNKLKPEMDEKGNLTTAGFACSQCGQPLFVYKLEQVSEKGKAYTNYFGRCNVAEHEKLILLAQLKPEKDSDEAVTYSLGKFGQRALDFYSIHVTKESTHPVKPLAQIAGNRYASSTPVGKALSDACMGTIASFLSKYQDIIIEHQKVVKGNQKRLESLRELAGKENLEYPSVTLPPQPHTKEGVDAYNEVIARVRMWVNLNLWQKLKLSRDDAKPLLRLKGFPSFPLVERQANEVDWWDMVCNVKKLINEKKEDGKVFWQNLAGYKRQEALRPYLSSEEDRKKGKKFARTQLGDLLLHLEKKHGEDWGKVYDEAWERIDKKVEGLSKHIKLEEERRSEDAQSKAALTDWLRAKASFVIEGLKEADKDEFCRCELKLQKWYGDLRGKPFAIEAENSILDISGFSKQYNCAFIWQKDGVKKLNLYLIINYFKGGKLRFKKIKPEAFEANRFYTVINKKSGEIVPMEVNFNFDDPNLIILPLAFGKRQGREFIWNDLLSLETGSLKLANGRVIEKTLYNRRTRQDEPALFVALTFERREVLDSSNIKPMNLIGVDRGENIPAVIALTDPEGCPLSRFKDSLGNPTHILRIGESYKEKQRTIQAKKEVEQRRAGGYSRKYASKAKNLADDMVRNTARDLLYYAVTQDAMLIFENLSRGFGRQGKRTFMAERQYTRMEDWLTAKLAYEGLPSKTYLSKTLAQYTSKTCSNCGFTITSADYDRVLEKLKKTATGWMTTINGKELKVEGQITYYNRYKRQNVVKDLSVELDRLSEESVNNDISSWTKGRSGEALSLLKKRFSHRPVQEKFVCLNCGFETHADEQAALNIARSWLFLRSQEYKKYQTNKTTGNTDKRAFVETWQSFYRKKLKEVWKPAV

SEQ ID NO: 30604 - protein, 979 aa, synthetic construct
  REGION 1..979: note = engineered CasX variant
QEIKRINKIRRRLVKDSNTKKAGKTGPMKTLLVRVMTPDLRERLENLRKKPENIPQPISNTSRANLNKLLTDYTEMKKAILHVYWEEFQKDPVGLMSRVAQPASKKIDQNKLKPEMDEKGNLTTAGFACSQCGQPLFVYKLEQVSEKGKAYTNYFGRCNVAEHEKLILLAQLKPEKDSDEAVTYSLGKFGQRALDFYSIHVTKESTHPVKPLAQIAGNRYASSAPVGKALSDACMGTIASFLSKYQDIIIEHQKVVKGNQKRLESLRELAGKENLEYPSVTLPPQPHTKEGVDAYNEVIARVRMWVNLNLWQKLKLSRDDAKPLLRLKGFPSFPLVERQANEVDWWDMVCNVKKLINEKKEDGKVFWQNLAGYKRQEALRPYLSSEEDRKKGKKFARTQLGDLLLHLEKKHGEDWGKVYDEAWERIDKKVEGLSKHIKLEEERRSEDAQSKAALTDWLRAKASFVIEGLKEADKDEFCRCELKLQKWYGDLRGKPFAIEAENSILDISGFSKQYNCAFIWQKDGVKKLNLYLIINYFKGGKLRFKKIKPEAFEANRFYTVINKKSGEIVPMEVNFNFDDPNLIILPLAFGKRQGREFIWNDLLSLETGSLKLANGRVIEKTLYNRRTRQDEPALFVALTFERREVLDSSNIKPMNLIGVDRGENIPAVIALTDPEGCPLSRFKDSLGNPTHILRIGESYKEKQRTIQAKKEVEQRRAGGYSRKYASKAKNLADDMVRNTARDLLYYAVTQDAMLIFENLSRGFGRQGKRTFMAERQYTRMEDWLTAKLAYEGLPSKTYLSKTLAQYTSKTCSNCGFTITSADYDRVLEKLKKTATGWMTTINGKELKVEGQITYYNRYKRQNVVKDLSVELDRLSEESVNNDISSWTKGRSGEALSLLKKRFSHRPVQEKFVCLNCGFETHADEQAALNIARSWLFLRSQEYKKYQTNKTTGNTDKRAFVETWQSFYRKKLKEVWKPAV

SEQ ID NO: 30605 - protein, 979 aa, synthetic construct
  REGION 1..979: note = engineered CasX variant
QEIKRINKIRRRLVKDSNTKKAGKTGPMKTLLVRVMTPDLRERLENLRKKPENIPQPISNTSRANLNKLLTDYTEMKKAILHVYWEEFQKDPVGLMSRVAQPASKKIDQNKLKPEMDEKGNLTTAGFACSQCGQPLFVYKLEQVSEKGKAYTNYFGRCNVAEHEKLILLAQLKPEKDSDEAVTYSLGKFGQRALDFYSIHVTKESTHPVKPLAQIAGNRYASSVPVGKALSDACMGTIASFLSKYQDIIIEHQKVVKGNQKRLESLRELAGKENLEYPSVTLPPQPHTKEGVDAYNEVIARVRMWVNLNLWQKLKLSRDDAKPLLRLKGFPSFPLVERQANEVDWWDMVCNVKKLINEKKEDGKVFWQNLAGYKRQEALRPYLSSEEDRKKGKKFARTQLGDLLLHLEKKHGEDWGKVYDEAWERIDKKVEGLSKHIKLEEERRSEDAQSKAALTDWLRAKASFVIEGLKEADKDEFCRCELKLQKWYGDLRGKPFAIEAENSILDISGFSKQYNCAFIWQKDGVKKLNLYLIINYFKGGKLRFKKIKPEAFEANRFYTVINKKSGEIVPMEVNFNFDDPNLIILPLAFGKRQGREFIWNDLLSLETGSLKLANGRVIEKTLYNRRTRQDEPALFVALTFERREVLDSSNIKPMNLIGVDRGENIPAVIALTDPEGCPLSRFKDSLGNPTHILRIGESYKEKQRTIQAKKEVEQRRAGGYSRKYASKAKNLADDMVRNTARDLLYYAVTQDAMLIFENLSRGFGRQGKRTFMAERQYTRMEDWLTAKLAYEGLPSKTYLSKTLAQYTSKTCSNCGFTITSADYDRVLEKLKKTATGWMTTINGKELKVEGQITYYNRYKRQNVVKDLSVELDRLSEESVNNDISSWTKGRSGEALSLLKKRFSHRPVQEKFVCLNCGFETHADEQAALNIARSWLFLRSQEYKKYQTNKTTGNTDKRAFVETWQSFYRKKLKEVWKPAV

SEQ ID NO: 30606 - protein, 978 aa, synthetic construct
  REGION 1..978: note = engineered CasX variant
QEIKRINKIRRRLVKDSNTKKAGKTGPMKTLLVRVMTPDLRERLENLRKKPENIPQPISNTSRANLNKLLTDYTEMKKAILHVYWEEFQKDPVGLMSRVAQPASKKIDQNKLKPEMDEKGNLTTAGFACSQCGQPLFVYKLEQVSEKGKAYTNYFGRCNVAEHEKLIKLAQLKPEKDSDEAVTYSLGKFGQRALDFYSIHVTKESTHPVKPLAQIAGNRYASSPVGKALSDACMGTIASFLSKYQDIIIEHQKVVKGNQKRLESLRELAGKENLEYPSVTLPPQPHTKEGVDAYNEVIARVRMWVNLNLWQKLKLSRDDAKPLLRLKGFPSFPLVERQANEVDWWDMVCNVKKLINEKKEDGKVFWQNLAGYKRQEALRPYLSSEEDRKKGKKFARTQLGDLLLHLEKKHGEDWGKVYDEAWERIDKKVEGLSKHIKLEEERRSEDAQSKAALTDWLRAKASFVIEGLKEADKDEFCRCELKLQKWYGDLRGKPFAIEAENSILDISGFSKQYNCAFIWQKDGVKKLNLYLIINYFKGGKLRFKKIKPEAFEANRFYTVINKKSGEIVPMEVNFNFDDPNLIILPLAFGKRQGREFIWNDLLSLETGSLKLANGRVIEKTLYNRRTRQDEPALFVALTFERREVLDSSNIKPMNLIGVDRGENIPAVIALTDPEGCPLSRFKDSLGNPTHILRIGESYKEKQRTIQAKKEVEQRRAGGYSRKYASKAKNLADDMVRNTARDLLYYAVTQDAMLIFENLSRGFGRQGKRTFMAERQYTRMEDWLTAKLAYEGLPSKTYLSKTLAQYTSKTCSNCGFTITSADYDRVLEKLKKTATGWMTTINGKELKVEGQITYYNRYKRQNVVKDLSVELDRLSEESVNNDISSWTKGRSGEALSLLKKRFSHRPVQEKFVCLNCGFETHADEQAALNIARSWLFLRSQEYKKYQTNKTTGNTDKRAFVETWQSFYRKKLKEVWKPAV

SEQ ID NO: 30607 - protein, 980 aa, synthetic construct
  REGION 1..980: note = engineered CasX variant
QEIKRINKIRRRLVKDSNTKKAGKTGPMKTLLVRVMTPDLRERLENLRKKPENIPQPISNTSRANLNKLLTDYTEMKKAILHVYWEEFQKDPVGLMSRVAQPASKKIDQNKLKPEMDEKGNLTTAGFACSQCGQPLFVYKLEQVSEKGKAYTNYFGRCNVAEHEKLILLAQLKPEKDSDEAVTYSLGKFGQRALDFYSIHVTKESTHPVKPLAQIAGNRYASSYPVGKALSDACMGTIASFLSKYQDIIIEHQKVVKGNQKRLESLRELAGKENLEYPSVTLPPQPHTKEGVDAYNEVIARVRMWVNLNLWQKLKLSRDDAKPLLRLKGFPSFPLVERQANEVDWWDMVCNVKKLINEKKEDGKVFWQNLAGYKRQEALRPYLSSEEDRKKGKKFARYQLGDLLLHLEKKHEGEDWGKVYDEAWERIDKKVEGLSKHIKLEEERRSEDAQSKAALTDWLRAKASFVIEGLKEADKDEFCRCELKLQKWYGDLRGKPFAIEAENSILDISGFSKQYNCAFIWQKDGVKKLNLYLIINYFKGGKLRFKKIKPEAFEANRFYTVINKKSGEIVPMEVNFNFDDPNLIILPLAFGKRQGREFIWNDLLSLETGSLKLANGRVIEKTLYNRRTRQDEPALFVALTFERREVLDSSNIKPMNLIGVDRGENIPAVIALTDPEGCPLSRFKDSLGNPTHILRIGESYKEKQRTIQAKKEVEQRRAGGYSRKYASKAKNLADDMVRNTARDLLYYAVTQDAMLIFENLSRGFGRQGKRTFMAERQYTRMEDWLTAKLAYEGLPSKTYLSKTLAQYTSKTCSNCGFTITSADYDRVLEKLKKTATGWMTTINGKELKVEGQITYYNRYKRQNVVKDLSVELDRLSEESVNNDISSWTKGRSGEALSLLKKRFSHRPVQEKFVCLNCGFETHADEQAALNIARSWLFLRSQEYKKYQTNKTTGNTDKRAFVETWQSFYRKKLKEVWKPAV

SEQ ID NO: 30608 - protein, 980 aa, synthetic construct
  REGION 1..980: note = engineered CasX variant
QEIKRINKIRRRLVKDSNTKKAGKTGPMKTLLVRVMTPDLRERLENLRKKPENIPQPISNTSRANLNKLLTDYTEMKKAILHVYWEEFQKDPVGLMSRVAQPASKKIDQNKLKPEMDEKGNLTTAGFACSQCGQPLFVYKLEQVSEKGKAYTNYFGRCNVAEHEKLILLAQLKPEKDSDEAVTYSLGKFGQRALDFYSIHVTKESTHPVKPLAQIAGNRYASSHPVGKALSDACMGTIASFLSKYQDIIIEHQKVVKGNQKRLESLRELAGKENLEYPSVTLPPQPHTKEGVDAYNEVIARVRMWVNLNLWQKLKLSRDDAKPLLRLKGFPSFPLVERQANEVDWWDMVCNVKKLINEKKEDGKVFWQNLAGYKRQEALRPYLSSEEDRKKGKKFARYQLGDLLLHLEKKHEGEDWGKVYDEAWERIDKKVEGLSKHIKLEEERRSEDAQSKAALTDWLRAKASFVIEGLKEADKDEFCRCELKLQKWYGDLRGKPFAIEAENSILDISGFSKQYNCAFIWQKDGVKKLNLYLIINYFKGGKLRFKKIKPEAFEANRFYTVINKKSGEIVPMEVNFNFDDPNLIILPLAFGKRQGREFIWNDLLSLETGSLKLANGRVIEKTLYNRRTRQDEPALFVALTFERREVLDSSNIKPMNLIGVDRGENIPAVIALTDPEGCPLSRFKDSLGNPTHILRIGESYKEKQRTIQAKKEVEQRRAGGYSRKYASKAKNLADDMVRNTARDLLYYAVTQDAMLIFENLSRGFGRQGKRTFMAERQYTRMEDWLTAKLAYEGLPSKTYLSKTLAQYTSKTCSNCGFTITSADYDRVLEKLKKTATGWMTTINGKELKVEGQITYYNRYKRQNVVKDLSVELDRLSEESVNNDISSWTKGRSGEALSLLKKRFSHRPVQEKFVCLNCGFETHADEQAALNIARSWLFLRSQEYKKYQTNKTTGNTDKRAFVETWQSFYRKKLKEVWKPAV

SEQ ID NO: 30609 - protein, 980 aa, synthetic construct
  REGION 1..980: note = engineered CasX variant
QEIKRINKIRRRLVKDSNTKKAGKTGPMKTLLVRVMTPDLRERLENLRKKPENIPQPISNTSRANLNKLLTDYTEMKKAILHVYWEEFQKDPVGLMSRVAQPASKKIDQNKLKPEMDEKGNLTTAGFACSQCGQPLFVYKLEQVSEKGKAYTNYFGRCNVAEHEKLILLAQLKPEKDSDEAVTYSLGKFGQRALDFYSIHVTKESTHPVKPLAQIAGNRYASSSPVGKALSDACMGTIASFLSKYQDIIIEHQKVVKGNQKRLESLRELAGKENLEYPSVTLPPQPHTKEGVDAYNEVIARVRMWVNLNLWQKLKLSRDDAKPLLRLKGFPSFPLVERQANEVDWWDMVCNVKKLINEKKEDGKVFWQNLAGYKRQEALRPYLSSEEDRKKGKKFARYQLGDLLLHLEKKHEGEDWGKVYDEAWERIDKKVEGLSKHIKLEEERRSEDAQSKAALTDWLRAKASFVIEGLKEADKDEFCRCELKLQKWYGDLRGKPFAIEAENSILDISGFSKQYNCAFIWQKDGVKKLNLYLIINYFKGGKLRFKKIKPEAFEANRFYTVINKKSGEIVPMEVNFNFDDPNLIILPLAFGKRQGREFIWNDLLSLETGSLKLANGRVIEKTLYNRRTRQDEPALFVALTFERREVLDSSNIKPMNLIGVDRGENIPAVIALTDPEGCPLSRFKDSLGNPTHILRIGESYKEKQRTIQAKKEVEQRRAGGYSRKYASKAKNLADDMVRNTARDLLYYAVTQDAMLIFENLSRGFGRQGKRTFMAERQYTRMEDWLTAKLAYEGLPSKTYLSKTLAQYTSKTCSNCGFTITSADYDRVLEKLKKTATGWMTTINGKELKVEGQITYYNRYKRQNVVKDLSVELDRLSEESVNNDISSWTKGRSGEALSLLKKRFSHRPVQEKFVCLNCGFETHADEQAALNIARSWLFLRSQEYKKYQTNKTTGNTDKRAFVETWQSFYRKKLKEVWKPAV

SEQ ID NO: 30610 - protein, 980 aa, synthetic construct
  REGION 1..980: note = engineered CasX variant
QEIKRINKIRRRLVKDSNTKKAGKTGPMKTLLVRVMTPDLRERLENLRKKPENIPQPISNTSRANLNKLLTDYTEMKKAILHVYWEEFQKDPVGLMSRVAQPASKKIDQNKLKPEMDEKGNLTTAGFACSQCGQPLFVYKLEQVSEKGKAYTNYFGRCNVAEHEKLILLAQLKPEKDSDEAVTYSLGKFGQRALDFYSIHVTKESTHPVKPLAQIAGNRYASSTPVGKALSDACMGTIASFLSKYQDIIIEHQKVVKGNQKRLESLRELAGKENLEYPSVTLPPQPHTKEGVDAYNEVIARVRMWVNLNLWQKLKLSRDDAKPLLRLKGFPSFPLVERQANEVDWWDMVCNVKKLINEKKEDGKVFWQNLAGYKRQEALRPYLSSEEDRKKGKKFARYQLGDLLLHLEKKHEGEDWGKVYDEAWERIDKKVEGLSKHIKLEEERRSEDAQSKAALTDWLRAKASFVIEGLKEADKDEFCRCELKLQKWYGDLRGKPFAIEAENSILDISGFSKQYNCAFIWQKDGVKKLNLYLIINYFKGGKLRFKKIKPEAFEANRFYTVINKKSGEIVPMEVNFNFDDPNLIILPLAFGKRQGREFIWNDLLSLETGSLKLANGRVIEKTLYNRRTRQDEPALFVALTFERREVLDSSNIKPMNLIGVDRGENIPAVIALTDPEGCPLSRFKDSLGNPTHILRIGESYKEKQRTIQAKKEVEQRRAGGYSRKYASKAKNLADDMVRNTARDLLYYAVTQDAMLIFENLSRGFGRQGKRTFMAERQYTRMEDWLTAKLAYEGLPSKTYLSKTLAQYTSKTCSNCGFTITSADYDRVLEKLKKTATGWMTTINGKELKVEGQITYYNRYKRQNVVKDLSVELDRLSEESVNNDISSWTKGRSGEALSLLKKRFSHRPVQEKFVCLNCGFETHADEQAALNIARSWLFLRSQEYKKYQTNKTTGNTDKRAFVETWQSFYRKKLKEVWKPAV

SEQ ID NO: 30611 - protein, 980 aa, synthetic construct
  REGION 1..980: note = engineered CasX variant
QEIKRINKIRRRLVKDSNTKKAGKTGPMKTLLVRVMTPDLRERLENLRKKPENIPQPISNTSRANLNKLLTDYTEMKKAILHVYWEEFQKDPVGLMSRVAQPASKKIDQNKLKPEMDEKGNLTTAGFACSQCGQPLFVYKLEQVSEKGKAYTNYFGRCNVAEHEKLILLAQLKPEKDSDEAVTYSLGKFGQRALDFYSIHVTKESTHPVKPLAQIAGNRYASSAPVGKALSDACMGTIASFLSKYQDIIIEHQKVVKGNQKRLESLRELAGKENLEYPSVTLPPQPHTKEGVDAYNEVIARVRMWVNLNLWQKLKLSRDDAKPLLRLKGFPSFPLVERQANEVDWWDMVCNVKKLINEKKEDGKVFWQNLAGYKRQEALRPYLSSEEDRKKGKKFARYQLGDLLLHLEKKHEGEDWGKVYDEAWERIDKKVEGLSKHIKLEEERRSEDAQSKAALTDWLRAKASFVIEGLKEADKDEFCRCELKLQKWYGDLRGKPFAIEAENSILDISGFSKQYNCAFIWQKDGVKKLNLYLIINYFKGGKLRFKKIKPEAFEANRFYTVINKKSGEIVPMEVNFNFDDPNLIILPLAFGKRQGREFIWNDLLSLETGSLKLANGRVIEKTLYNRRTRQDEPALFVALTFERREVLDSSNIKPMNLIGVDRGENIPAVIALTDPEGCPLSRFKDSLGNPTHILRIGESYKEKQRTIQAKKEVEQRRAGGYSRKYASKAKNLADDMVRNTARDLLYYAVTQDAMLIFENLSRGFGRQGKRTFMAERQYTRMEDWLTAKLAYEGLPSKTYLSKTLAQYTSKTCSNCGFTITSADYDRVLEKLKKTATGWMTTINGKELKVEGQITYYNRYKRQNVVKDLSVELDRLSEESVNNDISSWTKGRSGEALSLLKKRFSHRPVQEKFVCLNCGFETHADEQAALNIARSWLFLRSQEYKKYQTNKTTGNTDKRAFVETWQSFYRKKLKEVWKPAV

SEQ ID NO: 30612 - protein, 980 aa, synthetic construct
  REGION 1..980: note = engineered CasX variant
QEIKRINKIRRRLVKDSNTKKAGKTGPMKTLLVRVMTPDLRERLENLRKKPENIPQPISNTSRANLNKLLTDYTEMKKAILHVYWEEFQKDPVGLMSRVAQPASKKIDQNKLKPEMDEKGNLTTAGFACSQCGQPLFVYKLEQVSEKGKAYTNYFGRCNVAEHEKLILLAQLKPEKDSDEAVTYSLGKFGQRALDFYSIHVTKESTHPVKPLAQIAGNRYASSVPVGKALSDACMGTIASFLSKYQDIIIEHQKVVKGNQKRLESLRELAGKENLEYPSVTLPPQPHTKEGVDAYNEVIARVRMWVNLNLWQKLKLSRDDAKPLLRLKGFPSFPLVERQANEVDWWDMVCNVKKLINEKKEDGKVFWQNLAGYKRQEALRPYLSSEEDRKKGKKFARYQLGDLLLHLEKKHEGEDWGKVYDEAWERIDKKVEGLSKHIKLEEERRSEDAQSKAALTDWLRAKASFVIEGLKEADKDEFCRCELKLQKWYGDLRGKPFAIEAENSILDISGFSKQYNCAFIWQKDGVKKLNLYLIINYFKGGKLRFKKIKPEAFEANRFYTVINKKSGEIVPMEVNFNFDDPNLIILPLAFGKRQGREFIWNDLLSLETGSLKLANGRVIEKTLYNRRTRQDEPALFVALTFERREVLDSSNIKPMNLIGVDRGENIPAVIALTDPEGCPLSRFKDSLGNPTHILRIGESYKEKQRTIQAKKEVEQRRAGGYSRKYASKAKNLADDMVRNTARDLLYYAVTQDAMLIFENLSRGFGRQGKRTFMAERQYTRMEDWLTAKLAYEGLPSKTYLSKTLAQYTSKTCSNCGFTITSADYDRVLEKLKKTATGWMTTINGKELKVEGQITYYNRYKRQNVVKDLSVELDRLSEESVNNDISSWTKGRSGEALSLLKKRFSHRPVQEKFVCLNCGFETHADEQAALNIARSWLFLRSQEYKKYQTNKTTGNTDKRAFVETWQSFYRKKLKEVWKPAV

SEQ ID NO: 30613 - protein, 979 aa, synthetic construct
  REGION 1..979: note = engineered CasX variant
QEIKRINKIRRRLVKDSNTKKAGKTGPMKTLLVRVMTPDLRERLENLRKKPENIPQPISNTSRANLNKLLTDYTEMKKAILHVYWEEFQKDPVGLMSRVAQPASKKIDQNKLKPEMDEKGNLTTAGFACSQCGQPLFVYKLEQVSEKGKAYTNYFGRCNVAEHEKLIKLAQLKPEKDSDEAVTYSLGKFGQRALDFYSIHVTKESTHPVKPLAQIAGNRYASSPVGKALSDACMGTIASFLSKYQDIIIEHQKVVKGNQKRLESLRELAGKENLEYPSVTLPPQPHTKEGVDAYNEVIARVRMWVNLNLWQKLKLSRDDAKPLLRLKGFPSFPLVERQANEVDWWDMVCNVKKLINEKKEDGKVFWQNLAGYKRQEALRPYLSSEEDRKKGKKFARYQLGDLLLHLEKKHEGEDWGKVYDEAWERIDKKVEGLSKHIKLEEERRSEDAQSKAALTDWLRAKASFVIEGLKEADKDEFCRCELKLQKWYGDLRGKPFAIEAENSILDISGFSKQYNCAFIWQKDGVKKLNLYLIINYFKGGKLRFKKIKPEAFEANRFYTVINKKSGEIVPMEVNFNFDDPNLIILPLAFGKRQGREFIWNDLLSLETGSLKLANGRVIEKTLYNRRTRQDEPALFVALTFERREVLDSSNIKPMNLIGVDRGENIPAVIALTDPEGCPLSRFKDSLGNPTHILRIGESYKEKQRTIQAKKEVEQRRAGGYSRKYASKAKNLADDMVRNTARDLLYYAVTQDAMLIFENLSRGFGRQGKRTFMAERQYTRMEDWLTAKLAYEGLPSKTYLSKTLAQYTSKTCSNCGFTITSADYDRVLEKLKKTATGWMTTINGKELKVEGQITYYNRYKRQNVVKDLSVELDRLSEESVNNDISSWTKGRSGEALSLLKKRFSHRPVQEKFVCLNCGFETHADEQAALNIARSWLFLRSQEYKKYQTNKTTGNTDKRAFVETWQSFYRKKLKEVWKPAV

SEQ ID NO: 30614 - protein, 979 aa, synthetic construct
  REGION 1..979: note = engineered CasX variant
QEIKRINKIRRRLVKDSNTKKAGKTGPMKTLLVRVMTPDLRERLENLRKKPENIPQPISNTSRANLNKLLTDYTEMKKAILHVYWEEFQKDPVGLMSRVAQPASKKIDQNKLKPEMDEKGNLTTAGFACSQCGQPLFVYKLEQVSEKGKAYTNYFGRCNVAEHEKLILLAQLKPEKDSDEAVTYSLGKFGQRALDFYSIHVTKESTHPVKPLAQIAGNRYASSYPVGKALSDACMGTIASFLSKYQDIIIEHQKVVKGNQKRLESLRELAGKENLEYPSVTLPPQPHTKEGVDAYNEVIARVRMWVNLNLWQKLKLSRDDAKPLLRLKGFPSFPLVERQANEVDWWDMVCNVKKLINEKKEDGKVFWQNLAGYKRQEALRPYLSSEEDRKKGKKFARYQLGDLLLHLEKKHGEDWGKVYDEAWERIDKKVEGLSKHIKLEEERRSEDAQSKAALTDWLRAKASFVIEGLKEADKDEFCRCDLKLQKWYGDLRGKPFAIEAENSILDISGFSKQYNCAFIWQKDGVKKLNLYLIINYFKGGKLRFKKIKPEAFEANRFYTVINKKSGEIVPMEVNFNFDDPNLIILPLAFGKRQGREFIWNDLLSLETGSLKLANGRVIEKTLYNRRTRQDEPALFVALTFERREVLDSSNIKPMNLIGVDRGENIPAVIALTDPEGCPLSRFKDSLGNPTHILRIGESYKEKQRTIQAKKEVEQRRAGGYSRKYASKAKNLADDMVRNTARDLLYYAVTQDAMLIFENLSRGFGRQGKRTFMAERQYTRMEDWLTAKLAYEGLPSKTYLSKTLAQYTSKTCSNCGFTITSADYDRVLEKLKKTATGWMTTINGKELKVEGQITYYNRYKRQNVVKDLSVELDRLSEESVNNDISSWTKGRSGEALSLLKKRFSHRPVQEKFVCLNCGFETHADEQAALNIARSWLFLRSQEYKKYQTNKTTGNTDKRAFVETWQSFYRKKLKEVWKPAV

SEQ ID NO: 30615 - protein, 979 aa, synthetic construct
  REGION 1..979: note = engineered CasX variant
QEIKRINKIRRRLVKDSNTKKAGKTGPMKTLLVRVMTPDLRERLENLRKKPENIPQPISNTSRANLNKLLTDYTEMKKAILHVYWEEFQKDPVGLMSRVAQPASKKIDQNKLKPEMDEKGNLTTAGFACSQCGQPLFVYKLEQVSEKGKAYTNYFGRCNVAEHEKLILLAQLKPEKDSDEAVTYSLGKFGQRALDFYSIHVTKESTHPVKPLAQIAGNRYASSHPVGKALSDACMGTIASFLSKYQDIIIEHQKVVKGNQKRLESLRELAGKENLEYPSVTLPPQPHTKEGVDAYNEVIARVRMWVNLNLWQKLKLSRDDAKPLLRLKGFPSFPLVERQANEVDWWDMVCNVKKLINEKKEDGKVFWQNLAGYKRQEALRPYLSSEEDRKKGKKFARYQLGDLLLHLEKKHGEDWGKVYDEAWERIDKKVEGLSKHIKLEEERRSEDAQSKAALTDWLRAKASFVIEGLKEADKDEFCRCDLKLQKWYGDLRGKPFAIEAENSILDISGFSKQYNCAFIWQKDGVKKLNLYLIINYFKGGKLRFKKIKPEAFEANRFYTVINKKSGEIVPMEVNFNFDDPNLIILPLAFGKRQGREFIWNDLLSLETGSLKLANGRVIEKTLYNRRTRQDEPALFVALTFERREVLDSSNIKPMNLIGVDRGENIPAVIALTDPEGCPLSRFKDSLGNPTHILRIGESYKEKQRTIQAKKEVEQRRAGGYSRKYASKAKNLADDMVRNTARDLLYYAVTQDAMLIFENLSRGFGRQGKRTFMAERQYTRMEDWLTAKLAYEGLPSKTYLSKTLAQYTSKTCSNCGFTITSADYDRVLEKLKKTATGWMTTINGKELKVEGQITYYNRYKRQNVVKDLSVELDRLSEESVNNDISSWTKGRSGEALSLLKKRFSHRPVQEKFVCLNCGFETHADEQAALNIARSWLFLRSQEYKKYQTNKTTGNTDKRAFVETWQSFYRKKLKEVWKPAV

SEQ ID NO: 30616 - protein, 979 aa, synthetic construct
  REGION 1..979: note = engineered CasX variant
QEIKRINKIRRRLVKDSNTKKAGKTGPMKTLLVRVMTPDLRERLENLRKKPENIPQPISNTSRANLNKLLTDYTEMKKAILHVYWEEFQKDPVGLMSRVAQPASKKIDQNKLKPEMDEKGNLTTAGFACSQCGQPLFVYKLEQVSEKGKAYTNYFGRCNVAEHEKLILLAQLKPEKDSDEAVTYSLGKFGQRALDFYSIHVTKESTHPVKPLAQIAGNRYASSSPVGKALSDACMGTIASFLSKYQDIIIEHQKVVKGNQKRLESLRELAGKENLEYPSVTLPPQPHTKEGVDAYNEVIARVRMWVNLNLWQKLKLSRDDAKPLLRLKGFPSFPLVERQANEVDWWDMVCNVKKLINEKKEDGKVFWQNLAGYKRQEALRPYLSSEEDRKKGKKFARYQLGDLLLHLEKKHGEDWGKVYDEAWERIDKKVEGLSKHIKLEEERRSEDAQSKAALTDWLRAKASFVIEGLKEADKDEFCRCDLKLQKWYGDLRGKPFAIEAENSILDISGFSKQYNCAFIWQKDGVKKLNLYLIINYFKGGKLRFKKIKPEAFEANRFYTVINKKSGEIVPMEVNFNFDDPNLIILPLAFGKRQGREFIWNDLLSLETGSLKLANGRVIEKTLYNRRTRQDEPALFVALTFERREVLDSSNIKPMNLIGVDRGENIPAVIALTDPEGCPLSRFKDSLGNPTHILRIGESYKEKQRTIQAKKEVEQRRAGGYSRKYASKAKNLADDMVRNTARDLLYYAVTQDAMLIFENLSRGFGRQGKRTFMAERQYTRMEDWLTAKLAYEGLPSKTYLSKTLAQYTSKTCSNCGFTITSADYDRVLEKLKKTATGWMTTINGKELKVEGQITYYNRYKRQNVVKDLSVELDRLSEESVNNDISSWTKGRSGEALSLLKKRFSHRPVQEKFVCLNCGFETHADEQAALNIARSWLFLRSQEYKKYQTNKTTGNTDKRAFVETWQSFYRKKLKEVWKPAV

SEQ ID NO: 30617 - protein, 979 aa, synthetic construct
  REGION 1..979: note = engineered CasX variant
QEIKRINKIRRRLVKDSNTKKAGKTGPMKTLLVRVMTPDLRERLENLRKKPENIPQPISNTSRANLNKLLTDYTEMKKAILHVYWEEFQKDPVGLMSRVAQPASKKIDQNKLKPEMDEKGNLTTAGFACSQCGQPLFVYKLEQVSEKGKAYTNYFGRCNVAEHEKLILLAQLKPEKDSDEAVTYSLGKFGQRALDFYSIHVTKESTHPVKPLAQIAGNRYASSTPVGKALSDACMGTIASFLSKYQDIIIEHQKVVKGNQKRLESLRELAGKENLEYPSVTLPPQPHTKEGVDAYNEVIARVRMWVNLNLWQKLKLSRDDAKPLLRLKGFPSFPLVERQANEVDWWDMVCNVKKLINEKKEDGKVFWQNLAGYKRQEALRPYLSSEEDRKKGKKFARYQLGDLLLHLEKKHGEDWGKVYDEAWERIDKKVEGLSKHIKLEEERRSEDAQSKAALTDWLRAKASFVIEGLKEADKDEFCRCDLKLQKWYGDLRGKPFAIEAENSILDISGFSKQYNCAFIWQKDGVKKLNLYLIINYFKGGKLRFKKIKPEAFEANRFYTVINKKSGEIVPMEVNFNFDDPNLIILPLAFGKRQGREFIWNDLLSLETGSLKLANGRVIEKTLYNRRTRQDEPALFVALTFERREVLDSSNIKPMNLIGVDRGENIPAVIALTDPEGCPLSRFKDSLGNPTHILRIGESYKEKQRTIQAKKEVEQRRAGGYSRKYASKAKNLADDMVRNTARDLLYYAVTQDAMLIFENLSRGFGRQGKRTFMAERQYTRMEDWLTAKLAYEGLPSKTYLSKTLAQYTSKTCSNCGFTITSADYDRVLEKLKKTATGWMTTINGKELKVEGQITYYNRYKRQNVVKDLSVELDRLSEESVNNDISSWTKGRSGEALSLLKKRFSHRPVQEKFVCLNCGFETHADEQAALNIARSWLFLRSQEYKKYQTNKTTGNTDKRAFVETWQSFYRKKLKEVWKPAV

SEQ ID NO: 30618 - protein, 979 aa, synthetic construct
  REGION 1..979: note = engineered CasX variant
QEIKRINKIRRRLVKDSNTKKAGKTGPMKTLLVRVMTPDLRERLENLRKKPENIPQPISNTSRANLNKLLTDYTEMKKAILHVYWEEFQKDPVGLMSRVAQPASKKIDQNKLKPEMDEKGNLTTAGFACSQCGQPLFVYKLEQVSEKGKAYTNYFGRCNVAEHEKLILLAQLKPEKDSDEAVTYSLGKFGQRALDFYSIHVTKESTHPVKPLAQIAGNRYASSAPVGKALSDACMGTIASFLSKYQDIIIEHQKVVKGNQKRLESLRELAGKENLEYPSVTLPPQPHTKEGVDAYNEVIARVRMWVNLNLWQKLKLSRDDAKPLLRLKGFPSFPLVERQANEVDWWDMVCNVKKLINEKKEDGKVFWQNLAGYKRQEALRPYLSSEEDRKKGKKFARYQLGDLLLHLEKKHGEDWGKVYDEAWERIDKKVEGLSKHIKLEEERRSEDAQSKAALTDWLRAKASFVIEGLKEADKDEFCRCDLKLQKWYGDLRGKPFAIEAENSILDISGFSKQYNCAFIWQKDGVKKLNLYLIINYFKGGKLRFKKIKPEAFEANRFYTVINKKSGEIVPMEVNFNFDDPNLIILPLAFGKRQGREFIWNDLLSLETGSLKLANGRVIEKTLYNRRTRQDEPALFVALTFERREVLDSSNIKPMNLIGVDRGENIPAVIALTDPEGCPLSRFKDSLGNPTHILRIGESYKEKQRTIQAKKEVEQRRAGGYSRKYASKAKNLADDMVRNTARDLLYYAVTQDAMLIFENLSRGFGRQGKRTFMAERQYTRMEDWLTAKLAYEGLPSKTYLSKTLAQYTSKTCSNCGFTITSADYDRVLEKLKKTATGWMTTINGKELKVEGQITYYNRYKRQNVVKDLSVELDRLSEESVNNDISSWTKGRSGEALSLLKKRFSHRPVQEKFVCLNCGFETHADEQAALNIARSWLFLRSQEYKKYQTNKTTGNTDKRAFVETWQSFYRKKLKEVWKPAV

SEQ ID NO: 30619 - protein, 979 aa, synthetic construct
  REGION 1..979: note = engineered CasX variant
QEIKRINKIRRRLVKDSNTKKAGKTGPMKTLLVRVMTPDLRERLENLRKKPENIPQPISNTSRANLNKLLTDYTEMKKAILHVYWEEFQKDPVGLMSRVAQPASKKIDQNKLKPEMDEKGNLTTAGFACSQCGQPLFVYKLEQVSEKGKAYTNYFGRCNVAEHEKLILLAQLKPEKDSDEAVTYSLGKFGQRALDFYSIHVTKESTHPVKPLAQIAGNRYASSVPVGKALSDACMGTIASFLSKYQDIIIEHQKVVKGNQKRLESLRELAGKENLEYPSVTLPPQPHTKEGVDAYNEVIARVRMWVNLNLWQKLKLSRDDAKPLLRLKGFPSFPLVERQANEVDWWDMVCNVKKLINEKKEDGKVFWQNLAGYKRQEALRPYLSSEEDRKKGKKFARYQLGDLLLHLEKKHGEDWGKVYDEAWERIDKKVEGLSKHIKLEEERRSEDAQSKAALTDWLRAKASFVIEGLKEADKDEFCRCDLKLQKWYGDLRGKPFAIEAENSILDISGFSKQYNCAFIWQKDGVKKLNLYLIINYFKGGKLRFKKIKPEAFEANRFYTVINKKSGEIVPMEVNFNFDDPNLIILPLAFGKRQGREFIWNDLLSLETGSLKLANGRVIEKTLYNRRTRQDEPALFVALTFERREVLDSSNIKPMNLIGVDRGENIPAVIALTDPEGCPLSRFKDSLGNPTHILRIGESYKEKQRTIQAKKEVEQRRAGGYSRKYASKAKNLADDMVRNTARDLLYYAVTQDAMLIFENLSRGFGRQGKRTFMAERQYTRMEDWLTAKLAYEGLPSKTYLSKTLAQYTSKTCSNCGFTITSADYDRVLEKLKKTATGWMTTINGKELKVEGQITYYNRYKRQNVVKDLSVELDRLSEESVNNDISSWTKGRSGEALSLLKKRFSHRPVQEKFVCLNCGFETHADEQAALNIARSWLFLRSQEYKKYQTNKTTGNTDKRAFVETWQSFYRKKLKEVWKPAV

SEQ ID NO: 30620 - protein, 978 aa, synthetic construct
  REGION 1..978: note = engineered CasX variant
QEIKRINKIRRRLVKDSNTKKAGKTGPMKTLLVRVMTPDLRERLENLRKKPENIPQPISNTSRANLNKLLTDYTEMKKAILHVYWEEFQKDPVGLMSRVAQPASKKIDQNKLKPEMDEKGNLTTAGFACSQCGQPLFVYKLEQVSEKGKAYTNYFGRCNVAEHEKLIKLAQLKPEKDSDEAVTYSLGKFGQRALDFYSIHVTKESTHPVKPLAQIAGNRYASSPVGKALSDACMGTIASFLSKYQDIIIEHQKVVKGNQKRLESLRELAGKENLEYPSVTLPPQPHTKEGVDAYNEVIARVRMWVNLNLWQKLKLSRDDAKPLLRLKGFPSFPLVERQANEVDWWDMVCNVKKLINEKKEDGKVFWQNLAGYKRQEALRPYLSSEEDRKKGKKFARYQLGDLLLHLEKKHGEDWGKVYDEAWERIDKKVEGLSKHIKLEEERRSEDAQSKAALTDWLRAKASFVIEGLKEADKDEFCRCDLKLQKWYGDLRGKPFAIEAENSILDISGFSKQYNCAFIWQKDGVKKLNLYLIINYFKGGKLRFKKIKPEAFEANRFYTVINKKSGEIVPMEVNFNFDDPNLIILPLAFGKRQGREFIWNDLLSLETGSLKLANGRVIEKTLYNRRTRQDEPALFVALTFERREVLDSSNIKPMNLIGVDRGENIPAVIALTDPEGCPLSRFKDSLGNPTHILRIGESYKEKQRTIQAKKEVEQRRAGGYSRKYASKAKNLADDMVRNTARDLLYYAVTQDAMLIFENLSRGFGRQGKRTFMAERQYTRMEDWLTAKLAYEGLPSKTYLSKTLAQYTSKTCSNCGFTITSADYDRVLEKLKKTATGWMTTINGKELKVEGQITYYNRYKRQNVVKDLSVELDRLSEESVNNDISSWTKGRSGEALSLLKKRFSHRPVQEKFVCLNCGFETHADEQAALNIARSWLFLRSQEYKKYQTNKTTGNTDKRAFVETWQSFYRKKLKEVWKPAV

SEQ ID NO: 30621 - protein, 979 aa, synthetic construct
  REGION 1..979: note = engineered CasX variant
QEIKRINKIRRRLVKDSNTKKAGKTGPMKTLLVRVMTPDLRERLENLRKKPENIPQPISNTSRANLNKLLTDYTEMKKAILHVYWEEFQKDPVGLMSRVAQPASKKIDQNKLKPEMDEKGNLTTAGFACSQCGQPLFVYKLEQVSEKGKAYTNYFGRCNVAEHEKLILLAQLKPEKDSDEAVTYSLGKFGQRALDFYSIHVTKESTHPVKPLAQIAGNRYASSYPVGKALSDACMGTIASFLSKYQDIIIEHQKVVKGNQKRLESLRELAGKENLEYPSVTLPPQPHTKEGVDAYNEVIARVRMWVNLNLWQKLKLSRDDAKPLLRLKGFPSFPLVERQANEVDWWDMVCNVKKLINEKKEDGKVFWQNLAGYKRQEALRPYLSSEEDRKKGKKFARYQLGDLLLHLEKKHGEDWGKVYDEAWERIDKKVEGLSKHIKLEEERRSEDAQSKAALTDWLRAKASFVIEGLKEADKDEFCRCELKLQKWYGDLRGKPFAIEAENSILDISGFSKQYNCAFIWQKDGVKKLNLYLIINYFKGGKLRFKKIKPEAFEANRFYTVINKKSGEIVPMEVNFNFDDPNLIILPLAFGKRFGREFIWNDLLSLETGSLKLANGRVIEKTLYNRRTRQDEPALFVALTFERREVLDSSNIKPMNLIGVDRGENIPAVIALTDPEGCPLSRFKDSLGNPTHILRIGESYKEKQRTIQAKKEVEQRRAGGYSRKYASKAKNLADDMVRNTARDLLYYAVTQDAMLIFENLSRGFGRQGKRTFMAERQYTRMEDWLTAKLAYEGLPSKTYLSKTLAQYTSKTCSNCGFTITSADYDRVLEKLKKTATGWMTTINGKELKVEGQITYYNRYKRQNVVKDLSVELDRLSEESVNNDISSWTKGRSGEALSLLKKRFSHRPVQEKFVCLNCGFETHADEQAALNIARSWLFLRSQEYKKYQTNKTTGNTDKRAFVETWQSFYRKKLKEVWKPAV

SEQ ID NO: 30622 - protein, 979 aa, synthetic construct
  REGION 1..979: note = engineered CasX variant
QEIKRINKIRRRLVKDSNTKKAGKTGPMKTLLVRVMTPDLRERLENLRKKPENIPQPISNTSRANLNKLLTDYTEMKKAILHVYWEEFQKDPVGLMSRVAQPASKKIDQNKLKPEMDEKGNLTTAGFACSQCGQPLFVYKLEQVSEKGKAYTNYFGRCNVAEHEKLILLAQLKPEKDSDEAVTYSLGKFGQRALDFYSIHVTKESTHPVKPLAQIAGNRYASSHPVGKALSDACMGTIASFLSKYQDIIIEHQKVVKGNQKRLESLRELAGKENLEYPSVTLPPQPHTKEGVDAYNEVIARVRMWVNLNLWQKLKLSRDDAKPLLRLKGFPSFPLVERQANEVDWWDMVCNVKKLINEKKEDGKVFWQNLAGYKRQEALRPYLSSEEDRKKGKKFARYQLGDLLLHLEKKHGEDWGKVYDEAWERIDKKVEGLSKHIKLEEERRSEDAQSKAALTDWLRAKASFVIEGLKEADKDEFCRCELKLQKWYGDLRGKPFAIEAENSILDISGFSKQYNCAFIWQKDGVKKLNLYLIINYFKGGKLRFKKIKPEAFEANRFYTVINKKSGEIVPMEVNFNFDDPNLIILPLAFGKRFGREFIWNDLLSLETGSLKLANGRVIEKTLYNRRTRQDEPALFVALTFERREVLDSSNIKPMNLIGVDRGENIPAVIALTDPEGCPLSRFKDSLGNPTHILRIGESYKEKQRTIQAKKEVEQRRAGGYSRKYASKAKNLADDMVRNTARDLLYYAVTQDAMLIFENLSRGFGRQGKRTFMAERQYTRMEDWLTAKLAYEGLPSKTYLSKTLAQYTSKTCSNCGFTITSADYDRVLEKLKKTATGWMTTINGKELKVEGQITYYNRYKRQNVVKDLSVELDRLSEESVNNDISSWTKGRSGEALSLLKKRFSHRPVQEKFVCLNCGFETHADEQAALNIARSWLFLRSQEYKKYQTNKTTGNTDKRAFVETWQSFYRKKLKEVWKPAV

SEQ ID NO: 30623 - protein, 979 aa, synthetic construct
  REGION 1..979: note = engineered CasX variant
QEIKRINKIRRRLVKDSNTKKAGKTGPMKTLLVRVMTPDLRERLENLRKKPENIPQPISNTSRANLNKLLTDYTEMKKAILHVYWEEFQKDPVGLMSRVAQPASKKIDQNKLKPEMDEKGNLTTAGFACSQCGQPLFVYKLEQVSEKGKAYTNYFGRCNVAEHEKLILLAQLKPEKDSDEAVTYSLGKFGQRALDFYSIHVTKESTHPVKPLAQIAGNRYASSSPVGKALSDACMGTIASFLSKYQDIIIEHQKVVKGNQKRLESLRELAGKENLEYPSVTLPPQPHTKEGVDAYNEVIARVRMWVNLNLWQKLKLSRDDAKPLLRLKGFPSFPLVERQANEVDWWDMVCNVKKLINEKKEDGKVFWQNLAGYKRQEALRPYLSSEEDRKKGKKFARYQLGDLLLHLEKKHGEDWGKVYDEAWERIDKKVEGLSKHIKLEEERRSEDAQSKAALTDWLRAKASFVIEGLKEADKDEFCRCELKLQKWYGDLRGKPFAIEAENSILDISGFSKQYNCAFIWQKDGVKKLNLYLIINYFKGGKLRFKKIKPEAFEANRFYTVINKKSGEIVPMEVNFNFDDPNLIILPLAFGKRFGREFIWNDLLSLETGSLKLANGRVIEKTLYNRRTRQDEPALFVALTFERREVLDSSNIKPMNLIGVDRGENIPAVIALTDPEGCPLSRFKDSLGNPTHILRIGESYKEKQRTIQAKKEVEQRRAGGYSRKYASKAKNLADDMVRNTARDLLYYAVTQDAMLIFENLSRGFGRQGKRTFMAERQYTRMEDWLTAKLAYEGLPSKTYLSKTLAQYTSKTCSNCGFTITSADYDRVLEKLKKTATGWMTTINGKELKVEGQITYYNRYKRQNVVKDLSVELDRLSEESVNNDISSWTKGRSGEALSLLKKRFSHRPVQEKFVCLNCGFETHADEQAALNIARSWLFLRSQEYKKYQTNKTTGNTDKRAFVETWQSFYRKKLKEVWKPAV

SEQ ID NO: 30624 - protein, 979 aa, synthetic construct
  REGION 1..979: note = engineered CasX variant
QEIKRINKIRRRLVKDSNTKKAGKTGPMKTLLVRVMTPDLRERLENLRKKPENIPQPISNTSRANLNKLLTDYTEMKKAILHVYWEEFQKDPVGLMSRVAQPASKKIDQNKLKPEMDEKGNLTTAGFACSQCGQPLFVYKLEQVSEKGKAYTNYFGRCNVAEHEKLILLAQLKPEKDSDEAVTYSLGKFGQRALDFYSIHVTKESTHPVKPLAQIAGNRYASSTPVGKALSDACMGTIASFLSKYQDIIIEHQKVVKGNQKRLESLRELAGKENLEYPSVTLPPQPHTKEGVDAYNEVIARVRMWVNLNLWQKLKLSRDDAKPLLRLKGFPSFPLVERQANEVDWWDMVCNVKKLINEKKEDGKVFWQNLAGYKRQEALRPYLSSEEDRKKGKKFARYQLGDLLLHLEKKHGEDWGKVYDEAWERIDKKVEGLSKHIKLEEERRSEDAQSKAALTDWLRAKASFVIEGLKEADKDEFCRCELKLQKWYGDLRGKPFAIEAENSILDISGFSKQYNCAFIWQKDGVKKLNLYLIINYFKGGKLRFKKIKPEAFEANRFYTVINKKSGEIVPMEVNFNFDDPNLIILPLAFGKRFGREFIWNDLLSLETGSLKLANGRVIEKTLYNRRTRQDEPALFVALTFERREVLDSSNIKPMNLIGVDRGENIPAVIALTDPEGCPLSRFKDSLGNPTHILRIGESYKEKQRTIQAKKEVEQRRAGGYSRKYASKAKNLADDMVRNTARDLLYYAVTQDAMLIFENLSRGFGRQGKRTFMAERQYTRMEDWLTAKLAYEGLPSKTYLSKTLAQYTSKTCSNCGFTITSADYDRVLEKLKKTATGWMTTINGKELKVEGQITYYNRYKRQNVVKDLSVELDRLSEESVNNDISSWTKGRSGEALSLLKKRFSHRPVQEKFVCLNCGFETHADEQAALNIARSWLFLRSQEYKKYQTNKTTGNTDKRAFVETWQSFYRKKLKEVWKPAV

SEQ ID NO: 30625 - protein, 979 aa, synthetic construct
  REGION 1..979: note = engineered CasX variant
QEIKRINKIRRRLVKDSNTKKAGKTGPMKTLLVRVMTPDLRERLENLRKKPENIPQPISNTSRANLNKLLTDYTEMKKAILHVYWEEFQKDPVGLMSRVAQPASKKIDQNKLKPEMDEKGNLTTAGFACSQCGQPLFVYKLEQVSEKGKAYTNYFGRCNVAEHEKLILLAQLKPEKDSDEAVTYSLGKFGQRALDFYSIHVTKESTHPVKPLAQIAGNRYASSAPVGKALSDACMGTIASFLSKYQDIIIEHQKVVKGNQKRLESLRELAGKENLEYPSVTLPPQPHTKEGVDAYNEVIARVRMWVNLNLWQKLKLSRDDAKPLLRLKGFPSFPLVERQANEVDWWDMVCNVKKLINEKKEDGKVFWQNLAGYKRQEALRPYLSSEEDRKKGKKFARYQLGDLLLHLEKKHGEDWGKVYDEAWERIDKKVEGLSKHIKLEEERRSEDAQSKAALTDWLRAKASFVIEGLKEADKDEFCRCELKLQKWYGDLRGKPFAIEAENSILDISGFSKQYNCAFIWQKDGVKKLNLYLIINYFKGGKLRFKKIKPEAFEANRFYTVINKKSGEIVPMEVNFNFDDPNLIILPLAFGKRFGREFIWNDLLSLETGSLKLANGRVIEKTLYNRRTRQDEPALFVALTFERREVLDSSNIKPMNLIGVDRGENIPAVIALTDPEGCPLSRFKDSLGNPTHILRIGESYKEKQRTIQAKKEVEQRRAGGYSRKYASKAKNLADDMVRNTARDLLYYAVTQDAMLIFENLSRGFGRQGKRTFMAERQYTRMEDWLTAKLAYEGLPSKTYLSKTLAQYTSKTCSNCGFTITSADYDRVLEKLKKTATGWMTTINGKELKVEGQITYYNRYKRQNVVKDLSVELDRLSEESVNNDISSWTKGRSGEALSLLKKRFSHRPVQEKFVCLNCGFETHADEQAALNIARSWLFLRSQEYKKYQTNKTTGNTDKRAFVETWQSFYRKKLKEVWKPAV

SEQ ID NO: 30626 - protein, 979 aa, synthetic construct
  REGION 1..979: note = engineered CasX variant
QEIKRINKIRRRLVKDSNTKKAGKTGPMKTLLVRVMTPDLRERLENLRKKPENIPQPISNTSRANLNKLLTDYTEMKKAILHVYWEEFQKDPVGLMSRVAQPASKKIDQNKLKPEMDEKGNLTTAGFACSQCGQPLFVYKLEQVSEKGKAYTNYFGRCNVAEHEKLILLAQLKPEKDSDEAVTYSLGKFGQRALDFYSIHVTKESTHPVKPLAQIAGNRYASSVPVGKALSDACMGTIASFLSKYQDIIIEHQKVVKGNQKRLESLRELAGKENLEYPSVTLPPQPHTKEGVDAYNEVIARVRMWVNLNLWQKLKLSRDDAKPLLRLKGFPSFPLVERQANEVDWWDMVCNVKKLINEKKEDGKVFWQNLAGYKRQEALRPYLSSEEDRKKGKKFARYQLGDLLLHLEKKHGEDWGKVYDEAWERIDKKVEGLSKHIKLEEERRSEDAQSKAALTDWLRAKASFVIEGLKEADKDEFCRCELKLQKWYGDLRGKPFAIEAENSILDISGFSKQYNCAFIWQKDGVKKLNLYLIINYFKGGKLRFKKIKPEAFEANRFYTVINKKSGEIVPMEVNFNFDDPNLIILPLAFGKRFGREFIWNDLLSLETGSLKLANGRVIEKTLYNRRTRQDEPALFVALTFERREVLDSSNIKPMNLIGVDRGENIPAVIALTDPEGCPLSRFKDSLGNPTHILRIGESYKEKQRTIQAKKEVEQRRAGGYSRKYASKAKNLADDMVRNTARDLLYYAVTQDAMLIFENLSRGFGRQGKRTFMAERQYTRMEDWLTAKLAYEGLPSKTYLSKTLAQYTSKTCSNCGFTITSADYDRVLEKLKKTATGWMTTINGKELKVEGQITYYNRYKRQNVVKDLSVELDRLSEESVNNDISSWTKGRSGEALSLLKKRFSHRPVQEKFVCLNCGFETHADEQAALNIARSWLFLRSQEYKKYQTNKTTGNTDKRAFVETWQSFYRKKLKEVWKPAV

SEQ ID NO: 30627 - protein, 978 aa, synthetic construct
  REGION 1..978: note = engineered CasX variant
QEIKRINKIRRRLVKDSNTKKAGKTGPMKTLLVRVMTPDLRERLENLRKKPENIPQPISNTSRANLNKLLTDYTEMKKAILHVYWEEFQKDPVGLMSRVAQPASKKIDQNKLKPEMDEKGNLTTAGFACSQCGQPLFVYKLEQVSEKGKAYTNYFGRCNVAEHEKLIKLAQLKPEKDSDEAVTYSLGKFGQRALDFYSIHVTKESTHPVKPLAQIAGNRYASSPVGKALSDACMGTIASFLSKYQDIIIEHQKVVKGNQKRLESLRELAGKENLEYPSVTLPPQPHTKEGVDAYNEVIARVRMWVNLNLWQKLKLSRDDAKPLLRLKGFPSFPLVERQANEVDWWDMVCNVKKLINEKKEDGKVFWQNLAGYKRQEALRPYLSSEEDRKKGKKFARYQLGDLLLHLEKKHGEDWGKVYDEAWERIDKKVEGLSKHIKLEEERRSEDAQSKAALTDWLRAKASFVIEGLKEADKDEFCRCELKLQKWYGDLRGKPFAIEAENSILDISGFSKQYNCAFIWQKDGVKKLNLYLIINYFKGGKLRFKKIKPEAFEANRFYTVINKKSGEIVPMEVNFNFDDPNLIILPLAFGKRFGREFIWNDLLSLETGSLKLANGRVIEKTLYNRRTRQDEPALFVALTFERREVLDSSNIKPMNLIGVDRGENIPAVIALTDPEGCPLSRFKDSLGNPTHILRIGESYKEKQRTIQAKKEVEQRRAGGYSRKYASKAKNLADDMVRNTARDLLYYAVTQDAMLIFENLSRGFGRQGKRTFMAERQYTRMEDWLTAKLAYEGLPSKTYLSKTLAQYTSKTCSNCGFTITSADYDRVLEKLKKTATGWMTTINGKELKVEGQITYYNRYKRQNVVKDLSVELDRLSEESVNNDISSWTKGRSGEALSLLKKRFSHRPVQEKFVCLNCGFETHADEQAALNIARSWLFLRSQEYKKYQTNKTTGNTDKRAFVETWQSFYRKKLKEVWKPAV

SEQ ID NO: 30628 - protein, 979 aa, synthetic construct
  REGION 1..979: note = engineered CasX variant
QEIKRINKIRRRLVKDSNTKKAGKTGPMKTLLVRVMTPDLRERLENLRKKPENIPQPISNTSRANLNKLLTDYTEMKKAILHVYWEEFQKDPVGLMSRVAQPASKKIDQNKLKPEMDEKGNLTTAGFACSQCGQPLFVYKLEQVSEKGKAYTNYFGRCNVAEHEKLILLAQLKPEKDSDEAVTYSLGKFGQRALDFYSIHVTKESTHPVKPLAQIAGNRYASSYPVGKALSDACMGTIASFLSKYQDIIIEHQKVVKGNQKRLESLRELAGKENLEYPSVTLPPQPHTKEGVDAYNEVIARVRMWVNLNLWQKLKLSRDDAKPLLRLKGFPSFPLVERQANEVDWWDMVCNVKKLINEKKEDGKVFWQNLAGYKRQEALRPYLSSEEDRKKGKKFARYQLGDLLLHLEKKHGEDWGKVYDEAWERIDKKVEGLSKHIKLEEERRSEDAQSKAALTDWLRAKASFVIEGLKEADKDEFCRCELKLQKWYGDLRGKPFAIEAENSILDISGFSKQYNCAFIWQKDGVKKLNLYLIINYFKGGKLRFKKIKPEAFEANRFYTVINKKSGEIVPMEVNFNFDDPNLIILPLAFGKRVGREFIWNDLLSLETGSLKLANGRVIEKTLYNRRTRQDEPALFVALTFERREVLDSSNIKPMNLIGVDRGENIPAVIALTDPEGCPLSRFKDSLGNPTHILRIGESYKEKQRTIQAKKEVEQRRAGGYSRKYASKAKNLADDMVRNTARDLLYYAVTQDAMLIFENLSRGFGRQGKRTFMAERQYTRMEDWLTAKLAYEGLPSKTYLSKTLAQYTSKTCSNCGFTITSADYDRVLEKLKKTATGWMTTINGKELKVEGQITYYNRYKRQNVVKDLSVELDRLSEESVNNDISSWTKGRSGEALSLLKKRFSHRPVQEKFVCLNCGFETHADEQAALNIARSWLFLRSQEYKKYQTNKTTGNTDKRAFVETWQSFYRKKLKEVWKPAV

SEQ ID NO: 30629 - protein, 979 aa, synthetic construct
  REGION 1..979: note = engineered CasX variant
QEIKRINKIRRRLVKDSNTKKAGKTGPMKTLLVRVMTPDLRERLENLRKKPENIPQPISNTSRANLNKLLTDYTEMKKAILHVYWEEFQKDPVGLMSRVAQPASKKIDQNKLKPEMDEKGNLTTAGFACSQCGQPLFVYKLEQVSEKGKAYTNYFGRCNVAEHEKLILLAQLKPEKDSDEAVTYSLGKFGQRALDFYSIHVTKESTHPVKPLAQIAGNRYASSHPVGKALSDACMGTIASFLSKYQDIIIEHQKVVKGNQKRLESLRELAGKENLEYPSVTLPPQPHTKEGVDAYNEVIARVRMWVNLNLWQKLKLSRDDAKPLLRLKGFPSFPLVERQANEVDWWDMVCNVKKLINEKKEDGKVFWQNLAGYKRQEALRPYLSSEEDRKKGKKFARYQLGDLLLHLEKKHGEDWGKVYDEAWERIDKKVEGLSKHIKLEEERRSEDAQSKAALTDWLRAKASFVIEGLKEADKDEFCRCELKLQKWYGDLRGKPFAIEAENSILDISGFSKQYNCAFIWQKDGVKKLNLYLIINYFKGGKLRFKKIKPEAFEANRFYTVINKKSGEIVPMEVNFNFDDPNLIILPLAFGKRVGREFIWNDLLSLETGSLKLANGRVIEKTLYNRRTRQDEPALFVALTFERREVLDSSNIKPMNLIGVDRGENIPAVIALTDPEGCPLSRFKDSLGNPTHILRIGESYKEKQRTIQAKKEVEQRRAGGYSRKYASKAKNLADDMVRNTARDLLYYAVTQDAMLIFENLSRGFGRQGKRTFMAERQYTRMEDWLTAKLAYEGLPSKTYLSKTLAQYTSKTCSNCGFTITSADYDRVLEKLKKTATGWMTTINGKELKVEGQITYYNRYKRQNVVKDLSVELDRLSEESVNNDISSWTKGRSGEALSLLKKRFSHRPVQEKFVCLNCGFETHADEQAALNIARSWLFLRSQEYKKYQTNKTTGNTDKRAFVETWQSFYRKKLKEVWKPAV

SEQ ID NO: 30630 - protein, 979 aa, synthetic construct
  REGION 1..979: note = engineered CasX variant
QEIKRINKIRRRLVKDSNTKKAGKTGPMKTLLVRVMTPDLRERLENLRKKPENIPQPISNTSRANLNKLLTDYTEMKKAILHVYWEEFQKDPVGLMSRVAQPASKKIDQNKLKPEMDEKGNLTTAGFACSQCGQPLFVYKLEQVSEKGKAYTNYFGRCNVAEHEKLILLAQLKPEKDSDEAVTYSLGKFGQRALDFYSIHVTKESTHPVKPLAQIAGNRYASSSPVGKALSDACMGTIASFLSKYQDIIIEHQKVVKGNQKRLESLRELAGKENLEYPSVTLPPQPHTKEGVDAYNEVIARVRMWVNLNLWQKLKLSRDDAKPLLRLKGFPSFPLVERQANEVDWWDMVCNVKKLINEKKEDGKVFWQNLAGYKRQEALRPYLSSEEDRKKGKKFARYQLGDLLLHLEKKHGEDWGKVYDEAWERIDKKVEGLSKHIKLEEERRSEDAQSKAALTDWLRAKASFVIEGLKEADKDEFCRCELKLQKWYGDLRGKPFAIEAENSILDISGFSKQYNCAFIWQKDGVKKLNLYLIINYFKGGKLRFKKIKPEAFEANRFYTVINKKSGEIVPMEVNFNFDDPNLIILPLAFGKRVGREFIWNDLLSLETGSLKLANGRVIEKTLYNRRTRQDEPALFVALTFERREVLDSSNIKPMNLIGVDRGENIPAVIALTDPEGCPLSRFKDSLGNPTHILRIGESYKEKQRTIQAKKEVEQRRAGGYSRKYASKAKNLADDMVRNTARDLLYYAVTQDAMLIFENLSRGFGRQGKRTFMAERQYTRMEDWLTAKLAYEGLPSKTYLSKTLAQYTSKTCSNCGFTITSADYDRVLEKLKKTATGWMTTINGKELKVEGQITYYNRYKRQNVVKDLSVELDRLSEESVNNDISSWTKGRSGEALSLLKKRFSHRPVQEKFVCLNCGFETHADEQAALNIARSWLFLRSQEYKKYQTNKTTGNTDKRAFVETWQSFYRKKLKEVWKPAV

SEQ ID NO: 30631 - protein, 979 aa, synthetic construct
  REGION 1..979: note = engineered CasX variant
QEIKRINKIRRRLVKDSNTKKAGKTGPMKTLLVRVMTPDLRERLENLRKKPENIPQPISNTSRANLNKLLTDYTEMKKAILHVYWEEFQKDPVGLMSRVAQPASKKIDQNKLKPEMDEKGNLTTAGFACSQCGQPLFVYKLEQVSEKGKAYTNYFGRCNVAEHEKLILLAQLKPEKDSDEAVTYSLGKFGQRALDFYSIHVTKESTHPVKPLAQIAGNRYASSTPVGKALSDACMGTIASFLSKYQDIIIEHQKVVKGNQKRLESLRELAGKENLEYPSVTLPPQPHTKEGVDAYNEVIARVRMWVNLNLWQKLKLSRDDAKPLLRLKGFPSFPLVERQANEVDWWDMVCNVKKLINEKKEDGKVFWQNLAGYKRQEALRPYLSSEEDRKKGKKFARYQLGDLLLHLEKKHGEDWGKVYDEAWERIDKKVEGLSKHIKLEEERRSEDAQSKAALTDWLRAKASFVIEGLKEADKDEFCRCELKLQKWYGDLRGKPFAIEAENSILDISGFSKQYNCAFIWQKDGVKKLNLYLIINYFKGGKLRFKKIKPEAFEANRFYTVINKKSGEIVPMEVNFNFDDPNLIILPLAFGKRVGREFIWNDLLSLETGSLKLANGRVIEKTLYNRRTRQDEPALFVALTFERREVLDSSNIKPMNLIGVDRGENIPAVIALTDPEGCPLSRFKDSLGNPTHILRIGESYKEKQRTIQAKKEVEQRRAGGYSRKYASKAKNLADDMVRNTARDLLYYAVTQDAMLIFENLSRGFGRQGKRTFMAERQYTRMEDWLTAKLAYEGLPSKTYLSKTLAQYTSKTCSNCGFTITSADYDRVLEKLKKTATGWMTTINGKELKVEGQITYYNRYKRQNVVKDLSVELDRLSEESVNNDISSWTKGRSGEALSLLKKRFSHRPVQEKFVCLNCGFETHADEQAALNIARSWLFLRSQEYKKYQTNKTTGNTDKRAFVETWQSFYRKKLKEVWKPAV

SEQ ID NO: 30632 - protein, 979 aa, synthetic construct
  REGION 1..979: note = engineered CasX variant
QEIKRINKIRRRLVKDSNTKKAGKTGPMKTLLVRVMTPDLRERLENLRKKPENIPQPISNTSRANLNKLLTDYTEMKKAILHVYWEEFQKDPVGLMSRVAQPASKKIDQNKLKPEMDEKGNLTTAGFACSQCGQPLFVYKLEQVSEKGKAYTNYFGRCNVAEHEKLILLAQLKPEKDSDEAVTYSLGKFGQRALDFYSIHVTKESTHPVKPLAQIAGNRYASSAPVGKALSDACMGTIASFLSKYQDIIIEHQKVVKGNQKRLESLRELAGKENLEYPSVTLPPQPHTKEGVDAYNEVIARVRMWVNLNLWQKLKLSRDDAKPLLRLKGFPSFPLVERQANEVDWWDMVCNVKKLINEKKEDGKVFWQNLAGYKRQEALRPYLSSEEDRKKGKKFARYQLGDLLLHLEKKHGEDWGKVYDEAWERIDKKVEGLSKHIKLEEERRSEDAQSKAALTDWLRAKASFVIEGLKEADKDEFCRCELKLQKWYGDLRGKPFAIEAENSILDISGFSKQYNCAFIWQKDGVKKLNLYLIINYFKGGKLRFKKIKPEAFEANRFYTVINKKSGEIVPMEVNFNFDDPNLIILPLAFGKRVGREFIWNDLLSLETGSLKLANGRVIEKTLYNRRTRQDEPALFVALTFERREVLDSSNIKPMNLIGVDRGENIPAVIALTDPEGCPLSRFKDSLGNPTHILRIGESYKEKQRTIQAKKEVEQRRAGGYSRKYASKAKNLADDMVRNTARDLLYYAVTQDAMLIFENLSRGFGRQGKRTFMAERQYTRMEDWLTAKLAYEGLPSKTYLSKTLAQYTSKTCSNCGFTITSADYDRVLEKLKKTATGWMTTINGKELKVEGQITYYNRYKRQNVVKDLSVELDRLSEESVNNDISSWTKGRSGEALSLLKKRFSHRPVQEKFVCLNCGFETHADEQAALNIARSWLFLRSQEYKKYQTNKTTGNTDKRAFVETWQSFYRKKLKEVWKPAV

SEQ ID NO: 30633 - protein, 979 aa, synthetic construct
  REGION 1..979: note = engineered CasX variant
QEIKRINKIRRRLVKDSNTKKAGKTGPMKTLLVRVMTPDLRERLENLRKKPENIPQPISNTSRANLNKLLTDYTEMKKAILHVYWEEFQKDPVGLMSRVAQPASKKIDQNKLKPEMDEKGNLTTAGFACSQCGQPLFVYKLEQVSEKGKAYTNYFGRCNVAEHEKLILLAQLKPEKDSDEAVTYSLGKFGQRALDFYSIHVTKESTHPVKPLAQIAGNRYASSVPVGKALSDACMGTIASFLSKYQDIIIEHQKVVKGNQKRLESLRELAGKENLEYPSVTLPPQPHTKEGVDAYNEVIARVRMWVNLNLWQKLKLSRDDAKPLLRLKGFPSFPLVERQANEVDWWDMVCNVKKLINEKKEDGKVFWQNLAGYKRQEALRPYLSSEEDRKKGKKFARYQLGDLLLHLEKKHGEDWGKVYDEAWERIDKKVEGLSKHIKLEEERRSEDAQSKAALTDWLRAKASFVIEGLKEADKDEFCRCELKLQKWYGDLRGKPFAIEAENSILDISGFSKQYNCAFIWQKDGVKKLNLYLIINYFKGGKLRFKKIKPEAFEANRFYTVINKKSGEIVPMEVNFNFDDPNLIILPLAFGKRVGREFIWNDLLSLETGSLKLANGRVIEKTLYNRRTRQDEPALFVALTFERREVLDSSNIKPMNLIGVDRGENIPAVIALTDPEGCPLSRFKDSLGNPTHILRIGESYKEKQRTIQAKKEVEQRRAGGYSRKYASKAKNLADDMVRNTARDLLYYAVTQDAMLIFENLSRGFGRQGKRTFMAERQYTRMEDWLTAKLAYEGLPSKTYLSKTLAQYTSKTCSNCGFTITSADYDRVLEKLKKTATGWMTTINGKELKVEGQITYYNRYKRQNVVKDLSVELDRLSEESVNNDISSWTKGRSGEALSLLKKRFSHRPVQEKFVCLNCGFETHADEQAALNIARSWLFLRSQEYKKYQTNKTTGNTDKRAFVETWQSFYRKKLKEVWKPAV

SEQ ID NO: 30634 - protein, 978 aa, synthetic construct
  REGION 1..978: note = engineered CasX variant
QEIKRINKIRRRLVKDSNTKKAGKTGPMKTLLVRVMTPDLRERLENLRKKPENIPQPISNTSRANLNKLLTDYTEMKKAILHVYWEEFQKDPVGLMSRVAQPASKKIDQNKLKPEMDEKGNLTTAGFACSQCGQPLFVYKLEQVSEKGKAYTNYFGRCNVAEHEKLIKLAQLKPEKDSDEAVTYSLGKFGQRALDFYSIHVTKESTHPVKPLAQIAGNRYASSPVGKALSDACMGTIASFLSKYQDIIIEHQKVVKGNQKRLESLRELAGKENLEYPSVTLPPQPHTKEGVDAYNEVIARVRMWVNLNLWQKLKLSRDDAKPLLRLKGFPSFPLVERQANEVDWWDMVCNVKKLINEKKEDGKVFWQNLAGYKRQEALRPYLSSEEDRKKGKKFARYQLGDLLLHLEKKHGEDWGKVYDEAWERIDKKVEGLSKHIKLEEERRSEDAQSKAALTDWLRAKASFVIEGLKEADKDEFCRCELKLQKWYGDLRGKPFAIEAENSILDISGFSKQYNCAFIWQKDGVKKLNLYLIINYFKGGKLRFKKIKPEAFEANRFYTVINKKSGEIVPMEVNFNFDDPNLIILPLAFGKRVGREFIWNDLLSLETGSLKLANGRVIEKTLYNRRTRQDEPALFVALTFERREVLDSSNIKPMNLIGVDRGENIPAVIALTDPEGCPLSRFKDSLGNPTHILRIGESYKEKQRTIQAKKEVEQRRAGGYSRKYASKAKNLADDMVRNTARDLLYYAVTQDAMLIFENLSRGFGRQGKRTFMAERQYTRMEDWLTAKLAYEGLPSKTYLSKTLAQYTSKTCSNCGFTITSADYDRVLEKLKKTATGWMTTINGKELKVEGQITYYNRYKRQNVVKDLSVELDRLSEESVNNDISSWTKGRSGEALSLLKKRFSHRPVQEKFVCLNCGFETHADEQAALNIARSWLFLRSQEYKKYQTNKTTGNTDKRAFVETWQSFYRKKLKEVWKPAV

SEQ ID NO: 30635 - protein, 980 aa, synthetic construct
  REGION 1..980: note = engineered CasX variant
QEIKRINKIRRRLVKDSNTKKAGKTGPMKTLLVRVMTPDLRERLENLRKKPENIPQPISNTSRANLNKLLTDYTEMKKAILHVYWEEFQKDPVGLMSRVAQPASKKIDQNKLKPEMDEKGNLTTAGFACSQCGQPLFVYKLEQVSEKGKAYTNYFGRCNVAEHEKLILLAQLKPEKDSDEAVTYSLGKFGQRALDFYSIHVTKESTHPVKPLAQIAGNRYASSYPVGKALSDACMGTIASFLSKYQDIIIEHQKVVKGNQKRLESLRELAGKENLEYPSVTLPPQPHTKEGVDAYNEVIARVRMWVNLNLWQKLKLSRDDAKPLLRLKGFPSFPLVERQANEVDWWDMVCNVKKLINEKKEDGKVFWQNLAGYKRQEALRPYLSSEEDRKKGKKFARYQLGDLLLHLEKKHGEDWGKVYDEAWERIDKKVEGLSKHIKLEEERRSEDAQSKAALTDWLRAKASFVIEGLKEADKDEFCRCELKLQKWYGDLRGKPFAIEAENSILDISGFSKQYNCAFIWQKDGVKKLNLYLIINYFKGGKLRFKKIKPEAFEANRFYTVINKKSGEIVPMEVNFNFDDPNLIILPLAFGKRQGREFIWNDLLSLETGSLKLANGRVIEKTLYNRRTRQDEPALFVALTFERREVLDSSNIKTPMNLIGVDRGENIPAVIALTDPEGCPLSRFKDSLGNPTHILRIGESYKEKQRTIQAKKEVEQRRAGGYSRKYASKAKNLADDMVRNTARDLLYYAVTQDAMLIFENLSRGFGRQGKRTFMAERQYTRMEDWLTAKLAYEGLPSKTYLSKTLAQYTSKTCSNCGFTITSADYDRVLEKLKKTATGWMTTINGKELKVEGQITYYNRYKRQNVVKDLSVELDRLSEESVNNDISSWTKGRSGEALSLLKKRFSHRPVQEKFVCLNCGFETHADEQAALNIARSWLFLRSQEYKKYQTNKTTGNTDKRAFVETWQSFYRKKLKEVWKPAV

SEQ ID NO: 30636 - protein, 980 aa, synthetic construct
  REGION 1..980: note = engineered CasX variant
QEIKRINKIRRRLVKDSNTKKAGKTGPMKTLLVRVMTPDLRERLENLRKKPENIPQPISNTSRANLNKLLTDYTEMKKAILHVYWEEFQKDPVGLMSRVAQPASKKIDQNKLKPEMDEKGNLTTAGFACSQCGQPLFVYKLEQVSEKGKAYTNYFGRCNVAEHEKLILLAQLKPEKDSDEAVTYSLGKFGQRALDFYSIHVTKESTHPVKPLAQIAGNRYASSHPVGKALSDACMGTIASFLSKYQDIIIEHQKVVKGNQKRLESLRELAGKENLEYPSVTLPPQPHTKEGVDAYNEVIARVRMWVNLNLWQKLKLSRDDAKPLLRLKGFPSFPLVERQANEVDWWDMVCNVKKLINEKKEDGKVFWQNLAGYKRQEALRPYLSSEEDRKKGKKFARYQLGDLLLHLEKKHGEDWGKVYDEAWERIDKKVEGLSKHIKLEEERRSEDAQSKAALTDWLRAKASFVIEGLKEADKDEFCRCELKLQKWYGDLRGKPFAIEAENSILDISGFSKQYNCAFIWQKDGVKKLNLYLIINYFKGGKLRFKKIKPEAFEANRFYTVINKKSGEIVPMEVNFNFDDPNLIILPLAFGKRQGREFIWNDLLSLETGSLKLANGRVIEKTLYNRRTRQDEPALFVALTFERREVLDSSNIKTPMNLIGVDRGENIPAVIALTDPEGCPLSRFKDSLGNPTHILRIGESYKEKQRTIQAKKEVEQRRAGGYSRKYASKAKNLADDMVRNTARDLLYYAVTQDAMLIFENLSRGFGRQGKRTFMAERQYTRMEDWLTAKLAYEGLPSKTYLSKTLAQYTSKTCSNCGFTITSADYDRVLEKLKKTATGWMTTINGKELKVEGQITYYNRYKRQNVVKDLSVELDRLSEESVNNDISSWTKGRSGEALSLLKKRFSHRPVQEKFVCLNCGFETHADEQAALNIARSWLFLRSQEYKKYQTNKTTGNTDKRAFVETWQSFYRKKLKEVWKPAV

SEQ ID NO: 30637 - protein, 980 aa, synthetic construct
  REGION 1..980: note = engineered CasX variant
QEIKRINKIRRRLVKDSNTKKAGKTGPMKTLLVRVMTPDLRERLENLRKKPENIPQPISNTSRANLNKLLTDYTEMKKAILHVYWEEFQKDPVGLMSRVAQPASKKIDQNKLKPEMDEKGNLTTAGFACSQCGQPLFVYKLEQVSEKGKAYTNYFGRCNVAEHEKLILLAQLKPEKDSDEAVTYSLGKFGQRALDFYSIHVTKESTHPVKPLAQIAGNRYASSSPVGKALSDACMGTIASFLSKYQDIIIEHQKVVKGNQKRLESLRELAGKENLEYPSVTLPPQPHTKEGVDAYNEVIARVRMWVNLNLWQKLKLSRDDAKPLLRLKGFPSFPLVERQANEVDWWDMVCNVKKLINEKKEDGKVFWQNLAGYKRQEALRPYLSSEEDRKKGKKFARYQLGDLLLHLEKKHGEDWGKVYDEAWERIDKKVEGLSKHIKLEEERRSEDAQSKAALTDWLRAKASFVIEGLKEADKDEFCRCELKLQKWYGDLRGKPFAIEAENSILDISGFSKQYNCAFIWQKDGVKKLNLYLIINYFKGGKLRFKKIKPEAFEANRFYTVINKKSGEIVPMEVNFNFDDPNLIILPLAFGKRQGREFIWNDLLSLETGSLKLANGRVIEKTLYNRRTRQDEPALFVALTFERREVLDSSNIKTPMNLIGVDRGENIPAVIALTDPEGCPLSRFKDSLGNPTHILRIGESYKEKQRTIQAKKEVEQRRAGGYSRKYASKAKNLADDMVRNTARDLLYYAVTQDAMLIFENLSRGFGRQGKRTFMAERQYTRMEDWLTAKLAYEGLPSKTYLSKTLAQYTSKTCSNCGFTITSADYDRVLEKLKKTATGWMTTINGKELKVEGQITYYNRYKRQNVVKDLSVELDRLSEESVNNDISSWTKGRSGEALSLLKKRFSHRPVQEKFVCLNCGFETHADEQAALNIARSWLFLRSQEYKKYQTNKTTGNTDKRAFVETWQSFYRKKLKEVWKPAV

SEQ ID NO: 30638 - protein, 980 aa, synthetic construct
  REGION 1..980: note = engineered CasX variant
QEIKRINKIRRRLVKDSNTKKAGKTGPMKTLLVRVMTPDLRERLENLRKKPENIPQPISNTSRANLNKLLTDYTEMKKAILHVYWEEFQKDPVGLMSRVAQPASKKIDQNKLKPEMDEKGNLTTAGFACSQCGQPLFVYKLEQVSEKGKAYTNYFGRCNVAEHEKLILLAQLKPEKDSDEAVTYSLGKFGQRALDFYSIHVTKESTHPVKPLAQIAGNRYASSTPVGKALSDACMGTIASFLSKYQDIIIEHQKVVKGNQKRLESLRELAGKENLEYPSVTLPPQPHTKEGVDAYNEVIARVRMWVNLNLWQKLKLSRDDAKPLLRLKGFPSFPLVERQANEVDWWDMVCNVKKLINEKKEDGKVFWQNLAGYKRQEALRPYLSSEEDRKKGKKFARYQLGDLLLHLEKKHGEDWGKVYDEAWERIDKKVEGLSKHIKLEEERRSEDAQSKAALTDWLRAKASFVIEGLKEADKDEFCRCELKLQKWYGDLRGKPFAIEAENSILDISGFSKQYNCAFIWQKDGVKKLNLYLIINYFKGGKLRFKKIKPEAFEANRFYTVINKKSGEIVPMEVNFNFDDPNLIILPLAFGKRQGREFIWNDLLSLETGSLKLANGRVIEKTLYNRRTRQDEPALFVALTFERREVLDSSNIKTPMNLIGVDRGENIPAVIALTDPEGCPLSRFKDSLGNPTHILRIGESYKEKQRTIQAKKEVEQRRAGGYSRKYASKAKNLADDMVRNTARDLLYYAVTQDAMLIFENLSRGFGRQGKRTFMAERQYTRMEDWLTAKLAYEGLPSKTYLSKTLAQYTSKTCSNCGFTITSADYDRVLEKLKKTATGWMTTINGKELKVEGQITYYNRYKRQNVVKDLSVELDRLSEESVNNDISSWTKGRSGEALSLLKKRFSHRPVQEKFVCLNCGFETHADEQAALNIARSWLFLRSQEYKKYQTNKTTGNTDKRAFVETWQSFYRKKLKEVWKPAV

SEQ ID NO: 30639 - protein, 980 aa, synthetic construct
  REGION 1..980: note = engineered CasX variant
QEIKRINKIRRRLVKDSNTKKAGKTGPMKTLLVRVMTPDLRERLENLRKKPENIPQPISNTSRANLNKLLTDYTEMKKAILHVYWEEFQKDPVGLMSRVAQPASKKIDQNKLKPEMDEKGNLTTAGFACSQCGQPLFVYKLEQVSEKGKAYTNYFGRCNVAEHEKLILLAQLKPEKDSDEAVTYSLGKFGQRALDFYSIHVTKESTHPVKPLAQIAGNRYASSAPVGKALSDACMGTIASFLSKYQDIIIEHQKVVKGNQKRLESLRELAGKENLEYPSVTLPPQPHTKEGVDAYNEVIARVRMWVNLNLWQKLKLSRDDAKPLLRLKGFPSFPLVERQANEVDWWDMVCNVKKLINEKKEDGKVFWQNLAGYKRQEALRPYLSSEEDRKKGKKFARYQLGDLLLHLEKKHGEDWGKVYDEAWERIDKKVEGLSKHIKLEEERRSEDAQSKAALTDWLRAKASFVIEGLKEADKDEFCRCELKLQKWYGDLRGKPFAIEAENSILDISGFSKQYNCAFIWQKDGVKKLNLYLIINYFKGGKLRFKKIKPEAFEANRFYTVINKKSGEIVPMEVNFNFDDPNLIILPLAFGKRQGREFIWNDLLSLETGSLKLANGRVIEKTLYNRRTRQDEPALFVALTFERREVLDSSNIKTPMNLIGVDRGENIPAVIALTDPEGCPLSRFKDSLGNPTHILRIGESYKEKQRTIQAKKEVEQRRAGGYSRKYASKAKNLADDMVRNTARDLLYYAVTQDAMLIFENLSRGFGRQGKRTFMAERQYTRMEDWLTAKLAYEGLPSKTYLSKTLAQYTSKTCSNCGFTITSADYDRVLEKLKKTATGWMTTINGKELKVEGQITYYNRYKRQNVVKDLSVELDRLSEESVNNDISSWTKGRSGEALSLLKKRFSHRPVQEKFVCLNCGFETHADEQAALNIARSWLFLRSQEYKKYQTNKTTGNTDKRAFVETWQSFYRKKLKEVWKPAV

SEQ ID NO: 30640 - protein, 980 aa, synthetic construct
  REGION 1..980: note = engineered CasX variant
QEIKRINKIRRRLVKDSNTKKAGKTGPMKTLLVRVMTPDLRERLENLRKKPENIPQPISNTSRANLNKLLTDYTEMKKAILHVYWEEFQKDPVGLMSRVAQPASKKIDQNKLKPEMDEKGNLTTAGFACSQCGQPLFVYKLEQVSEKGKAYTNYFGRCNVAEHEKLILLAQLKPEKDSDEAVTYSLGKFGQRALDFYSIHVTKESTHPVKPLAQIAGNRYASSVPVGKALSDACMGTIASFLSKYQDIIIEHQKVVKGNQKRLESLRELAGKENLEYPSVTLPPQPHTKEGVDAYNEVIARVRMWVNLNLWQKLKLSRDDAKPLLRLKGFPSFPLVERQANEVDWWDMVCNVKKLINEKKEDGKVFWQNLAGYKRQEALRPYLSSEEDRKKGKKFARYQLGDLLLHLEKKHGEDWGKVYDEAWERIDKKVEGLSKHIKLEEERRSEDAQSKAALTDWLRAKASFVIEGLKEADKDEFCRCELKLQKWYGDLRGKPFAIEAENSILDISGFSKQYNCAFIWQKDGVKKLNLYLIINYFKGGKLRFKKIKPEAFEANRFYTVINKKSGEIVPMEVNFNFDDPNLIILPLAFGKRQGREFIWNDLLSLETGSLKLANGRVIEKTLYNRRTRQDEPALFVALTFERREVLDSSNIKTPMNLIGVDRGENIPAVIALTDPEGCPLSRFKDSLGNPTHILRIGESYKEKQRTIQAKKEVEQRRAGGYSRKYASKAKNLADDMVRNTARDLLYYAVTQDAMLIFENLSRGFGRQGKRTFMAERQYTRMEDWLTAKLAYEGLPSKTYLSKTLAQYTSKTCSNCGFTITSADYDRVLEKLKKTATGWMTTINGKELKVEGQITYYNRYKRQNVVKDLSVELDRLSEESVNNDISSWTKGRSGEALSLLKKRFSHRPVQEKFVCLNCGFETHADEQAALNIARSWLFLRSQEYKKYQTNKTTGNTDKRAFVETWQSFYRKKLKEVWKPAV

SEQ ID NO: 30641 - protein, 979 aa, synthetic construct
  REGION 1..979: note = engineered CasX variant
QEIKRINKIRRRLVKDSNTKKAGKTGPMKTLLVRVMTPDLRERLENLRKKPENIPQPISNTSRANLNKLLTDYTEMKKAILHVYWEEFQKDPVGLMSRVAQPASKKIDQNKLKPEMDEKGNLTTAGFACSQCGQPLFVYKLEQVSEKGKAYTNYFGRCNVAEHEKLIKLAQLKPEKDSDEAVTYSLGKFGQRALDFYSIHVTKESTHPVKPLAQIAGNRYASSPVGKALSDACMGTIASFLSKYQDIIIEHQKVVKGNQKRLESLRELAGKENLEYPSVTLPPQPHTKEGVDAYNEVIARVRMWVNLNLWQKLKLSRDDAKPLLRLKGFPSFPLVERQANEVDWWDMVCNVKKLINEKKEDGKVFWQNLAGYKRQEALRPYLSSEEDRKKGKKFARYQLGDLLLHLEKKHGEDWGKVYDEAWERIDKKVEGLSKHIKLEEERRSEDAQSKAALTDWLRAKASFVIEGLKEADKDEFCRCELKLQKWYGDLRGKPFAIEAENSILDISGFSKQYNCAFIWQKDGVKKLNLYLIINYFKGGKLRFKKIKPEAFEANRFYTVINKKSGEIVPMEVNFNFDDPNLIILPLAFGKRQGREFIWNDLLSLETGSLKLANGRVIEKTLYNRRTRQDEPALFVALTFERREVLDSSNIKTPMNLIGVDRGENIPAVIALTDPEGCPLSRFKDSLGNPTHILRIGESYKEKQRTIQAKKEVEQRRAGGYSRKYASKAKNLADDMVRNTARDLLYYAVTQDAMLIFENLSRGFGRQGKRTFMAERQYTRMEDWLTAKLAYEGLPSKTYLSKTLAQYTSKTCSNCGFTITSADYDRVLEKLKKTATGWMTTINGKELKVEGQITYYNRYKRQNVVKDLSVELDRLSEESVNNDISSWTKGRSGEALSLLKKRFSHRPVQEKFVCLNCGFETHADEQAALNIARSWLFLRSQEYKKYQTNKTTGNTDKRAFVETWQSFYRKKLKEVWKPAV

SEQ ID NO: 30642 - protein, 980 aa, synthetic construct
  REGION 1..980: note = engineered CasX variant
QEIKRINKIRRRLVKDSNTKKAGKTGPMKTLLVRVMTPDLRERLENLRKKPENIPQPISNTSRANLNKLLTDYTEMKKAILHVYWEEFQKDPVGLMSRVAQPASKKIDQNKLKPEMDEKGNLTTAGFACSQCGQPLFVYKLEQVSEKGKAYTNYFGRCNVAEHEKLILLAQLKPEKDSDEAVTYSLGKFGQRALDFYSIHVTKESTHPVKPLAQIAGNRYASSYPVGKALSDACMGTIASFLSKYQDIIIEHQKVVKGNQKRLESLRELAGKENLEYPSVTLPPQPHTKEGVDAYNEVIARVRMWVNLNLWQKLKLSRDDAKPLLRLKGFPSFPLVERQANEVDWWDMVCNVKKLINEKKEDGKVFWQNLAGYKRQEALRPYLSSEEDRKKGKKFARYQLGDLLLHLEKKHGEDWGKVYDEAWERIDKKVEGLSKHIKLEEERRSEDAQSKAALTDWLRAKASFVIEGLKEADKDEFCRCELKLQKWYGDLRGKPFAIEAENSILDISGFSKQYNCAFIWQKDGVKKLNLYLIINYFKGGKLRFKKIKPEAFEANRFYTVINKKSGEIVPMEVNFNFDDPNLIILPLAFGKRQGREFIWNDLLSLETGSLKLANGRVIEKTLYNRRTRQDEPALFVALTFERREVLDSSNIKPMSNLIGVDRGENIPAVIALTDPEGCPLSRFKDSLGNPTHILRIGESYKEKQRTIQAKKEVEQRRAGGYSRKYASKAKNLADDMVRNTARDLLYYAVTQDAMLIFENLSRGFGRQGKRTFMAERQYTRMEDWLTAKLAYEGLPSKTYLSKTLAQYTSKTCSNCGFTITSADYDRVLEKLKKTATGWMTTINGKELKVEGQITYYNRYKRQNVVKDLSVELDRLSEESVNNDISSWTKGRSGEALSLLKKRFSHRPVQEKFVCLNCGFETHADEQAALNIARSWLFLRSQEYKKYQTNKTTGNTDKRAFVETWQSFYRKKLKEVWKPAV

SEQ ID NO: 30643 - protein, 980 aa, synthetic construct
  REGION 1..980: note = engineered CasX variant
QEIKRINKIRRRLVKDSNTKKAGKTGPMKTLLVRVMTPDLRERLENLRKKPENIPQPISNTSRANLNKLLTDYTEMKKAILHVYWEEFQKDPVGLMSRVAQPASKKIDQNKLKPEMDEKGNLTTAGFACSQCGQPLFVYKLEQVSEKGKAYTNYFGRCNVAEHEKLILLAQLKPEKDSDEAVTYSLGKFGQRALDFYSIHVTKESTHPVKPLAQIAGNRYASSHPVGKALSDACMGTIASFLSKYQDIIIEHQKVVKGNQKRLESLRELAGKENLEYPSVTLPPQPHTKEGVDAYNEVIARVRMWVNLNLWQKLKLSRDDAKPLLRLKGFPSFPLVERQANEVDWWDMVCNVKKLINEKKEDGKVFWQNLAGYKRQEALRPYLSSEEDRKKGKKFARYQLGDLLLHLEKKHGEDWGKVYDEAWERIDKKVEGLSKHIKLEEERRSEDAQSKAALTDWLRAKASFVIEGLKEADKDEFCRCELKLQKWYGDLRGKPFAIEAENSILDISGFSKQYNCAFIWQKDGVKKLNLYLIINYFKGGKLRFKKIKPEAFEANRFYTVINKKSGEIVPMEVNFNFDDPNLIILPLAFGKRQGREFIWNDLLSLETGSLKLANGRVIEKTLYNRRTRQDEPALFVALTFERREVLDSSNIKPMSNLIGVDRGENIPAVIALTDPEGCPLSRFKDSLGNPTHILRIGESYKEKQRTIQAKKEVEQRRAGGYSRKYASKAKNLADDMVRNTARDLLYYAVTQDAMLIFENLSRGFGRQGKRTFMAERQYTRMEDWLTAKLAYEGLPSKTYLSKTLAQYTSKTCSNCGFTITSADYDRVLEKLKKTATGWMTTINGKELKVEGQITYYNRYKRQNVVKDLSVELDRLSEESVNNDISSWTKGRSGEALSLLKKRFSHRPVQEKFVCLNCGFETHADEQAALNIARSWLFLRSQEYKKYQTNKTTGNTDKRAFVETWQSFYRKKLKEVWKPAV

SEQ ID NO: 30644 - protein, 980 aa, synthetic construct
  REGION 1..980: note = engineered CasX variant
QEIKRINKIRRRLVKDSNTKKAGKTGPMKTLLVRVMTPDLRERLENLRKKPENIPQPISNTSRANLNKLLTDYTEMKKAILHVYWEEFQKDPVGLMSRVAQPASKKIDQNKLKPEMDEKGNLTTAGFACSQCGQPLFVYKLEQVSEKGKAYTNYFGRCNVAEHEKLILLAQLKPEKDSDEAVTYSLGKFGQRALDFYSIHVTKESTHPVKPLAQIAGNRYASSSPVGKALSDACMGTIASFLSKYQDIIIEHQKVVKGNQKRLESLRELAGKENLEYPSVTLPPQPHTKEGVDAYNEVIARVRMWVNLNLWQKLKLSRDDAKPLLRLKGFPSFPLVERQANEVDWWDMVCNVKKLINEKKEDGKVFWQNLAGYKRQEALRPYLSSEEDRKKGKKFARYQLGDLLLHLEKKHGEDWGKVYDEAWERIDKKVEGLSKHIKLEEERRSEDAQSKAALTDWLRAKASFVIEGLKEADKDEFCRCELKLQKWYGDLRGKPFAIEAENSILDISGFSKQYNCAFIWQKDGVKKLNLYLIINYFKGGKLRFKKIKPEAFEANRFYTVINKKSGEIVPMEVNFNFDDPNLIILPLAFGKRQGREFIWNDLLSLETGSLKLANGRVIEKTLYNRRTRQDEPALFVALTFERREVLDSSNIKPMSNLIGVDRGENIPAVIALTDPEGCPLSRFKDSLGNPTHILRIGESYKEKQRTIQAKKEVEQRRAGGYSRKYASKAKNLADDMVRNTARDLLYYAVTQDAMLIFENLSRGFGRQGKRTFMAERQYTRMEDWLTAKLAYEGLPSKTYLSKTLAQYTSKTCSNCGFTITSADYDRVLEKLKKTATGWMTTINGKELKVEGQITYYNRYKRQNVVKDLSVELDRLSEESVNNDISSWTKGRSGEALSLLKKRFSHRPVQEKFVCLNCGFETHADEQAALNIARSWLFLRSQEYKKYQTNKTTGNTDKRAFVETWQSFYRKKLKEVWKPAV

SEQ ID NO: 30645 - protein, 980 aa, synthetic construct
  REGION 1..980: note = engineered CasX variant
QEIKRINKIRRRLVKDSNTKKAGKTGPMKTLLVRVMTPDLRERLENLRKKPENIPQPISNTSRANLNKLLTDYTEMKKAILHVYWEEFQKDPVGLMSRVAQPASKKIDQNKLKPEMDEKGNLTTAGFACSQCGQPLFVYKLEQVSEKGKAYTNYFGRCNVAEHEKLILLAQLKPEKDSDEAVTYSLGKFGQRALDFYSIHVTKESTHPVKPLAQIAGNRYASSTPVGKALSDACMGTIASFLSKYQDIIIEHQKVVKGNQKRLESLRELAGKENLEYPSVTLPPQPHTKEGVDAYNEVIARVRMWVNLNLWQKLKLSRDDAKPLLRLKGFPSFPLVERQANEVDWWDMVCNVKKLINEKKEDGKVFWQNLAGYKRQEALRPYLSSEEDRKKGKKFARYQLGDLLLHLEKKHGEDWGKVYDEAWERIDKKVEGLSKHIKLEEERRSEDAQSKAALTDWLRAKASFVIEGLKEADKDEFCRCELKLQKWYGDLRGKPFAIEAENSILDISGFSKQYNCAFIWQKDGVKKLNLYLIINYFKGGKLRFKKIKPEAFEANRFYTVINKKSGEIVPMEVNFNFDDPNLIILPLAFGKRQGREFIWNDLLSLETGSLKLANGRVIEKTLYNRRTRQDEPALFVALTFERREVLDSSNIKPMSNLIGVDRGENIPAVIALTDPEGCPLSRFKDSLGNPTHILRIGESYKEKQRTIQAKKEVEQRRAGGYSRKYASKAKNLADDMVRNTARDLLYYAVTQDAMLIFENLSRGFGRQGKRTFMAERQYTRMEDWLTAKLAYEGLPSKTYLSKTLAQYTSKTCSNCGFTITSADYDRVLEKLKKTATGWMTTINGKELKVEGQITYYNRYKRQNVVKDLSVELDRLSEESVNNDISSWTKGRSGEALSLLKKRFSHRPVQEKFVCLNCGFETHADEQAALNIARSWLFLRSQEYKKYQTNKTTGNTDKRAFVETWQSFYRKKLKEVWKPAV

SEQ ID NO: 30646 - protein, 980 aa, synthetic construct
  REGION 1..980: note = engineered CasX variant
QEIKRINKIRRRLVKDSNTKKAGKTGPMKTLLVRVMTPDLRERLENLRKKPENIPQPISNTSRANLNKLLTDYTEMKKAILHVYWEEFQKDPVGLMSRVAQPASKKIDQNKLKPEMDEKGNLTTAGFACSQCGQPLFVYKLEQVSEKGKAYTNYFGRCNVAEHEKLILLAQLKPEKDSDEAVTYSLGKFGQRALDFYSIHVTKESTHPVKPLAQIAGNRYASSAPVGKALSDACMGTIASFLSKYQDIIIEHQKVVKGNQKRLESLRELAGKENLEYPSVTLPPQPHTKEGVDAYNEVIARVRMWVNLNLWQKLKLSRDDAKPLLRLKGFPSFPLVERQANEVDWWDMVCNVKKLINEKKEDGKVFWQNLAGYKRQEALRPYLSSEEDRKKGKKFARYQLGDLLLHLEKKHGEDWGKVYDEAWERIDKKVEGLSKHIKLEEERRSEDAQSKAALTDWLRAKASFVIEGLKEADKDEFCRCELKLQKWYGDLRGKPFAIEAENSILDISGFSKQYNCAFIWQKDGVKKLNLYLIINYFKGGKLRFKKIKPEAFEANRFYTVINKKSGEIVPMEVNFNFDDPNLIILPLAFGKRQGREFIWNDLLSLETGSLKLANGRVIEKTLYNRRTRQDEPALFVALTFERREVLDSSNIKPMSNLIGVDRGENIPAVIALTDPEGCPLSRFKDSLGNPTHILRIGESYKEKQRTIQAKKEVEQRRAGGYSRKYASKAKNLADDMVRNTARDLLYYAVTQDAMLIFENLSRGFGRQGKRTFMAERQYTRMEDWLTAKLAYEGLPSKTYLSKTLAQYTSKTCSNCGFTITSADYDRVLEKLKKTATGWMTTINGKELKVEGQITYYNRYKRQNVVKDLSVELDRLSEESVNNDISSWTKGRSGEALSLLKKRFSHRPVQEKFVCLNCGFETHADEQAALNIARSWLFLRSQEYKKYQTNKTTGNTDKRAFVETWQSFYRKKLKEVWKPAV

SEQ ID NO: 30647 - protein, 980 aa, synthetic construct
  REGION 1..980: note = engineered CasX variant
QEIKRINKIRRRLVKDSNTKKAGKTGPMKTLLVRVMTPDLRERLENLRKKPENIPQPISNTSRANLNKLLTDYTEMKKAILHVYWEEFQKDPVGLMSRVAQPASKKIDQNKLKPEMDEKGNLTTAGFACSQCGQPLFVYKLEQVSEKGKAYTNYFGRCNVAEHEKLILLAQLKPEKDSDEAVTYSLGKFGQRALDFYSIHVTKESTHPVKPLAQIAGNRYASSVPVGKALSDACMGTIASFLSKYQDIIIEHQKVVKGNQKRLESLRELAGKENLEYPSVTLPPQPHTKEGVDAYNEVIARVRMWVNLNLWQKLKLSRDDAKPLLRLKGFPSFPLVERQANEVDWWDMVCNVKKLINEKKEDGKVFWQNLAGYKRQEALRPYLSSEEDRKKGKKFARYQLGDLLLHLEKKHGEDWGKVYDEAWERIDKKVEGLSKHIKLEEERRSEDAQSKAALTDWLRAKASFVIEGLKEADKDEFCRCELKLQKWYGDLRGKPFAIEAENSILDISGFSKQYNCAFIWQKDGVKKLNLYLIINYFKGGKLRFKKIKPEAFEANRFYTVINKKSGEIVPMEVNFNFDDPNLIILPLAFGKRQGREFIWNDLLSLETGSLKLANGRVIEKTLYNRRTRQDEPALFVALTFERREVLDSSNIKPMSNLIGVDRGENIPAVIALTDPEGCPLSRFKDSLGNPTHILRIGESYKEKQRTIQAKKEVEQRRAGGYSRKYASKAKNLADDMVRNTARDLLYYAVTQDAMLIFENLSRGFGRQGKRTFMAERQYTRMEDWLTAKLAYEGLPSKTYLSKTLAQYTSKTCSNCGFTITSADYDRVLEKLKKTATGWMTTINGKELKVEGQITYYNRYKRQNVVKDLSVELDRLSEESVNNDISSWTKGRSGEALSLLKKRFSHRPVQEKFVCLNCGFETHADEQAALNIARSWLFLRSQEYKKYQTNKTTGNTDKRAFVETWQSFYRKKLKEVWKPAV

SEQ ID NO: 30648 - protein, 979 aa, synthetic construct
  REGION 1..979: note = engineered CasX variant
QEIKRINKIRRRLVKDSNTKKAGKTGPMKTLLVRVMTPDLRERLENLRKKPENIPQPISNTSRANLNKLLTDYTEMKKAILHVYWEEFQKDPVGLMSRVAQPASKKIDQNKLKPEMDEKGNLTTAGFACSQCGQPLFVYKLEQVSEKGKAYTNYFGRCNVAEHEKLIKLAQLKPEKDSDEAVTYSLGKFGQRALDFYSIHVTKESTHPVKPLAQIAGNRYASSPVGKALSDACMGTIASFLSKYQDIIIEHQKVVKGNQKRLESLRELAGKENLEYPSVTLPPQPHTKEGVDAYNEVIARVRMWVNLNLWQKLKLSRDDAKPLLRLKGFPSFPLVERQANEVDWWDMVCNVKKLINEKKEDGKVFWQNLAGYKRQEALRPYLSSEEDRKKGKKFARYQLGDLLLHLEKKHGEDWGKVYDEAWERIDKKVEGLSKHIKLEEERRSEDAQSKAALTDWLRAKASFVIEGLKEADKDEFCRCELKLQKWYGDLRGKPFAIEAENSILDISGFSKQYNCAFIWQKDGVKKLNLYLIINYFKGGKLRFKKIKPEAFEANRFYTVINKKSGEIVPMEVNFNFDDPNLIILPLAFGKRQGREFIWNDLLSLETGSLKLANGRVIEKTLYNRRTRQDEPALFVALTFERREVLDSSNIKPMSNLIGVDRGENIPAVIALTDPEGCPLSRFKDSLGNPTHILRIGESYKEKQRTIQAKKEVEQRRAGGYSRKYASKAKNLADDMVRNTARDLLYYAVTQDAMLIFENLSRGFGRQGKRTFMAERQYTRMEDWLTAKLAYEGLPSKTYLSKTLAQYTSKTCSNCGFTITSADYDRVLEKLKKTATGWMTTINGKELKVEGQITYYNRYKRQNVVKDLSVELDRLSEESVNNDISSWTKGRSGEALSLLKKRFSHRPVQEKFVCLNCGFETHADEQAALNIARSWLFLRSQEYKKYQTNKTTGNTDKRAFVETWQSFYRKKLKEVWKPAV

SEQ ID NO: 30649 - protein, 979 aa, synthetic construct
  REGION 1..979: note = engineered CasX variant
QEIKRINKIRRRLVKDSNTKKAGKTGPMKTLLVRVMTPDLRERLENLRKKPENIPQPISNTSRANLNKLLTDYTEMKKAILHVYWEEFQKDPVGLMSRVAQPASKKIDQNKLKPEMDEKGNLTTAGFACSQCGQPLFVYKLEQVSEKGKAYTNYFGRCNVAEHEKLILLAQLKPEKDSDEAVTYSLGKFGQRALDFYSIHVTKESTHPVKPLAQIAGNRYASSYPVGKALSDACMGTIASFLSKYQDIIIEHQKVVKGNQKRLESLRELAGKENLEYPSVTLPPQPHTKEGVDAYNEVIARVRMWVNLNLWQKLKLSRDDAKPLLRLKGFPSFPLVERQANEVDWWDMVCNVKKLINEKKEDGKVFWQNLAGYKRQEALRPYLSSEEDRKKGKKFARYQLGDLLLHLEKKHGEDWGKVYDEAWERIDKKVEGLSKHIKLEEERRSEDAQSKAALTDWLRAKASFVIEGLKEADKDEFCRCELKLQKWYGDLRGKPFAIEAENSILDISGFSKQYNCAFIWQKDGVKKLNLYLIINYFKGGKLRFKKIKPEAFEANRFYTVINKKSGEIVPMEVNFNFDDPNLIILPLAFGKRQGREFIWNDLLSLETGSLKLANGRVIEKTLYNRRTRQDEPALFVALTFERREVLDSSNIKPMNLIGVDRGENIPAVIALTDPEGCPLSRFKDSLGNPTHILRIRESYKEKQRTIQAKKEVEQRRAGGYSRKYASKAKNLADDMVRNTARDLLYYAVTQDAMLIFENLSRGFGRQGKRTFMAERQYTRMEDWLTAKLAYEGLPSKTYLSKTLAQYTSKTCSNCGFTITSADYDRVLEKLKKTATGWMTTINGKELKVEGQITYYNRYKRQNVVKDLSVELDRLSEESVNNDISSWTKGRSGEALSLLKKRFSHRPVQEKFVCLNCGFETHADEQAALNIARSWLFLRSQEYKKYQTNKTTGNTDKRAFVETWQSFYRKKLKEVWKPAV

SEQ ID NO: 30650 - protein, 979 aa, synthetic construct
  REGION 1..979: note = engineered CasX variant
QEIKRINKIRRRLVKDSNTKKAGKTGPMKTLLVRVMTPDLRERLENLRKKPENIPQPISNTSRANLNKLLTDYTEMKKAILHVYWEEFQKDPVGLMSRVAQPASKKIDQNKLKPEMDEKGNLTTAGFACSQCGQPLFVYKLEQVSEKGKAYTNYFGRCNVAEHEKLILLAQLKPEKDSDEAVTYSLGKFGQRALDFYSIHVTKESTHPVKPLAQIAGNRYASSHPVGKALSDACMGTIASFLSKYQDIIIEHQKVVKGNQKRLESLRELAGKENLEYPSVTLPPQPHTKEGVDAYNEVIARVRMWVNLNLWQKLKLSRDDAKPLLRLKGFPSFPLVERQANEVDWWDMVCNVKKLINEKKEDGKVFWQNLAGYKRQEALRPYLSSEEDRKKGKKFARYQLGDLLLHLEKKHGEDWGKVYDEAWERIDKKVEGLSKHIKLEEERRSEDAQSKAALTDWLRAKASFVIEGLKEADKDEFCRCELKLQKWYGDLRGKPFAIEAENSILDISGFSKQYNCAFIWQKDGVKKLNLYLIINYFKGGKLRFKKIKPEAFEANRFYTVINKKSGEIVPMEVNFNFDDPNLIILPLAFGKRQGREFIWNDLLSLETGSLKLANGRVIEKTLYNRRTRQDEPALFVALTFERREVLDSSNIKPMNLIGVDRGENIPAVIALTDPEGCPLSRFKDSLGNPTHILRIRESYKEKQRTIQAKKEVEQRRAGGYSRKYASKAKNLADDMVRNTARDLLYYAVTQDAMLIFENLSRGFGRQGKRTFMAERQYTRMEDWLTAKLAYEGLPSKTYLSKTLAQYTSKTCSNCGFTITSADYDRVLEKLKKTATGWMTTINGKELKVEGQITYYNRYKRQNVVKDLSVELDRLSEESVNNDISSWTKGRSGEALSLLKKRFSHRPVQEKFVCLNCGFETHADEQAALNIARSWLFLRSQEYKKYQTNKTTGNTDKRAFVETWQSFYRKKLKEVWKPAV

SEQ ID NO: 30651 - protein, 979 aa, synthetic construct
  REGION 1..979: note = engineered CasX variant
QEIKRINKIRRRLVKDSNTKKAGKTGPMKTLLVRVMTPDLRERLENLRKKPENIPQPISNTSRANLNKLLTDYTEMKKAILHVYWEEFQKDPVGLMSRVAQPASKKIDQNKLKPEMDEKGNLTTAGFACSQCGQPLFVYKLEQVSEKGKAYTNYFGRCNVAEHEKLILLAQLKPEKDSDEAVTYSLGKFGQRALDFYSIHVTKESTHPVKPLAQIAGNRYASSSPVGKALSDACMGTIASFLSKYQDIIIEHQKVVKGNQKRLESLRELAGKENLEYPSVTLPPQPHTKEGVDAYNEVIARVRMWVNLNLWQKLKLSRDDAKPLLRLKGFPSFPLVERQANEVDWWDMVCNVKKLINEKKEDGKVFWQNLAGYKRQEALRPYLSSEEDRKKGKKFARYQLGDLLLHLEKKHGEDWGKVYDEAWERIDKKVEGLSKHIKLEEERRSEDAQSKAALTDWLRAKASFVIEGLKEADKDEFCRCELKLQKWYGDLRGKPFAIEAENSILDISGFSKQYNCAFIWQKDGVKKLNLYLIINYFKGGKLRFKKIKPEAFEANRFYTVINKKSGEIVPMEVNFNFDDPNLIILPLAFGKRQGREFIWNDLLSLETGSLKLANGRVIEKTLYNRRTRQDEPALFVALTFERREVLDSSNIKPMNLIGVDRGENIPAVIALTDPEGCPLSRFKDSLGNPTHILRIRESYKEKQRTIQAKKEVEQRRAGGYSRKYASKAKNLADDMVRNTARDLLYYAVTQDAMLIFENLSRGFGRQGKRTFMAERQYTRMEDWLTAKLAYEGLPSKTYLSKTLAQYTSKTCSNCGFTITSADYDRVLEKLKKTATGWMTTINGKELKVEGQITYYNRYKRQNVVKDLSVELDRLSEESVNNDISSWTKGRSGEALSLLKKRFSHRPVQEKFVCLNCGFETHADEQAALNIARSWLFLRSQEYKKYQTNKTTGNTDKRAFVETWQSFYRKKLKEVWKPAV

SEQ ID NO: 30652 - protein, 979 aa, synthetic construct
  REGION 1..979: note = engineered CasX variant
QEIKRINKIRRRLVKDSNTKKAGKTGPMKTLLVRVMTPDLRERLENLRKKPENIPQPISNTSRANLNKLLTDYTEMKKAILHVYWEEFQKDPVGLMSRVAQPASKKIDQNKLKPEMDEKGNLTTAGFACSQCGQPLFVYKLEQVSEKGKAYTNYFGRCNVAEHEKLILLAQLKPEKDSDEAVTYSLGKFGQRALDFYSIHVTKESTHPVKPLAQIAGNRYASSTPVGKALSDACMGTIASFLSKYQDIIIEHQKVVKGNQKRLESLRELAGKENLEYPSVTLPPQPHTKEGVDAYNEVIARVRMWVNLNLWQKLKLSRDDAKPLLRLKGFPSFPLVERQANEVDWWDMVCNVKKLINEKKEDGKVFWQNLAGYKRQEALRPYLSSEEDRKKGKKFARYQLGDLLLHLEKKHGEDWGKVYDEAWERIDKKVEGLSKHIKLEEERRSEDAQSKAALTDWLRAKASFVIEGLKEADKDEFCRCELKLQKWYGDLRGKPFAIEAENSILDISGFSKQYNCAFIWQKDGVKKLNLYLIINYFKGGKLRFKKIKPEAFEANRFYTVINKKSGEIVPMEVNFNFDDPNLIILPLAFGKRQGREFIWNDLLSLETGSLKLANGRVIEKTLYNRRTRQDEPALFVALTFERREVLDSSNIKPMNLIGVDRGENIPAVIALTDPEGCPLSRFKDSLGNPTHILRIRESYKEKQRTIQAKKEVEQRRAGGYSRKYASKAKNLADDMVRNTARDLLYYAVTQDAMLIFENLSRGFGRQGKRTFMAERQYTRMEDWLTAKLAYEGLPSKTYLSKTLAQYTSKTCSNCGFTITSADYDRVLEKLKKTATGWMTTINGKELKVEGQITYYNRYKRQNVVKDLSVELDRLSEESVNNDISSWTKGRSGEALSLLKKRFSHRPVQEKFVCLNCGFETHADEQAALNIARSWLFLRSQEYKKYQTNKTTGNTDKRAFVETWQSFYRKKLKEVWKPAV

SEQ ID NO: 30653 - protein, 979 aa, synthetic construct
  REGION 1..979: note = engineered CasX variant
QEIKRINKIRRRLVKDSNTKKAGKTGPMKTLLVRVMTPDLRERLENLRKKPENIPQPISNTSRANLNKLLTDYTEMKKAILHVYWEEFQKDPVGLMSRVAQPASKKIDQNKLKPEMDEKGNLTTAGFACSQCGQPLFVYKLEQVSEKGKAYTNYFGRCNVAEHEKLILLAQLKPEKDSDEAVTYSLGKFGQRALDFYSIHVTKESTHPVKPLAQIAGNRYASSAPVGKALSDACMGTIASFLSKYQDIIIEHQKVVKGNQKRLESLRELAGKENLEYPSVTLPPQPHTKEGVDAYNEVIARVRMWVNLNLWQKLKLSRDDAKPLLRLKGFPSFPLVERQANEVDWWDMVCNVKKLINEKKEDGKVFWQNLAGYKRQEALRPYLSSEEDRKKGKKFARYQLGDLLLHLEKKHGEDWGKVYDEAWERIDKKVEGLSKHIKLEEERRSEDAQSKAALTDWLRAKASFVIEGLKEADKDEFCRCELKLQKWYGDLRGKPFAIEAENSILDISGFSKQYNCAFIWQKDGVKKLNLYLIINYFKGGKLRFKKIKPEAFEANRFYTVINKKSGEIVPMEVNFNFDDPNLIILPLAFGKRQGREFIWNDLLSLETGSLKLANGRVIEKTLYNRRTRQDEPALFVALTFERREVLDSSNIKPMNLIGVDRGENIPAVIALTDPEGCPLSRFKDSLGNPTHILRIRESYKEKQRTIQAKKEVEQRRAGGYSRKYASKAKNLADDMVRNTARDLLYYAVTQDAMLIFENLSRGFGRQGKRTFMAERQYTRMEDWLTAKLAYEGLPSKTYLSKTLAQYTSKTCSNCGFTITSADYDRVLEKLKKTATGWMTTINGKELKVEGQITYYNRYKRQNVVKDLSVELDRLSEESVNNDISSWTKGRSGEALSLLKKRFSHRPVQEKFVCLNCGFETHADEQAALNIARSWLFLRSQEYKKYQTNKTTGNTDKRAFVETWQSFYRKKLKEVWKPAV

SEQ ID NO: 30654 - protein, 979 aa, synthetic construct
  REGION 1..979: note = engineered CasX variant
QEIKRINKIRRRLVKDSNTKKAGKTGPMKTLLVRVMTPDLRERLENLRKKPENIPQPISNTSRANLNKLLTDYTEMKKAILHVYWEEFQKDPVGLMSRVAQPASKKIDQNKLKPEMDEKGNLTTAGFACSQCGQPLFVYKLEQVSEKGKAYTNYFGRCNVAEHEKLILLAQLKPEKDSDEAVTYSLGKFGQRALDFYSIHVTKESTHPVKPLAQIAGNRYASSVPVGKALSDACMGTIASFLSKYQDIIIEHQKVVKGNQKRLESLRELAGKENLEYPSVTLPPQPHTKEGVDAYNEVIARVRMWVNLNLWQKLKLSRDDAKPLLRLKGFPSFPLVERQANEVDWWDMVCNVKKLINEKKEDGKVFWQNLAGYKRQEALRPYLSSEEDRKKGKKFARYQLGDLLLHLEKKHGEDWGKVYDEAWERIDKKVEGLSKHIKLEEERRSEDAQSKAALTDWLRAKASFVIEGLKEADKDEFCRCELKLQKWYGDLRGKPFAIEAENSILDISGFSKQYNCAFIWQKDGVKKLNLYLIINYFKGGKLRFKKIKPEAFEANRFYTVINKKSGEIVPMEVNFNFDDPNLIILPLAFGKRQGREFIWNDLLSLETGSLKLANGRVIEKTLYNRRTRQDEPALFVALTFERREVLDSSNIKPMNLIGVDRGENIPAVIALTDPEGCPLSRFKDSLGNPTHILRIRESYKEKQRTIQAKKEVEQRRAGGYSRKYASKAKNLADDMVRNTARDLLYYAVTQDAMLIFENLSRGFGRQGKRTFMAERQYTRMEDWLTAKLAYEGLPSKTYLSKTLAQYTSKTCSNCGFTITSADYDRVLEKLKKTATGWMTTINGKELKVEGQITYYNRYKRQNVVKDLSVELDRLSEESVNNDISSWTKGRSGEALSLLKKRFSHRPVQEKFVCLNCGFETHADEQAALNIARSWLFLRSQEYKKYQTNKTTGNTDKRAFVETWQSFYRKKLKEVWKPAV

SEQ ID NO: 30655 - protein, 978 aa, synthetic construct
  REGION 1..978: note = engineered CasX variant
QEIKRINKIRRRLVKDSNTKKAGKTGPMKTLLVRVMTPDLRERLENLRKKPENIPQPISNTSRANLNKLLTDYTEMKKAILHVYWEEFQKDPVGLMSRVAQPASKKIDQNKLKPEMDEKGNLTTAGFACSQCGQPLFVYKLEQVSEKGKAYTNYFGRCNVAEHEKLIKLAQLKPEKDSDEAVTYSLGKFGQRALDFYSIHVTKESTHPVKPLAQIAGNRYASSPVGKALSDACMGTIASFLSKYQDIIIEHQKVVKGNQKRLESLRELAGKENLEYPSVTLPPQPHTKEGVDAYNEVIARVRMWVNLNLWQKLKLSRDDAKPLLRLKGFPSFPLVERQANEVDWWDMVCNVKKLINEKKEDGKVFWQNLAGYKRQEALRPYLSSEEDRKKGKKFARYQLGDLLLHLEKKHGEDWGKVYDEAWERIDKKVEGLSKHIKLEEERRSEDAQSKAALTDWLRAKASFVIEGLKEADKDEFCRCELKLQKWYGDLRGKPFAIEAENSILDISGFSKQYNCAFIWQKDGVKKLNLYLIINYFKGGKLRFKKIKPEAFEANRFYTVINKKSGEIVPMEVNFNFDDPNLIILPLAFGKRQGREFIWNDLLSLETGSLKLANGRVIEKTLYNRRTRQDEPALFVALTFERREVLDSSNIKPMNLIGVDRGENIPAVIALTDPEGCPLSRFKDSLGNPTHILRIRESYKEKQRTIQAKKEVEQRRAGGYSRKYASKAKNLADDMVRNTARDLLYYAVTQDAMLIFENLSRGFGRQGKRTFMAERQYTRMEDWLTAKLAYEGLPSKTYLSKTLAQYTSKTCSNCGFTITSADYDRVLEKLKKTATGWMTTINGKELKVEGQITYYNRYKRQNVVKDLSVELDRLSEESVNNDISSWTKGRSGEALSLLKKRFSHRPVQEKFVCLNCGFETHADEQAALNIARSWLFLRSQEYKKYQTNKTTGNTDKRAFVETWQSFYRKKLKEVWKPAV

SEQ ID NO: 30656 - protein, 979 aa, synthetic construct
  REGION 1..979: note = engineered CasX variant
QEIKRINKIRRRLVKDSNTKKAGKTGPMKTLLVRVMTPDLRERLENLRKKPENIPQPISNTSRANLNKLLTDYTEMKKAILHVYWEEFQKDPVGLMSRVAQPASKKIDQNKLKPEMDEKGNLTTAGFACSQCGQPLFVYKLEQVSEKGKAYTNYFGRCNVAEHEKLILLAQLKPEKDSDEAVTYSLGKFGQRALDFYSIHVTKESTHPVKPLAQIAGNRYASSYPVGKALSDACMGTIASFLSKYQDIIIEHQKVVKGNQKRLESLRELAGKENLEYPSVTLPPQPHTKEGVDAYNEVIARVRMWVNLNLWQKLKLSRDDAKPLLRLKGFPSFPLVERQANEVDWWDMVCNVKKLINEKKEDGKVFWQNLAGYKRQEALRPYLSSEEDRKKGKKFARYQLGDLLLHLEKKHGEDWGKVYDEAWERIDKKVEGLSKHIKLEEERRSEDAQSKAALTDWLRAKASFVIEGLKEADKDEFCRCELKLQKWYGDLRGKPFAIEAENSILDISGFSKQYNCAFIWQKDGVKKLNLYLIINYFKGGKLRFKKIKPEAFEANRFYTVINKKSGEIVPMEVNFNFDDPNLIILPLAFGKRQGREFIWNDLLSLETGSLKLANGRVIEKTLYNRRTRQDEPALFVALTFERREVLDSSNIKPMNLIGVDRGENIPAVIALTDPEGCPLSRFKDSLGNPTHILRIGESYKEKQRTIQAKKEVEQRRAGGYSRKYASKAKNLADDMVRNTARDLLYYAVTQDAMLIFENLSRGFGRQGKRTFSAERQYTRMEDWLTAKLAYEGLPSKTYLSKTLAQYTSKTCSNCGFTITSADYDRVLEKLKKTATGWMTTINGKELKVEGQITYYNRYKRQNVVKDLSVELDRLSEESVNNDISSWTKGRSGEALSLLKKRFSHRPVQEKFVCLNCGFETHADEQAALNIARSWLFLRSQEYKKYQTNKTTGNTDKRAFVETWQSFYRKKLKEVWKPAV

SEQ ID NO: 30657 - protein, 979 aa, synthetic construct
  REGION 1..979: note = engineered CasX variant
QEIKRINKIRRRLVKDSNTKKAGKTGPMKTLLVRVMTPDLRERLENLRKKPENIPQPISNTSRANLNKLLTDYTEMKKAILHVYWEEFQKDPVGLMSRVAQPASKKIDQNKLKPEMDEKGNLTTAGFACSQCGQPLFVYKLEQVSEKGKAYTNYFGRCNVAEHEKLILLAQLKPEKDSDEAVTYSLGKFGQRALDFYSIHVTKESTHPVKPLAQIAGNRYASSHPVGKALSDACMGTIASFLSKYQDIIIEHQKVVKGNQKRLESLRELAGKENLEYPSVTLPPQPHTKEGVDAYNEVIARVRMWVNLNLWQKLKLSRDDAKPLLRLKGFPSFPLVERQANEVDWWDMVCNVKKLINEKKEDGKVFWQNLAGYKRQEALRPYLSSEEDRKKGKKFARYQLGDLLLHLEKKHGEDWGKVYDEAWERIDKKVEGLSKHIKLEEERRSEDAQSKAALTDWLRAKASFVIEGLKEADKDEFCRCELKLQKWYGDLRGKPFAIEAENSILDISGFSKQYNCAFIWQKDGVKKLNLYLIINYFKGGKLRFKKIKPEAFEANRFYTVINKKSGEIVPMEVNFNFDDPNLIILPLAFGKRQGREFIWNDLLSLETGSLKLANGRVIEKTLYNRRTRQDEPALFVALTFERREVLDSSNIKPMNLIGVDRGENIPAVIALTDPEGCPLSRFKDSLGNPTHILRIGESYKEKQRTIQAKKEVEQRRAGGYSRKYASKAKNLADDMVRNTARDLLYYAVTQDAMLIFENLSRGFGRQGKRTFSAERQYTRMEDWLTAKLAYEGLPSKTYLSKTLAQYTSKTCSNCGFTITSADYDRVLEKLKKTATGWMTTINGKELKVEGQITYYNRYKRQNVVKDLSVELDRLSEESVNNDISSWTKGRSGEALSLLKKRFSHRPVQEKFVCLNCGFETHADEQAALNIARSWLFLRSQEYKKYQTNKTTGNTDKRAFVETWQSFYRKKLKEVWKPAV

SEQ ID NO: 30658 - protein, 979 aa, synthetic construct
  REGION 1..979: note = engineered CasX variant
QEIKRINKIRRRLVKDSNTKKAGKTGPMKTLLVRVMTPDLRERLENLRKKPENIPQPISNTSRANLNKLLTDYTEMKKAILHVYWEEFQKDPVGLMSRVAQPASKKIDQNKLKPEMDEKGNLTTAGFACSQCGQPLFVYKLEQVSEKGKAYTNYFGRCNVAEHEKLILLAQLKPEKDSDEAVTYSLGKFGQRALDFYSIHVTKESTHPVKPLAQIAGNRYASSSPVGKALSDACMGTIASFLSKYQDIIIEHQKVVKGNQKRLESLRELAGKENLEYPSVTLPPQPHTKEGVDAYNEVIARVRMWVNLNLWQKLKLSRDDAKPLLRLKGFPSFPLVERQANEVDWWDMVCNVKKLINEKKEDGKVFWQNLAGYKRQEALRPYLSSEEDRKKGKKFARYQLGDLLLHLEKKHGEDWGKVYDEAWERIDKKVEGLSKHIKLEEERRSEDAQSKAALTDWLRAKASFVIEGLKEADKDEFCRCELKLQKWYGDLRGKPFAIEAENSILDISGFSKQYNCAFIWQKDGVKKLNLYLIINYFKGGKLRFKKIKPEAFEANRFYTVINKKSGEIVPMEVNFNFDDPNLIILPLAFGKRQGREFIWNDLLSLETGSLKLANGRVIEKTLYNRRTRQDEPALFVALTFERREVLDSSNIKPMNLIGVDRGENIPAVIALTDPEGCPLSRFKDSLGNPTHILRIGESYKEKQRTIQAKKEVEQRRAGGYSRKYASKAKNLADDMVRNTARDLLYYAVTQDAMLIFENLSRGFGRQGKRTFSAERQYTRMEDWLTAKLAYEGLPSKTYLSKTLAQYTSKTCSNCGFTITSADYDRVLEKLKKTATGWMTTINGKELKVEGQITYYNRYKRQNVVKDLSVELDRLSEESVNNDISSWTKGRSGEALSLLKKRFSHRPVQEKFVCLNCGFETHADEQAALNIARSWLFLRSQEYKKYQTNKTTGNTDKRAFVETWQSFYRKKLKEVWKPAV

SEQ ID NO: 30659 - protein, 979 aa, synthetic construct
  REGION 1..979: note = engineered CasX variant
QEIKRINKIRRRLVKDSNTKKAGKTGPMKTLLVRVMTPDLRERLENLRKKPENIPQPISNTSRANLNKLLTDYTEMKKAILHVYWEEFQKDPVGLMSRVAQPASKKIDQNKLKPEMDEKGNLTTAGFACSQCGQPLFVYKLEQVSEKGKAYTNYFGRCNVAEHEKLILLAQLKPEKDSDEAVTYSLGKFGQRALDFYSIHVTKESTHPVKPLAQIAGNRYASSTPVGKALSDACMGTIASFLSKYQDIIIEHQKVVKGNQKRLESLRELAGKENLEYPSVTLPPQPHTKEGVDAYNEVIARVRMWVNLNLWQKLKLSRDDAKPLLRLKGFPSFPLVERQANEVDWWDMVCNVKKLINEKKEDGKVFWQNLAGYKRQEALRPYLSSEEDRKKGKKFARYQLGDLLLHLEKKHGEDWGKVYDEAWERIDKKVEGLSKHIKLEEERRSEDAQSKAALTDWLRAKASFVIEGLKEADKDEFCRCELKLQKWYGDLRGKPFAIEAENSILDISGFSKQYNCAFIWQKDGVKKLNLYLIINYFKGGKLRFKKIKPEAFEANRFYTVINKKSGEIVPMEVNFNFDDPNLIILPLAFGKRQGREFIWNDLLSLETGSLKLANGRVIEKTLYNRRTRQDEPALFVALTFERREVLDSSNIKPMNLIGVDRGENIPAVIALTDPEGCPLSRFKDSLGNPTHILRIGESYKEKQRTIQAKKEVEQRRAGGYSRKYASKAKNLADDMVRNTARDLLYYAVTQDAMLIFENLSRGFGRQGKRTFSAERQYTRMEDWLTAKLAYEGLPSKTYLSKTLAQYTSKTCSNCGFTITSADYDRVLEKLKKTATGWMTTINGKELKVEGQITYYNRYKRQNVVKDLSVELDRLSEESVNNDISSWTKGRSGEALSLLKKRFSHRPVQEKFVCLNCGFETHADEQAALNIARSWLFLRSQEYKKYQTNKTTGNTDKRAFVETWQSFYRKKLKEVWKPAV

SEQ ID NO: 30660 - protein, 979 aa, synthetic construct
  REGION 1..979: note = engineered CasX variant
QEIKRINKIRRRLVKDSNTKKAGKTGPMKTLLVRVMTPDLRERLENLRKKPENIPQPISNTSRANLNKLLTDYTEMKKAILHVYWEEFQKDPVGLMSRVAQPASKKIDQNKLKPEMDEKGNLTTAGFACSQCGQPLFVYKLEQVSEKGKAYTNYFGRCNVAEHEKLILLAQLKPEKDSDEAVTYSLGKFGQRALDFYSIHVTKESTHPVKPLAQIAGNRYASSAPVGKALSDACMGTIASFLSKYQDIIIEHQKVVKGNQKRLESLRELAGKENLEYPSVTLPPQPHTKEGVDAYNEVIARVRMWVNLNLWQKLKLSRDDAKPLLRLKGFPSFPLVERQANEVDWWDMVCNVKKLINEKKEDGKVFWQNLAGYKRQEALRPYLSSEEDRKKGKKFARYQLGDLLLHLEKKHGEDWGKVYDEAWERIDKKVEGLSKHIKLEEERRSEDAQSKAALTDWLRAKASFVIEGLKEADKDEFCRCELKLQKWYGDLRGKPFAIEAENSILDISGFSKQYNCAFIWQKDGVKKLNLYLIINYFKGGKLRFKKIKPEAFEANRFYTVINKKSGEIVPMEVNFNFDDPNLIILPLAFGKRQGREFIWNDLLSLETGSLKLANGRVIEKTLYNRRTRQDEPALFVALTFERREVLDSSNIKPMNLIGVDRGENIPAVIALTDPEGCPLSRFKDSLGNPTHILRIGESYKEKQRTIQAKKEVEQRRAGGYSRKYASKAKNLADDMVRNTARDLLYYAVTQDAMLIFENLSRGFGRQGKRTFSAERQYTRMEDWLTAKLAYEGLPSKTYLSKTLAQYTSKTCSNCGFTITSADYDRVLEKLKKTATGWMTTINGKELKVEGQITYYNRYKRQNVVKDLSVELDRLSEESVNNDISSWTKGRSGEALSLLKKRFSHRPVQEKFVCLNCGFETHADEQAALNIARSWLFLRSQEYKKYQTNKTTGNTDKRAFVETWQSFYRKKLKEVWKPAV

SEQ ID NO: 30661 - protein, 979 aa, synthetic construct
  REGION 1..979: note = engineered CasX variant
QEIKRINKIRRRLVKDSNTKKAGKTGPMKTLLVRVMTPDLRERLENLRKKPENIPQPISNTSRANLNKLLTDYTEMKKAILHVYWEEFQKDPVGLMSRVAQPASKKIDQNKLKPEMDEKGNLTTAGFACSQCGQPLFVYKLEQVSEKGKAYTNYFGRCNVAEHEKLILLAQLKPEKDSDEAVTYSLGKFGQRALDFYSIHVTKESTHPVKPLAQIAGNRYASSVPVGKALSDACMGTIASFLSKYQDIIIEHQKVVKGNQKRLESLRELAGKENLEYPSVTLPPQPHTKEGVDAYNEVIARVRMWVNLNLWQKLKLSRDDAKPLLRLKGFPSFPLVERQANEVDWWDMVCNVKKLINEKKEDGKVFWQNLAGYKRQEALRPYLSSEEDRKKGKKFARYQLGDLLLHLEKKHGEDWGKVYDEAWERIDKKVEGLSKHIKLEEERRSEDAQSKAALTDWLRAKASFVIEGLKEADKDEFCRCELKLQKWYGDLRGKPFAIEAENSILDISGFSKQYNCAFIWQKDGVKKLNLYLIINYFKGGKLRFKKIKPEAFEANRFYTVINKKSGEIVPMEVNFNFDDPNLIILPLAFGKRQGREFIWNDLLSLETGSLKLANGRVIEKTLYNRRTRQDEPALFVALTFERREVLDSSNIKPMNLIGVDRGENIPAVIALTDPEGCPLSRFKDSLGNPTHILRIGESYKEKQRTIQAKKEVEQRRAGGYSRKYASKAKNLADDMVRNTARDLLYYAVTQDAMLIFENLSRGFGRQGKRTFSAERQYTRMEDWLTAKLAYEGLPSKTYLSKTLAQYTSKTCSNCGFTITSADYDRVLEKLKKTATGWMTTINGKELKVEGQITYYNRYKRQNVVKDLSVELDRLSEESVNNDISSWTKGRSGEALSLLKKRFSHRPVQEKFVCLNCGFETHADEQAALNIARSWLFLRSQEYKKYQTNKTTGNTDKRAFVETWQSFYRKKLKEVWKPAV

SEQ ID NO: 30662 - protein, 978 aa, synthetic construct
  REGION 1..978: note = engineered CasX variant
QEIKRINKIRRRLVKDSNTKKAGKTGPMKTLLVRVMTPDLRERLENLRKKPENIPQPISNTSRANLNKLLTDYTEMKKAILHVYWEEFQKDPVGLMSRVAQPASKKIDQNKLKPEMDEKGNLTTAGFACSQCGQPLFVYKLEQVSEKGKAYTNYFGRCNVAEHEKLIKLAQLKPEKDSDEAVTYSLGKFGQRALDFYSIHVTKESTHPVKPLAQIAGNRYASSPVGKALSDACMGTIASFLSKYQDIIIEHQKVVKGNQKRLESLRELAGKENLEYPSVTLPPQPHTKEGVDAYNEVIARVRMWVNLNLWQKLKLSRDDAKPLLRLKGFPSFPLVERQANEVDWWDMVCNVKKLINEKKEDGKVFWQNLAGYKRQEALRPYLSSEEDRKKGKKFARYQLGDLLLHLEKKHGEDWGKVYDEAWERIDKKVEGLSKHIKLEEERRSEDAQSKAALTDWLRAKASFVIEGLKEADKDEFCRCELKLQKWYGDLRGKPFAIEAENSILDISGFSKQYNCAFIWQKDGVKKLNLYLIINYFKGGKLRFKKIKPEAFEANRFYTVINKKSGEIVPMEVNFNFDDPNLIILPLAFGKRQGREFIWNDLLSLETGSLKLANGRVIEKTLYNRRTRQDEPALFVALTFERREVLDSSNIKPMNLIGVDRGENIPAVIALTDPEGCPLSRFKDSLGNPTHILRIGESYKEKQRTIQAKKEVEQRRAGGYSRKYASKAKNLADDMVRNTARDLLYYAVTQDAMLIFENLSRGFGRQGKRTFSAERQYTRMEDWLTAKLAYEGLPSKTYLSKTLAQYTSKTCSNCGFTITSADYDRVLEKLKKTATGWMTTINGKELKVEGQITYYNRYKRQNVVKDLSVELDRLSEESVNNDISSWTKGRSGEALSLLKKRFSHRPVQEKFVCLNCGFETHADEQAALNIARSWLFLRSQEYKKYQTNKTTGNTDKRAFVETWQSFYRKKLKEVWKPAV

SEQ ID NO: 30663 - protein, 979 aa, synthetic construct
  REGION 1..979: note = engineered CasX variant
QEIKRINKIRRRLVKDSNTKKAGKTGPMKTLLVRVMTPDLRERLENLRKKPENIPQPISNTSRANLNKLLTDYTEMKKAILHVYWEEFQKDPVGLMSRVAQPASKKIDQNKLKPEMDEKGNLTTAGFACSQCGQPLFVYKLEQVSEKGKAYTNYFGRCNVAEHEKLILLAQLKPEKDSDEAVTYSLGKFGQRALDFYSIHVTKESTHPVKPLAQIAGNRYASSYPVGKALSDACMGTIASFLSKYQDIIIEHQKVVKGNQKRLESLRELAGKENLEYPSVTLPPQPHTKEGVDAYNEVIARVRMWVNLNLWQKLKLSRDDAKPLLRLKGFPSFPLVERQANEVDWWDMVCNVKKLINEKKEDGKVFWQNLAGYKRQEALRPYLSSEEDRKKGKKFARYQLGDLLLHLEKKHGEDWGKVYDEAWERIDKKVEGLSKHIKLEEERRSEDAQSKAALTDWLRAKASFVIEGLKEADKDEFCRCELKLQKWYGDLRGKPFAIEAENSILDISGFSKQYNCAFIWQKDGVKKLNLYLIINYFKGGKLRFKKIKPEAFEANRFYTVINKKSGEIVPMEVNFNFDDPNLIILPLAFGKRQGREFIWNDLLSLETGSLKLANGRVIEKTLYNRRTRQDEPALFVALTFERREVLDSSNIKPMNLIGVDRGENIPAVIALTDPEGCPLSRFKDSLGNPTHILRIGESYKEKQRTIQAKKEVEQRRAGGYSRKYASKAKNLADDMVRNTARDLLYYAVTQDAMLIFENLSRGFGRQGKRTFMAERQYTRMEDWLTAKLAYEGLPSKTYLSKTLAQYTSKTCSNCGFTITSADYDRVLEKLKKTATGWMTTINGKELKVEGQITYYNRYKRQNVVKDLSVELDRLSEESVNNDISSWDKGRSGEALSLLKKRFSHRPVQEKFVCLNCGFETHADEQAALNIARSWLFLRSQEYKKYQTNKTTGNTDKRAFVETWQSFYRKKLKEVWKPAV

SEQ ID NO: 30664 - protein, 979 aa, synthetic construct
  REGION 1..979: note = engineered CasX variant
QEIKRINKIRRRLVKDSNTKKAGKTGPMKTLLVRVMTPDLRERLENLRKKPENIPQPISNTSRANLNKLLTDYTEMKKAILHVYWEEFQKDPVGLMSRVAQPASKKIDQNKLKPEMDEKGNLTTAGFACSQCGQPLFVYKLEQVSEKGKAYTNYFGRCNVAEHEKLILLAQLKPEKDSDEAVTYSLGKFGQRALDFYSIHVTKESTHPVKPLAQIAGNRYASSHPVGKALSDACMGTIASFLSKYQDIIIEHQKVVKGNQKRLESLRELAGKENLEYPSVTLPPQPHTKEGVDAYNEVIARVRMWVNLNLWQKLKLSRDDAKPLLRLKGFPSFPLVERQANEVDWWDMVCNVKKLINEKKEDGKVFWQNLAGYKRQEALRPYLSSEEDRKKGKKFARYQLGDLLLHLEKKHGEDWGKVYDEAWERIDKKVEGLSKHIKLEEERRSEDAQSKAALTDWLRAKASFVIEGLKEADKDEFCRCELKLQKWYGDLRGKPFAIEAENSILDISGFSKQYNCAFIWQKDGVKKLNLYLIINYFKGGKLRFKKIKPEAFEANRFYTVINKKSGEIVPMEVNFNFDDPNLIILPLAFGKRQGREFIWNDLLSLETGSLKLANGRVIEKTLYNRRTRQDEPALFVALTFERREVLDSSNIKPMNLIGVDRGENIPAVIALTDPEGCPLSRFKDSLGNPTHILRIGESYKEKQRTIQAKKEVEQRRAGGYSRKYASKAKNLADDMVRNTARDLLYYAVTQDAMLIFENLSRGFGRQGKRTFMAERQYTRMEDWLTAKLAYEGLPSKTYLSKTLAQYTSKTCSNCGFTITSADYDRVLEKLKKTATGWMTTINGKELKVEGQITYYNRYKRQNVVKDLSVELDRLSEESVNNDISSWDKGRSGEALSLLKKRFSHRPVQEKFVCLNCGFETHADEQAALNIARSWLFLRSQEYKKYQTNKTTGNTDKRAFVETWQSFYRKKLKEVWKPAV

SEQ ID NO: 30665 - protein, 979 aa, synthetic construct
  REGION 1..979: note = engineered CasX variant
QEIKRINKIRRRLVKDSNTKKAGKTGPMKTLLVRVMTPDLRERLENLRKKPENIPQPISNTSRANLNKLLTDYTEMKKAILHVYWEEFQKDPVGLMSRVAQPASKKIDQNKLKPEMDEKGNLTTAGFACSQCGQPLFVYKLEQVSEKGKAYTNYFGRCNVAEHEKLILLAQLKPEKDSDEAVTYSLGKFGQRALDFYSIHVTKESTHPVKPLAQIAGNRYASSSPVGKALSDACMGTIASFLSKYQDIIIEHQKVVKGNQKRLESLRELAGKENLEYPSVTLPPQPHTKEGVDAYNEVIARVRMWVNLNLWQKLKLSRDDAKPLLRLKGFPSFPLVERQANEVDWWDMVCNVKKLINEKKEDGKVFWQNLAGYKRQEALRPYLSSEEDRKKGKKFARYQLGDLLLHLEKKHGEDWGKVYDEAWERIDKKVEGLSKHIKLEEERRSEDAQSKAALTDWLRAKASFVIEGLKEADKDEFCRCELKLQKWYGDLRGKPFAIEAENSILDISGFSKQYNCAFIWQKDGVKKLNLYLIINYFKGGKLRFKKIKPEAFEANRFYTVINKKSGEIVPMEVNFNFDDPNLIILPLAFGKRQGREFIWNDLLSLETGSLKLANGRVIEKTLYNRRTRQDEPALFVALTFERREVLDSSNIKPMNLIGVDRGENIPAVIALTDPEGCPLSRFKDSLGNPTHILRIGESYKEKQRTIQAKKEVEQRRAGGYSRKYASKAKNLADDMVRNTARDLLYYAVTQDAMLIFENLSRGFGRQGKRTFMAERQYTRMEDWLTAKLAYEGLPSKTYLSKTLAQYTSKTCSNCGFTITSADYDRVLEKLKKTATGWMTTINGKELKVEGQITYYNRYKRQNVVKDLSVELDRLSEESVNNDISSWDKGRSGEALSLLKKRFSHRPVQEKFVCLNCGFETHADEQAALNIARSWLFLRSQEYKKYQTNKTTGNTDKRAFVETWQSFYRKKLKEVWKPAV

SEQ ID NO: 30666 - protein, 979 aa, synthetic construct
  REGION 1..979: note = engineered CasX variant
QEIKRINKIRRRLVKDSNTKKAGKTGPMKTLLVRVMTPDLRERLENLRKKPENIPQPISNTSRANLNKLLTDYTEMKKAILHVYWEEFQKDPVGLMSRVAQPASKKIDQNKLKPEMDEKGNLTTAGFACSQCGQPLFVYKLEQVSEKGKAYTNYFGRCNVAEHEKLILLAQLKPEKDSDEAVTYSLGKFGQRALDFYSIHVTKESTHPVKPLAQIAGNRYASSTPVGKALSDACMGTIASFLSKYQDIIIEHQKVVKGNQKRLESLRELAGKENLEYPSVTLPPQPHTKEGVDAYNEVIARVRMWVNLNLWQKLKLSRDDAKPLLRLKGFPSFPLVERQANEVDWWDMVCNVKKLINEKKEDGKVFWQNLAGYKRQEALRPYLSSEEDRKKGKKFARYQLGDLLLHLEKKHGEDWGKVYDEAWERIDKKVEGLSKHIKLEEERRSEDAQSKAALTDWLRAKASFVIEGLKEADKDEFCRCELKLQKWYGDLRGKPFAIEAENSILDISGFSKQYNCAFIWQKDGVKKLNLYLIINYFKGGKLRFKKIKPEAFEANRFYTVINKKSGEIVPMEVNFNFDDPNLIILPLAFGKRQGREFIWNDLLSLETGSLKLANGRVIEKTLYNRRTRQDEPALFVALTFERREVLDSSNIKPMNLIGVDRGENIPAVIALTDPEGCPLSRFKDSLGNPTHILRIGESYKEKQRTIQAKKEVEQRRAGGYSRKYASKAKNLADDMVRNTARDLLYYAVTQDAMLIFENLSRGFGRQGKRTFMAERQYTRMEDWLTAKLAYEGLPSKTYLSKTLAQYTSKTCSNCGFTITSADYDRVLEKLKKTATGWMTTINGKELKVEGQITYYNRYKRQNVVKDLSVELDRLSEESVNNDISSWDKGRSGEALSLLKKRFSHRPVQEKFVCLNCGFETHADEQAALNIARSWLFLRSQEYKKYQTNKTTGNTDKRAFVETWQSFYRKKLKEVWKPAV

SEQ ID NO: 30667 - protein, 979 aa, synthetic construct
  REGION 1..979: note = engineered CasX variant
QEIKRINKIRRRLVKDSNTKKAGKTGPMKTLLVRVMTPDLRERLENLRKKPENIPQPISNTSRANLNKLLTDYTEMKKAILHVYWEEFQKDPVGLMSRVAQPASKKIDQNKLKPEMDEKGNLTTAGFACSQCGQPLFVYKLEQVSEKGKAYTNYFGRCNVAEHEKLILLAQLKPEKDSDEAVTYSLGKFGQRALDFYSIHVTKESTHPVKPLAQIAGNRYASSAPVGKALSDACMGTIASFLSKYQDIIIEHQKVVKGNQKRLESLRELAGKENLEYPSVTLPPQPHTKEGVDAYNEVIARVRMWVNLNLWQKLKLSRDDAKPLLRLKGFPSFPLVERQANEVDWWDMVCNVKKLINEKKEDGKVFWQNLAGYKRQEALRPYLSSEEDRKKGKKFARYQLGDLLLHLEKKHGEDWGKVYDEAWERIDKKVEGLSKHIKLEEERRSEDAQSKAALTDWLRAKASFVIEGLKEADKDEFCRCELKLQKWYGDLRGKPFAIEAENSILDISGFSKQYNCAFIWQKDGVKKLNLYLIINYFKGGKLRFKKIKPEAFEANRFYTVINKKSGEIVPMEVNFNFDDPNLIILPLAFGKRQGREFIWNDLLSLETGSLKLANGRVIEKTLYNRRTRQDEPALFVALTFERREVLDSSNIKPMNLIGVDRGENIPAVIALTDPEGCPLSRFKDSLGNPTHILRIGESYKEKQRTIQAKKEVEQRRAGGYSRKYASKAKNLADDMVRNTARDLLYYAVTQDAMLIFENLSRGFGRQGKRTFMAERQYTRMEDWLTAKLAYEGLPSKTYLSKTLAQYTSKTCSNCGFTITSADYDRVLEKLKKTATGWMTTINGKELKVEGQITYYNRYKRQNVVKDLSVELDRLSEESVNNDISSWDKGRSGEALSLLKKRFSHRPVQEKFVCLNCGFETHADEQAALNIARSWLFLRSQEYKKYQTNKTTGNTDKRAFVETWQSFYRKKLKEVWKPAV

SEQ ID NO: 30668 - protein, 979 aa, synthetic construct
  REGION 1..979: note = engineered CasX variant
QEIKRINKIRRRLVKDSNTKKAGKTGPMKTLLVRVMTPDLRERLENLRKKPENIPQPISNTSRANLNKLLTDYTEMKKAILHVYWEEFQKDPVGLMSRVAQPASKKIDQNKLKPEMDEKGNLTTAGFACSQCGQPLFVYKLEQVSEKGKAYTNYFGRCNVAEHEKLILLAQLKPEKDSDEAVTYSLGKFGQRALDFYSIHVTKESTHPVKPLAQIAGNRYASSVPVGKALSDACMGTIASFLSKYQDIIIEHQKVVKGNQKRLESLRELAGKENLEYPSVTLPPQPHTKEGVDAYNEVIARVRMWVNLNLWQKLKLSRDDAKPLLRLKGFPSFPLVERQANEVDWWDMVCNVKKLINEKKEDGKVFWQNLAGYKRQEALRPYLSSEEDRKKGKKFARYQLGDLLLHLEKKHGEDWGKVYDEAWERIDKKVEGLSKHIKLEEERRSEDAQSKAALTDWLRAKASFVIEGLKEADKDEFCRCELKLQKWYGDLRGKPFAIEAENSILDISGFSKQYNCAFIWQKDGVKKLNLYLIINYFKGGKLRFKKIKPEAFEANRFYTVINKKSGEIVPMEVNFNFDDPNLIILPLAFGKRQGREFIWNDLLSLETGSLKLANGRVIEKTLYNRRTRQDEPALFVALTFERREVLDSSNIKPMNLIGVDRGENIPAVIALTDPEGCPLSRFKDSLGNPTHILRIGESYKEKQRTIQAKKEVEQRRAGGYSRKYASKAKNLADDMVRNTARDLLYYAVTQDAMLIFENLSRGFGRQGKRTFMAERQYTRMEDWLTAKLAYEGLPSKTYLSKTLAQYTSKTCSNCGFTITSADYDRVLEKLKKTATGWMTTINGKELKVEGQITYYNRYKRQNVVKDLSVELDRLSEESVNNDISSWDKGRSGEALSLLKKRFSHRPVQEKFVCLNCGFETHADEQAALNIARSWLFLRSQEYKKYQTNKTTGNTDKRAFVETWQSFYRKKLKEVWKPAV

SEQ ID NO: 30669 - protein, 978 aa, synthetic construct
  REGION 1..978: note = engineered CasX variant
QEIKRINKIRRRLVKDSNTKKAGKTGPMKTLLVRVMTPDLRERLENLRKKPENIPQPISNTSRANLNKLLTDYTEMKKAILHVYWEEFQKDPVGLMSRVAQPASKKIDQNKLKPEMDEKGNLTTAGFACSQCGQPLFVYKLEQVSEKGKAYTNYFGRCNVAEHEKLIKLAQLKPEKDSDEAVTYSLGKFGQRALDFYSIHVTKESTHPVKPLAQIAGNRYASSPVGKALSDACMGTIASFLSKYQDIIIEHQKVVKGNQKRLESLRELAGKENLEYPSVTLPPQPHTKEGVDAYNEVIARVRMWVNLNLWQKLKLSRDDAKPLLRLKGFPSFPLVERQANEVDWWDMVCNVKKLINEKKEDGKVFWQNLAGYKRQEALRPYLSSEEDRKKGKKFARYQLGDLLLHLEKKHGEDWGKVYDEAWERIDKKVEGLSKHIKLEEERRSEDAQSKAALTDWLRAKASFVIEGLKEADKDEFCRCELKLQKWYGDLRGKPFAIEAENSILDISGFSKQYNCAFIWQKDGVKKLNLYLIINYFKGGKLRFKKIKPEAFEANRFYTVINKKSGEIVPMEVNFNFDDPNLIILPLAFGKRQGREFIWNDLLSLETGSLKLANGRVIEKTLYNRRTRQDEPALFVALTFERREVLDSSNIKPMNLIGVDRGENIPAVIALTDPEGCPLSRFKDSLGNPTHILRIGESYKEKQRTIQAKKEVEQRRAGGYSRKYASKAKNLADDMVRNTARDLLYYAVTQDAMLIFENLSRGFGRQGKRTFMAERQYTRMEDWLTAKLAYEGLPSKTYLSKTLAQYTSKTCSNCGFTITSADYDRVLEKLKKTATGWMTTINGKELKVEGQITYYNRYKRQNVVKDLSVELDRLSEESVNNDISSWDKGRSGEALSLLKKRFSHRPVQEKFVCLNCGFETHADEQAALNIARSWLFLRSQEYKKYQTNKTTGNTDKRAFVETWQSFYRKKLKEVWKPAV

SEQ ID NO: 30670 - protein, 979 aa, synthetic construct
  REGION 1..979: note = engineered CasX variant
QEIKRINKIRRRLVKDSNTKKAGKTGPMKTLLVRVMTPDLRERLENLRKKPENIPQPISNTSRANLNKLLTDYTEMKKAILHVYWEEFQVDPVGLMSRVAQPASKKIDQNKLKPEMDEKGNLTTAGFACSQCGQPLFVYKLEQVSEKGKAYTNYFGRCNVAEHEKLILLAQLKPEKDSDEAVTYSLGKFGQRALDFYSIHVTKESTHPVKPLAQIAGNRYASSYPVGKALSDACMGTIASFLSKYQDIIIEHQKVVKGNQKRLESLRELAGKENLEYPSVTLPPQPHTKEGVDAYNEVIARVRMWVNLNLWQKLKLSRDDAKPLLRLKGFPSFPLVERQANEVDWWDMVCNVKKLINEKKEDGKVFWQNLAGYKRQEALRPYLSSEEDRKKGKKFARYQLGDLLLHLEKKHGEDWGKVYDEAWERIDKKVEGLSKHIKLEEERRSEDAQSKAALTDWLRAKASFVIEGLKEADKDEFCRCELKLQKWYGDLRGKPFAIEAENSILDISGFSKQYNCAFIWQKDGVKKLNLYLIINYFKGGKLRFKKIKPEAFEANRFYTVINKKSGEIVPMEVNFNFDDPNLIILPLAFGKRQGREFIWNDLLSLETGSLKLANGRVIEKTLYNRRTRQDEPALFVALTFERREVLDSSNIKPMNLIGVDRGENIPAVIALTDPEGCPLSRFKDSLGNPTHILRIGESYKEKQRTIQAKKEVEQRRAGGYSRKYASKAKNLADDMVRNTARDLLYYAVTQDAMLIFENLSRGFGRQGKRTFMAERQYTRMEDWLTAKLAYEGLPSKTYLSKTLAQYTSKTCSNCGFTITSADYDRVLEKLKKTATGWMTTINGKELKVEGQITYYNRYKRQNVVKDLSVELDRLSEESVNNDISSWTKGRSGEALSLLKKRFSHRPVQEKFVCLNCGFETHADEQAALNIARSWLFLRSQEYKKYQTNKTTGNTDKRAFVETWQSFYRKKLKEVWKPAV

SEQ ID NO: 30671 - protein, 979 aa, synthetic construct
  REGION 1..979: note = engineered CasX variant
QEIKRINKIRRRLVKDSNTKKAGKTGPMKTLLVRVMTPDLRERLENLRKKPENIPQPISNTSRANLNKLLTDYTEMKKAILHVYWEEFQVDPVGLMSRVAQPASKKIDQNKLKPEMDEKGNLTTAGFACSQCGQPLFVYKLEQVSEKGKAYTNYFGRCNVAEHEKLILLAQLKPEKDSDEAVTYSLGKFGQRALDFYSIHVTKESTHPVKPLAQIAGNRYASSHPVGKALSDACMGTIASFLSKYQDIIIEHQKVVKGNQKRLESLRELAGKENLEYPSVTLPPQPHTKEGVDAYNEVIARVRMWVNLNLWQKLKLSRDDAKPLLRLKGFPSFPLVERQANEVDWWDMVCNVKKLINEKKEDGKVFWQNLAGYKRQEALRPYLSSEEDRKKGKKFARYQLGDLLLHLEKKHGEDWGKVYDEAWERIDKKVEGLSKHIKLEEERRSEDAQSKAALTDWLRAKASFVIEGLKEADKDEFCRCELKLQKWYGDLRGKPFAIEAENSILDISGFSKQYNCAFIWQKDGVKKLNLYLIINYFKGGKLRFKKIKPEAFEANRFYTVINKKSGEIVPMEVNFNFDDPNLIILPLAFGKRQGREFIWNDLLSLETGSLKLANGRVIEKTLYNRRTRQDEPALFVALTFERREVLDSSNIKPMNLIGVDRGENIPAVIALTDPEGCPLSRFKDSLGNPTHILRIGESYKEKQRTIQAKKEVEQRRAGGYSRKYASKAKNLADDMVRNTARDLLYYAVTQDAMLIFENLSRGFGRQGKRTFMAERQYTRMEDWLTAKLAYEGLPSKTYLSKTLAQYTSKTCSNCGFTITSADYDRVLEKLKKTATGWMTTINGKELKVEGQITYYNRYKRQNVVKDLSVELDRLSEESVNNDISSWTKGRSGEALSLLKKRFSHRPVQEKFVCLNCGFETHADEQAALNIARSWLFLRSQEYKKYQTNKTTGNTDKRAFVETWQSFYRKKLKEVWKPAV

SEQ ID NO: 30672 - protein, 979 aa, synthetic construct
  REGION 1..979: note = engineered CasX variant
QEIKRINKIRRRLVKDSNTKKAGKTGPMKTLLVRVMTPDLRERLENLRKKPENIPQPISNTSRANLNKLLTDYTEMKKAILHVYWEEFQVDPVGLMSRVAQPASKKIDQNKLKPEMDEKGNLTTAGFACSQCGQPLFVYKLEQVSEKGKAYTNYFGRCNVAEHEKLILLAQLKPEKDSDEAVTYSLGKFGQRALDFYSIHVTKESTHPVKPLAQIAGNRYASSSPVGKALSDACMGTIASFLSKYQDIIIEHQKVVKGNQKRLESLRELAGKENLEYPSVTLPPQPHTKEGVDAYNEVIARVRMWVNLNLWQKLKLSRDDAKPLLRLKGFPSFPLVERQANEVDWWDMVCNVKKLINEKKEDGKVFWQNLAGYKRQEALRPYLSSEEDRKKGKKFARYQLGDLLLHLEKKHGEDWGKVYDEAWERIDKKVEGLSKHIKLEEERRSEDAQSKAALTDWLRAKASFVIEGLKEADKDEFCRCELKLQKWYGDLRGKPFAIEAENSILDISGFSKQYNCAFIWQKDGVKKLNLYLIINYFKGGKLRFKKIKPEAFEANRFYTVINKKSGEIVPMEVNFNFDDPNLIILPLAFGKRQGREFIWNDLLSLETGSLKLANGRVIEKTLYNRRTRQDEPALFVALTFERREVLDSSNIKPMNLIGVDRGENIPAVIALTDPEGCPLSRFKDSLGNPTHILRIGESYKEKQRTIQAKKEVEQRRAGGYSRKYASKAKNLADDMVRNTARDLLYYAVTQDAMLIFENLSRGFGRQGKRTFMAERQYTRMEDWLTAKLAYEGLPSKTYLSKTLAQYTSKTCSNCGFTITSADYDRVLEKLKKTATGWMTTINGKELKVEGQITYYNRYKRQNVVKDLSVELDRLSEESVNNDISSWTKGRSGEALSLLKKRFSHRPVQEKFVCLNCGFETHADEQAALNIARSWLFLRSQEYKKYQTNKTTGNTDKRAFVETWQSFYRKKLKEVWKPAV

SEQ ID NO: 30673 - protein, 979 aa, synthetic construct
  REGION 1..979: note = engineered CasX variant
QEIKRINKIRRRLVKDSNTKKAGKTGPMKTLLVRVMTPDLRERLENLRKKPENIPQPISNTSRANLNKLLTDYTEMKKAILHVYWEEFQVDPVGLMSRVAQPASKKIDQNKLKPEMDEKGNLTTAGFACSQCGQPLFVYKLEQVSEKGKAYTNYFGRCNVAEHEKLILLAQLKPEKDSDEAVTYSLGKFGQRALDFYSIHVTKESTHPVKPLAQIAGNRYASSTPVGKALSDACMGTIASFLSKYQDIIIEHQKVVKGNQKRLESLRELAGKENLEYPSVTLPPQPHTKEGVDAYNEVIARVRMWVNLNLWQKLKLSRDDAKPLLRLKGFPSFPLVERQANEVDWWDMVCNVKKLINEKKEDGKVFWQNLAGYKRQEALRPYLSSEEDRKKGKKFARYQLGDLLLHLEKKHGEDWGKVYDEAWERIDKKVEGLSKHIKLEEERRSEDAQSKAALTDWLRAKASFVIEGLKEADKDEFCRCELKLQKWYGDLRGKPFAIEAENSILDISGFSKQYNCAFIWQKDGVKKLNLYLIINYFKGGKLRFKKIKPEAFEANRFYTVINKKSGEIVPMEVNFNFDDPNLIILPLAFGKRQGREFIWNDLLSLETGSLKLANGRVIEKTLYNRRTRQDEPALFVALTFERREVLDSSNIKPMNLIGVDRGENIPAVIALTDPEGCPLSRFKDSLGNPTHILRIGESYKEKQRTIQAKKEVEQRRAGGYSRKYASKAKNLADDMVRNTARDLLYYAVTQDAMLIFENLSRGFGRQGKRTFMAERQYTRMEDWLTAKLAYEGLPSKTYLSKTLAQYTSKTCSNCGFTITSADYDRVLEKLKKTATGWMTTINGKELKVEGQITYYNRYKRQNVVKDLSVELDRLSEESVNNDISSWTKGRSGEALSLLKKRFSHRPVQEKFVCLNCGFETHADEQAALNIARSWLFLRSQEYKKYQTNKTTGNTDKRAFVETWQSFYRKKLKEVWKPAV

SEQ ID NO: 30674 - protein, 979 aa, synthetic construct
  REGION 1..979: note = engineered CasX variant
QEIKRINKIRRRLVKDSNTKKAGKTGPMKTLLVRVMTPDLRERLENLRKKPENIPQPISNTSRANLNKLLTDYTEMKKAILHVYWEEFQVDPVGLMSRVAQPASKKIDQNKLKPEMDEKGNLTTAGFACSQCGQPLFVYKLEQVSEKGKAYTNYFGRCNVAEHEKLILLAQLKPEKDSDEAVTYSLGKFGQRALDFYSIHVTKESTHPVKPLAQIAGNRYASSAPVGKALSDACMGTIASFLSKYQDIIIEHQKVVKGNQKRLESLRELAGKENLEYPSVTLPPQPHTKEGVDAYNEVIARVRMWVNLNLWQKLKLSRDDAKPLLRLKGFPSFPLVERQANEVDWWDMVCNVKKLINEKKEDGKVFWQNLAGYKRQEALRPYLSSEEDRKKGKKFARYQLGDLLLHLEKKHGEDWGKVYDEAWERIDKKVEGLSKHIKLEEERRSEDAQSKAALTDWLRAKASFVIEGLKEADKDEFCRCELKLQKWYGDLRGKPFAIEAENSILDISGFSKQYNCAFIWQKDGVKKLNLYLIINYFKGGKLRFKKIKPEAFEANRFYTVINKKSGEIVPMEVNFNFDDPNLIILPLAFGKRQGREFIWNDLLSLETGSLKLANGRVIEKTLYNRRTRQDEPALFVALTFERREVLDSSNIKPMNLIGVDRGENIPAVIALTDPEGCPLSRFKDSLGNPTHILRIGESYKEKQRTIQAKKEVEQRRAGGYSRKYASKAKNLADDMVRNTARDLLYYAVTQDAMLIFENLSRGFGRQGKRTFMAERQYTRMEDWLTAKLAYEGLPSKTYLSKTLAQYTSKTCSNCGFTITSADYDRVLEKLKKTATGWMTTINGKELKVEGQITYYNRYKRQNVVKDLSVELDRLSEESVNNDISSWTKGRSGEALSLLKKRFSHRPVQEKFVCLNCGFETHADEQAALNIARSWLFLRSQEYKKYQTNKTTGNTDKRAFVETWQSFYRKKLKEVWKPAV

SEQ ID NO: 30675 - protein, 979 aa, synthetic construct
  REGION 1..979: note = engineered CasX variant
QEIKRINKIRRRLVKDSNTKKAGKTGPMKTLLVRVMTPDLRERLENLRKKPENIPQPISNTSRANLNKLLTDYTEMKKAILHVYWEEFQVDPVGLMSRVAQPASKKIDQNKLKPEMDEKGNLTTAGFACSQCGQPLFVYKLEQVSEKGKAYTNYFGRCNVAEHEKLILLAQLKPEKDSDEAVTYSLGKFGQRALDFYSIHVTKESTHPVKPLAQIAGNRYASSVPVGKALSDACMGTIASFLSKYQDIIIEHQKVVKGNQKRLESLRELAGKENLEYPSVTLPPQPHTKEGVDAYNEVIARVRMWVNLNLWQKLKLSRDDAKPLLRLKGFPSFPLVERQANEVDWWDMVCNVKKLINEKKEDGKVFWQNLAGYKRQEALRPYLSSEEDRKKGKKFARYQLGDLLLHLEKKHGEDWGKVYDEAWERIDKKVEGLSKHIKLEEERRSEDAQSKAALTDWLRAKASFVIEGLKEADKDEFCRCELKLQKWYGDLRGKPFAIEAENSILDISGFSKQYNCAFIWQKDGVKKLNLYLIINYFKGGKLRFKKIKPEAFEANRFYTVINKKSGEIVPMEVNFNFDDPNLIILPLAFGKRQGREFIWNDLLSLETGSLKLANGRVIEKTLYNRRTRQDEPALFVALTFERREVLDSSNIKPMNLIGVDRGENIPAVIALTDPEGCPLSRFKDSLGNPTHILRIGESYKEKQRTIQAKKEVEQRRAGGYSRKYASKAKNLADDMVRNTARDLLYYAVTQDAMLIFENLSRGFGRQGKRTFMAERQYTRMEDWLTAKLAYEGLPSKTYLSKTLAQYTSKTCSNCGFTITSADYDRVLEKLKKTATGWMTTINGKELKVEGQITYYNRYKRQNVVKDLSVELDRLSEESVNNDISSWTKGRSGEALSLLKKRFSHRPVQEKFVCLNCGFETHADEQAALNIARSWLFLRSQEYKKYQTNKTTGNTDKRAFVETWQSFYRKKLKEVWKPAV

SEQ ID NO: 30676 - protein, 978 aa, synthetic construct
  REGION 1..978: note = engineered CasX variant
QEIKRINKIRRRLVKDSNTKKAGKTGPMKTLLVRVMTPDLRERLENLRKKPENIPQPISNTSRANLNKLLTDYTEMKKAILHVYWEEFQVDPVGLMSRVAQPASKKIDQNKLKPEMDEKGNLTTAGFACSQCGQPLFVYKLEQVSEKGKAYTNYFGRCNVAEHEKLIKLAQLKPEKDSDEAVTYSLGKFGQRALDFYSIHVTKESTHPVKPLAQIAGNRYASSPVGKALSDACMGTIASFLSKYQDIIIEHQKVVKGNQKRLESLRELAGKENLEYPSVTLPPQPHTKEGVDAYNEVIARVRMWVNLNLWQKLKLSRDDAKPLLRLKGFPSFPLVERQANEVDWWDMVCNVKKLINEKKEDGKVFWQNLAGYKRQEALRPYLSSEEDRKKGKKFARYQLGDLLLHLEKKHGEDWGKVYDEAWERIDKKVEGLSKHIKLEEERRSEDAQSKAALTDWLRAKASFVIEGLKEADKDEFCRCELKLQKWYGDLRGKPFAIEAENSILDISGFSKQYNCAFIWQKDGVKKLNLYLIINYFKGGKLRFKKIKPEAFEANRFYTVINKKSGEIVPMEVNFNFDDPNLIILPLAFGKRQGREFIWNDLLSLETGSLKLANGRVIEKTLYNRRTRQDEPALFVALTFERREVLDSSNIKPMNLIGVDRGENIPAVIALTDPEGCPLSRFKDSLGNPTHILRIGESYKEKQRTIQAKKEVEQRRAGGYSRKYASKAKNLADDMVRNTARDLLYYAVTQDAMLIFENLSRGFGRQGKRTFMAERQYTRMEDWLTAKLAYEGLPSKTYLSKTLAQYTSKTCSNCGFTITSADYDRVLEKLKKTATGWMTTINGKELKVEGQITYYNRYKRQNVVKDLSVELDRLSEESVNNDISSWTKGRSGEALSLLKKRFSHRPVQEKFVCLNCGFETHADEQAALNIARSWLFLRSQEYKKYQTNKTTGNTDKRAFVETWQSFYRKKLKEVWKPAV

SEQ ID NO: 30677 - protein, 979 aa, synthetic construct
  REGION 1..979: note = engineered CasX variant
QEIKRLNKIRRRLVKDSNTKKAGKTGPMKTLLVRVMTPDLRERLENLRKKPENIPQPISNTSRANLNKLLTDYTEMKKAILHVYWEEFQKDPVGLMSRVAQPASKKIDQNKLKPEMDEKGNLTTAGFACSQCGQPLFVYKLEQVSEKGKAYTNYFGRCNVAEHEKLILLAQLKPEKDSDEAVTYSLGKFGQRALDFYSIHVTKESTHPVKPLAQIAGNRYASSYPVGKALSDACMGTIASFLSKYQDIIIEHQKVVKGNQKRLESLRELAGKENLEYPSVTLPPQPHTKEGVDAYNEVIARVRMWVNLNLWQKLKLSRDDAKPLLRLKGFPSFPLVERQANEVDWWDMVCNVKKLINEKKEDGKVFWQNLAGYKRQEALRPYLSSEEDRKKGKKFARYQLGDLLLHLEKKHGEDWGKVYDEAWERIDKKVEGLSKHIKLEEERRSEDAQSKAALTDWLRAKASFVIEGLKEADKDEFCRCELKLQKWYGDLRGKPFAIEAENSILDISGFSKQYNCAFIWQKDGVKKLNLYLIINYFKGGKLRFKKIKPEAFEANRFYTVINKKSGEIVPMEVNFNFDDPNLIILPLAFGKRQGREFIWNDLLSLETGSLKLANGRVIEKTLYNRRTRQDEPALFVALTFERREVLDSSNIKPMNLIGVDRGENIPAVIALTDPEGCPLSRFKDSLGNPTHILRIGESYKEKQRTIQAKKEVEQRRAGGYSRKYASKAKNLADDMVRNTARDLLYYAVTQDAMLIFENLSRGFGRQGKRTFMAERQYTRMEDWLTAKLAYEGLPSKTYLSKTLAQYTSKTCSNCGFTITSADYDRVLEKLKKTATGWMTTINGKELKVEGQITYYNRYKRQNVVKDLSVELDRLSEESVNNDISSWTKGRSGEALSLLKKRFSHRPVQEKFVCLNCGFETHADEQAALNIARSWLFLRSQEYKKYQTNKTTGNTDKRAFVETWQSFYRKKLKEVWKPAV

SEQ ID NO: 30678 - protein, 979 aa, synthetic construct
  REGION 1..979: note = engineered CasX variant
QEIKRLNKIRRRLVKDSNTKKAGKTGPMKTLLVRVMTPDLRERLENLRKKPENIPQPISNTSRANLNKLLTDYTEMKKAILHVYWEEFQKDPVGLMSRVAQPASKKIDQNKLKPEMDEKGNLTTAGFACSQCGQPLFVYKLEQVSEKGKAYTNYFGRCNVAEHEKLILLAQLKPEKDSDEAVTYSLGKFGQRALDFYSIHVTKESTHPVKPLAQIAGNRYASSHPVGKALSDACMGTIASFLSKYQDIIIEHQKVVKGNQKRLESLRELAGKENLEYPSVTLPPQPHTKEGVDAYNEVIARVRMWVNLNLWQKLKLSRDDAKPLLRLKGFPSFPLVERQANEVDWWDMVCNVKKLINEKKEDGKVFWQNLAGYKRQEALRPYLSSEEDRKKGKKFARYQLGDLLLHLEKKHGEDWGKVYDEAWERIDKKVEGLSKHIKLEEERRSEDAQSKAALTDWLRAKASFVIEGLKEADKDEFCRCELKLQKWYGDLRGKPFAIEAENSILDISGFSKQYNCAFIWQKDGVKKLNLYLIINYFKGGKLRFKKIKPEAFEANRFYTVINKKSGEIVPMEVNFNFDDPNLIILPLAFGKRQGREFIWNDLLSLETGSLKLANGRVIEKTLYNRRTRQDEPALFVALTFERREVLDSSNIKPMNLIGVDRGENIPAVIALTDPEGCPLSRFKDSLGNPTHILRIGESYKEKQRTIQAKKEVEQRRAGGYSRKYASKAKNLADDMVRNTARDLLYYAVTQDAMLIFENLSRGFGRQGKRTFMAERQYTRMEDWLTAKLAYEGLPSKTYLSKTLAQYTSKTCSNCGFTITSADYDRVLEKLKKTATGWMTTINGKELKVEGQITYYNRYKRQNVVKDLSVELDRLSEESVNNDISSWTKGRSGEALSLLKKRFSHRPVQEKFVCLNCGFETHADEQAALNIARSWLFLRSQEYKKYQTNKTTGNTDKRAFVETWQSFYRKKLKEVWKPAV

SEQ ID NO: 30679 - protein, 979 aa, synthetic construct
  REGION 1..979: note = engineered CasX variant
QEIKRLNKIRRRLVKDSNTKKAGKTGPMKTLLVRVMTPDLRERLENLRKKPENIPQPISNTSRANLNKLLTDYTEMKKAILHVYWEEFQKDPVGLMSRVAQPASKKIDQNKLKPEMDEKGNLTTAGFACSQCGQPLFVYKLEQVSEKGKAYTNYFGRCNVAEHEKLILLAQLKPEKDSDEAVTYSLGKFGQRALDFYSIHVTKESTHPVKPLAQIAGNRYASSSPVGKALSDACMGTIASFLSKYQDIIIEHQKVVKGNQKRLESLRELAGKENLEYPSVTLPPQPHTKEGVDAYNEVIARVRMWVNLNLWQKLKLSRDDAKPLLRLKGFPSFPLVERQANEVDWWDMVCNVKKLINEKKEDGKVFWQNLAGYKRQEALRPYLSSEEDRKKGKKFARYQLGDLLLHLEKKHGEDWGKVYDEAWERIDKKVEGLSKHIKLEEERRSEDAQSKAALTDWLRAKASFVIEGLKEADKDEFCRCELKLQKWYGDLRGKPFAIEAENSILDISGFSKQYNCAFIWQKDGVKKLNLYLIINYFKGGKLRFKKIKPEAFEANRFYTVINKKSGEIVPMEVNFNFDDPNLIILPLAFGKRQGREFIWNDLLSLETGSLKLANGRVIEKTLYNRRTRQDEPALFVALTFERREVLDSSNIKPMNLIGVDRGENIPAVIALTDPEGCPLSRFKDSLGNPTHILRIGESYKEKQRTIQAKKEVEQRRAGGYSRKYASKAKNLADDMVRNTARDLLYYAVTQDAMLIFENLSRGFGRQGKRTFMAERQYTRMEDWLTAKLAYEGLPSKTYLSKTLAQYTSKTCSNCGFTITSADYDRVLEKLKKTATGWMTTINGKELKVEGQITYYNRYKRQNVVKDLSVELDRLSEESVNNDISSWTKGRSGEALSLLKKRFSHRPVQEKFVCLNCGFETHADEQAALNIARSWLFLRSQEYKKYQTNKTTGNTDKRAFVETWQSFYRKKLKEVWKPAV

SEQ ID NO: 30680 - protein, 979 aa, synthetic construct
  REGION 1..979: note = engineered CasX variant
QEIKRLNKIRRRLVKDSNTKKAGKTGPMKTLLVRVMTPDLRERLENLRKKPENIPQPISNTSRANLNKLLTDYTEMKKAILHVYWEEFQKDPVGLMSRVAQPASKKIDQNKLKPEMDEKGNLTTAGFACSQCGQPLFVYKLEQVSEKGKAYTNYFGRCNVAEHEKLILLAQLKPEKDSDEAVTYSLGKFGQRALDFYSIHVTKESTHPVKPLAQIAGNRYASSTPVGKALSDACMGTIASFLSKYQDIIIEHQKVVKGNQKRLESLRELAGKENLEYPSVTLPPQPHTKEGVDAYNEVIARVRMWVNLNLWQKLKLSRDDAKPLLRLKGFPSFPLVERQANEVDWWDMVCNVKKLINEKKEDGKVFWQNLAGYKRQEALRPYLSSEEDRKKGKKFARYQLGDLLLHLEKKHGEDWGKVYDEAWERIDKKVEGLSKHIKLEEERRSEDAQSKAALTDWLRAKASFVIEGLKEADKDEFCRCELKLQKWYGDLRGKPFAIEAENSILDISGFSKQYNCAFIWQKDGVKKLNLYLIINYFKGGKLRFKKIKPEAFEANRFYTVINKKSGEIVPMEVNFNFDDPNLIILPLAFGKRQGREFIWNDLLSLETGSLKLANGRVIEKTLYNRRTRQDEPALFVALTFERREVLDSSNIKPMNLIGVDRGENIPAVIALTDPEGCPLSRFKDSLGNPTHILRIGESYKEKQRTIQAKKEVEQRRAGGYSRKYASKAKNLADDMVRNTARDLLYYAVTQDAMLIFENLSRGFGRQGKRTFMAERQYTRMEDWLTAKLAYEGLPSKTYLSKTLAQYTSKTCSNCGFTITSADYDRVLEKLKKTATGWMTTINGKELKVEGQITYYNRYKRQNVVKDLSVELDRLSEESVNNDISSWTKGRSGEALSLLKKRFSHRPVQEKFVCLNCGFETHADEQAALNIARSWLFLRSQEYKKYQTNKTTGNTDKRAFVETWQSFYRKKLKEVWKPAV

SEQ ID NO: 30681 - protein, 979 aa, synthetic construct
  REGION 1..979: note = engineered CasX variant
QEIKRLNKIRRRLVKDSNTKKAGKTGPMKTLLVRVMTPDLRERLENLRKKPENIPQPISNTSRANLNKLLTDYTEMKKAILHVYWEEFQKDPVGLMSRVAQPASKKIDQNKLKPEMDEKGNLTTAGFACSQCGQPLFVYKLEQVSEKGKAYTNYFGRCNVAEHEKLILLAQLKPEKDSDEAVTYSLGKFGQRALDFYSIHVTKESTHPVKPLAQIAGNRYASSAPVGKALSDACMGTIASFLSKYQDIIIEHQKVVKGNQKRLESLRELAGKENLEYPSVTLPPQPHTKEGVDAYNEVIARVRMWVNLNLWQKLKLSRDDAKPLLRLKGFPSFPLVERQANEVDWWDMVCNVKKLINEKKEDGKVFWQNLAGYKRQEALRPYLSSEEDRKKGKKFARYQLGDLLLHLEKKHGEDWGKVYDEAWERIDKKVEGLSKHIKLEEERRSEDAQSKAALTDWLRAKASFVIEGLKEADKDEFCRCELKLQKWYGDLRGKPFAIEAENSILDISGFSKQYNCAFIWQKDGVKKLNLYLIINYFKGGKLRFKKIKPEAFEANRFYTVINKKSGEIVPMEVNFNFDDPNLIILPLAFGKRQGREFIWNDLLSLETGSLKLANGRVIEKTLYNRRTRQDEPALFVALTFERREVLDSSNIKPMNLIGVDRGENIPAVIALTDPEGCPLSRFKDSLGNPTHILRIGESYKEKQRTIQAKKEVEQRRAGGYSRKYASKAKNLADDMVRNTARDLLYYAVTQDAMLIFENLSRGFGRQGKRTFMAERQYTRMEDWLTAKLAYEGLPSKTYLSKTLAQYTSKTCSNCGFTITSADYDRVLEKLKKTATGWMTTINGKELKVEGQITYYNRYKRQNVVKDLSVELDRLSEESVNNDISSWTKGRSGEALSLLKKRFSHRPVQEKFVCLNCGFETHADEQAALNIARSWLFLRSQEYKKYQTNKTTGNTDKRAFVETWQSFYRKKLKEVWKPAV

SEQ ID NO: 30682 - protein, 979 aa, synthetic construct
  REGION 1..979: note = engineered CasX variant
QEIKRLNKIRRRLVKDSNTKKAGKTGPMKTLLVRVMTPDLRERLENLRKKPENIPQPISNTSRANLNKLLTDYTEMKKAILHVYWEEFQKDPVGLMSRVAQPASKKIDQNKLKPEMDEKGNLTTAGFACSQCGQPLFVYKLEQVSEKGKAYTNYFGRCNVAEHEKLILLAQLKPEKDSDEAVTYSLGKFGQRALDFYSIHVTKESTHPVKPLAQIAGNRYASSVPVGKALSDACMGTIASFLSKYQDIIIEHQKVVKGNQKRLESLRELAGKENLEYPSVTLPPQPHTKEGVDAYNEVIARVRMWVNLNLWQKLKLSRDDAKPLLRLKGFPSFPLVERQANEVDWWDMVCNVKKLINEKKEDGKVFWQNLAGYKRQEALRPYLSSEEDRKKGKKFARYQLGDLLLHLEKKHGEDWGKVYDEAWERIDKKVEGLSKHIKLEEERRSEDAQSKAALTDWLRAKASFVIEGLKEADKDEFCRCELKLQKWYGDLRGKPFAIEAENSILDISGFSKQYNCAFIWQKDGVKKLNLYLIINYFKGGKLRFKKIKPEAFEANRFYTVINKKSGEIVPMEVNFNFDDPNLIILPLAFGKRQGREFIWNDLLSLETGSLKLANGRVIEKTLYNRRTRQDEPALFVALTFERREVLDSSNIKPMNLIGVDRGENIPAVIALTDPEGCPLSRFKDSLGNPTHILRIGESYKEKQRTIQAKKEVEQRRAGGYSRKYASKAKNLADDMVRNTARDLLYYAVTQDAMLIFENLSRGFGRQGKRTFMAERQYTRMEDWLTAKLAYEGLPSKTYLSKTLAQYTSKTCSNCGFTITSADYDRVLEKLKKTATGWMTTINGKELKVEGQITYYNRYKRQNVVKDLSVELDRLSEESVNNDISSWTKGRSGEALSLLKKRFSHRPVQEKFVCLNCGFETHADEQAALNIARSWLFLRSQEYKKYQTNKTTGNTDKRAFVETWQSFYRKKLKEVWKPAV

SEQ ID NO: 30683 - protein, 978 aa, synthetic construct
  REGION 1..978: note = engineered CasX variant
QEIKRLNKIRRRLVKDSNTKKAGKTGPMKTLLVRVMTPDLRERLENLRKKPENIPQPISNTSRANLNKLLTDYTEMKKAILHVYWEEFQKDPVGLMSRVAQPASKKIDQNKLKPEMDEKGNLTTAGFACSQCGQPLFVYKLEQVSEKGKAYTNYFGRCNVAEHEKLIKLAQLKPEKDSDEAVTYSLGKFGQRALDFYSIHVTKESTHPVKPLAQIAGNRYASSPVGKALSDACMGTIASFLSKYQDIIIEHQKVVKGNQKRLESLRELAGKENLEYPSVTLPPQPHTKEGVDAYNEVIARVRMWVNLNLWQKLKLSRDDAKPLLRLKGFPSFPLVERQANEVDWWDMVCNVKKLINEKKEDGKVFWQNLAGYKRQEALRPYLSSEEDRKKGKKFARYQLGDLLLHLEKKHGEDWGKVYDEAWERIDKKVEGLSKHIKLEEERRSEDAQSKAALTDWLRAKASFVIEGLKEADKDEFCRCELKLQKWYGDLRGKPFAIEAENSILDISGFSKQYNCAFIWQKDGVKKLNLYLIINYFKGGKLRFKKIKPEAFEANRFYTVINKKSGEIVPMEVNFNFDDPNLIILPLAFGKRQGREFIWNDLLSLETGSLKLANGRVIEKTLYNRRTRQDEPALFVALTFERREVLDSSNIKPMNLIGVDRGENIPAVIALTDPEGCPLSRFKDSLGNPTHILRIGESYKEKQRTIQAKKEVEQRRAGGYSRKYASKAKNLADDMVRNTARDLLYYAVTQDAMLIFENLSRGFGRQGKRTFMAERQYTRMEDWLTAKLAYEGLPSKTYLSKTLAQYTSKTCSNCGFTITSADYDRVLEKLKKTATGWMTTINGKELKVEGQITYYNRYKRQNVVKDLSVELDRLSEESVNNDISSWTKGRSGEALSLLKKRFSHRPVQEKFVCLNCGFETHADEQAALNIARSWLFLRSQEYKKYQTNKTTGNTDKRAFVETWQSFYRKKLKEVWKPAV

SEQ ID NO: 30684 - protein, 979 aa, synthetic construct
  REGION 1..979: note = engineered CasX variant
QEIKRINKIRRRLVKDSNTKKAGKTGPMKTLLVRVMTPDLRERLENLRKKPENIPQPISNTSRANLNKLLTDYTEMKKAILHVYWEEFQKDPVGLMSRVAQPASKKIDQNKLKPEMDEKGNLTTAGFACSQCGQPLFVYKLEQVSEKGKAYTNYVGRCNVAEHEKLILLAQLKPEKDSDEAVTYSLGKFGQRALDFYSIHVTKESTHPVKPLAQIAGNRYASSYPVGKALSDACMGTIASFLSKYQDIIIEHQKVVKGNQKRLESLRELAGKENLEYPSVTLPPQPHTKEGVDAYNEVIARVRMWVNLNLWQKLKLSRDDAKPLLRLKGFPSFPLVERQANEVDWWDMVCNVKKLINEKKEDGKVFWQNLAGYKRQEALRPYLSSEEDRKKGKKFARYQLGDLLLHLEKKHGEDWGKVYDEAWERIDKKVEGLSKHIKLEEERRSEDAQSKAALTDWLRAKASFVIEGLKEADKDEFCRCELKLQKWYGDLRGKPFAIEAENSILDISGFSKQYNCAFIWQKDGVKKLNLYLIINYFKGGKLRFKKIKPEAFEANRFYTVINKKSGEIVPMEVNFNFDDPNLIILPLAFGKRQGREFIWNDLLSLETGSLKLANGRVIEKTLYNRRTRQDEPALFVALTFERREVLDSSNIKPMNLIGVDRGENIPAVIALTDPEGCPLSRFKDSLGNPTHILRIGESYKEKQRTIQAKKEVEQRRAGGYSRKYASKAKNLADDMVRNTARDLLYYAVTQDAMLIFENLSRGFGRQGKRTFMAERQYTRMEDWLTAKLAYEGLPSKTYLSKTLAQYTSKTCSNCGFTITSADYDRVLEKLKKTATGWMTTINGKELKVEGQITYYNRYKRQNVVKDLSVELDRLSEESVNNDISSWTKGRSGEALSLLKKRFSHRPVQEKFVCLNCGFETHADEQAALNIARSWLFLRSQEYKKYQTNKTTGNTDKRAFVETWQSFYRKKLKEVWKPAV

SEQ ID NO: 30685 - protein, 979 aa, synthetic construct
  REGION 1..979: note = engineered CasX variant
QEIKRINKIRRRLVKDSNTKKAGKTGPMKTLLVRVMTPDLRERLENLRKKPENIPQPISNTSRANLNKLLTDYTEMKKAILHVYWEEFQKDPVGLMSRVAQPASKKIDQNKLKPEMDEKGNLTTAGFACSQCGQPLFVYKLEQVSEKGKAYTNYVGRCNVAEHEKLILLAQLKPEKDSDEAVTYSLGKFGQRALDFYSIHVTKESTHPVKPLAQIAGNRYASSHPVGKALSDACMGTIASFLSKYQDIIIEHQKVVKGNQKRLESLRELAGKENLEYPSVTLPPQPHTKEGVDAYNEVIARVRMWVNLNLWQKLKLSRDDAKPLLRLKGFPSFPLVERQANEVDWWDMVCNVKKLINEKKEDGKVFWQNLAGYKRQEALRPYLSSEEDRKKGKKFARYQLGDLLLHLEKKHGEDWGKVYDEAWERIDKKVEGLSKHIKLEEERRSEDAQSKAALTDWLRAKASFVIEGLKEADKDEFCRCELKLQKWYGDLRGKPFAIEAENSILDISGFSKQYNCAFIWQKDGVKKLNLYLIINYFKGGKLRFKKIKPEAFEANRFYTVINKKSGEIVPMEVNFNFDDPNLIILPLAFGKRQGREFIWNDLLSLETGSLKLANGRVIEKTLYNRRTRQDEPALFVALTFERREVLDSSNIKPMNLIGVDRGENIPAVIALTDPEGCPLSRFKDSLGNPTHILRIGESYKEKQRTIQAKKEVEQRRAGGYSRKYASKAKNLADDMVRNTARDLLYYAVTQDAMLIFENLSRGFGRQGKRTFMAERQYTRMEDWLTAKLAYEGLPSKTYLSKTLAQYTSKTCSNCGFTITSADYDRVLEKLKKTATGWMTTINGKELKVEGQITYYNRYKRQNVVKDLSVELDRLSEESVNNDISSWTKGRSGEALSLLKKRFSHRPVQEKFVCLNCGFETHADEQAALNIARSWLFLRSQEYKKYQTNKTTGNTDKRAFVETWQSFYRKKLKEVWKPAV

SEQ ID NO: 30686 - protein, 979 aa, synthetic construct
  REGION 1..979: note = engineered CasX variant
QEIKRINKIRRRLVKDSNTKKAGKTGPMKTLLVRVMTPDLRERLENLRKKPENIPQPISNTSRANLNKLLTDYTEMKKAILHVYWEEFQKDPVGLMSRVAQPASKKIDQNKLKPEMDEKGNLTTAGFACSQCGQPLFVYKLEQVSEKGKAYTNYVGRCNVAEHEKLILLAQLKPEKDSDEAVTYSLGKFGQRALDFYSIHVTKESTHPVKPLAQIAGNRYASSSPVGKALSDACMGTIASFLSKYQDIIIEHQKVVKGNQKRLESLRELAGKENLEYPSVTLPPQPHTKEGVDAYNEVIARVRMWVNLNLWQKLKLSRDDAKPLLRLKGFPSFPLVERQANEVDWWDMVCNVKKLINEKKEDGKVFWQNLAGYKRQEALRPYLSSEEDRKKGKKFARYQLGDLLLHLEKKHGEDWGKVYDEAWERIDKKVEGLSKHIKLEEERRSEDAQSKAALTDWLRAKASFVIEGLKEADKDEFCRCELKLQKWYGDLRGKPFAIEAENSILDISGFSKQYNCAFIWQKDGVKKLNLYLIINYFKGGKLRFKKIKPEAFEANRFYTVINKKSGEIVPMEVNFNFDDPNLIILPLAFGKRQGREFIWNDLLSLETGSLKLANGRVIEKTLYNRRTRQDEPALFVALTFERREVLDSSNIKPMNLIGVDRGENIPAVIALTDPEGCPLSRFKDSLGNPTHILRIGESYKEKQRTIQAKKEVEQRRAGGYSRKYASKAKNLADDMVRNTARDLLYYAVTQDAMLIFENLSRGFGRQGKRTFMAERQYTRMEDWLTAKLAYEGLPSKTYLSKTLAQYTSKTCSNCGFTITSADYDRVLEKLKKTATGWMTTINGKELKVEGQITYYNRYKRQNVVKDLSVELDRLSEESVNNDISSWTKGRSGEALSLLKKRFSHRPVQEKFVCLNCGFETHADEQAALNIARSWLFLRSQEYKKYQTNKTTGNTDKRAFVETWQSFYRKKLKEVWKPAV

SEQ ID NO: 30687 - protein, 979 aa, synthetic construct
  REGION 1..979: note = engineered CasX variant
QEIKRINKIRRRLVKDSNTKKAGKTGPMKTLLVRVMTPDLRERLENLRKKPENIPQPISNTSRANLNKLLTDYTEMKKAILHVYWEEFQKDPVGLMSRVAQPASKKIDQNKLKPEMDEKGNLTTAGFACSQCGQPLFVYKLEQVSEKGKAYTNYVGRCNVAEHEKLILLAQLKPEKDSDEAVTYSLGKFGQRALDFYSIHVTKESTHPVKPLAQIAGNRYASSTPVGKALSDACMGTIASFLSKYQDIIIEHQKVVKGNQKRLESLRELAGKENLEYPSVTLPPQPHTKEGVDAYNEVIARVRMWVNLNLWQKLKLSRDDAKPLLRLKGFPSFPLVERQANEVDWWDMVCNVKKLINEKKEDGKVFWQNLAGYKRQEALRPYLSSEEDRKKGKKFARYQLGDLLLHLEKKHGEDWGKVYDEAWERIDKKVEGLSKHIKLEEERRSEDAQSKAALTDWLRAKASFVIEGLKEADKDEFCRCELKLQKWYGDLRGKPFAIEAENSILDISGFSKQYNCAFIWQKDGVKKLNLYLIINYFKGGKLRFKKIKPEAFEANRFYTVINKKSGEIVPMEVNFNFDDPNLIILPLAFGKRQGREFIWNDLLSLETGSLKLANGRVIEKTLYNRRTRQDEPALFVALTFERREVLDSSNIKPMNLIGVDRGENIPAVIALTDPEGCPLSRFKDSLGNPTHILRIGESYKEKQRTIQAKKEVEQRRAGGYSRKYASKAKNLADDMVRNTARDLLYYAVTQDAMLIFENLSRGFGRQGKRTFMAERQYTRMEDWLTAKLAYEGLPSKTYLSKTLAQYTSKTCSNCGFTITSADYDRVLEKLKKTATGWMTTINGKELKVEGQITYYNRYKRQNVVKDLSVELDRLSEESVNNDISSWTKGRSGEALSLLKKRFSHRPVQEKFVCLNCGFETHADEQAALNIARSWLFLRSQEYKKYQTNKTTGNTDKRAFVETWQSFYRKKLKEVWKPAV

SEQ ID NO: 30688 - protein, 979 aa, synthetic construct
  REGION 1..979: note = engineered CasX variant
QEIKRINKIRRRLVKDSNTKKAGKTGPMKTLLVRVMTPDLRERLENLRKKPENIPQPISNTSRANLNKLLTDYTEMKKAILHVYWEEFQKDPVGLMSRVAQPASKKIDQNKLKPEMDEKGNLTTAGFACSQCGQPLFVYKLEQVSEKGKAYTNYVGRCNVAEHEKLILLAQLKPEKDSDEAVTYSLGKFGQRALDFYSIHVTKESTHPVKPLAQIAGNRYASSAPVGKALSDACMGTIASFLSKYQDIIIEHQKVVKGNQKRLESLRELAGKENLEYPSVTLPPQPHTKEGVDAYNEVIARVRMWVNLNLWQKLKLSRDDAKPLLRLKGFPSFPLVERQANEVDWWDMVCNVKKLINEKKEDGKVFWQNLAGYKRQEALRPYLSSEEDRKKGKKFARYQLGDLLLHLEKKHGEDWGKVYDEAWERIDKKVEGLSKHIKLEEERRSEDAQSKAALTDWLRAKASFVIEGLKEADKDEFCRCELKLQKWYGDLRGKPFAIEAENSILDISGFSKQYNCAFIWQKDGVKKLNLYLIINYFKGGKLRFKKIKPEAFEANRFYTVINKKSGEIVPMEVNFNFDDPNLIILPLAFGKRQGREFIWNDLLSLETGSLKLANGRVIEKTLYNRRTRQDEPALFVALTFERREVLDSSNIKPMNLIGVDRGENIPAVIALTDPEGCPLSRFKDSLGNPTHILRIGESYKEKQRTIQAKKEVEQRRAGGYSRKYASKAKNLADDMVRNTARDLLYYAVTQDAMLIFENLSRGFGRQGKRTFMAERQYTRMEDWLTAKLAYEGLPSKTYLSKTLAQYTSKTCSNCGFTITSADYDRVLEKLKKTATGWMTTINGKELKVEGQITYYNRYKRQNVVKDLSVELDRLSEESVNNDISSWTKGRSGEALSLLKKRFSHRPVQEKFVCLNCGFETHADEQAALNIARSWLFLRSQEYKKYQTNKTTGNTDKRAFVETWQSFYRKKLKEVWKPAV

SEQ ID NO: 30689 - protein, 979 aa, synthetic construct
  REGION 1..979: note = engineered CasX variant
QEIKRINKIRRRLVKDSNTKKAGKTGPMKTLLVRVMTPDLRERLENLRKKPENIPQPISNTSRANLNKLLTDYTEMKKAILHVYWEEFQKDPVGLMSRVAQPASKKIDQNKLKPEMDEKGNLTTAGFACSQCGQPLFVYKLEQVSEKGKAYTNYVGRCNVAEHEKLILLAQLKPEKDSDEAVTYSLGKFGQRALDFYSIHVTKESTHPVKPLAQIAGNRYASSVPVGKALSDACMGTIASFLSKYQDIIIEHQKVVKGNQKRLESLRELAGKENLEYPSVTLPPQPHTKEGVDAYNEVIARVRMWVNLNLWQKLKLSRDDAKPLLRLKGFPSFPLVERQANEVDWWDMVCNVKKLINEKKEDGKVFWQNLAGYKRQEALRPYLSSEEDRKKGKKFARYQLGDLLLHLEKKHGEDWGKVYDEAWERIDKKVEGLSKHIKLEEERRSEDAQSKAALTDWLRAKASFVIEGLKEADKDEFCRCELKLQKWYGDLRGKPFAIEAENSILDISGFSKQYNCAFIWQKDGVKKLNLYLIINYFKGGKLRFKKIKPEAFEANRFYTVINKKSGEIVPMEVNFNFDDPNLIILPLAFGKRQGREFIWNDLLSLETGSLKLANGRVIEKTLYNRRTRQDEPALFVALTFERREVLDSSNIKPMNLIGVDRGENIPAVIALTDPEGCPLSRFKDSLGNPTHILRIGESYKEKQRTIQAKKEVEQRRAGGYSRKYASKAKNLADDMVRNTARDLLYYAVTQDAMLIFENLSRGFGRQGKRTFMAERQYTRMEDWLTAKLAYEGLPSKTYLSKTLAQYTSKTCSNCGFTITSADYDRVLEKLKKTATGWMTTINGKELKVEGQITYYNRYKRQNVVKDLSVELDRLSEESVNNDISSWTKGRSGEALSLLKKRFSHRPVQEKFVCLNCGFETHADEQAALNIARSWLFLRSQEYKKYQTNKTTGNTDKRAFVETWQSFYRKKLKEVWKPAV

SEQ ID NO: 30690 - protein, 978 aa, synthetic construct
  REGION 1..978: note = engineered CasX variant
QEIKRINKIRRRLVKDSNTKKAGKTGPMKTLLVRVMTPDLRERLENLRKKPENIPQPISNTSRANLNKLLTDYTEMKKAILHVYWEEFQKDPVGLMSRVAQPASKKIDQNKLKPEMDEKGNLTTAGFACSQCGQPLFVYKLEQVSEKGKAYTNYVGRCNVAEHEKLIKLAQLKPEKDSDEAVTYSLGKFGQRALDFYSIHVTKESTHPVKPLAQIAGNRYASSPVGKALSDACMGTIASFLSKYQDIIIEHQKVVKGNQKRLESLRELAGKENLEYPSVTLPPQPHTKEGVDAYNEVIARVRMWVNLNLWQKLKLSRDDAKPLLRLKGFPSFPLVERQANEVDWWDMVCNVKKLINEKKEDGKVFWQNLAGYKRQEALRPYLSSEEDRKKGKKFARYQLGDLLLHLEKKHGEDWGKVYDEAWERIDKKVEGLSKHIKLEEERRSEDAQSKAALTDWLRAKASFVIEGLKEADKDEFCRCELKLQKWYGDLRGKPFAIEAENSILDISGFSKQYNCAFIWQKDGVKKLNLYLIINYFKGGKLRFKKIKPEAFEANRFYTVINKKSGEIVPMEVNFNFDDPNLIILPLAFGKRQGREFIWNDLLSLETGSLKLANGRVIEKTLYNRRTRQDEPALFVALTFERREVLDSSNIKPMNLIGVDRGENIPAVIALTDPEGCPLSRFKDSLGNPTHILRIGESYKEKQRTIQAKKEVEQRRAGGYSRKYASKAKNLADDMVRNTARDLLYYAVTQDAMLIFENLSRGFGRQGKRTFMAERQYTRMEDWLTAKLAYEGLPSKTYLSKTLAQYTSKTCSNCGFTITSADYDRVLEKLKKTATGWMTTINGKELKVEGQITYYNRYKRQNVVKDLSVELDRLSEESVNNDISSWTKGRSGEALSLLKKRFSHRPVQEKFVCLNCGFETHADEQAALNIARSWLFLRSQEYKKYQTNKTTGNTDKRAFVETWQSFYRKKLKEVWKPAV

SEQ ID NO: 30691 - protein, 979 aa, synthetic construct
  REGION 1..979: note = engineered CasX variant
QEIKRINKIRRRLVKDSNTKKAGKTGPMKTLLVRVMTPDLRERLENLRKKPENIPQPISNTSRANLNKLLTDYTEMKKAILHVYWEEFQKDPVGLMSRVAQPASKKIDQNKLKPEMDEKGNLTTAGFACSQCGQPLFVYKLEQVSEKGKAYTNYFGRCNVAEHEKLILLAQLKPEKDSDEAVTYSLGKFGQRALDFYSIHVTKESTHPVKPLAQIAGNRYASSYPVGKALSDACMGTIASFLSKYQDIIIEHQKVVKGNQKRLESLRELAGKENLEYPSVTLPPQPHTKEGVDAYNEVIARVRMWVNLNLWQKLKLSRDDAKPLLRLKGFPSFPLVERQANEVDWWDMVCNVKKLINEKKEDGKVFWQNLAGYKRQEALRPYLSSEEDRKKGKKFARYQLGDLLLHLEKKHGEDWGKVYDEAWERIDKKVEGLSKHIKLEEERRSEDAQSKAALTDWLRAKASFVIEGLKEADKDEFCRCELKLQKWYGDLRGKPFAIEAENSILDISGFSKQYNCAFIWQKDGVKKLNLYLIINYFKGGKLRFKKIKPEAFEANRFYTVINKKSGEIVPMEVNFNFDDPNLIILPLAFGKRQGREFIWNDLLSLETGSLKLANGRVIEKTLYNRRTRQDEPALFVALTFERREVLDSSNIKPMNLIGVDRGENIPAVIALTDPEGCPLSRFKDSLGNPTHILRIGESYKEKQRTIQAKKEVEQRRAGGYSRKYASKAKNLADDMVRNTARDLLYYAVTQDAMLIFENLSRGFGRQGKRTFMAERQYTRMEDWLTAKLAYEGLASKTYLSKTLAQYTSKTCSNCGFTITSADYDRVLEKLKKTATGWMTTINGKELKVEGQITYYNRYKRQNVVKDLSVELDRLSEESVNNDISSWTKGRSGEALSLLKKRFSHRPVQEKFVCLNCGFETHADEQAALNIARSWLFLRSQEYKKYQTNKTTGNTDKRAFVETWQSFYRKKLKEVWKPAV

SEQ ID NO: 30692 - protein, 979 aa, synthetic construct
  REGION 1..979: note = engineered CasX variant
QEIKRINKIRRRLVKDSNTKKAGKTGPMKTLLVRVMTPDLRERLENLRKKPENIPQPISNTSRANLNKLLTDYTEMKKAILHVYWEEFQKDPVGLMSRVAQPASKKIDQNKLKPEMDEKGNLTTAGFACSQCGQPLFVYKLEQVSEKGKAYTNYFGRCNVAEHEKLILLAQLKPEKDSDEAVTYSLGKFGQRALDFYSIHVTKESTHPVKPLAQIAGNRYASSHPVGKALSDACMGTIASFLSKYQDIIIEHQKVVKGNQKRLESLRELAGKENLEYPSVTLPPQPHTKEGVDAYNEVIARVRMWVNLNLWQKLKLSRDDAKPLLRLKGFPSFPLVERQANEVDWWDMVCNVKKLINEKKEDGKVFWQNLAGYKRQEALRPYLSSEEDRKKGKKFARYQLGDLLLHLEKKHGEDWGKVYDEAWERIDKKVEGLSKHIKLEEERRSEDAQSKAALTDWLRAKASFVIEGLKEADKDEFCRCELKLQKWYGDLRGKPFAIEAENSILDISGFSKQYNCAFIWQKDGVKKLNLYLIINYFKGGKLRFKKIKPEAFEANRFYTVINKKSGEIVPMEVNFNFDDPNLIILPLAFGKRQGREFIWNDLLSLETGSLKLANGRVIEKTLYNRRTRQDEPALFVALTFERREVLDSSNIKPMNLIGVDRGENIPAVIALTDPEGCPLSRFKDSLGNPTHILRIGESYKEKQRTIQAKKEVEQRRAGGYSRKYASKAKNLADDMVRNTARDLLYYAVTQDAMLIFENLSRGFGRQGKRTFMAERQYTRMEDWLTAKLAYEGLASKTYLSKTLAQYTSKTCSNCGFTITSADYDRVLEKLKKTATGWMTTINGKELKVEGQITYYNRYKRQNVVKDLSVELDRLSEESVNNDISSWTKGRSGEALSLLKKRFSHRPVQEKFVCLNCGFETHADEQAALNIARSWLFLRSQEYKKYQTNKTTGNTDKRAFVETWQSFYRKKLKEVWKPAV

SEQ ID NO: 30693 - protein, 979 aa, synthetic construct
  REGION 1..979: note = engineered CasX variant
QEIKRINKIRRRLVKDSNTKKAGKTGPMKTLLVRVMTPDLRERLENLRKKPENIPQPISNTSRANLNKLLTDYTEMKKAILHVYWEEFQKDPVGLMSRVAQPASKKIDQNKLKPEMDEKGNLTTAGFACSQCGQPLFVYKLEQVSEKGKAYTNYFGRCNVAEHEKLILLAQLKPEKDSDEAVTYSLGKFGQRALDFYSIHVTKESTHPVKPLAQIAGNRYASSSPVGKALSDACMGTIASFLSKYQDIIIEHQKVVKGNQKRLESLRELAGKENLEYPSVTLPPQPHTKEGVDAYNEVIARVRMWVNLNLWQKLKLSRDDAKPLLRLKGFPSFPLVERQANEVDWWDMVCNVKKLINEKKEDGKVFWQNLAGYKRQEALRPYLSSEEDRKKGKKFARYQLGDLLLHLEKKHGEDWGKVYDEAWERIDKKVEGLSKHIKLEEERRSEDAQSKAALTDWLRAKASFVIEGLKEADKDEFCRCELKLQKWYGDLRGKPFAIEAENSILDISGFSKQYNCAFIWQKDGVKKLNLYLIINYFKGGKLRFKKIKPEAFEANRFYTVINKKSGEIVPMEVNFNFDDPNLIILPLAFGKRQGREFIWNDLLSLETGSLKLANGRVIEKTLYNRRTRQDEPALFVALTFERREVLDSSNIKPMNLIGVDRGENIPAVIALTDPEGCPLSRFKDSLGNPTHILRIGESYKEKQRTIQAKKEVEQRRAGGYSRKYASKAKNLADDMVRNTARDLLYYAVTQDAMLIFENLSRGFGRQGKRTFMAERQYTRMEDWLTAKLAYEGLASKTYLSKTLAQYTSKTCSNCGFTITSADYDRVLEKLKKTATGWMTTINGKELKVEGQITYYNRYKRQNVVKDLSVELDRLSEESVNNDISSWTKGRSGEALSLLKKRFSHRPVQEKFVCLNCGFETHADEQAALNIARSWLFLRSQEYKKYQTNKTTGNTDKRAFVETWQSFYRKKLKEVWKPAV

SEQ ID NO: 30694 - protein, 979 aa, synthetic construct
  REGION 1..979: note = engineered CasX variant
QEIKRINKIRRRLVKDSNTKKAGKTGPMKTLLVRVMTPDLRERLENLRKKPENIPQPISNTSRANLNKLLTDYTEMKKAILHVYWEEFQKDPVGLMSRVAQPASKKIDQNKLKPEMDEKGNLTTAGFACSQCGQPLFVYKLEQVSEKGKAYTNYFGRCNVAEHEKLILLAQLKPEKDSDEAVTYSLGKFGQRALDFYSIHVTKESTHPVKPLAQIAGNRYASSTPVGKALSDACMGTIASFLSKYQDIIIEHQKVVKGNQKRLESLRELAGKENLEYPSVTLPPQPHTKEGVDAYNEVIARVRMWVNLNLWQKLKLSRDDAKPLLRLKGFPSFPLVERQANEVDWWDMVCNVKKLINEKKEDGKVFWQNLAGYKRQEALRPYLSSEEDRKKGKKFARYQLGDLLLHLEKKHGEDWGKVYDEAWERIDKKVEGLSKHIKLEEERRSEDAQSKAALTDWLRAKASFVIEGLKEADKDEFCRCELKLQKWYGDLRGKPFAIEAENSILDISGFSKQYNCAFIWQKDGVKKLNLYLIINYFKGGKLRFKKIKPEAFEANRFYTVINKKSGEIVPMEVNFNFDDPNLIILPLAFGKRQGREFIWNDLLSLETGSLKLANGRVIEKTLYNRRTRQDEPALFVALTFERREVLDSSNIKPMNLIGVDRGENIPAVIALTDPEGCPLSRFKDSLGNPTHILRIGESYKEKQRTIQAKKEVEQRRAGGYSRKYASKAKNLADDMVRNTARDLLYYAVTQDAMLIFENLSRGFGRQGKRTFMAERQYTRMEDWLTAKLAYEGLASKTYLSKTLAQYTSKTCSNCGFTITSADYDRVLEKLKKTATGWMTTINGKELKVEGQITYYNRYKRQNVVKDLSVELDRLSEESVNNDISSWTKGRSGEALSLLKKRFSHRPVQEKFVCLNCGFETHADEQAALNIARSWLFLRSQEYKKYQTNKTTGNTDKRAFVETWQSFYRKKLKEVWKPAV

SEQ ID NO: 30695 - protein, 979 aa, synthetic construct
  REGION 1..979: note = engineered CasX variant
QEIKRINKIRRRLVKDSNTKKAGKTGPMKTLLVRVMTPDLRERLENLRKKPENIPQPISNTSRANLNKLLTDYTEMKKAILHVYWEEFQKDPVGLMSRVAQPASKKIDQNKLKPEMDEKGNLTTAGFACSQCGQPLFVYKLEQVSEKGKAYTNYFGRCNVAEHEKLILLAQLKPEKDSDEAVTYSLGKFGQRALDFYSIHVTKESTHPVKPLAQIAGNRYASSAPVGKALSDACMGTIASFLSKYQDIIIEHQKVVKGNQKRLESLRELAGKENLEYPSVTLPPQPHTKEGVDAYNEVIARVRMWVNLNLWQKLKLSRDDAKPLLRLKGFPSFPLVERQANEVDWWDMVCNVKKLINEKKEDGKVFWQNLAGYKRQEALRPYLSSEEDRKKGKKFARYQLGDLLLHLEKKHGEDWGKVYDEAWERIDKKVEGLSKHIKLEEERRSEDAQSKAALTDWLRAKASFVIEGLKEADKDEFCRCELKLQKWYGDLRGKPFAIEAENSILDISGFSKQYNCAFIWQKDGVKKLNLYLIINYFKGGKLRFKKIKPEAFEANRFYTVINKKSGEIVPMEVNFNFDDPNLIILPLAFGKRQGREFIWNDLLSLETGSLKLANGRVIEKTLYNRRTRQDEPALFVALTFERREVLDSSNIKPMNLIGVDRGENIPAVIALTDPEGCPLSRFKDSLGNPTHILRIGESYKEKQRTIQAKKEVEQRRAGGYSRKYASKAKNLADDMVRNTARDLLYYAVTQDAMLIFENLSRGFGRQGKRTFMAERQYTRMEDWLTAKLAYEGLASKTYLSKTLAQYTSKTCSNCGFTITSADYDRVLEKLKKTATGWMTTINGKELKVEGQITYYNRYKRQNVVKDLSVELDRLSEESVNNDISSWTKGRSGEALSLLKKRFSHRPVQEKFVCLNCGFETHADEQAALNIARSWLFLRSQEYKKYQTNKTTGNTDKRAFVETWQSFYRKKLKEVWKPAV

SEQ ID NO: 30696 - protein, 979 aa, synthetic construct
  REGION 1..979: note = engineered CasX variant
QEIKRINKIRRRLVKDSNTKKAGKTGPMKTLLVRVMTPDLRERLENLRKKPENIPQPISNTSRANLNKLLTDYTEMKKAILHVYWEEFQKDPVGLMSRVAQPASKKIDQNKLKPEMDEKGNLTTAGFACSQCGQPLFVYKLEQVSEKGKAYTNYFGRCNVAEHEKLILLAQLKPEKDSDEAVTYSLGKFGQRALDFYSIHVTKESTHPVKPLAQIAGNRYASSVPVGKALSDACMGTIASFLSKYQDIIIEHQKVVKGNQKRLESLRELAGKENLEYPSVTLPPQPHTKEGVDAYNEVIARVRMWVNLNLWQKLKLSRDDAKPLLRLKGFPSFPLVERQANEVDWWDMVCNVKKLINEKKEDGKVFWQNLAGYKRQEALRPYLSSEEDRKKGKKFARYQLGDLLLHLEKKHGEDWGKVYDEAWERIDKKVEGLSKHIKLEEERRSEDAQSKAALTDWLRAKASFVIEGLKEADKDEFCRCELKLQKWYGDLRGKPFAIEAENSILDISGFSKQYNCAFIWQKDGVKKLNLYLIINYFKGGKLRFKKIKPEAFEANRFYTVINKKSGEIVPMEVNFNFDDPNLIILPLAFGKRQGREFIWNDLLSLETGSLKLANGRVIEKTLYNRRTRQDEPALFVALTFERREVLDSSNIKPMNLIGVDRGENIPAVIALTDPEGCPLSRFKDSLGNPTHILRIGESYKEKQRTIQAKKEVEQRRAGGYSRKYASKAKNLADDMVRNTARDLLYYAVTQDAMLIFENLSRGFGRQGKRTFMAERQYTRMEDWLTAKLAYEGLASKTYLSKTLAQYTSKTCSNCGFTITSADYDRVLEKLKKTATGWMTTINGKELKVEGQITYYNRYKRQNVVKDLSVELDRLSEESVNNDISSWTKGRSGEALSLLKKRFSHRPVQEKFVCLNCGFETHADEQAALNIARSWLFLRSQEYKKYQTNKTTGNTDKRAFVETWQSFYRKKLKEVWKPAV

SEQ ID NO: 30697 - protein, 978 aa, synthetic construct
  REGION 1..978: note = engineered CasX variant
QEIKRINKIRRRLVKDSNTKKAGKTGPMKTLLVRVMTPDLRERLENLRKKPENIPQPISNTSRANLNKLLTDYTEMKKAILHVYWEEFQKDPVGLMSRVAQPASKKIDQNKLKPEMDEKGNLTTAGFACSQCGQPLFVYKLEQVSEKGKAYTNYFGRCNVAEHEKLIKLAQLKPEKDSDEAVTYSLGKFGQRALDFYSIHVTKESTHPVKPLAQIAGNRYASSPVGKALSDACMGTIASFLSKYQDIIIEHQKVVKGNQKRLESLRELAGKENLEYPSVTLPPQPHTKEGVDAYNEVIARVRMWVNLNLWQKLKLSRDDAKPLLRLKGFPSFPLVERQANEVDWWDMVCNVKKLINEKKEDGKVFWQNLAGYKRQEALRPYLSSEEDRKKGKKFARYQLGDLLLHLEKKHGEDWGKVYDEAWERIDKKVEGLSKHIKLEEERRSEDAQSKAALTDWLRAKASFVIEGLKEADKDEFCRCELKLQKWYGDLRGKPFAIEAENSILDISGFSKQYNCAFIWQKDGVKKLNLYLIINYFKGGKLRFKKIKPEAFEANRFYTVINKKSGEIVPMEVNFNFDDPNLIILPLAFGKRQGREFIWNDLLSLETGSLKLANGRVIEKTLYNRRTRQDEPALFVALTFERREVLDSSNIKPMNLIGVDRGENIPAVIALTDPEGCPLSRFKDSLGNPTHILRIGESYKEKQRTIQAKKEVEQRRAGGYSRKYASKAKNLADDMVRNTARDLLYYAVTQDAMLIFENLSRGFGRQGKRTFMAERQYTRMEDWLTAKLAYEGLASKTYLSKTLAQYTSKTCSNCGFTITSADYDRVLEKLKKTATGWMTTINGKELKVEGQITYYNRYKRQNVVKDLSVELDRLSEESVNNDISSWTKGRSGEALSLLKKRFSHRPVQEKFVCLNCGFETHADEQAALNIARSWLFLRSQEYKKYQTNKTTGNTDKRAFVETWQSFYRKKLKEVWKPAV

SEQ ID NO: 30698 - protein, 979 aa, synthetic construct
  REGION 1..979: note = engineered CasX variant
QEIKRINKIRRRLVKDSNTKKAGKTGPMKTLLVRVMTPDLRERLENLRKKPENIPQPISNTSRANLNKLLTDYTEMKKAILHVYWEEFQKDPVGLMSRVAQPASKKIDQNKLKPEMDEKGNLTTAGFACSQCGQPLFVYKLEQVSEKGKAYTNYFGRCNVAEHEKLILLAQLKPEKDSDEAVTYSLGKFGQRALDFYSIHVTKESTHPVKPLAQIAGNRYASSYPVGKALSDACMGTIASFLSKYQDIIIEHQKVVKGNQKRLESLRELAGKENLEYPSVTLPPQPHTKEGVDAYNEVIARVRMWVNLNLWQKLKLSRDDAKPLLRLKGFPSFPLVERQANEVDWWDMVCNVKKLINEKKEDGKVFWQNLAGYKRQEALRPYLSSEEDRKKGKKFARYQLGDLLLHLEKKHGEDWGKVYDEAWERIDKKVEGLSKHIKLEEERRSEDAQSKAALTDWLRAKASFVIEGLKEADKDEFCRCELKLQKWYGDLRGKPFAIEAENSILDISGFSKQYNCAFIWQKDGVKKLNLYLIINYFKGGKLRFKKIKPEAFEANRFYTVINKKSGEIVPMEVNFNFDDPNLIILPLAFGKRQGREFIWNDLLSLETGSLKLANGRVIEKTLYNRRTRQDEPALFVALTFERREVLDSSNIKPMNLIGVDRGENIPAVIALTDPEGCPLSRFKDSLGNPTHILRIGESYKEKQRTIQAKKEVEQRRAGGYSRKYASKAKNLADDMVRNTARDLLYYAVTQDAMLIFENLSRGFGRQGKRTFMAERQYTRMEDWLTAKLAYEGLPSKVYLSKTLAQYTSKTCSNCGFTITSADYDRVLEKLKKTATGWMTTINGKELKVEGQITYYNRYKRQNVVKDLSVELDRLSEESVNNDISSWTKGRSGEALSLLKKRFSHRPVQEKFVCLNCGFETHADEQAALNIARSWLFLRSQEYKKYQTNKTTGNTDKRAFVETWQSFYRKKLKEVWKPAV

SEQ ID NO: 30699 - protein, 979 aa, synthetic construct
  REGION 1..979: note = engineered CasX variant
QEIKRINKIRRRLVKDSNTKKAGKTGPMKTLLVRVMTPDLRERLENLRKKPENIPQPISNTSRANLNKLLTDYTEMKKAILHVYWEEFQKDPVGLMSRVAQPASKKIDQNKLKPEMDEKGNLTTAGFACSQCGQPLFVYKLEQVSEKGKAYTNYFGRCNVAEHEKLILLAQLKPEKDSDEAVTYSLGKFGQRALDFYSIHVTKESTHPVKPLAQIAGNRYASSHPVGKALSDACMGTIASFLSKYQDIIIEHQKVVKGNQKRLESLRELAGKENLEYPSVTLPPQPHTKEGVDAYNEVIARVRMWVNLNLWQKLKLSRDDAKPLLRLKGFPSFPLVERQANEVDWWDMVCNVKKLINEKKEDGKVFWQNLAGYKRQEALRPYLSSEEDRKKGKKFARYQLGDLLLHLEKKHGEDWGKVYDEAWERIDKKVEGLSKHIKLEEERRSEDAQSKAALTDWLRAKASFVIEGLKEADKDEFCRCELKLQKWYGDLRGKPFAIEAENSILDISGFSKQYNCAFIWQKDGVKKLNLYLIINYFKGGKLRFKKIKPEAFEANRFYTVINKKSGEIVPMEVNFNFDDPNLIILPLAFGKRQGREFIWNDLLSLETGSLKLANGRVIEKTLYNRRTRQDEPALFVALTFERREVLDSSNIKPMNLIGVDRGENIPAVIALTDPEGCPLSRFKDSLGNPTHILRIGESYKEKQRTIQAKKEVEQRRAGGYSRKYASKAKNLADDMVRNTARDLLYYAVTQDAMLIFENLSRGFGRQGKRTFMAERQYTRMEDWLTAKLAYEGLPSKVYLSKTLAQYTSKTCSNCGFTITSADYDRVLEKLKKTATGWMTTINGKELKVEGQITYYNRYKRQNVVKDLSVELDRLSEESVNNDISSWTKGRSGEALSLLKKRFSHRPVQEKFVCLNCGFETHADEQAALNIARSWLFLRSQEYKKYQTNKTTGNTDKRAFVETWQSFYRKKLKEVWKPAV

SEQ ID NO: 30700 - protein, 979 aa, synthetic construct
  REGION 1..979: note = engineered CasX variant
QEIKRINKIRRRLVKDSNTKKAGKTGPMKTLLVRVMTPDLRERLENLRKKPENIPQPISNTSRANLNKLLTDYTEMKKAILHVYWEEFQKDPVGLMSRVAQPASKKIDQNKLKPEMDEKGNLTTAGFACSQCGQPLFVYKLEQVSEKGKAYTNYFGRCNVAEHEKLILLAQLKPEKDSDEAVTYSLGKFGQRALDFYSIHVTKESTHPVKPLAQIAGNRYASSSPVGKALSDACMGTIASFLSKYQDIIIEHQKVVKGNQKRLESLRELAGKENLEYPSVTLPPQPHTKEGVDAYNEVIARVRMWVNLNLWQKLKLSRDDAKPLLRLKGFPSFPLVERQANEVDWWDMVCNVKKLINEKKEDGKVFWQNLAGYKRQEALRPYLSSEEDRKKGKKFARYQLGDLLLHLEKKHGEDWGKVYDEAWERIDKKVEGLSKHIKLEEERRSEDAQSKAALTDWLRAKASFVIEGLKEADKDEFCRCELKLQKWYGDLRGKPFAIEAENSILDISGFSKQYNCAFIWQKDGVKKLNLYLIINYFKGGKLRFKKIKPEAFEANRFYTVINKKSGEIVPMEVNFNFDDPNLIILPLAFGKRQGREFIWNDLLSLETGSLKLANGRVIEKTLYNRRTRQDEPALFVALTFERREVLDSSNIKPMNLIGVDRGENIPAVIALTDPEGCPLSRFKDSLGNPTHILRIGESYKEKQRTIQAKKEVEQRRAGGYSRKYASKAKNLADDMVRNTARDLLYYAVTQDAMLIFENLSRGFGRQGKRTFMAERQYTRMEDWLTAKLAYEGLPSKVYLSKTLAQYTSKTCSNCGFTITSADYDRVLEKLKKTATGWMTTINGKELKVEGQITYYNRYKRQNVVKDLSVELDRLSEESVNNDISSWTKGRSGEALSLLKKRFSHRPVQEKFVCLNCGFETHADEQAALNIARSWLFLRSQEYKKYQTNKTTGNTDKRAFVETWQSFYRKKLKEVWKPAV

SEQ ID NO: 30701 - protein, 979 aa, synthetic construct
  REGION 1..979: note = engineered CasX variant
QEIKRINKIRRRLVKDSNTKKAGKTGPMKTLLVRVMTPDLRERLENLRKKPENIPQPISNTSRANLNKLLTDYTEMKKAILHVYWEEFQKDPVGLMSRVAQPASKKIDQNKLKPEMDEKGNLTTAGFACSQCGQPLFVYKLEQVSEKGKAYTNYFGRCNVAEHEKLILLAQLKPEKDSDEAVTYSLGKFGQRALDFYSIHVTKESTHPVKPLAQIAGNRYASSTPVGKALSDACMGTIASFLSKYQDIIIEHQKVVKGNQKRLESLRELAGKENLEYPSVTLPPQPHTKEGVDAYNEVIARVRMWVNLNLWQKLKLSRDDAKPLLRLKGFPSFPLVERQANEVDWWDMVCNVKKLINEKKEDGKVFWQNLAGYKRQEALRPYLSSEEDRKKGKKFARYQLGDLLLHLEKKHGEDWGKVYDEAWERIDKKVEGLSKHIKLEEERRSEDAQSKAALTDWLRAKASFVIEGLKEADKDEFCRCELKLQKWYGDLRGKPFAIEAENSILDISGFSKQYNCAFIWQKDGVKKLNLYLIINYFKGGKLRFKKIKPEAFEANRFYTVINKKSGEIVPMEVNFNFDDPNLIILPLAFGKRQGREFIWNDLLSLETGSLKLANGRVIEKTLYNRRTRQDEPALFVALTFERREVLDSSNIKPMNLIGVDRGENIPAVIALTDPEGCPLSRFKDSLGNPTHILRIGESYKEKQRTIQAKKEVEQRRAGGYSRKYASKAKNLADDMVRNTARDLLYYAVTQDAMLIFENLSRGFGRQGKRTFMAERQYTRMEDWLTAKLAYEGLPSKVYLSKTLAQYTSKTCSNCGFTITSADYDRVLEKLKKTATGWMTTINGKELKVEGQITYYNRYKRQNVVKDLSVELDRLSEESVNNDISSWTKGRSGEALSLLKKRFSHRPVQEKFVCLNCGFETHADEQAALNIARSWLFLRSQEYKKYQTNKTTGNTDKRAFVETWQSFYRKKLKEVWKPAV

SEQ ID NO: 30702 - protein, 979 aa, synthetic construct
  REGION 1..979: note = engineered CasX variant
QEIKRINKIRRRLVKDSNTKKAGKTGPMKTLLVRVMTPDLRERLENLRKKPENIPQPISNTSRANLNKLLTDYTEMKKAILHVYWEEFQKDPVGLMSRVAQPASKKIDQNKLKPEMDEKGNLTTAGFACSQCGQPLFVYKLEQVSEKGKAYTNYFGRCNVAEHEKLILLAQLKPEKDSDEAVTYSLGKFGQRALDFYSIHVTKESTHPVKPLAQIAGNRYASSAPVGKALSDACMGTIASFLSKYQDIIIEHQKVVKGNQKRLESLRELAGKENLEYPSVTLPPQPHTKEGVDAYNEVIARVRMWVNLNLWQKLKLSRDDAKPLLRLKGFPSFPLVERQANEVDWWDMVCNVKKLINEKKEDGKVFWQNLAGYKRQEALRPYLSSEEDRKKGKKFARYQLGDLLLHLEKKHGEDWGKVYDEAWERIDKKVEGLSKHIKLEEERRSEDAQSKAALTDWLRAKASFVIEGLKEADKDEFCRCELKLQKWYGDLRGKPFAIEAENSILDISGFSKQYNCAFIWQKDGVKKLNLYLIINYFKGGKLRFKKIKPEAFEANRFYTVINKKSGEIVPMEVNFNFDDPNLIILPLAFGKRQGREFIWNDLLSLETGSLKLANGRVIEKTLYNRRTRQDEPALFVALTFERREVLDSSNIKPMNLIGVDRGENIPAVIALTDPEGCPLSRFKDSLGNPTHILRIGESYKEKQRTIQAKKEVEQRRAGGYSRKYASKAKNLADDMVRNTARDLLYYAVTQDAMLIFENLSRGFGRQGKRTFMAERQYTRMEDWLTAKLAYEGLPSKVYLSKTLAQYTSKTCSNCGFTITSADYDRVLEKLKKTATGWMTTINGKELKVEGQITYYNRYKRQNVVKDLSVELDRLSEESVNNDISSWTKGRSGEALSLLKKRFSHRPVQEKFVCLNCGFETHADEQAALNIARSWLFLRSQEYKKYQTNKTTGNTDKRAFVETWQSFYRKKLKEVWKPAV

SEQ ID NO: 30703 - protein, 979 aa, synthetic construct
  REGION 1..979: note = engineered CasX variant
QEIKRINKIRRRLVKDSNTKKAGKTGPMKTLLVRVMTPDLRERLENLRKKPENIPQPISNTSRANLNKLLTDYTEMKKAILHVYWEEFQKDPVGLMSRVAQPASKKIDQNKLKPEMDEKGNLTTAGFACSQCGQPLFVYKLEQVSEKGKAYTNYFGRCNVAEHEKLILLAQLKPEKDSDEAVTYSLGKFGQRALDFYSIHVTKESTHPVKPLAQIAGNRYASSVPVGKALSDACMGTIASFLSKYQDIIIEHQKVVKGNQKRLESLRELAGKENLEYPSVTLPPQPHTKEGVDAYNEVIARVRMWVNLNLWQKLKLSRDDAKPLLRLKGFPSFPLVERQANEVDWWDMVCNVKKLINEKKEDGKVFWQNLAGYKRQEALRPYLSSEEDRKKGKKFARYQLGDLLLHLEKKHGEDWGKVYDEAWERIDKKVEGLSKHIKLEEERRSEDAQSKAALTDWLRAKASFVIEGLKEADKDEFCRCELKLQKWYGDLRGKPFAIEAENSILDISGFSKQYNCAFIWQKDGVKKLNLYLIINYFKGGKLRFKKIKPEAFEANRFYTVINKKSGEIVPMEVNFNFDDPNLIILPLAFGKRQGREFIWNDLLSLETGSLKLANGRVIEKTLYNRRTRQDEPALFVALTFERREVLDSSNIKPMNLIGVDRGENIPAVIALTDPEGCPLSRFKDSLGNPTHILRIGESYKEKQRTIQAKKEVEQRRAGGYSRKYASKAKNLADDMVRNTARDLLYYAVTQDAMLIFENLSRGFGRQGKRTFMAERQYTRMEDWLTAKLAYEGLPSKVYLSKTLAQYTSKTCSNCGFTITSADYDRVLEKLKKTATGWMTTINGKELKVEGQITYYNRYKRQNVVKDLSVELDRLSEESVNNDISSWTKGRSGEALSLLKKRFSHRPVQEKFVCLNCGFETHADEQAALNIARSWLFLRSQEYKKYQTNKTTGNTDKRAFVETWQSFYRKKLKEVWKPAV

SEQ ID NO: 30704 - protein, 978 aa, synthetic construct
  REGION 1..978: note = engineered CasX variant
QEIKRINKIRRRLVKDSNTKKAGKTGPMKTLLVRVMTPDLRERLENLRKKPENIPQPISNTSRANLNKLLTDYTEMKKAILHVYWEEFQKDPVGLMSRVAQPASKKIDQNKLKPEMDEKGNLTTAGFACSQCGQPLFVYKLEQVSEKGKAYTNYFGRCNVAEHEKLIKLAQLKPEKDSDEAVTYSLGKFGQRALDFYSIHVTKESTHPVKPLAQIAGNRYASSPVGKALSDACMGTIASFLSKYQDIIIEHQKVVKGNQKRLESLRELAGKENLEYPSVTLPPQPHTKEGVDAYNEVIARVRMWVNLNLWQKLKLSRDDAKPLLRLKGFPSFPLVERQANEVDWWDMVCNVKKLINEKKEDGKVFWQNLAGYKRQEALRPYLSSEEDRKKGKKFARYQLGDLLLHLEKKHGEDWGKVYDEAWERIDKKVEGLSKHIKLEEERRSEDAQSKAALTDWLRAKASFVIEGLKEADKDEFCRCELKLQKWYGDLRGKPFAIEAENSILDISGFSKQYNCAFIWQKDGVKKLNLYLIINYFKGGKLRFKKIKPEAFEANRFYTVINKKSGEIVPMEVNFNFDDPNLIILPLAFGKRQGREFIWNDLLSLETGSLKLANGRVIEKTLYNRRTRQDEPALFVALTFERREVLDSSNIKPMNLIGVDRGENIPAVIALTDPEGCPLSRFKDSLGNPTHILRIGESYKEKQRTIQAKKEVEQRRAGGYSRKYASKAKNLADDMVRNTARDLLYYAVTQDAMLIFENLSRGFGRQGKRTFMAERQYTRMEDWLTAKLAYEGLPSKVYLSKTLAQYTSKTCSNCGFTITSADYDRVLEKLKKTATGWMTTINGKELKVEGQITYYNRYKRQNVVKDLSVELDRLSEESVNNDISSWTKGRSGEALSLLKKRFSHRPVQEKFVCLNCGFETHADEQAALNIARSWLFLRSQEYKKYQTNKTTGNTDKRAFVETWQSFYRKKLKEVWKPAV

SEQ ID NO: 30705 - protein, 980 aa, synthetic construct
  REGION 1..980: note = engineered CasX variant
QEIKRINKIRRRLVKDSNTKKAGKTGPMKTLLVRVMTPDLRERLENLRKKPENIPQPISNTSRANLNKLLTDYTEMKKAILHVYWEEFQKDPVGLMSRVAQPASKKIDQNKLKPEMDEKGNLTTAGFACSQCGQPLFVYKLEQVSEKGKAYTNYFGRCNVAEHEKLILLAQLKPEKDSDEAVTYSLGKFGQRALDFYSIHVTKESTHPVKPLAQIAGNRYASSYPVGKALSDACMGTIASFLSKYQDIIIEHQKVVKGNQKRLESLRELAGKENLEYPSVTLPPQPHTKEGVDAYNEVIARVRMWVNLNLWQKLKLSRDDAKPLLRLKGFPSFPLVERQANEVDWWDMVCNVKKLINEKKEDGKVFWQNLAGYKRQEALRPYLSSEEDRKKGKKFARYQLGDLLLHLEKKHGEDWGKVYDEAWERIDKKVEGLSKHIKLEEERRSEDAQSKAALTDWLRAKASFVIEGLKEADKDEFCRCELKLQKWYGDLRGKPFAIEAENSILDISGFSKQYNCAFIWQKDGVKKLNLYLIINYFKGGKLRFKKIKPEAFEANRFYTVINKKSGEIVPMEVNFNFDDPNLIILPLAFGKRQGREFIWNDLLSLETGSLKLANGRVIEKTLYNRRTRQDEPALFVALTFERREVLDSSNIKPMNLIGVDRGENIPAVIALTDPEGCPLSRFKDSLGNPTHILRIGESYKEKQRTIQAKKEVEQRRAGGYSRKYASKAKNLADDMVRNTARDLLYYAVTQDAMLIFENLSRGFGRQGKRTFMAERQYTRMEDWLTAKLAYEGPLPSKTYLSKTLAQYTSKTCSNCGFTITSADYDRVLEKLKKTATGWMTTINGKELKVEGQITYYNRYKRQNVVKDLSVELDRLSEESVNNDISSWTKGRSGEALSLLKKRFSHRPVQEKFVCLNCGFETHADEQAALNIARSWLFLRSQEYKKYQTNKTTGNTDKRAFVETWQSFYRKKLKEVWKPAV

SEQ ID NO: 30706 - protein, 980 aa, synthetic construct
  REGION 1..980: note = engineered CasX variant
QEIKRINKIRRRLVKDSNTKKAGKTGPMKTLLVRVMTPDLRERLENLRKKPENIPQPISNTSRANLNKLLTDYTEMKKAILHVYWEEFQKDPVGLMSRVAQPASKKIDQNKLKPEMDEKGNLTTAGFACSQCGQPLFVYKLEQVSEKGKAYTNYFGRCNVAEHEKLILLAQLKPEKDSDEAVTYSLGKFGQRALDFYSIHVTKESTHPVKPLAQIAGNRYASSHPVGKALSDACMGTIASFLSKYQDIIIEHQKVVKGNQKRLESLRELAGKENLEYPSVTLPPQPHTKEGVDAYNEVIARVRMWVNLNLWQKLKLSRDDAKPLLRLKGFPSFPLVERQANEVDWWDMVCNVKKLINEKKEDGKVFWQNLAGYKRQEALRPYLSSEEDRKKGKKFARYQLGDLLLHLEKKHGEDWGKVYDEAWERIDKKVEGLSKHIKLEEERRSEDAQSKAALTDWLRAKASFVIEGLKEADKDEFCRCELKLQKWYGDLRGKPFAIEAENSILDISGFSKQYNCAFIWQKDGVKKLNLYLIINYFKGGKLRFKKIKPEAFEANRFYTVINKKSGEIVPMEVNFNFDDPNLIILPLAFGKRQGREFIWNDLLSLETGSLKLANGRVIEKTLYNRRTRQDEPALFVALTFERREVLDSSNIKPMNLIGVDRGENIPAVIALTDPEGCPLSRFKDSLGNPTHILRIGESYKEKQRTIQAKKEVEQRRAGGYSRKYASKAKNLADDMVRNTARDLLYYAVTQDAMLIFENLSRGFGRQGKRTFMAERQYTRMEDWLTAKLAYEGPLPSKTYLSKTLAQYTSKTCSNCGFTITSADYDRVLEKLKKTATGWMTTINGKELKVEGQITYYNRYKRQNVVKDLSVELDRLSEESVNNDISSWTKGRSGEALSLLKKRFSHRPVQEKFVCLNCGFETHADEQAALNIARSWLFLRSQEYKKYQTNKTTGNTDKRAFVETWQSFYRKKLKEVWKPAV

SEQ ID NO: 30707 - protein, 980 aa, synthetic construct
  REGION 1..980: note = engineered CasX variant
QEIKRINKIRRRLVKDSNTKKAGKTGPMKTLLVRVMTPDLRERLENLRKKPENIPQPISNTSRANLNKLLTDYTEMKKAILHVYWEEFQKDPVGLMSRVAQPASKKIDQNKLKPEMDEKGNLTTAGFACSQCGQPLFVYKLEQVSEKGKAYTNYFGRCNVAEHEKLILLAQLKPEKDSDEAVTYSLGKFGQRALDFYSIHVTKESTHPVKPLAQIAGNRYASSSPVGKALSDACMGTIASFLSKYQDIIIEHQKVVKGNQKRLESLRELAGKENLEYPSVTLPPQPHTKEGVDAYNEVIARVRMWVNLNLWQKLKLSRDDAKPLLRLKGFPSFPLVERQANEVDWWDMVCNVKKLINEKKEDGKVFWQNLAGYKRQEALRPYLSSEEDRKKGKKFARYQLGDLLLHLEKKHGEDWGKVYDEAWERIDKKVEGLSKHIKLEEERRSEDAQSKAALTDWLRAKASFVIEGLKEADKDEFCRCELKLQKWYGDLRGKPFAIEAENSILDISGFSKQYNCAFIWQKDGVKKLNLYLIINYFKGGKLRFKKIKPEAFEANRFYTVINKKSGEIVPMEVNFNFDDPNLIILPLAFGKRQGREFIWNDLLSLETGSLKLANGRVIEKTLYNRRTRQDEPALFVALTFERREVLDSSNIKPMNLIGVDRGENIPAVIALTDPEGCPLSRFKDSLGNPTHILRIGESYKEKQRTIQAKKEVEQRRAGGYSRKYASKAKNLADDMVRNTARDLLYYAVTQDAMLIFENLSRGFGRQGKRTFMAERQYTRMEDWLTAKLAYEGPLPSKTYLSKTLAQYTSKTCSNCGFTITSADYDRVLEKLKKTATGWMTTINGKELKVEGQITYYNRYKRQNVVKDLSVELDRLSEESVNNDISSWTKGRSGEALSLLKKRFSHRPVQEKFVCLNCGFETHADEQAALNIARSWLFLRSQEYKKYQTNKTTGNTDKRAFVETWQSFYRKKLKEVWKPAV

SEQ ID NO: 30708 - protein, 980 aa, synthetic construct
  REGION 1..980: note = engineered CasX variant
QEIKRINKIRRRLVKDSNTKKAGKTGPMKTLLVRVMTPDLRERLENLRKKPENIPQPISNTSRANLNKLLTDYTEMKKAILHVYWEEFQKDPVGLMSRVAQPASKKIDQNKLKPEMDEKGNLTTAGFACSQCGQPLFVYKLEQVSEKGKAYTNYFGRCNVAEHEKLILLAQLKPEKDSDEAVTYSLGKFGQRALDFYSIHVTKESTHPVKPLAQIAGNRYASSTPVGKALSDACMGTIASFLSKYQDIIIEHQKVVKGNQKRLESLRELAGKENLEYPSVTLPPQPHTKEGVDAYNEVIARVRMWVNLNLWQKLKLSRDDAKPLLRLKGFPSFPLVERQANEVDWWDMVCNVKKLINEKKEDGKVFWQNLAGYKRQEALRPYLSSEEDRKKGKKFARYQLGDLLLHLEKKHGEDWGKVYDEAWERIDKKVEGLSKHIKLEEERRSEDAQSKAALTDWLRAKASFVIEGLKEADKDEFCRCELKLQKWYGDLRGKPFAIEAENSILDISGFSKQYNCAFIWQKDGVKKLNLYLIINYFKGGKLRFKKIKPEAFEANRFYTVINKKSGEIVPMEVNFNFDDPNLIILPLAFGKRQGREFIWNDLLSLETGSLKLANGRVIEKTLYNRRTRQDEPALFVALTFERREVLDSSNIKPMNLIGVDRGENIPAVIALTDPEGCPLSRFKDSLGNPTHILRIGESYKEKQRTIQAKKEVEQRRAGGYSRKYASKAKNLADDMVRNTARDLLYYAVTQDAMLIFENLSRGFGRQGKRTFMAERQYTRMEDWLTAKLAYEGPLPSKTYLSKTLAQYTSKTCSNCGFTITSADYDRVLEKLKKTATGWMTTINGKELKVEGQITYYNRYKRQNVVKDLSVELDRLSEESVNNDISSWTKGRSGEALSLLKKRFSHRPVQEKFVCLNCGFETHADEQAALNIARSWLFLRSQEYKKYQTNKTTGNTDKRAFVETWQSFYRKKLKEVWKPAV

SEQ ID NO: 30709 - protein, 980 aa, synthetic construct
  REGION 1..980: note = engineered CasX variant
QEIKRINKIRRRLVKDSNTKKAGKTGPMKTLLVRVMTPDLRERLENLRKKPENIPQPISNTSRANLNKLLTDYTEMKKAILHVYWEEFQKDPVGLMSRVAQPASKKIDQNKLKPEMDEKGNLTTAGFACSQCGQPLFVYKLEQVSEKGKAYTNYFGRCNVAEHEKLILLAQLKPEKDSDEAVTYSLGKFGQRALDFYSIHVTKESTHPVKPLAQIAGNRYASSAPVGKALSDACMGTIASFLSKYQDIIIEHQKVVKGNQKRLESLRELAGKENLEYPSVTLPPQPHTKEGVDAYNEVIARVRMWVNLNLWQKLKLSRDDAKPLLRLKGFPSFPLVERQANEVDWWDMVCNVKKLINEKKEDGKVFWQNLAGYKRQEALRPYLSSEEDRKKGKKFARYQLGDLLLHLEKKHGEDWGKVYDEAWERIDKKVEGLSKHIKLEEERRSEDAQSKAALTDWLRAKASFVIEGLKEADKDEFCRCELKLQKWYGDLRGKPFAIEAENSILDISGFSKQYNCAFIWQKDGVKKLNLYLIINYFKGGKLRFKKIKPEAFEANRFYTVINKKSGEIVPMEVNFNFDDPNLIILPLAFGKRQGREFIWNDLLSLETGSLKLANGRVIEKTLYNRRTRQDEPALFVALTFERREVLDSSNIKPMNLIGVDRGENIPAVIALTDPEGCPLSRFKDSLGNPTHILRIGESYKEKQRTIQAKKEVEQRRAGGYSRKYASKAKNLADDMVRNTARDLLYYAVTQDAMLIFENLSRGFGRQGKRTFMAERQYTRMEDWLTAKLAYEGPLPSKTYLSKTLAQYTSKTCSNCGFTITSADYDRVLEKLKKTATGWMTTINGKELKVEGQITYYNRYKRQNVVKDLSVELDRLSEESVNNDISSWTKGRSGEALSLLKKRFSHRPVQEKFVCLNCGFETHADEQAALNIARSWLFLRSQEYKKYQTNKTTGNTDKRAFVETWQSFYRKKLKEVWKPAV

SEQ ID NO: 30710 - protein, 980 aa, synthetic construct
  REGION 1..980: note = engineered CasX variant
QEIKRINKIRRRLVKDSNTKKAGKTGPMKTLLVRVMTPDLRERLENLRKKPENIPQPISNTSRANLNKLLTDYTEMKKAILHVYWEEFQKDPVGLMSRVAQPASKKIDQNKLKPEMDEKGNLTTAGFACSQCGQPLFVYKLEQVSEKGKAYTNYFGRCNVAEHEKLILLAQLKPEKDSDEAVTYSLGKFGQRALDFYSIHVTKESTHPVKPLAQIAGNRYASSVPVGKALSDACMGTIASFLSKYQDIIIEHQKVVKGNQKRLESLRELAGKENLEYPSVTLPPQPHTKEGVDAYNEVIARVRMWVNLNLWQKLKLSRDDAKPLLRLKGFPSFPLVERQANEVDWWDMVCNVKKLINEKKEDGKVFWQNLAGYKRQEALRPYLSSEEDRKKGKKFARYQLGDLLLHLEKKHGEDWGKVYDEAWERIDKKVEGLSKHIKLEEERRSEDAQSKAALTDWLRAKASFVIEGLKEADKDEFCRCELKLQKWYGDLRGKPFAIEAENSILDISGFSKQYNCAFIWQKDGVKKLNLYLIINYFKGGKLRFKKIKPEAFEANRFYTVINKKSGEIVPMEVNFNFDDPNLIILPLAFGKRQGREFIWNDLLSLETGSLKLANGRVIEKTLYNRRTRQDEPALFVALTFERREVLDSSNIKPMNLIGVDRGENIPAVIALTDPEGCPLSRFKDSLGNPTHILRIGESYKEKQRTIQAKKEVEQRRAGGYSRKYASKAKNLADDMVRNTARDLLYYAVTQDAMLIFENLSRGFGRQGKRTFMAERQYTRMEDWLTAKLAYEGPLPSKTYLSKTLAQYTSKTCSNCGFTITSADYDRVLEKLKKTATGWMTTINGKELKVEGQITYYNRYKRQNVVKDLSVELDRLSEESVNNDISSWTKGRSGEALSLLKKRFSHRPVQEKFVCLNCGFETHADEQAALNIARSWLFLRSQEYKKYQTNKTTGNTDKRAFVETWQSFYRKKLKEVWKPAV

SEQ ID NO: 30711 - protein, 979 aa, synthetic construct
  REGION 1..979: note = engineered CasX variant
QEIKRINKIRRRLVKDSNTKKAGKTGPMKTLLVRVMTPDLRERLENLRKKPENIPQPISNTSRANLNKLLTDYTEMKKAILHVYWEEFQKDPVGLMSRVAQPASKKIDQNKLKPEMDEKGNLTTAGFACSQCGQPLFVYKLEQVSEKGKAYTNYFGRCNVAEHEKLIKLAQLKPEKDSDEAVTYSLGKFGQRALDFYSIHVTKESTHPVKPLAQIAGNRYASSPVGKALSDACMGTIASFLSKYQDIIIEHQKVVKGNQKRLESLRELAGKENLEYPSVTLPPQPHTKEGVDAYNEVIARVRMWVNLNLWQKLKLSRDDAKPLLRLKGFPSFPLVERQANEVDWWDMVCNVKKLINEKKEDGKVFWQNLAGYKRQEALRPYLSSEEDRKKGKKFARYQLGDLLLHLEKKHGEDWGKVYDEAWERIDKKVEGLSKHIKLEEERRSEDAQSKAALTDWLRAKASFVIEGLKEADKDEFCRCELKLQKWYGDLRGKPFAIEAENSILDISGFSKQYNCAFIWQKDGVKKLNLYLIINYFKGGKLRFKKIKPEAFEANRFYTVINKKSGEIVPMEVNFNFDDPNLIILPLAFGKRQGREFIWNDLLSLETGSLKLANGRVIEKTLYNRRTRQDEPALFVALTFERREVLDSSNIKPMNLIGVDRGENIPAVIALTDPEGCPLSRFKDSLGNPTHILRIGESYKEKQRTIQAKKEVEQRRAGGYSRKYASKAKNLADDMVRNTARDLLYYAVTQDAMLIFENLSRGFGRQGKRTFMAERQYTRMEDWLTAKLAYEGPLPSKTYLSKTLAQYTSKTCSNCGFTITSADYDRVLEKLKKTATGWMTTINGKELKVEGQITYYNRYKRQNVVKDLSVELDRLSEESVNNDISSWTKGRSGEALSLLKKRFSHRPVQEKFVCLNCGFETHADEQAALNIARSWLFLRSQEYKKYQTNKTTGNTDKRAFVETWQSFYRKKLKEVWKPAV

SEQ ID NO: 30712 - protein, 980 aa, synthetic construct
  REGION 1..980: note = engineered CasX variant
QEIKRINKIRRRLVKDSNTKKAGKTGPMKTLLVRVMTPDLRERLENLRKKPENIPQPISNTSRANLNKLLTDYTEMKKAILHVYWEEFQKDPVGLMSRVAQPASKKIDQNKLKPEMDEKGNLTTAGFACSQCGQPLFVYKLEQVSEKGKAYTNYFGRCNVAEHEKLILLAQLKPEKDSDEAVTYSLGKFGQRALDFYSIHVTKESTHPVKPLAQIAGNRYASSYPVGKALSDACMGTIASFLSKYQDIIIEHQKVVKGNQKRLESLRELAGKENLEYPSVTLPPQPHTKEGVDAYNEVIARVRMWVNLNLWQKLKLSRDDAKPLLRLKGFPSFPLVERQANEVDWWDMVCNVKKLINEKKEDGKVFWQNLAGYKRQEALRPYLSSEEDVRKKGKKFARYQLGDLLLHLEKKHGEDWGKVYDEAWERIDKKVEGLSKHIKLEEERRSEDAQSKAALTDWLRAKASFVIEGLKEADKDEFCRCELKLQKWYGDLRGKPFAIEAENSILDISGFSKQYNCAFIWQKDGVKKLNLYLIINYFKGGKLRFKKIKPEAFEANRFYTVINKKSGEIVPMEVNFNFDDPNLIILPLAFGKRQGREFIWNDLLSLETGSLKLANGRVIEKTLYNRRTRQDEPALFVALTFERREVLDSSNIKPMNLIGVDRGENIPAVIALTDPEGCPLSRFKDSLGNPTHILRIGESYKEKQRTIQAKKEVEQRRAGGYSRKYASKAKNLADDMVRNTARDLLYYAVTQDAMLIFENLSRGFGRQGKRTFMAERQYTRMEDWLTAKLAYEGLPSKTYLSKTLAQYTSKTCSNCGFTITSADYDRVLEKLKKTATGWMTTINGKELKVEGQITYYNRYKRQNVVKDLSVELDRLSEESVNNDISSWTKGRSGEALSLLKKRFSHRPVQEKFVCLNCGFETHADEQAALNIARSWLFLRSQEYKKYQTNKTTGNTDKRAFVETWQSFYRKKLKEVWKPAV

SEQ ID NO: 30713 - protein, 980 aa, synthetic construct
  REGION 1..980: note = engineered CasX variant
QEIKRINKIRRRLVKDSNTKKAGKTGPMKTLLVRVMTPDLRERLENLRKKPENIPQPISNTSRANLNKLLTDYTEMKKAILHVYWEEFQKDPVGLMSRVAQPASKKIDQNKLKPEMDEKGNLTTAGFACSQCGQPLFVYKLEQVSEKGKAYTNYFGRCNVAEHEKLILLAQLKPEKDSDEAVTYSLGKFGQRALDFYSIHVTKESTHPVKPLAQIAGNRYASSHPVGKALSDACMGTIASFLSKYQDIIIEHQKVVKGNQKRLESLRELAGKENLEYPSVTLPPQPHTKEGVDAYNEVIARVRMWVNLNLWQKLKLSRDDAKPLLRLKGFPSFPLVERQANEVDWWDMVCNVKKLINEKKEDGKVFWQNLAGYKRQEALRPYLSSEEDVRKKGKKFARYQLGDLLLHLEKKHGEDWGKVYDEAWERIDKKVEGLSKHIKLEEERRSEDAQSKAALTDWLRAKASFVIEGLKEADKDEFCRCELKLQKWYGDLRGKPFAIEAENSILDISGFSKQYNCAFIWQKDGVKKLNLYLIINYFKGGKLRFKKIKPEAFEANRFYTVINKKSGEIVPMEVNFNFDDPNLIILPLAFGKRQGREFIWNDLLSLETGSLKLANGRVIEKTLYNRRTRQDEPALFVALTFERREVLDSSNIKPMNLIGVDRGENIPAVIALTDPEGCPLSRFKDSLGNPTHILRIGESYKEKQRTIQAKKEVEQRRAGGYSRKYASKAKNLADDMVRNTARDLLYYAVTQDAMLIFENLSRGFGRQGKRTFMAERQYTRMEDWLTAKLAYEGLPSKTYLSKTLAQYTSKTCSNCGFTITSADYDRVLEKLKKTATGWMTTINGKELKVEGQITYYNRYKRQNVVKDLSVELDRLSEESVNNDISSWTKGRSGEALSLLKKRFSHRPVQEKFVCLNCGFETHADEQAALNIARSWLFLRSQEYKKYQTNKTTGNTDKRAFVETWQSFYRKKLKEVWKPAV

SEQ ID NO: 30714 - protein, 980 aa, synthetic construct
  REGION 1..980: note = engineered CasX variant
QEIKRINKIRRRLVKDSNTKKAGKTGPMKTLLVRVMTPDLRERLENLRKKPENIPQPISNTSRANLNKLLTDYTEMKKAILHVYWEEFQKDPVGLMSRVAQPASKKIDQNKLKPEMDEKGNLTTAGFACSQCGQPLFVYKLEQVSEKGKAYTNYFGRCNVAEHEKLILLAQLKPEKDSDEAVTYSLGKFGQRALDFYSIHVTKESTHPVKPLAQIAGNRYASSSPVGKALSDACMGTIASFLSKYQDIIIEHQKVVKGNQKRLESLRELAGKENLEYPSVTLPPQPHTKEGVDAYNEVIARVRMWVNLNLWQKLKLSRDDAKPLLRLKGFPSFPLVERQANEVDWWDMVCNVKKLINEKKEDGKVFWQNLAGYKRQEALRPYLSSEEDVRKKGKKFARYQLGDLLLHLEKKHGEDWGKVYDEAWERIDKKVEGLSKHIKLEEERRSEDAQSKAALTDWLRAKASFVIEGLKEADKDEFCRCELKLQKWYGDLRGKPFAIEAENSILDISGFSKQYNCAFIWQKDGVKKLNLYLIINYFKGGKLRFKKIKPEAFEANRFYTVINKKSGEIVPMEVNFNFDDPNLIILPLAFGKRQGREFIWNDLLSLETGSLKLANGRVIEKTLYNRRTRQDEPALFVALTFERREVLDSSNIKPMNLIGVDRGENIPAVIALTDPEGCPLSRFKDSLGNPTHILRIGESYKEKQRTIQAKKEVEQRRAGGYSRKYASKAKNLADDMVRNTARDLLYYAVTQDAMLIFENLSRGFGRQGKRTFMAERQYTRMEDWLTAKLAYEGLPSKTYLSKTLAQYTSKTCSNCGFTITSADYDRVLEKLKKTATGWMTTINGKELKVEGQITYYNRYKRQNVVKDLSVELDRLSEESVNNDISSWTKGRSGEALSLLKKRFSHRPVQEKFVCLNCGFETHADEQAALNIARSWLFLRSQEYKKYQTNKTTGNTDKRAFVETWQSFYRKKLKEVWKPAV

SEQ ID NO: 30715 - protein, 980 aa, synthetic construct
  REGION 1..980: note = engineered CasX variant
QEIKRINKIRRRLVKDSNTKKAGKTGPMKTLLVRVMTPDLRERLENLRKKPENIPQPISNTSRANLNKLLTDYTEMKKAILHVYWEEFQKDPVGLMSRVAQPASKKIDQNKLKPEMDEKGNLTTAGFACSQCGQPLFVYKLEQVSEKGKAYTNYFGRCNVAEHEKLILLAQLKPEKDSDEAVTYSLGKFGQRALDFYSIHVTKESTHPVKPLAQIAGNRYASSTPVGKALSDACMGTIASFLSKYQDIIIEHQKVVKGNQKRLESLRELAGKENLEYPSVTLPPQPHTKEGVDAYNEVIARVRMWVNLNLWQKLKLSRDDAKPLLRLKGFPSFPLVERQANEVDWWDMVCNVKKLINEKKEDGKVFWQNLAGYKRQEALRPYLSSEEDVRKKGKKFARYQLGDLLLHLEKKHGEDWGKVYDEAWERIDKKVEGLSKHIKLEEERRSEDAQSKAALTDWLRAKASFVIEGLKEADKDEFCRCELKLQKWYGDLRGKPFAIEAENSILDISGFSKQYNCAFIWQKDGVKKLNLYLIINYFKGGKLRFKKIKPEAFEANRFYTVINKKSGEIVPMEVNFNFDDPNLIILPLAFGKRQGREFIWNDLLSLETGSLKLANGRVIEKTLYNRRTRQDEPALFVALTFERREVLDSSNIKPMNLIGVDRGENIPAVIALTDPEGCPLSRFKDSLGNPTHILRIGESYKEKQRTIQAKKEVEQRRAGGYSRKYASKAKNLADDMVRNTARDLLYYAVTQDAMLIFENLSRGFGRQGKRTFMAERQYTRMEDWLTAKLAYEGLPSKTYLSKTLAQYTSKTCSNCGFTITSADYDRVLEKLKKTATGWMTTINGKELKVEGQITYYNRYKRQNVVKDLSVELDRLSEESVNNDISSWTKGRSGEALSLLKKRFSHRPVQEKFVCLNCGFETHADEQAALNIARSWLFLRSQEYKKYQTNKTTGNTDKRAFVETWQSFYRKKLKEVWKPAV

SEQ ID NO: 30716 - protein, 980 aa, synthetic construct
  REGION 1..980: note = engineered CasX variant
QEIKRINKIRRRLVKDSNTKKAGKTGPMKTLLVRVMTPDLRERLENLRKKPENIPQPISNTSRANLNKLLTDYTEMKKAILHVYWEEFQKDPVGLMSRVAQPASKKIDQNKLKPEMDEKGNLTTAGFACSQCGQPLFVYKLEQVSEKGKAYTNYFGRCNVAEHEKLILLAQLKPEKDSDEAVTYSLGKFGQRALDFYSIHVTKESTHPVKPLAQIAGNRYASSAPVGKALSDACMGTIASFLSKYQDIIIEHQKVVKGNQKRLESLRELAGKENLEYPSVTLPPQPHTKEGVDAYNEVIARVRMWVNLNLWQKLKLSRDDAKPLLRLKGFPSFPLVERQANEVDWWDMVCNVKKLINEKKEDGKVFWQNLAGYKRQEALRPYLSSEEDVRKKGKKFARYQLGDLLLHLEKKHGEDWGKVYDEAWERIDKKVEGLSKHIKLEEERRSEDAQSKAALTDWLRAKASFVIEGLKEADKDEFCRCELKLQKWYGDLRGKPFAIEAENSILDISGFSKQYNCAFIWQKDGVKKLNLYLIINYFKGGKLRFKKIKPEAFEANRFYTVINKKSGEIVPMEVNFNFDDPNLIILPLAFGKRQGREFIWNDLLSLETGSLKLANGRVIEKTLYNRRTRQDEPALFVALTFERREVLDSSNIKPMNLIGVDRGENIPAVIALTDPEGCPLSRFKDSLGNPTHILRIGESYKEKQRTIQAKKEVEQRRAGGYSRKYASKAKNLADDMVRNTARDLLYYAVTQDAMLIFENLSRGFGRQGKRTFMAERQYTRMEDWLTAKLAYEGLPSKTYLSKTLAQYTSKTCSNCGFTITSADYDRVLEKLKKTATGWMTTINGKELKVEGQITYYNRYKRQNVVKDLSVELDRLSEESVNNDISSWTKGRSGEALSLLKKRFSHRPVQEKFVCLNCGFETHADEQAALNIARSWLFLRSQEYKKYQTNKTTGNTDKRAFVETWQSFYRKKLKEVWKPAV

SEQ ID NO: 30717 - protein, 980 aa, synthetic construct
  REGION 1..980: note = engineered CasX variant
QEIKRINKIRRRLVKDSNTKKAGKTGPMKTLLVRVMTPDLRERLENLRKKPENIPQPISNTSRANLNKLLTDYTEMKKAILHVYWEEFQKDPVGLMSRVAQPASKKIDQNKLKPEMDEKGNLTTAGFACSQCGQPLFVYKLEQVSEKGKAYTNYFGRCNVAEHEKLILLAQLKPEKDSDEAVTYSLGKFGQRALDFYSIHVTKESTHPVKPLAQIAGNRYASSVPVGKALSDACMGTIASFLSKYQDIIIEHQKVVKGNQKRLESLRELAGKENLEYPSVTLPPQPHTKEGVDAYNEVIARVRMWVNLNLWQKLKLSRDDAKPLLRLKGFPSFPLVERQANEVDWWDMVCNVKKLINEKKEDGKVFWQNLAGYKRQEALRPYLSSEEDVRKKGKKFARYQLGDLLLHLEKKHGEDWGKVYDEAWERIDKKVEGLSKHIKLEEERRSEDAQSKAALTDWLRAKASFVIEGLKEADKDEFCRCELKLQKWYGDLRGKPFAIEAENSILDISGFSKQYNCAFIWQKDGVKKLNLYLIINYFKGGKLRFKKIKPEAFEANRFYTVINKKSGEIVPMEVNFNFDDPNLIILPLAFGKRQGREFIWNDLLSLETGSLKLANGRVIEKTLYNRRTRQDEPALFVALTFERREVLDSSNIKPMNLIGVDRGENIPAVIALTDPEGCPLSRFKDSLGNPTHILRIGESYKEKQRTIQAKKEVEQRRAGGYSRKYASKAKNLADDMVRNTARDLLYYAVTQDAMLIFENLSRGFGRQGKRTFMAERQYTRMEDWLTAKLAYEGLPSKTYLSKTLAQYTSKTCSNCGFTITSADYDRVLEKLKKTATGWMTTINGKELKVEGQITYYNRYKRQNVVKDLSVELDRLSEESVNNDISSWTKGRSGEALSLLKKRFSHRPVQEKFVCLNCGFETHADEQAALNIARSWLFLRSQEYKKYQTNKTTGNTDKRAFVETWQSFYRKKLKEVWKPAV

SEQ ID NO: 30718 - protein, 979 aa, synthetic construct
  REGION 1..979: note = engineered CasX variant
QEIKRINKIRRRLVKDSNTKKAGKTGPMKTLLVRVMTPDLRERLENLRKKPENIPQPISNTSRANLNKLLTDYTEMKKAILHVYWEEFQKDPVGLMSRVAQPASKKIDQNKLKPEMDEKGNLTTAGFACSQCGQPLFVYKLEQVSEKGKAYTNYFGRCNVAEHEKLIKLAQLKPEKDSDEAVTYSLGKFGQRALDFYSIHVTKESTHPVKPLAQIAGNRYASSPVGKALSDACMGTIASFLSKYQDIIIEHQKVVKGNQKRLESLRELAGKENLEYPSVTLPPQPHTKEGVDAYNEVIARVRMWVNLNLWQKLKLSRDDAKPLLRLKGFPSFPLVERQANEVDWWDMVCNVKKLINEKKEDGKVFWQNLAGYKRQEALRPYLSSEEDVRKKGKKFARYQLGDLLLHLEKKHGEDWGKVYDEAWERIDKKVEGLSKHIKLEEERRSEDAQSKAALTDWLRAKASFVIEGLKEADKDEFCRCELKLQKWYGDLRGKPFAIEAENSILDISGFSKQYNCAFIWQKDGVKKLNLYLIINYFKGGKLRFKKIKPEAFEANRFYTVINKKSGEIVPMEVNFNFDDPNLIILPLAFGKRQGREFIWNDLLSLETGSLKLANGRVIEKTLYNRRTRQDEPALFVALTFERREVLDSSNIKPMNLIGVDRGENIPAVIALTDPEGCPLSRFKDSLGNPTHILRIGESYKEKQRTIQAKKEVEQRRAGGYSRKYASKAKNLADDMVRNTARDLLYYAVTQDAMLIFENLSRGFGRQGKRTFMAERQYTRMEDWLTAKLAYEGLPSKTYLSKTLAQYTSKTCSNCGFTITSADYDRVLEKLKKTATGWMTTINGKELKVEGQITYYNRYKRQNVVKDLSVELDRLSEESVNNDISSWTKGRSGEALSLLKKRFSHRPVQEKFVCLNCGFETHADEQAALNIARSWLFLRSQEYKKYQTNKTTGNTDKRAFVETWQSFYRKKLKEVWKPAV

SEQ ID NO: 30719 - protein, 979 aa, synthetic construct
  REGION 1..979: note = engineered CasX variant
QEIKRINKIRRRLVKDSNTKKAGKTGPMKTLLVRVMTPDLRERLENLRKKPENIPQPISNTSRANLNKLLTDYTEMKKAILHVYWEEFQKDPVGLMSRVAQPASKKIDQNKLKPEMDEKGNLTTAGFACSQCGQPLFVYKLEQVSEKGKAYTNYFGRCNVAEHEKLILLAQLKPEKDSDEAVTYSLGKFGQRALDFYSIHVTKESTHPVKPLAQIAGNRYASSYPVGKALSDACMGTIASFLSKYQDIIIEHQKVVKGNQKRLESLRELAGKENLEYPSVTLPPQPHTKEGVDAYNEVIARVRMWVNLNLWQKLKLSRDDAKPLLRLKGFPSFPLVERQANEVDWWDMVCNVKKLINEKKEDGKVFWQNLAGYKRQEALRPYLSSEEDRKKGKKFARYQLGDLLLHLEKKHGEDWGKVYDEAWERIDKKVEGLSKHIKLEEERRSEDAQSKAALTDWLRAKASFVIEGLKEADKDEFCRCELKLQKWYGDLRGKPFAIEAENSILDISGFSKQYNCAFIWQKDGVKKLNLYLIINYFKGGKLRFKKIKPEAFEANRFYTVINKKSGEIVPMEVNFNFDDPNLIILPLAFGKRQGREFIWNDLLSLETGSLKLANGRVIEKTLYNRRTRQDEPALFVALTFERREVLDSSNIKPMNLIGVDRGENIPAVIALTDPEGCPLSRFKDSLGNPTHILRIGESYKEKQRTIQAKKEVEQRRAGGYSRKYASKAKNLADDMVRNTARDLLYYAVTQDAMLIFENLSRGFGRQGKRTFMAERQYTRMEDWLTAKLAYEGLPSKTYLSKTLAQYTSKTCSNCGFTITSADYDRMLEKLKKTATGWMTTINGKELKVEGQITYYNRYKRQNVVKDLSVELDRLSEESVNNDISSWTKGRSGEALSLLKKRFSHRPVQEKFVCLNCGFETHADEQAALNIARSWLFLRSQEYKKYQTNKTTGNTDKRAFVETWQSFYRKKLKEVWKPAV

SEQ ID NO: 30720 - protein, 979 aa, synthetic construct
  REGION 1..979: note = engineered CasX variant
QEIKRINKIRRRLVKDSNTKKAGKTGPMKTLLVRVMTPDLRERLENLRKKPENIPQPISNTSRANLNKLLTDYTEMKKAILHVYWEEFQKDPVGLMSRVAQPASKKIDQNKLKPEMDEKGNLTTAGFACSQCGQPLFVYKLEQVSEKGKAYTNYFGRCNVAEHEKLILLAQLKPEKDSDEAVTYSLGKFGQRALDFYSIHVTKESTHPVKPLAQIAGNRYASSHPVGKALSDACMGTIASFLSKYQDIIIEHQKVVKGNQKRLESLRELAGKENLEYPSVTLPPQPHTKEGVDAYNEVIARVRMWVNLNLWQKLKLSRDDAKPLLRLKGFPSFPLVERQANEVDWWDMVCNVKKLINEKKEDGKVFWQNLAGYKRQEALRPYLSSEEDRKKGKKFARYQLGDLLLHLEKKHGEDWGKVYDEAWERIDKKVEGLSKHIKLEEERRSEDAQSKAALTDWLRAKASFVIEGLKEADKDEFCRCELKLQKWYGDLRGKPFAIEAENSILDISGFSKQYNCAFIWQKDGVKKLNLYLIINYFKGGKLRFKKIKPEAFEANRFYTVINKKSGEIVPMEVNFNFDDPNLIILPLAFGKRQGREFIWNDLLSLETGSLKLANGRVIEKTLYNRRTRQDEPALFVALTFERREVLDSSNIKPMNLIGVDRGENIPAVIALTDPEGCPLSRFKDSLGNPTHILRIGESYKEKQRTIQAKKEVEQRRAGGYSRKYASKAKNLADDMVRNTARDLLYYAVTQDAMLIFENLSRGFGRQGKRTFMAERQYTRMEDWLTAKLAYEGLPSKTYLSKTLAQYTSKTCSNCGFTITSADYDRMLEKLKKTATGWMTTINGKELKVEGQITYYNRYKRQNVVKDLSVELDRLSEESVNNDISSWTKGRSGEALSLLKKRFSHRPVQEKFVCLNCGFETHADEQAALNIARSWLFLRSQEYKKYQTNKTTGNTDKRAFVETWQSFYRKKLKEVWKPAV

SEQ ID NO: 30721 - protein, 979 aa, synthetic construct
  REGION 1..979: note = engineered CasX variant
QEIKRINKIRRRLVKDSNTKKAGKTGPMKTLLVRVMTPDLRERLENLRKKPENIPQPISNTSRANLNKLLTDYTEMKKAILHVYWEEFQKDPVGLMSRVAQPASKKIDQNKLKPEMDEKGNLTTAGFACSQCGQPLFVYKLEQVSEKGKAYTNYFGRCNVAEHEKLILLAQLKPEKDSDEAVTYSLGKFGQRALDFYSIHVTKESTHPVKPLAQIAGNRYASSSPVGKALSDACMGTIASFLSKYQDIIIEHQKVVKGNQKRLESLRELAGKENLEYPSVTLPPQPHTKEGVDAYNEVIARVRMWVNLNLWQKLKLSRDDAKPLLRLKGFPSFPLVERQANEVDWWDMVCNVKKLINEKKEDGKVFWQNLAGYKRQEALRPYLSSEEDRKKGKKFARYQLGDLLLHLEKKHGEDWGKVYDEAWERIDKKVEGLSKHIKLEEERRSEDAQSKAALTDWLRAKASFVIEGLKEADKDEFCRCELKLQKWYGDLRGKPFAIEAENSILDISGFSKQYNCAFIWQKDGVKKLNLYLIINYFKGGKLRFKKIKPEAFEANRFYTVINKKSGEIVPMEVNFNFDDPNLIILPLAFGKRQGREFIWNDLLSLETGSLKLANGRVIEKTLYNRRTRQDEPALFVALTFERREVLDSSNIKPMNLIGVDRGENIPAVIALTDPEGCPLSRFKDSLGNPTHILRIGESYKEKQRTIQAKKEVEQRRAGGYSRKYASKAKNLADDMVRNTARDLLYYAVTQDAMLIFENLSRGFGRQGKRTFMAERQYTRMEDWLTAKLAYEGLPSKTYLSKTLAQYTSKTCSNCGFTITSADYDRMLEKLKKTATGWMTTINGKELKVEGQITYYNRYKRQNVVKDLSVELDRLSEESVNNDISSWTKGRSGEALSLLKKRFSHRPVQEKFVCLNCGFETHADEQAALNIARSWLFLRSQEYKKYQTNKTTGNTDKRAFVETWQSFYRKKLKEVWKPAV

SEQ ID NO: 30722 - protein, 979 aa, synthetic construct
  REGION 1..979: note = engineered CasX variant
QEIKRINKIRRRLVKDSNTKKAGKTGPMKTLLVRVMTPDLRERLENLRKKPENIPQPISNTSRANLNKLLTDYTEMKKAILHVYWEEFQKDPVGLMSRVAQPASKKIDQNKLKPEMDEKGNLTTAGFACSQCGQPLFVYKLEQVSEKGKAYTNYFGRCNVAEHEKLILLAQLKPEKDSDEAVTYSLGKFGQRALDFYSIHVTKESTHPVKPLAQIAGNRYASSTPVGKALSDACMGTIASFLSKYQDIIIEHQKVVKGNQKRLESLRELAGKENLEYPSVTLPPQPHTKEGVDAYNEVIARVRMWVNLNLWQKLKLSRDDAKPLLRLKGFPSFPLVERQANEVDWWDMVCNVKKLINEKKEDGKVFWQNLAGYKRQEALRPYLSSEEDRKKGKKFARYQLGDLLLHLEKKHGEDWGKVYDEAWERIDKKVEGLSKHIKLEEERRSEDAQSKAALTDWLRAKASFVIEGLKEADKDEFCRCELKLQKWYGDLRGKPFAIEAENSILDISGFSKQYNCAFIWQKDGVKKLNLYLIINYFKGGKLRFKKIKPEAFEANRFYTVINKKSGEIVPMEVNFNFDDPNLIILPLAFGKRQGREFIWNDLLSLETGSLKLANGRVIEKTLYNRRTRQDEPALFVALTFERREVLDSSNIKPMNLIGVDRGENIPAVIALTDPEGCPLSRFKDSLGNPTHILRIGESYKEKQRTIQAKKEVEQRRAGGYSRKYASKAKNLADDMVRNTARDLLYYAVTQDAMLIFENLSRGFGRQGKRTFMAERQYTRMEDWLTAKLAYEGLPSKTYLSKTLAQYTSKTCSNCGFTITSADYDRMLEKLKKTATGWMTTINGKELKVEGQITYYNRYKRQNVVKDLSVELDRLSEESVNNDISSWTKGRSGEALSLLKKRFSHRPVQEKFVCLNCGFETHADEQAALNIARSWLFLRSQEYKKYQTNKTTGNTDKRAFVETWQSFYRKKLKEVWKPAV

SEQ ID NO: 30723 - protein, 979 aa, synthetic construct
  REGION 1..979: note = engineered CasX variant
QEIKRINKIRRRLVKDSNTKKAGKTGPMKTLLVRVMTPDLRERLENLRKKPENIPQPISNTSRANLNKLLTDYTEMKKAILHVYWEEFQKDPVGLMSRVAQPASKKIDQNKLKPEMDEKGNLTTAGFACSQCGQPLFVYKLEQVSEKGKAYTNYFGRCNVAEHEKLILLAQLKPEKDSDEAVTYSLGKFGQRALDFYSIHVTKESTHPVKPLAQIAGNRYASSAPVGKALSDACMGTIASFLSKYQDIIIEHQKVVKGNQKRLESLRELAGKENLEYPSVTLPPQPHTKEGVDAYNEVIARVRMWVNLNLWQKLKLSRDDAKPLLRLKGFPSFPLVERQANEVDWWDMVCNVKKLINEKKEDGKVFWQNLAGYKRQEALRPYLSSEEDRKKGKKFARYQLGDLLLHLEKKHGEDWGKVYDEAWERIDKKVEGLSKHIKLEEERRSEDAQSKAALTDWLRAKASFVIEGLKEADKDEFCRCELKLQKWYGDLRGKPFAIEAENSILDISGFSKQYNCAFIWQKDGVKKLNLYLIINYFKGGKLRFKKIKPEAFEANRFYTVINKKSGEIVPMEVNFNFDDPNLIILPLAFGKRQGREFIWNDLLSLETGSLKLANGRVIEKTLYNRRTRQDEPALFVALTFERREVLDSSNIKPMNLIGVDRGENIPAVIALTDPEGCPLSRFKDSLGNPTHILRIGESYKEKQRTIQAKKEVEQRRAGGYSRKYASKAKNLADDMVRNTARDLLYYAVTQDAMLIFENLSRGFGRQGKRTFMAERQYTRMEDWLTAKLAYEGLPSKTYLSKTLAQYTSKTCSNCGFTITSADYDRMLEKLKKTATGWMTTINGKELKVEGQITYYNRYKRQNVVKDLSVELDRLSEESVNNDISSWTKGRSGEALSLLKKRFSHRPVQEKFVCLNCGFETHADEQAALNIARSWLFLRSQEYKKYQTNKTTGNTDKRAFVETWQSFYRKKLKEVWKPAV

SEQ ID NO: 30724 - protein, 979 aa, synthetic construct
  REGION 1..979: note = engineered CasX variant
QEIKRINKIRRRLVKDSNTKKAGKTGPMKTLLVRVMTPDLRERLENLRKKPENIPQPISNTSRANLNKLLTDYTEMKKAILHVYWEEFQKDPVGLMSRVAQPASKKIDQNKLKPEMDEKGNLTTAGFACSQCGQPLFVYKLEQVSEKGKAYTNYFGRCNVAEHEKLILLAQLKPEKDSDEAVTYSLGKFGQRALDFYSIHVTKESTHPVKPLAQIAGNRYASSVPVGKALSDACMGTIASFLSKYQDIIIEHQKVVKGNQKRLESLRELAGKENLEYPSVTLPPQPHTKEGVDAYNEVIARVRMWVNLNLWQKLKLSRDDAKPLLRLKGFPSFPLVERQANEVDWWDMVCNVKKLINEKKEDGKVFWQNLAGYKRQEALRPYLSSEEDRKKGKKFARYQLGDLLLHLEKKHGEDWGKVYDEAWERIDKKVEGLSKHIKLEEERRSEDAQSKAALTDWLRAKASFVIEGLKEADKDEFCRCELKLQKWYGDLRGKPFAIEAENSILDISGFSKQYNCAFIWQKDGVKKLNLYLIINYFKGGKLRFKKIKPEAFEANRFYTVINKKSGEIVPMEVNFNFDDPNLIILPLAFGKRQGREFIWNDLLSLETGSLKLANGRVIEKTLYNRRTRQDEPALFVALTFERREVLDSSNIKPMNLIGVDRGENIPAVIALTDPEGCPLSRFKDSLGNPTHILRIGESYKEKQRTIQAKKEVEQRRAGGYSRKYASKAKNLADDMVRNTARDLLYYAVTQDAMLIFENLSRGFGRQGKRTFMAERQYTRMEDWLTAKLAYEGLPSKTYLSKTLAQYTSKTCSNCGFTITSADYDRMLEKLKKTATGWMTTINGKELKVEGQITYYNRYKRQNVVKDLSVELDRLSEESVNNDISSWTKGRSGEALSLLKKRFSHRPVQEKFVCLNCGFETHADEQAALNIARSWLFLRSQEYKKYQTNKTTGNTDKRAFVETWQSFYRKKLKEVWKPAV

SEQ ID NO: 30725 - protein, 978 aa, synthetic construct
  REGION 1..978: note = engineered CasX variant
QEIKRINKIRRRLVKDSNTKKAGKTGPMKTLLVRVMTPDLRERLENLRKKPENIPQPISNTSRANLNKLLTDYTEMKKAILHVYWEEFQKDPVGLMSRVAQPASKKIDQNKLKPEMDEKGNLTTAGFACSQCGQPLFVYKLEQVSEKGKAYTNYFGRCNVAEHEKLIKLAQLKPEKDSDEAVTYSLGKFGQRALDFYSIHVTKESTHPVKPLAQIAGNRYASSPVGKALSDACMGTIASFLSKYQDIIIEHQKVVKGNQKRLESLRELAGKENLEYPSVTLPPQPHTKEGVDAYNEVIARVRMWVNLNLWQKLKLSRDDAKPLLRLKGFPSFPLVERQANEVDWWDMVCNVKKLINEKKEDGKVFWQNLAGYKRQEALRPYLSSEEDRKKGKKFARYQLGDLLLHLEKKHGEDWGKVYDEAWERIDKKVEGLSKHIKLEEERRSEDAQSKAALTDWLRAKASFVIEGLKEADKDEFCRCELKLQKWYGDLRGKPFAIEAENSILDISGFSKQYNCAFIWQKDGVKKLNLYLIINYFKGGKLRFKKIKPEAFEANRFYTVINKKSGEIVPMEVNFNFDDPNLIILPLAFGKRQGREFIWNDLLSLETGSLKLANGRVIEKTLYNRRTRQDEPALFVALTFERREVLDSSNIKPMNLIGVDRGENIPAVIALTDPEGCPLSRFKDSLGNPTHILRIGESYKEKQRTIQAKKEVEQRRAGGYSRKYASKAKNLADDMVRNTARDLLYYAVTQDAMLIFENLSRGFGRQGKRTFMAERQYTRMEDWLTAKLAYEGLPSKTYLSKTLAQYTSKTCSNCGFTITSADYDRMLEKLKKTATGWMTTINGKELKVEGQITYYNRYKRQNVVKDLSVELDRLSEESVNNDISSWTKGRSGEALSLLKKRFSHRPVQEKFVCLNCGFETHADEQAALNIARSWLFLRSQEYKKYQTNKTTGNTDKRAFVETWQSFYRKKLKEVWKPAV

SEQ ID NO: 30726 - protein, 979 aa, synthetic construct
  REGION 1..979: note = engineered CasX variant
QEIKRINKIRRRLVKDSNTKKAGKTGPMKTLLVRVMTPDLRERLENLRKKPENIPQPISNTSRANLNKLLTDYTEMKKAILHVYWEEFQKDPVGLMSRVAQPASKKIDQNKLKPEMDEKGNLTTAGFACSQCGQPLFVYKLEQVSEKGKAYTNYFGRCNVAEHEKLILLAQLKPEKDSDEAVTYSLGKFGQRALDFYSIHVTKESTHPVKPLAQIAGNRYASSYPVGKALSDACMGTIASFLSKYQDIIIEHQKVVKGNQKRLESLRELAGKENLEYPSVTLPPQPHTKEGVDAYNEVIARVRMWVNLNLWQKLKLSRDDAKPLLRLKGFPSFPLVERQANEVDWWDMVCNVKKLINEKKEDGKVFWQNLAGYKRQEALRPYLSSEEDRKKGKKFARYQLGDLLLHLEKKHGEDWGKVYDEAWERIDKKVEGLSKHIKLEEERRSEDAQSKAALTDWLRAKASFVIEGLKEADKDEFCRCELKLQKWYGDLRGKPFAIEAENSILDISGFSKQYNCAFIWQKDGVKKLNLYLIINYFKGGKLRFKKIKPEAFEANRFYTVINKKSGEIVPMEVNFNFDDPNLIILPLAFGKRQGREFIWNDLLSLETGSLKLANGRVIEKTLYNRRTRQDEPALFVALTFERREVLDSSNIKPMNLIGVDRGENIPAVIALTDPEGCPLSRFKDSLGNPTHILRIGESYKEKQRTIQAKKEVEQRRAGGYSRKYASKAKNLADDMVRNTARDLLYYAVTQDAMLIFENLSRGFGRQGKRTFMAERQYTRMEDWLTAKLAYEGLPSKTYLSKTLAQYTSKTCSNCGFTITSADYDRVLEKLKKTATGWMTTINGKELKVEGQITYYNRYKRQNVVKDLSVELDRLSEESVNNDISSWTKGRQGEALSLLKKRFSHRPVQEKFVCLNCGFETHADEQAALNIARSWLFLRSQEYKKYQTNKTTGNTDKRAFVETWQSFYRKKLKEVWKPAV

SEQ ID NO: 30727 - protein, 979 aa, synthetic construct
  REGION 1..979: note = engineered CasX variant
QEIKRINKIRRRLVKDSNTKKAGKTGPMKTLLVRVMTPDLRERLENLRKKPENIPQPISNTSRANLNKLLTDYTEMKKAILHVYWEEFQKDPVGLMSRVAQPASKKIDQNKLKPEMDEKGNLTTAGFACSQCGQPLFVYKLEQVSEKGKAYTNYFGRCNVAEHEKLILLAQLKPEKDSDEAVTYSLGKFGQRALDFYSIHVTKESTHPVKPLAQIAGNRYASSHPVGKALSDACMGTIASFLSKYQDIIIEHQKVVKGNQKRLESLRELAGKENLEYPSVTLPPQPHTKEGVDAYNEVIARVRMWVNLNLWQKLKLSRDDAKPLLRLKGFPSFPLVERQANEVDWWDMVCNVKKLINEKKEDGKVFWQNLAGYKRQEALRPYLSSEEDRKKGKKFARYQLGDLLLHLEKKHGEDWGKVYDEAWERIDKKVEGLSKHIKLEEERRSEDAQSKAALTDWLRAKASFVIEGLKEADKDEFCRCELKLQKWYGDLRGKPFAIEAENSILDISGFSKQYNCAFIWQKDGVKKLNLYLIINYFKGGKLRFKKIKPEAFEANRFYTVINKKSGEIVPMEVNFNFDDPNLIILPLAFGKRQGREFIWNDLLSLETGSLKLANGRVIEKTLYNRRTRQDEPALFVALTFERREVLDSSNIKPMNLIGVDRGENIPAVIALTDPEGCPLSRFKDSLGNPTHILRIGESYKEKQRTIQAKKEVEQRRAGGYSRKYASKAKNLADDMVRNTARDLLYYAVTQDAMLIFENLSRGFGRQGKRTFMAERQYTRMEDWLTAKLAYEGLPSKTYLSKTLAQYTSKTCSNCGFTITSADYDRVLEKLKKTATGWMTTINGKELKVEGQITYYNRYKRQNVVKDLSVELDRLSEESVNNDISSWTKGRQGEALSLLKKRFSHRPVQEKFVCLNCGFETHADEQAALNIARSWLFLRSQEYKKYQTNKTTGNTDKRAFVETWQSFYRKKLKEVWKPAV

SEQ ID NO: 30728 - protein, 979 aa, synthetic construct
  REGION 1..979: note = engineered CasX variant
QEIKRINKIRRRLVKDSNTKKAGKTGPMKTLLVRVMTPDLRERLENLRKKPENIPQPISNTSRANLNKLLTDYTEMKKAILHVYWEEFQKDPVGLMSRVAQPASKKIDQNKLKPEMDEKGNLTTAGFACSQCGQPLFVYKLEQVSEKGKAYTNYFGRCNVAEHEKLILLAQLKPEKDSDEAVTYSLGKFGQRALDFYSIHVTKESTHPVKPLAQIAGNRYASSSPVGKALSDACMGTIASFLSKYQDIIIEHQKVVKGNQKRLESLRELAGKENLEYPSVTLPPQPHTKEGVDAYNEVIARVRMWVNLNLWQKLKLSRDDAKPLLRLKGFPSFPLVERQANEVDWWDMVCNVKKLINEKKEDGKVFWQNLAGYKRQEALRPYLSSEEDRKKGKKFARYQLGDLLLHLEKKHGEDWGKVYDEAWERIDKKVEGLSKHIKLEEERRSEDAQSKAALTDWLRAKASFVIEGLKEADKDEFCRCELKLQKWYGDLRGKPFAIEAENSILDISGFSKQYNCAFIWQKDGVKKLNLYLIINYFKGGKLRFKKIKPEAFEANRFYTVINKKSGEIVPMEVNFNFDDPNLIILPLAFGKRQGREFIWNDLLSLETGSLKLANGRVIEKTLYNRRTRQDEPALFVALTFERREVLDSSNIKPMNLIGVDRGENIPAVIALTDPEGCPLSRFKDSLGNPTHILRIGESYKEKQRTIQAKKEVEQRRAGGYSRKYASKAKNLADDMVRNTARDLLYYAVTQDAMLIFENLSRGFGRQGKRTFMAERQYTRMEDWLTAKLAYEGLPSKTYLSKTLAQYTSKTCSNCGFTITSADYDRVLEKLKKTATGWMTTINGKELKVEGQITYYNRYKRQNVVKDLSVELDRLSEESVNNDISSWTKGRQGEALSLLKKRFSHRPVQEKFVCLNCGFETHADEQAALNIARSWLFLRSQEYKKYQTNKTTGNTDKRAFVETWQSFYRKKLKEVWKPAV

SEQ ID NO: 30729 - protein, 979 aa, synthetic construct
  REGION 1..979: note = engineered CasX variant
QEIKRINKIRRRLVKDSNTKKAGKTGPMKTLLVRVMTPDLRERLENLRKKPENIPQPISNTSRANLNKLLTDYTEMKKAILHVYWEEFQKDPVGLMSRVAQPASKKIDQNKLKPEMDEKGNLTTAGFACSQCGQPLFVYKLEQVSEKGKAYTNYFGRCNVAEHEKLILLAQLKPEKDSDEAVTYSLGKFGQRALDFYSIHVTKESTHPVKPLAQIAGNRYASSTPVGKALSDACMGTIASFLSKYQDIIIEHQKVVKGNQKRLESLRELAGKENLEYPSVTLPPQPHTKEGVDAYNEVIARVRMWVNLNLWQKLKLSRDDAKPLLRLKGFPSFPLVERQANEVDWWDMVCNVKKLINEKKEDGKVFWQNLAGYKRQEALRPYLSSEEDRKKGKKFARYQLGDLLLHLEKKHGEDWGKVYDEAWERIDKKVEGLSKHIKLEEERRSEDAQSKAALTDWLRAKASFVIEGLKEADKDEFCRCELKLQKWYGDLRGKPFAIEAENSILDISGFSKQYNCAFIWQKDGVKKLNLYLIINYFKGGKLRFKKIKPEAFEANRFYTVINKKSGEIVPMEVNFNFDDPNLIILPLAFGKRQGREFIWNDLLSLETGSLKLANGRVIEKTLYNRRTRQDEPALFVALTFERREVLDSSNIKPMNLIGVDRGENIPAVIALTDPEGCPLSRFKDSLGNPTHILRIGESYKEKQRTIQAKKEVEQRRAGGYSRKYASKAKNLADDMVRNTARDLLYYAVTQDAMLIFENLSRGFGRQGKRTFMAERQYTRMEDWLTAKLAYEGLPSKTYLSKTLAQYTSKTCSNCGFTITSADYDRVLEKLKKTATGWMTTINGKELKVEGQITYYNRYKRQNVVKDLSVELDRLSEESVNNDISSWTKGRQGEALSLLKKRFSHRPVQEKFVCLNCGFETHADEQAALNIARSWLFLRSQEYKKYQTNKTTGNTDKRAFVETWQSFYRKKLKEVWKPAV

SEQ ID NO: 30730 - protein, 979 aa, synthetic construct
  REGION 1..979: note = engineered CasX variant
QEIKRINKIRRRLVKDSNTKKAGKTGPMKTLLVRVMTPDLRERLENLRKKPENIPQPISNTSRANLNKLLTDYTEMKKAILHVYWEEFQKDPVGLMSRVAQPASKKIDQNKLKPEMDEKGNLTTAGFACSQCGQPLFVYKLEQVSEKGKAYTNYFGRCNVAEHEKLILLAQLKPEKDSDEAVTYSLGKFGQRALDFYSIHVTKESTHPVKPLAQIAGNRYASSAPVGKALSDACMGTIASFLSKYQDIIIEHQKVVKGNQKRLESLRELAGKENLEYPSVTLPPQPHTKEGVDAYNEVIARVRMWVNLNLWQKLKLSRDDAKPLLRLKGFPSFPLVERQANEVDWWDMVCNVKKLINEKKEDGKVFWQNLAGYKRQEALRPYLSSEEDRKKGKKFARYQLGDLLLHLEKKHGEDWGKVYDEAWERIDKKVEGLSKHIKLEEERRSEDAQSKAALTDWLRAKASFVIEGLKEADKDEFCRCELKLQKWYGDLRGKPFAIEAENSILDISGFSKQYNCAFIWQKDGVKKLNLYLIINYFKGGKLRFKKIKPEAFEANRFYTVINKKSGEIVPMEVNFNFDDPNLIILPLAFGKRQGREFIWNDLLSLETGSLKLANGRVIEKTLYNRRTRQDEPALFVALTFERREVLDSSNIKPMNLIGVDRGENIPAVIALTDPEGCPLSRFKDSLGNPTHILRIGESYKEKQRTIQAKKEVEQRRAGGYSRKYASKAKNLADDMVRNTARDLLYYAVTQDAMLIFENLSRGFGRQGKRTFMAERQYTRMEDWLTAKLAYEGLPSKTYLSKTLAQYTSKTCSNCGFTITSADYDRVLEKLKKTATGWMTTINGKELKVEGQITYYNRYKRQNVVKDLSVELDRLSEESVNNDISSWTKGRQGEALSLLKKRFSHRPVQEKFVCLNCGFETHADEQAALNIARSWLFLRSQEYKKYQTNKTTGNTDKRAFVETWQSFYRKKLKEVWKPAV

SEQ ID NO: 30731 - protein, 979 aa, synthetic construct
  REGION 1..979: note = engineered CasX variant
QEIKRINKIRRRLVKDSNTKKAGKTGPMKTLLVRVMTPDLRERLENLRKKPENIPQPISNTSRANLNKLLTDYTEMKKAILHVYWEEFQKDPVGLMSRVAQPASKKIDQNKLKPEMDEKGNLTTAGFACSQCGQPLFVYKLEQVSEKGKAYTNYFGRCNVAEHEKLILLAQLKPEKDSDEAVTYSLGKFGQRALDFYSIHVTKESTHPVKPLAQIAGNRYASSVPVGKALSDACMGTIASFLSKYQDIIIEHQKVVKGNQKRLESLRELAGKENLEYPSVTLPPQPHTKEGVDAYNEVIARVRMWVNLNLWQKLKLSRDDAKPLLRLKGFPSFPLVERQANEVDWWDMVCNVKKLINEKKEDGKVFWQNLAGYKRQEALRPYLSSEEDRKKGKKFARYQLGDLLLHLEKKHGEDWGKVYDEAWERIDKKVEGLSKHIKLEEERRSEDAQSKAALTDWLRAKASFVIEGLKEADKDEFCRCELKLQKWYGDLRGKPFAIEAENSILDISGFSKQYNCAFIWQKDGVKKLNLYLIINYFKGGKLRFKKIKPEAFEANRFYTVINKKSGEIVPMEVNFNFDDPNLIILPLAFGKRQGREFIWNDLLSLETGSLKLANGRVIEKTLYNRRTRQDEPALFVALTFERREVLDSSNIKPMNLIGVDRGENIPAVIALTDPEGCPLSRFKDSLGNPTHILRIGESYKEKQRTIQAKKEVEQRRAGGYSRKYASKAKNLADDMVRNTARDLLYYAVTQDAMLIFENLSRGFGRQGKRTFMAERQYTRMEDWLTAKLAYEGLPSKTYLSKTLAQYTSKTCSNCGFTITSADYDRVLEKLKKTATGWMTTINGKELKVEGQITYYNRYKRQNVVKDLSVELDRLSEESVNNDISSWTKGRQGEALSLLKKRFSHRPVQEKFVCLNCGFETHADEQAALNIARSWLFLRSQEYKKYQTNKTTGNTDKRAFVETWQSFYRKKLKEVWKPAV

SEQ ID NO: 30732 - protein, 978 aa, synthetic construct
  REGION 1..978: note = engineered CasX variant
QEIKRINKIRRRLVKDSNTKKAGKTGPMKTLLVRVMTPDLRERLENLRKKPENIPQPISNTSRANLNKLLTDYTEMKKAILHVYWEEFQKDPVGLMSRVAQPASKKIDQNKLKPEMDEKGNLTTAGFACSQCGQPLFVYKLEQVSEKGKAYTNYFGRCNVAEHEKLIKLAQLKPEKDSDEAVTYSLGKFGQRALDFYSIHVTKESTHPVKPLAQIAGNRYASSPVGKALSDACMGTIASFLSKYQDIIIEHQKVVKGNQKRLESLRELAGKENLEYPSVTLPPQPHTKEGVDAYNEVIARVRMWVNLNLWQKLKLSRDDAKPLLRLKGFPSFPLVERQANEVDWWDMVCNVKKLINEKKEDGKVFWQNLAGYKRQEALRPYLSSEEDRKKGKKFARYQLGDLLLHLEKKHGEDWGKVYDEAWERIDKKVEGLSKHIKLEEERRSEDAQSKAALTDWLRAKASFVIEGLKEADKDEFCRCELKLQKWYGDLRGKPFAIEAENSILDISGFSKQYNCAFIWQKDGVKKLNLYLIINYFKGGKLRFKKIKPEAFEANRFYTVINKKSGEIVPMEVNFNFDDPNLIILPLAFGKRQGREFIWNDLLSLETGSLKLANGRVIEKTLYNRRTRQDEPALFVALTFERREVLDSSNIKPMNLIGVDRGENIPAVIALTDPEGCPLSRFKDSLGNPTHILRIGESYKEKQRTIQAKKEVEQRRAGGYSRKYASKAKNLADDMVRNTARDLLYYAVTQDAMLIFENLSRGFGRQGKRTFMAERQYTRMEDWLTAKLAYEGLPSKTYLSKTLAQYTSKTCSNCGFTITSADYDRVLEKLKKTATGWMTTINGKELKVEGQITYYNRYKRQNVVKDLSVELDRLSEESVNNDISSWTKGRQGEALSLLKKRFSHRPVQEKFVCLNCGFETHADEQAALNIARSWLFLRSQEYKKYQTNKTTGNTDKRAFVETWQSFYRKKLKEVWKPAV

SEQ ID NO: 30733 - protein, 979 aa, synthetic construct
  REGION 1..979: note = engineered CasX variant
QEIKRINKIRRRLVKDSNTKKAGKTGPMKTLLVRVMTPDLRERLENLRKKPENIPQPISNTSRANLNKLLTDYTEMKKAILHVYWEEFQKDPVGLMSRVAQPASKKIDQNKLKPEMDEKGNLTTAGFACSQCGQPLFVYKLEQVSEKGKAYTNYFGRCNVAEHEKLILLAQLKPEKDSDEAVTYSLGKFGQRALDFYSIHVTKESTHPVKPLAQIAGNRYASSYPVGKALSDACMGTIASFLSKYQDIIIEHQKVVKGNQKRLESLRELAGKENLEYPSVTLPPQPHTKEGVDAYNEVIARVRMWVNLNLWQKLKLSRDDAKPLLRLKGFPSFPLVERQANEVDWWDMVCNVKKLINEKKEDGKVFWQNLAGYKRQEALRPYLSSEEDRKKGKKFARYQLGDLLLHLEKKHGEDWGKVYDEAWERIDKKVEGLSKHIKLEEERRSEDAQSKAALTDWLRAKASFVIEGLKEADKDEFCRCELKLQKWYGDLRGKPFAIEAENSILDISGFSKQYNCAFIWQKDGVKKLNLYLIINYFKGGKLRFKKIKPEAFEANRFYTVINKKSGEIVPMEVNFNFDDPNLIILPLAFGKRQGREFIWNDLLSLETGSLKLANGRVIEKTLYNRRTRQDEPALFVALTFERREVLDSSNIKPMNLIGVDRGENIPAVIALTDPEGCPLSRFKDSLGNPTHILRIGESYKEKQRTIQAKKEVEQRRAGGYSRKYASKAKNLADDMVRNTARDLLYYAVTQDAMLIFENLSRGFGRQGKRTFMAERQYTRMEDWLTAKLAYEGLPSKTYLSKTLAQYTSKTCSNCGFTITSADYDRVLEKLKKTATGWMTTINGKELKVEGQITYYNRYKRQNVVKDLSVELDRLSEESVNNDISSWTKGRSGEALSLLKKRFSHRPVQEKFVCLNCEFETHADEQAALNIARSWLFLRSQEYKKYQTNKTTGNTDKRAFVETWQSFYRKKLKEVWKPAV

SEQ ID NO: 30734 - protein, 979 aa, synthetic construct
  REGION 1..979: note = engineered CasX variant
QEIKRINKIRRRLVKDSNTKKAGKTGPMKTLLVRVMTPDLRERLENLRKKPENIPQPISNTSRANLNKLLTDYTEMKKAILHVYWEEFQKDPVGLMSRVAQPASKKIDQNKLKPEMDEKGNLTTAGFACSQCGQPLFVYKLEQVSEKGKAYTNYFGRCNVAEHEKLILLAQLKPEKDSDEAVTYSLGKFGQRALDFYSIHVTKESTHPVKPLAQIAGNRYASSHPVGKALSDACMGTIASFLSKYQDIIIEHQKVVKGNQKRLESLRELAGKENLEYPSVTLPPQPHTKEGVDAYNEVIARVRMWVNLNLWQKLKLSRDDAKPLLRLKGFPSFPLVERQANEVDWWDMVCNVKKLINEKKEDGKVFWQNLAGYKRQEALRPYLSSEEDRKKGKKFARYQLGDLLLHLEKKHGEDWGKVYDEAWERIDKKVEGLSKHIKLEEERRSEDAQSKAALTDWLRAKASFVIEGLKEADKDEFCRCELKLQKWYGDLRGKPFAIEAENSILDISGFSKQYNCAFIWQKDGVKKLNLYLIINYFKGGKLRFKKIKPEAFEANRFYTVINKKSGEIVPMEVNFNFDDPNLIILPLAFGKRQGREFIWNDLLSLETGSLKLANGRVIEKTLYNRRTRQDEPALFVALTFERREVLDSSNIKPMNLIGVDRGENIPAVIALTDPEGCPLSRFKDSLGNPTHILRIGESYKEKQRTIQAKKEVEQRRAGGYSRKYASKAKNLADDMVRNTARDLLYYAVTQDAMLIFENLSRGFGRQGKRTFMAERQYTRMEDWLTAKLAYEGLPSKTYLSKTLAQYTSKTCSNCGFTITSADYDRVLEKLKKTATGWMTTINGKELKVEGQITYYNRYKRQNVVKDLSVELDRLSEESVNNDISSWTKGRSGEALSLLKKRFSHRPVQEKFVCLNCEFETHADEQAALNIARSWLFLRSQEYKKYQTNKTTGNTDKRAFVETWQSFYRKKLKEVWKPAV

SEQ ID NO: 30735 - protein, 979 aa, synthetic construct
  REGION 1..979: note = engineered CasX variant
QEIKRINKIRRRLVKDSNTKKAGKTGPMKTLLVRVMTPDLRERLENLRKKPENIPQPISNTSRANLNKLLTDYTEMKKAILHVYWEEFQKDPVGLMSRVAQPASKKIDQNKLKPEMDEKGNLTTAGFACSQCGQPLFVYKLEQVSEKGKAYTNYFGRCNVAEHEKLILLAQLKPEKDSDEAVTYSLGKFGQRALDFYSIHVTKESTHPVKPLAQIAGNRYASSSPVGKALSDACMGTIASFLSKYQDIIIEHQKVVKGNQKRLESLRELAGKENLEYPSVTLPPQPHTKEGVDAYNEVIARVRMWVNLNLWQKLKLSRDDAKPLLRLKGFPSFPLVERQANEVDWWDMVCNVKKLINEKKEDGKVFWQNLAGYKRQEALRPYLSSEEDRKKGKKFARYQLGDLLLHLEKKHGEDWGKVYDEAWERIDKKVEGLSKHIKLEEERRSEDAQSKAALTDWLRAKASFVIEGLKEADKDEFCRCELKLQKWYGDLRGKPFAIEAENSILDISGFSKQYNCAFIWQKDGVKKLNLYLIINYFKGGKLRFKKIKPEAFEANRFYTVINKKSGEIVPMEVNFNFDDPNLIILPLAFGKRQGREFIWNDLLSLETGSLKLANGRVIEKTLYNRRTRQDEPALFVALTFERREVLDSSNIKPMNLIGVDRGENIPAVIALTDPEGCPLSRFKDSLGNPTHILRIGESYKEKQRTIQAKKEVEQRRAGGYSRKYASKAKNLADDMVRNTARDLLYYAVTQDAMLIFENLSRGFGRQGKRTFMAERQYTRMEDWLTAKLAYEGLPSKTYLSKTLAQYTSKTCSNCGFTITSADYDRVLEKLKKTATGWMTTINGKELKVEGQITYYNRYKRQNVVKDLSVELDRLSEESVNNDISSWTKGRSGEALSLLKKRFSHRPVQEKFVCLNCEFETHADEQAALNIARSWLFLRSQEYKKYQTNKTTGNTDKRAFVETWQSFYRKKLKEVWKPAV

SEQ ID NO: 30736 - protein, 979 aa, synthetic construct
  REGION 1..979: note = engineered CasX variant
QEIKRINKIRRRLVKDSNTKKAGKTGPMKTLLVRVMTPDLRERLENLRKKPENIPQPISNTSRANLNKLLTDYTEMKKAILHVYWEEFQKDPVGLMSRVAQPASKKIDQNKLKPEMDEKGNLTTAGFACSQCGQPLFVYKLEQVSEKGKAYTNYFGRCNVAEHEKLILLAQLKPEKDSDEAVTYSLGKFGQRALDFYSIHVTKESTHPVKPLAQIAGNRYASSTPVGKALSDACMGTIASFLSKYQDIIIEHQKVVKGNQKRLESLRELAGKENLEYPSVTLPPQPHTKEGVDAYNEVIARVRMWVNLNLWQKLKLSRDDAKPLLRLKGFPSFPLVERQANEVDWWDMVCNVKKLINEKKEDGKVFWQNLAGYKRQEALRPYLSSEEDRKKGKKFARYQLGDLLLHLEKKHGEDWGKVYDEAWERIDKKVEGLSKHIKLEEERRSEDAQSKAALTDWLRAKASFVIEGLKEADKDEFCRCELKLQKWYGDLRGKPFAIEAENSILDISGFSKQYNCAFIWQKDGVKKLNLYLIINYFKGGKLRFKKIKPEAFEANRFYTVINKKSGEIVPMEVNFNFDDPNLIILPLAFGKRQGREFIWNDLLSLETGSLKLANGRVIEKTLYNRRTRQDEPALFVALTFERREVLDSSNIKPMNLIGVDRGENIPAVIALTDPEGCPLSRFKDSLGNPTHILRIGESYKEKQRTIQAKKEVEQRRAGGYSRKYASKAKNLADDMVRNTARDLLYYAVTQDAMLIFENLSRGFGRQGKRTFMAERQYTRMEDWLTAKLAYEGLPSKTYLSKTLAQYTSKTCSNCGFTITSADYDRVLEKLKKTATGWMTTINGKELKVEGQITYYNRYKRQNVVKDLSVELDRLSEESVNNDISSWTKGRSGEALSLLKKRFSHRPVQEKFVCLNCEFETHADEQAALNIARSWLFLRSQEYKKYQTNKTTGNTDKRAFVETWQSFYRKKLKEVWKPAV

SEQ ID NO: 30737 - protein, 979 aa, synthetic construct
  REGION 1..979: note = engineered CasX variant
QEIKRINKIRRRLVKDSNTKKAGKTGPMKTLLVRVMTPDLRERLENLRKKPENIPQPISNTSRANLNKLLTDYTEMKKAILHVYWEEFQKDPVGLMSRVAQPASKKIDQNKLKPEMDEKGNLTTAGFACSQCGQPLFVYKLEQVSEKGKAYTNYFGRCNVAEHEKLILLAQLKPEKDSDEAVTYSLGKFGQRALDFYSIHVTKESTHPVKPLAQIAGNRYASSAPVGKALSDACMGTIASFLSKYQDIIIEHQKVVKGNQKRLESLRELAGKENLEYPSVTLPPQPHTKEGVDAYNEVIARVRMWVNLNLWQKLKLSRDDAKPLLRLKGFPSFPLVERQANEVDWWDMVCNVKKLINEKKEDGKVFWQNLAGYKRQEALRPYLSSEEDRKKGKKFARYQLGDLLLHLEKKHGEDWGKVYDEAWERIDKKVEGLSKHIKLEEERRSEDAQSKAALTDWLRAKASFVIEGLKEADKDEFCRCELKLQKWYGDLRGKPFAIEAENSILDISGFSKQYNCAFIWQKDGVKKLNLYLIINYFKGGKLRFKKIKPEAFEANRFYTVINKKSGEIVPMEVNFNFDDPNLIILPLAFGKRQGREFIWNDLLSLETGSLKLANGRVIEKTLYNRRTRQDEPALFVALTFERREVLDSSNIKPMNLIGVDRGENIPAVIALTDPEGCPLSRFKDSLGNPTHILRIGESYKEKQRTIQAKKEVEQRRAGGYSRKYASKAKNLADDMVRNTARDLLYYAVTQDAMLIFENLSRGFGRQGKRTFMAERQYTRMEDWLTAKLAYEGLPSKTYLSKTLAQYTSKTCSNCGFTITSADYDRVLEKLKKTATGWMTTINGKELKVEGQITYYNRYKRQNVVKDLSVELDRLSEESVNNDISSWTKGRSGEALSLLKKRFSHRPVQEKFVCLNCEFETHADEQAALNIARSWLFLRSQEYKKYQTNKTTGNTDKRAFVETWQSFYRKKLKEVWKPAV

SEQ ID NO: 30738 - protein, 979 aa, synthetic construct
  REGION 1..979: note = engineered CasX variant
QEIKRINKIRRRLVKDSNTKKAGKTGPMKTLLVRVMTPDLRERLENLRKKPENIPQPISNTSRANLNKLLTDYTEMKKAILHVYWEEFQKDPVGLMSRVAQPASKKIDQNKLKPEMDEKGNLTTAGFACSQCGQPLFVYKLEQVSEKGKAYTNYFGRCNVAEHEKLILLAQLKPEKDSDEAVTYSLGKFGQRALDFYSIHVTKESTHPVKPLAQIAGNRYASSVPVGKALSDACMGTIASFLSKYQDIIIEHQKVVKGNQKRLESLRELAGKENLEYPSVTLPPQPHTKEGVDAYNEVIARVRMWVNLNLWQKLKLSRDDAKPLLRLKGFPSFPLVERQANEVDWWDMVCNVKKLINEKKEDGKVFWQNLAGYKRQEALRPYLSSEEDRKKGKKFARYQLGDLLLHLEKKHGEDWGKVYDEAWERIDKKVEGLSKHIKLEEERRSEDAQSKAALTDWLRAKASFVIEGLKEADKDEFCRCELKLQKWYGDLRGKPFAIEAENSILDISGFSKQYNCAFIWQKDGVKKLNLYLIINYFKGGKLRFKKIKPEAFEANRFYTVINKKSGEIVPMEVNFNFDDPNLIILPLAFGKRQGREFIWNDLLSLETGSLKLANGRVIEKTLYNRRTRQDEPALFVALTFERREVLDSSNIKPMNLIGVDRGENIPAVIALTDPEGCPLSRFKDSLGNPTHILRIGESYKEKQRTIQAKKEVEQRRAGGYSRKYASKAKNLADDMVRNTARDLLYYAVTQDAMLIFENLSRGFGRQGKRTFMAERQYTRMEDWLTAKLAYEGLPSKTYLSKTLAQYTSKTCSNCGFTITSADYDRVLEKLKKTATGWMTTINGKELKVEGQITYYNRYKRQNVVKDLSVELDRLSEESVNNDISSWTKGRSGEALSLLKKRFSHRPVQEKFVCLNCEFETHADEQAALNIARSWLFLRSQEYKKYQTNKTTGNTDKRAFVETWQSFYRKKLKEVWKPAV

SEQ ID NO: 30739 - protein, 978 aa, synthetic construct
  REGION 1..978: note = engineered CasX variant
QEIKRINKIRRRLVKDSNTKKAGKTGPMKTLLVRVMTPDLRERLENLRKKPENIPQPISNTSRANLNKLLTDYTEMKKAILHVYWEEFQKDPVGLMSRVAQPASKKIDQNKLKPEMDEKGNLTTAGFACSQCGQPLFVYKLEQVSEKGKAYTNYFGRCNVAEHEKLIKLAQLKPEKDSDEAVTYSLGKFGQRALDFYSIHVTKESTHPVKPLAQIAGNRYASSPVGKALSDACMGTIASFLSKYQDIIIEHQKVVKGNQKRLESLRELAGKENLEYPSVTLPPQPHTKEGVDAYNEVIARVRMWVNLNLWQKLKLSRDDAKPLLRLKGFPSFPLVERQANEVDWWDMVCNVKKLINEKKEDGKVFWQNLAGYKRQEALRPYLSSEEDRKKGKKFARYQLGDLLLHLEKKHGEDWGKVYDEAWERIDKKVEGLSKHIKLEEERRSEDAQSKAALTDWLRAKASFVIEGLKEADKDEFCRCELKLQKWYGDLRGKPFAIEAENSILDISGFSKQYNCAFIWQKDGVKKLNLYLIINYFKGGKLRFKKIKPEAFEANRFYTVINKKSGEIVPMEVNFNFDDPNLIILPLAFGKRQGREFIWNDLLSLETGSLKLANGRVIEKTLYNRRTRQDEPALFVALTFERREVLDSSNIKPMNLIGVDRGENIPAVIALTDPEGCPLSRFKDSLGNPTHILRIGESYKEKQRTIQAKKEVEQRRAGGYSRKYASKAKNLADDMVRNTARDLLYYAVTQDAMLIFENLSRGFGRQGKRTFMAERQYTRMEDWLTAKLAYEGLPSKTYLSKTLAQYTSKTCSNCGFTITSADYDRVLEKLKKTATGWMTTINGKELKVEGQITYYNRYKRQNVVKDLSVELDRLSEESVNNDISSWTKGRSGEALSLLKKRFSHRPVQEKFVCLNCEFETHADEQAALNIARSWLFLRSQEYKKYQTNKTTGNTDKRAFVETWQSFYRKKLKEVWKPAV

SEQ ID NO: 30740 - protein, 980 aa, synthetic construct
  REGION 1..980: note = engineered CasX variant
QEIKRINKIRRRLVKDSNTKKAGKTGPMKTLLVRVMTPDLRERLENLRKKPENIPQPISNTSRANLNKLLTDYTEMKKAILHVYWEEFQKDPVGLMSRVAQPASKKIDQNKLKPEMDEKGNLTTAGFACSQCGQPLFVYKLEQVSEKGKAYTNYFGRCNVAEHEKLILLAQLKPEKDSDEAVTYSLGKFGQRALDFYSIHVTKESTHPVKPLAQIAGNRYASSYPVGKALSDACMGTIASFLSKYQDIIIEHQKVVKGNQKRLESLRELAGKENLEYPSVTLPPQPHTKEGVDAYNEVIARVRMWVNLNLWQKLKLSRDDAKPLLRLKGFPSFPLVERQANEVDWWDMVCNVKKLINEKKEDGKVFWQNLAGYKRQEALRPYLSSEEDRKKGKKFARYQLGDLLLHLEKKHGEDWGKVYDEAWERIDKKVEGLSKHIKLEEERRSEDAQSKAALTDWLRAKASFVIEGLKEADKDEFCRCELKLQKWYGDLRGKPFAIEAENSILDISGFSKQYNCAFIWQKDGVKKLNLYLIINYFKGGKLRFKKIKPEAFEANRFYTVINKKSGEIVPMEVNFNFDDPNLIILPLAFGKRQGREFIWNDLLSLETGSLKLANGRVIEKTLYNRRTRQDEPALFVALTFERREVLDSSNIKPMNLIGVDRGENIPAVIALTDPEGCPLSRFKDSLGNPTHILRIGESYKEKQRTIQAKKEVEQRRAGGYSRKYASKAKNLADDMVRNTARDLLYYAVTQDAMLIFENLSRGFGRQGKRTFMAERQYTRMEDWLTAKLAYEGLPSKTYLSKTLAQYTSKTCSNCGFTITSADYDRVLEKLKKTATGWMTTINGKELKVEGQITYYNRYKRQNVVKDLSVELDRLSEESVNNDISSWTKGRSGEALSLLKKRFSHRPVQEKFVCLNCGFETHADEQAALNIARSWLFLRSQEYKKYQTNKTSTGNTDKRAFVETWQSFYRKKLKEVWKPAV

SEQ ID NO: 30741 - protein, 980 aa, synthetic construct
  REGION 1..980: note = engineered CasX variant
QEIKRINKIRRRLVKDSNTKKAGKTGPMKTLLVRVMTPDLRERLENLRKKPENIPQPISNTSRANLNKLLTDYTEMKKAILHVYWEEFQKDPVGLMSRVAQPASKKIDQNKLKPEMDEKGNLTTAGFACSQCGQPLFVYKLEQVSEKGKAYTNYFGRCNVAEHEKLILLAQLKPEKDSDEAVTYSLGKFGQRALDFYSIHVTKESTHPVKPLAQIAGNRYASSHPVGKALSDACMGTIASFLSKYQDIIIEHQKVVKGNQKRLESLRELAGKENLEYPSVTLPPQPHTKEGVDAYNEVIARVRMWVNLNLWQKLKLSRDDAKPLLRLKGFPSFPLVERQANEVDWWDMVCNVKKLINEKKEDGKVFWQNLAGYKRQEALRPYLSSEEDRKKGKKFARYQLGDLLLHLEKKHGEDWGKVYDEAWERIDKKVEGLSKHIKLEEERRSEDAQSKAALTDWLRAKASFVIEGLKEADKDEFCRCELKLQKWYGDLRGKPFAIEAENSILDISGFSKQYNCAFIWQKDGVKKLNLYLIINYFKGGKLRFKKIKPEAFEANRFYTVINKKSGEIVPMEVNFNFDDPNLIILPLAFGKRQGREFIWNDLLSLETGSLKLANGRVIEKTLYNRRTRQDEPALFVALTFERREVLDSSNIKPMNLIGVDRGENIPAVIALTDPEGCPLSRFKDSLGNPTHILRIGESYKEKQRTIQAKKEVEQRRAGGYSRKYASKAKNLADDMVRNTARDLLYYAVTQDAMLIFENLSRGFGRQGKRTFMAERQYTRMEDWLTAKLAYEGLPSKTYLSKTLAQYTSKTCSNCGFTITSADYDRVLEKLKKTATGWMTTINGKELKVEGQITYYNRYKRQNVVKDLSVELDRLSEESVNNDISSWTKGRSGEALSLLKKRFSHRPVQEKFVCLNCGFETHADEQAALNIARSWLFLRSQEYKKYQTNKTSTGNTDKRAFVETWQSFYRKKLKEVWKPAV

SEQ ID NO: 30742 - protein, 980 aa, synthetic construct
  REGION 1..980: note = engineered CasX variant
QEIKRINKIRRRLVKDSNTKKAGKTGPMKTLLVRVMTPDLRERLENLRKKPENIPQPISNTSRANLNKLLTDYTEMKKAILHVYWEEFQKDPVGLMSRVAQPASKKIDQNKLKPEMDEKGNLTTAGFACSQCGQPLFVYKLEQVSEKGKAYTNYFGRCNVAEHEKLILLAQLKPEKDSDEAVTYSLGKFGQRALDFYSIHVTKESTHPVKPLAQIAGNRYASSSPVGKALSDACMGTIASFLSKYQDIIIEHQKVVKGNQKRLESLRELAGKENLEYPSVTLPPQPHTKEGVDAYNEVIARVRMWVNLNLWQKLKLSRDDAKPLLRLKGFPSFPLVERQANEVDWWDMVCNVKKLINEKKEDGKVFWQNLAGYKRQEALRPYLSSEEDRKKGKKFARYQLGDLLLHLEKKHGEDWGKVYDEAWERIDKKVEGLSKHIKLEEERRSEDAQSKAALTDWLRAKASFVIEGLKEADKDEFCRCELKLQKWYGDLRGKPFAIEAENSILDISGFSKQYNCAFIWQKDGVKKLNLYLIINYFKGGKLRFKKIKPEAFEANRFYTVINKKSGEIVPMEVNFNFDDPNLIILPLAFGKRQGREFIWNDLLSLETGSLKLANGRVIEKTLYNRRTRQDEPALFVALTFERREVLDSSNIKPMNLIGVDRGENIPAVIALTDPEGCPLSRFKDSLGNPTHILRIGESYKEKQRTIQAKKEVEQRRAGGYSRKYASKAKNLADDMVRNTARDLLYYAVTQDAMLIFENLSRGFGRQGKRTFMAERQYTRMEDWLTAKLAYEGLPSKTYLSKTLAQYTSKTCSNCGFTITSADYDRVLEKLKKTATGWMTTINGKELKVEGQITYYNRYKRQNVVKDLSVELDRLSEESVNNDISSWTKGRSGEALSLLKKRFSHRPVQEKFVCLNCGFETHADEQAALNIARSWLFLRSQEYKKYQTNKTSTGNTDKRAFVETWQSFYRKKLKEVWKPAV

SEQ ID NO: 30743 - protein, 980 aa, synthetic construct
  REGION 1..980: note = engineered CasX variant
QEIKRINKIRRRLVKDSNTKKAGKTGPMKTLLVRVMTPDLRERLENLRKKPENIPQPISNTSRANLNKLLTDYTEMKKAILHVYWEEFQKDPVGLMSRVAQPASKKIDQNKLKPEMDEKGNLTTAGFACSQCGQPLFVYKLEQVSEKGKAYTNYFGRCNVAEHEKLILLAQLKPEKDSDEAVTYSLGKFGQRALDFYSIHVTKESTHPVKPLAQIAGNRYASSTPVGKALSDACMGTIASFLSKYQDIIIEHQKVVKGNQKRLESLRELAGKENLEYPSVTLPPQPHTKEGVDAYNEVIARVRMWVNLNLWQKLKLSRDDAKPLLRLKGFPSFPLVERQANEVDWWDMVCNVKKLINEKKEDGKVFWQNLAGYKRQEALRPYLSSEEDRKKGKKFARYQLGDLLLHLEKKHGEDWGKVYDEAWERIDKKVEGLSKHIKLEEERRSEDAQSKAALTDWLRAKASFVIEGLKEADKDEFCRCELKLQKWYGDLRGKPFAIEAENSILDISGFSKQYNCAFIWQKDGVKKLNLYLIINYFKGGKLRFKKIKPEAFEANRFYTVINKKSGEIVPMEVNFNFDDPNLIILPLAFGKRQGREFIWNDLLSLETGSLKLANGRVIEKTLYNRRTRQDEPALFVALTFERREVLDSSNIKPMNLIGVDRGENIPAVIALTDPEGCPLSRFKDSLGNPTHILRIGESYKEKQRTIQAKKEVEQRRAGGYSRKYASKAKNLADDMVRNTARDLLYYAVTQDAMLIFENLSRGFGRQGKRTFMAERQYTRMEDWLTAKLAYEGLPSKTYLSKTLAQYTSKTCSNCGFTITSADYDRVLEKLKKTATGWMTTINGKELKVEGQITYYNRYKRQNVVKDLSVELDRLSEESVNNDISSWTKGRSGEALSLLKKRFSHRPVQEKFVCLNCGFETHADEQAALNIARSWLFLRSQEYKKYQTNKTSTGNTDKRAFVETWQSFYRKKLKEVWKPAV

SEQ ID NO: 30744 - protein, 980 aa, synthetic construct
  REGION 1..980: note = engineered CasX variant
QEIKRINKIRRRLVKDSNTKKAGKTGPMKTLLVRVMTPDLRERLENLRKKPENIPQPISNTSRANLNKLLTDYTEMKKAILHVYWEEFQKDPVGLMSRVAQPASKKIDQNKLKPEMDEKGNLTTAGFACSQCGQPLFVYKLEQVSEKGKAYTNYFGRCNVAEHEKLILLAQLKPEKDSDEAVTYSLGKFGQRALDFYSIHVTKESTHPVKPLAQIAGNRYASSAPVGKALSDACMGTIASFLSKYQDIIIEHQKVVKGNQKRLESLRELAGKENLEYPSVTLPPQPHTKEGVDAYNEVIARVRMWVNLNLWQKLKLSRDDAKPLLRLKGFPSFPLVERQANEVDWWDMVCNVKKLINEKKEDGKVFWQNLAGYKRQEALRPYLSSEEDRKKGKKFARYQLGDLLLHLEKKHGEDWGKVYDEAWERIDKKVEGLSKHIKLEEERRSEDAQSKAALTDWLRAKASFVIEGLKEADKDEFCRCELKLQKWYGDLRGKPFAIEAENSILDISGFSKQYNCAFIWQKDGVKKLNLYLIINYFKGGKLRFKKIKPEAFEANRFYTVINKKSGEIVPMEVNFNFDDPNLIILPLAFGKRQGREFIWNDLLSLETGSLKLANGRVIEKTLYNRRTRQDEPALFVALTFERREVLDSSNIKPMNLIGVDRGENIPAVIALTDPEGCPLSRFKDSLGNPTHILRIGESYKEKQRTIQAKKEVEQRRAGGYSRKYASKAKNLADDMVRNTARDLLYYAVTQDAMLIFENLSRGFGRQGKRTFMAERQYTRMEDWLTAKLAYEGLPSKTYLSKTLAQYTSKTCSNCGFTITSADYDRVLEKLKKTATGWMTTINGKELKVEGQITYYNRYKRQNVVKDLSVELDRLSEESVNNDISSWTKGRSGEALSLLKKRFSHRPVQEKFVCLNCGFETHADEQAALNIARSWLFLRSQEYKKYQTNKTSTGNTDKRAFVETWQSFYRKKLKEVWKPAV

SEQ ID NO: 30745 - protein, 980 aa, synthetic construct
  REGION 1..980: note = engineered CasX variant
QEIKRINKIRRRLVKDSNTKKAGKTGPMKTLLVRVMTPDLRERLENLRKKPENIPQPISNTSRANLNKLLTDYTEMKKAILHVYWEEFQKDPVGLMSRVAQPASKKIDQNKLKPEMDEKGNLTTAGFACSQCGQPLFVYKLEQVSEKGKAYTNYFGRCNVAEHEKLILLAQLKPEKDSDEAVTYSLGKFGQRALDFYSIHVTKESTHPVKPLAQIAGNRYASSVPVGKALSDACMGTIASFLSKYQDIIIEHQKVVKGNQKRLESLRELAGKENLEYPSVTLPPQPHTKEGVDAYNEVIARVRMWVNLNLWQKLKLSRDDAKPLLRLKGFPSFPLVERQANEVDWWDMVCNVKKLINEKKEDGKVFWQNLAGYKRQEALRPYLSSEEDRKKGKKFARYQLGDLLLHLEKKHGEDWGKVYDEAWERIDKKVEGLSKHIKLEEERRSEDAQSKAALTDWLRAKASFVIEGLKEADKDEFCRCELKLQKWYGDLRGKPFAIEAENSILDISGFSKQYNCAFIWQKDGVKKLNLYLIINYFKGGKLRFKKIKPEAFEANRFYTVINKKSGEIVPMEVNFNFDDPNLIILPLAFGKRQGREFIWNDLLSLETGSLKLANGRVIEKTLYNRRTRQDEPALFVALTFERREVLDSSNIKPMNLIGVDRGENIPAVIALTDPEGCPLSRFKDSLGNPTHILRIGESYKEKQRTIQAKKEVEQRRAGGYSRKYASKAKNLADDMVRNTARDLLYYAVTQDAMLIFENLSRGFGRQGKRTFMAERQYTRMEDWLTAKLAYEGLPSKTYLSKTLAQYTSKTCSNCGFTITSADYDRVLEKLKKTATGWMTTINGKELKVEGQITYYNRYKRQNVVKDLSVELDRLSEESVNNDISSWTKGRSGEALSLLKKRFSHRPVQEKFVCLNCGFETHADEQAALNIARSWLFLRSQEYKKYQTNKTSTGNTDKRAFVETWQSFYRKKLKEVWKPAV

SEQ ID NO: 30746 - protein, 979 aa, synthetic construct
  REGION 1..979: note = engineered CasX variant
QEIKRINKIRRRLVKDSNTKKAGKTGPMKTLLVRVMTPDLRERLENLRKKPENIPQPISNTSRANLNKLLTDYTEMKKAILHVYWEEFQKDPVGLMSRVAQPASKKIDQNKLKPEMDEKGNLTTAGFACSQCGQPLFVYKLEQVSEKGKAYTNYFGRCNVAEHEKLIKLAQLKPEKDSDEAVTYSLGKFGQRALDFYSIHVTKESTHPVKPLAQIAGNRYASSPVGKALSDACMGTIASFLSKYQDIIIEHQKVVKGNQKRLESLRELAGKENLEYPSVTLPPQPHTKEGVDAYNEVIARVRMWVNLNLWQKLKLSRDDAKPLLRLKGFPSFPLVERQANEVDWWDMVCNVKKLINEKKEDGKVFWQNLAGYKRQEALRPYLSSEEDRKKGKKFARYQLGDLLLHLEKKHGEDWGKVYDEAWERIDKKVEGLSKHIKLEEERRSEDAQSKAALTDWLRAKASFVIEGLKEADKDEFCRCELKLQKWYGDLRGKPFAIEAENSILDISGFSKQYNCAFIWQKDGVKKLNLYLIINYFKGGKLRFKKIKPEAFEANRFYTVINKKSGEIVPMEVNFNFDDPNLIILPLAFGKRQGREFIWNDLLSLETGSLKLANGRVIEKTLYNRRTRQDEPALFVALTFERREVLDSSNIKPMNLIGVDRGENIPAVIALTDPEGCPLSRFKDSLGNPTHILRIGESYKEKQRTIQAKKEVEQRRAGGYSRKYASKAKNLADDMVRNTARDLLYYAVTQDAMLIFENLSRGFGRQGKRTFMAERQYTRMEDWLTAKLAYEGLPSKTYLSKTLAQYTSKTCSNCGFTITSADYDRVLEKLKKTATGWMTTINGKELKVEGQITYYNRYKRQNVVKDLSVELDRLSEESVNNDISSWTKGRSGEALSLLKKRFSHRPVQEKFVCLNCGFETHADEQAALNIARSWLFLRSQEYKKYQTNKTSTGNTDKRAFVETWQSFYRKKLKEVWKPAV

SEQ ID NO: 30747 - protein, 980 aa, synthetic construct
  REGION 1..980: note = engineered CasX variant
QEIKRINKIRRRLVKDSNTKKAGKTGPMKTLLVRVMTPDLRERLENLRKKPENIPQPISNTSRANLNKLLTDYTEMKKAILHVYWEEFQKDPVGLMSRVAQPASKKIDQNKLKPEMDEKGNLTTAGFACSQCGQPLFVYKLEQVSEKGKAYTNYFGRCNVAEHEKLILLAQLKPEKDSDEAVTYSLGKFGQRALDFYSIHVTKESTHPVKPLAQIAGNRYASSYPVGKALSDACMGTIASFLSKYQDIIIEHQKVVKGNQKRLESLRELAGKENLEYPSVTLPPQPHTKEGVDAYNEVIARVRMWVNLNLWQKLKLSRDDAKPLLRLKGFPSFPLVERQANEVDWWDMVCNVKKLINEKKEDGKVFWQNLAGYKRQEALRPYLSSEEDRKKGKKFARYQLGDLLLHLEKKHGEDWGKVYDEAWERIDKKVEGLSKHIKLEEERRSEDAQSKAALTDWLRAKASFVIEGLKEADKDEFCRCELKLQKWYGDLRGKPFAIEAENSILDISGFSKQYNCAFIWQKDGVKKLNLYLIINYFKGGKLRFKKIKPEAFEANRFYTVINKKSGEIVPMEVNFNFDDPNLIILPLAFGKRQGREFIWNDLLSLETGSLKLANGRVIEKTLYNRRTRQDEPALFVALTFERREVLDSSNIKPMNLIGVDRGENIPAVIALTDPEGCPLSRFKDSLGNPTHILRIGESYKEKQRTIQAKKEVEQRRAGGYSRKYASKAKNLADDMVRNTARDLLYYAVTQDAMLIFENLSRGFGRQGKRTFMAERQYTRMEDWLTAKLAYEGLPSKTYLSKTLAQYTSKTCSNCGFTITSADYDRVLEKLKKTATGWMTTINGKELKVEGQITYYNRYKRQNVVKDLSVELDRLSEESVNNDISSWTKGRSGEALSLLKKRFSHRPVQEKFVCLNCGFETHADEQAALNIARSWLFLRSQEYKKYQTNKTTGKNTDKRAFVETWQSFYRKKLKEVWKPAV

SEQ ID NO: 30748 - protein, 980 aa, synthetic construct
  REGION 1..980: note = engineered CasX variant
QEIKRINKIRRRLVKDSNTKKAGKTGPMKTLLVRVMTPDLRERLENLRKKPENIPQPISNTSRANLNKLLTDYTEMKKAILHVYWEEFQKDPVGLMSRVAQPASKKIDQNKLKPEMDEKGNLTTAGFACSQCGQPLFVYKLEQVSEKGKAYTNYFGRCNVAEHEKLILLAQLKPEKDSDEAVTYSLGKFGQRALDFYSIHVTKESTHPVKPLAQIAGNRYASSHPVGKALSDACMGTIASFLSKYQDIIIEHQKVVKGNQKRLESLRELAGKENLEYPSVTLPPQPHTKEGVDAYNEVIARVRMWVNLNLWQKLKLSRDDAKPLLRLKGFPSFPLVERQANEVDWWDMVCNVKKLINEKKEDGKVFWQNLAGYKRQEALRPYLSSEEDRKKGKKFARYQLGDLLLHLEKKHGEDWGKVYDEAWERIDKKVEGLSKHIKLEEERRSEDAQSKAALTDWLRAKASFVIEGLKEADKDEFCRCELKLQKWYGDLRGKPFAIEAENSILDISGFSKQYNCAFIWQKDGVKKLNLYLIINYFKGGKLRFKKIKPEAFEANRFYTVINKKSGEIVPMEVNFNFDDPNLIILPLAFGKRQGREFIWNDLLSLETGSLKLANGRVIEKTLYNRRTRQDEPALFVALTFERREVLDSSNIKPMNLIGVDRGENIPAVIALTDPEGCPLSRFKDSLGNPTHILRIGESYKEKQRTIQAKKEVEQRRAGGYSRKYASKAKNLADDMVRNTARDLLYYAVTQDAMLIFENLSRGFGRQGKRTFMAERQYTRMEDWLTAKLAYEGLPSKTYLSKTLAQYTSKTCSNCGFTITSADYDRVLEKLKKTATGWMTTINGKELKVEGQITYYNRYKRQNVVKDLSVELDRLSEESVNNDISSWTKGRSGEALSLLKKRFSHRPVQEKFVCLNCGFETHADEQAALNIARSWLFLRSQEYKKYQTNKTTGKNTDKRAFVETWQSFYRKKLKEVWKPAV

SEQ ID NO: 30749 - protein, 980 aa, synthetic construct
  REGION 1..980: note = engineered CasX variant
QEIKRINKIRRRLVKDSNTKKAGKTGPMKTLLVRVMTPDLRERLENLRKKPENIPQPISNTSRANLNKLLTDYTEMKKAILHVYWEEFQKDPVGLMSRVAQPASKKIDQNKLKPEMDEKGNLTTAGFACSQCGQPLFVYKLEQVSEKGKAYTNYFGRCNVAEHEKLILLAQLKPEKDSDEAVTYSLGKFGQRALDFYSIHVTKESTHPVKPLAQIAGNRYASSSPVGKALSDACMGTIASFLSKYQDIIIEHQKVVKGNQKRLESLRELAGKENLEYPSVTLPPQPHTKEGVDAYNEVIARVRMWVNLNLWQKLKLSRDDAKPLLRLKGFPSFPLVERQANEVDWWDMVCNVKKLINEKKEDGKVFWQNLAGYKRQEALRPYLSSEEDRKKGKKFARYQLGDLLLHLEKKHGEDWGKVYDEAWERIDKKVEGLSKHIKLEEERRSEDAQSKAALTDWLRAKASFVIEGLKEADKDEFCRCELKLQKWYGDLRGKPFAIEAENSILDISGFSKQYNCAFIWQKDGVKKLNLYLIINYFKGGKLRFKKIKPEAFEANRFYTVINKKSGEIVPMEVNFNFDDPNLIILPLAFGKRQGREFIWNDLLSLETGSLKLANGRVIEKTLYNRRTRQDEPALFVALTFERREVLDSSNIKPMNLIGVDRGENIPAVIALTDPEGCPLSRFKDSLGNPTHILRIGESYKEKQRTIQAKKEVEQRRAGGYSRKYASKAKNLADDMVRNTARDLLYYAVTQDAMLIFENLSRGFGRQGKRTFMAERQYTRMEDWLTAKLAYEGLPSKTYLSKTLAQYTSKTCSNCGFTITSADYDRVLEKLKKTATGWMTTINGKELKVEGQITYYNRYKRQNVVKDLSVELDRLSEESVNNDISSWTKGRSGEALSLLKKRFSHRPVQEKFVCLNCGFETHADEQAALNIARSWLFLRSQEYKKYQTNKTTGKNTDKRAFVETWQSFYRKKLKEVWKPAV

SEQ ID NO: 30750 - protein, 980 aa, synthetic construct
  REGION 1..980: note = engineered CasX variant
QEIKRINKIRRRLVKDSNTKKAGKTGPMKTLLVRVMTPDLRERLENLRKKPENIPQPISNTSRANLNKLLTDYTEMKKAILHVYWEEFQKDPVGLMSRVAQPASKKIDQNKLKPEMDEKGNLTTAGFACSQCGQPLFVYKLEQVSEKGKAYTNYFGRCNVAEHEKLILLAQLKPEKDSDEAVTYSLGKFGQRALDFYSIHVTKESTHPVKPLAQIAGNRYASSTPVGKALSDACMGTIASFLSKYQDIIIEHQKVVKGNQKRLESLRELAGKENLEYPSVTLPPQPHTKEGVDAYNEVIARVRMWVNLNLWQKLKLSRDDAKPLLRLKGFPSFPLVERQANEVDWWDMVCNVKKLINEKKEDGKVFWQNLAGYKRQEALRPYLSSEEDRKKGKKFARYQLGDLLLHLEKKHGEDWGKVYDEAWERIDKKVEGLSKHIKLEEERRSEDAQSKAALTDWLRAKASFVIEGLKEADKDEFCRCELKLQKWYGDLRGKPFAIEAENSILDISGFSKQYNCAFIWQKDGVKKLNLYLIINYFKGGKLRFKKIKPEAFEANRFYTVINKKSGEIVPMEVNFNFDDPNLIILPLAFGKRQGREFIWNDLLSLETGSLKLANGRVIEKTLYNRRTRQDEPALFVALTFERREVLDSSNIKPMNLIGVDRGENIPAVIALTDPEGCPLSRFKDSLGNPTHILRIGESYKEKQRTIQAKKEVEQRRAGGYSRKYASKAKNLADDMVRNTARDLLYYAVTQDAMLIFENLSRGFGRQGKRTFMAERQYTRMEDWLTAKLAYEGLPSKTYLSKTLAQYTSKTCSNCGFTITSADYDRVLEKLKKTATGWMTTINGKELKVEGQITYYNRYKRQNVVKDLSVELDRLSEESVNNDISSWTKGRSGEALSLLKKRFSHRPVQEKFVCLNCGFETHADEQAALNIARSWLFLRSQEYKKYQTNKTTGKNTDKRAFVETWQSFYRKKLKEVWKPAV

SEQ ID NO: 30751 - protein, 980 aa, synthetic construct
  REGION 1..980: note = engineered CasX variant
QEIKRINKIRRRLVKDSNTKKAGKTGPMKTLLVRVMTPDLRERLENLRKKPENIPQPISNTSRANLNKLLTDYTEMKKAILHVYWEEFQKDPVGLMSRVAQPASKKIDQNKLKPEMDEKGNLTTAGFACSQCGQPLFVYKLEQVSEKGKAYTNYFGRCNVAEHEKLILLAQLKPEKDSDEAVTYSLGKFGQRALDFYSIHVTKESTHPVKPLAQIAGNRYASSAPVGKALSDACMGTIASFLSKYQDIIIEHQKVVKGNQKRLESLRELAGKENLEYPSVTLPPQPHTKEGVDAYNEVIARVRMWVNLNLWQKLKLSRDDAKPLLRLKGFPSFPLVERQANEVDWWDMVCNVKKLINEKKEDGKVFWQNLAGYKRQEALRPYLSSEEDRKKGKKFARYQLGDLLLHLEKKHGEDWGKVYDEAWERIDKKVEGLSKHIKLEEERRSEDAQSKAALTDWLRAKASFVIEGLKEADKDEFCRCELKLQKWYGDLRGKPFAIEAENSILDISGFSKQYNCAFIWQKDGVKKLNLYLIINYFKGGKLRFKKIKPEAFEANRFYTVINKKSGEIVPMEVNFNFDDPNLIILPLAFGKRQGREFIWNDLLSLETGSLKLANGRVIEKTLYNRRTRQDEPALFVALTFERREVLDSSNIKPMNLIGVDRGENIPAVIALTDPEGCPLSRFKDSLGNPTHILRIGESYKEKQRTIQAKKEVEQRRAGGYSRKYASKAKNLADDMVRNTARDLLYYAVTQDAMLIFENLSRGFGRQGKRTFMAERQYTRMEDWLTAKLAYEGLPSKTYLSKTLAQYTSKTCSNCGFTITSADYDRVLEKLKKTATGWMTTINGKELKVEGQITYYNRYKRQNVVKDLSVELDRLSEESVNNDISSWTKGRSGEALSLLKKRFSHRPVQEKFVCLNCGFETHADEQAALNIARSWLFLRSQEYKKYQTNKTTGKNTDKRAFVETWQSFYRKKLKEVWKPAV

SEQ ID NO: 30752 - protein, 980 aa, synthetic construct
  REGION 1..980: note = engineered CasX variant
QEIKRINKIRRRLVKDSNTKKAGKTGPMKTLLVRVMTPDLRERLENLRKKPENIPQPISNTSRANLNKLLTDYTEMKKAILHVYWEEFQKDPVGLMSRVAQPASKKIDQNKLKPEMDEKGNLTTAGFACSQCGQPLFVYKLEQVSEKGKAYTNYFGRCNVAEHEKLILLAQLKPEKDSDEAVTYSLGKFGQRALDFYSIHVTKESTHPVKPLAQIAGNRYASSVPVGKALSDACMGTIASFLSKYQDIIIEHQKVVKGNQKRLESLRELAGKENLEYPSVTLPPQPHTKEGVDAYNEVIARVRMWVNLNLWQKLKLSRDDAKPLLRLKGFPSFPLVERQANEVDWWDMVCNVKKLINEKKEDGKVFWQNLAGYKRQEALRPYLSSEEDRKKGKKFARYQLGDLLLHLEKKHGEDWGKVYDEAWERIDKKVEGLSKHIKLEEERRSEDAQSKAALTDWLRAKASFVIEGLKEADKDEFCRCELKLQKWYGDLRGKPFAIEAENSILDISGFSKQYNCAFIWQKDGVKKLNLYLIINYFKGGKLRFKKIKPEAFEANRFYTVINKKSGEIVPMEVNFNFDDPNLIILPLAFGKRQGREFIWNDLLSLETGSLKLANGRVIEKTLYNRRTRQDEPALFVALTFERREVLDSSNIKPMNLIGVDRGENIPAVIALTDPEGCPLSRFKDSLGNPTHILRIGESYKEKQRTIQAKKEVEQRRAGGYSRKYASKAKNLADDMVRNTARDLLYYAVTQDAMLIFENLSRGFGRQGKRTFMAERQYTRMEDWLTAKLAYEGLPSKTYLSKTLAQYTSKTCSNCGFTITSADYDRVLEKLKKTATGWMTTINGKELKVEGQITYYNRYKRQNVVKDLSVELDRLSEESVNNDISSWTKGRSGEALSLLKKRFSHRPVQEKFVCLNCGFETHADEQAALNIARSWLFLRSQEYKKYQTNKTTGKNTDKRAFVETWQSFYRKKLKEVWKPAV

SEQ ID NO: 30753 - protein, 979 aa, synthetic construct
  REGION 1..979: note = engineered CasX variant
QEIKRINKIRRRLVKDSNTKKAGKTGPMKTLLVRVMTPDLRERLENLRKKPENIPQPISNTSRANLNKLLTDYTEMKKAILHVYWEEFQKDPVGLMSRVAQPASKKIDQNKLKPEMDEKGNLTTAGFACSQCGQPLFVYKLEQVSEKGKAYTNYFGRCNVAEHEKLIKLAQLKPEKDSDEAVTYSLGKFGQRALDFYSIHVTKESTHPVKPLAQIAGNRYASSPVGKALSDACMGTIASFLSKYQDIIIEHQKVVKGNQKRLESLRELAGKENLEYPSVTLPPQPHTKEGVDAYNEVIARVRMWVNLNLWQKLKLSRDDAKPLLRLKGFPSFPLVERQANEVDWWDMVCNVKKLINEKKEDGKVFWQNLAGYKRQEALRPYLSSEEDRKKGKKFARYQLGDLLLHLEKKHGEDWGKVYDEAWERIDKKVEGLSKHIKLEEERRSEDAQSKAALTDWLRAKASFVIEGLKEADKDEFCRCELKLQKWYGDLRGKPFAIEAENSILDISGFSKQYNCAFIWQKDGVKKLNLYLIINYFKGGKLRFKKIKPEAFEANRFYTVINKKSGEIVPMEVNFNFDDPNLIILPLAFGKRQGREFIWNDLLSLETGSLKLANGRVIEKTLYNRRTRQDEPALFVALTFERREVLDSSNIKPMNLIGVDRGENIPAVIALTDPEGCPLSRFKDSLGNPTHILRIGESYKEKQRTIQAKKEVEQRRAGGYSRKYASKAKNLADDMVRNTARDLLYYAVTQDAMLIFENLSRGFGRQGKRTFMAERQYTRMEDWLTAKLAYEGLPSKTYLSKTLAQYTSKTCSNCGFTITSADYDRVLEKLKKTATGWMTTINGKELKVEGQITYYNRYKRQNVVKDLSVELDRLSEESVNNDISSWTKGRSGEALSLLKKRFSHRPVQEKFVCLNCGFETHADEQAALNIARSWLFLRSQEYKKYQTNKTTGKNTDKRAFVETWQSFYRKKLKEVWKPAV

SEQ ID NO: 30754 - protein, 979 aa, synthetic construct
  REGION 1..979: note = engineered CasX variant
QEIKRINKIRRRLVKDSNTKKAGKTGPMKTLLVRVMTPDLRERLENLRKKPENIPQPISNTSRANLNKLLTDYTEMKKAILHVYWEEFQKDPVGLMSRVAQPASKKIDQNKLKPEMDEKGNLTTAGFACSQCGQPLFVYKLEQVSEKGKAYTNYFGRCNVAEHEKLILLAQLKPEKDSDEAVTYSLGKFGQRALDFYSIHVTKESTHPVKPLAQIAGNRYASSYPVGKALSDACMGTIASFLSKYQDIIIEHQKVVKGNQKRLESLRELAGKENLEYPSVTLPPQPHTKEGVDAYNEVIARVRMWVNLNLWQKLKLSRDDAKPLLRLKKFPSFPLVERQANEVDWWDMVCNVKKLINEKKEDGKVFWQNLAGYKRQEALRPYLSSEEDRKKGKKFARYQLGDLLLHLEKKHGEDWGKVYDEAWERIDKKVEGLSKHIKLEEERRSEDAQSKAALTDWLRAKASFVIEGLKEADKDEFCRCELKLQKWYGDLRGKPFAIEAENSILDISGFSKQYNCAFIWQKDGVKKLNLYLIINYFKGGKLRFKKIKPEAFEANRFYTVINKKSGEIVPMEVNFNFDDPNLIILPLAFGKRQGREFIWNDLLSLETGSLKLANGRVIEKTLYNRRTRQDEPALFVALTFERREVLDSSNIKPMNLIGVDRGENIPAVIALTDPEGCPLSRFKDSLGNPTHILRIGESYKEKQRTIQAKKEVEQRRAGGYSRKYASKAKNLADDMVRNTARDLLYYAVTQDAMLIFENLSRGFGRQGKRTFMAERQYTRMEDWLTAKLAYEGLPSKTYLSKTLAQYTSKTCSNCGFTITSADYDRVLEKLKKTATGWMTTINGKELKVEGQITYYNRYKRQNVVKDLSVELDRLSEESVNNDISSWTKGRSGEALSLLKKRFSHRPVQEKFVCLNCGFETHADEQAALNIARSWLFLRSQEYKKYQTNKTTGNTDKRAFVETWQSFYRKKLKEVWKPAV

SEQ ID NO: 30755 - protein, 979 aa, synthetic construct
  REGION 1..979: note = engineered CasX variant
QEIKRINKIRRRLVKDSNTKKAGKTGPMKTLLVRVMTPDLRERLENLRKKPENIPQPISNTSRANLNKLLTDYTEMKKAILHVYWEEFQKDPVGLMSRVAQPASKKIDQNKLKPEMDEKGNLTTAGFACSQCGQPLFVYKLEQVSEKGKAYTNYFGRCNVAEHEKLILLAQLKPEKDSDEAVTYSLGKFGQRALDFYSIHVTKESTHPVKPLAQIAGNRYASSHPVGKALSDACMGTIASFLSKYQDIIIEHQKVVKGNQKRLESLRELAGKENLEYPSVTLPPQPHTKEGVDAYNEVIARVRMWVNLNLWQKLKLSRDDAKPLLRLKKFPSFPLVERQANEVDWWDMVCNVKKLINEKKEDGKVFWQNLAGYKRQEALRPYLSSEEDRKKGKKFARYQLGDLLLHLEKKHGEDWGKVYDEAWERIDKKVEGLSKHIKLEEERRSEDAQSKAALTDWLRAKASFVIEGLKEADKDEFCRCELKLQKWYGDLRGKPFAIEAENSILDISGFSKQYNCAFIWQKDGVKKLNLYLIINYFKGGKLRFKKIKPEAFEANRFYTVINKKSGEIVPMEVNFNFDDPNLIILPLAFGKRQGREFIWNDLLSLETGSLKLANGRVIEKTLYNRRTRQDEPALFVALTFERREVLDSSNIKPMNLIGVDRGENIPAVIALTDPEGCPLSRFKDSLGNPTHILRIGESYKEKQRTIQAKKEVEQRRAGGYSRKYASKAKNLADDMVRNTARDLLYYAVTQDAMLIFENLSRGFGRQGKRTFMAERQYTRMEDWLTAKLAYEGLPSKTYLSKTLAQYTSKTCSNCGFTITSADYDRVLEKLKKTATGWMTTINGKELKVEGQITYYNRYKRQNVVKDLSVELDRLSEESVNNDISSWTKGRSGEALSLLKKRFSHRPVQEKFVCLNCGFETHADEQAALNIARSWLFLRSQEYKKYQTNKTTGNTDKRAFVETWQSFYRKKLKEVWKPAV

SEQ ID NO: 30756 - protein, 979 aa, synthetic construct
  REGION 1..979: note = engineered CasX variant
QEIKRINKIRRRLVKDSNTKKAGKTGPMKTLLVRVMTPDLRERLENLRKKPENIPQPISNTSRANLNKLLTDYTEMKKAILHVYWEEFQKDPVGLMSRVAQPASKKIDQNKLKPEMDEKGNLTTAGFACSQCGQPLFVYKLEQVSEKGKAYTNYFGRCNVAEHEKLILLAQLKPEKDSDEAVTYSLGKFGQRALDFYSIHVTKESTHPVKPLAQIAGNRYASSSPVGKALSDACMGTIASFLSKYQDIIIEHQKVVKGNQKRLESLRELAGKENLEYPSVTLPPQPHTKEGVDAYNEVIARVRMWVNLNLWQKLKLSRDDAKPLLRLKKFPSFPLVERQANEVDWWDMVCNVKKLINEKKEDGKVFWQNLAGYKRQEALRPYLSSEEDRKKGKKFARYQLGDLLLHLEKKHGEDWGKVYDEAWERIDKKVEGLSKHIKLEEERRSEDAQSKAALTDWLRAKASFVIEGLKEADKDEFCRCELKLQKWYGDLRGKPFAIEAENSILDISGFSKQYNCAFIWQKDGVKKLNLYLIINYFKGGKLRFKKIKPEAFEANRFYTVINKKSGEIVPMEVNFNFDDPNLIILPLAFGKRQGREFIWNDLLSLETGSLKLANGRVIEKTLYNRRTRQDEPALFVALTFERREVLDSSNIKPMNLIGVDRGENIPAVIALTDPEGCPLSRFKDSLGNPTHILRIGESYKEKQRTIQAKKEVEQRRAGGYSRKYASKAKNLADDMVRNTARDLLYYAVTQDAMLIFENLSRGFGRQGKRTFMAERQYTRMEDWLTAKLAYEGLPSKTYLSKTLAQYTSKTCSNCGFTITSADYDRVLEKLKKTATGWMTTINGKELKVEGQITYYNRYKRQNVVKDLSVELDRLSEESVNNDISSWTKGRSGEALSLLKKRFSHRPVQEKFVCLNCGFETHADEQAALNIARSWLFLRSQEYKKYQTNKTTGNTDKRAFVETWQSFYRKKLKEVWKPAV

SEQ ID NO: 30757 - protein, 979 aa, synthetic construct
  REGION 1..979: note = engineered CasX variant
QEIKRINKIRRRLVKDSNTKKAGKTGPMKTLLVRVMTPDLRERLENLRKKPENIPQPISNTSRANLNKLLTDYTEMKKAILHVYWEEFQKDPVGLMSRVAQPASKKIDQNKLKPEMDEKGNLTTAGFACSQCGQPLFVYKLEQVSEKGKAYTNYFGRCNVAEHEKLILLAQLKPEKDSDEAVTYSLGKFGQRALDFYSIHVTKESTHPVKPLAQIAGNRYASSTPVGKALSDACMGTIASFLSKYQDIIIEHQKVVKGNQKRLESLRELAGKENLEYPSVTLPPQPHTKEGVDAYNEVIARVRMWVNLNLWQKLKLSRDDAKPLLRLKKFPSFPLVERQANEVDWWDMVCNVKKLINEKKEDGKVFWQNLAGYKRQEALRPYLSSEEDRKKGKKFARYQLGDLLLHLEKKHGEDWGKVYDEAWERIDKKVEGLSKHIKLEEERRSEDAQSKAALTDWLRAKASFVIEGLKEADKDEFCRCELKLQKWYGDLRGKPFAIEAENSILDISGFSKQYNCAFIWQKDGVKKLNLYLIINYFKGGKLRFKKIKPEAFEANRFYTVINKKSGEIVPMEVNFNFDDPNLIILPLAFGKRQGREFIWNDLLSLETGSLKLANGRVIEKTLYNRRTRQDEPALFVALTFERREVLDSSNIKPMNLIGVDRGENIPAVIALTDPEGCPLSRFKDSLGNPTHILRIGESYKEKQRTIQAKKEVEQRRAGGYSRKYASKAKNLADDMVRNTARDLLYYAVTQDAMLIFENLSRGFGRQGKRTFMAERQYTRMEDWLTAKLAYEGLPSKTYLSKTLAQYTSKTCSNCGFTITSADYDRVLEKLKKTATGWMTTINGKELKVEGQITYYNRYKRQNVVKDLSVELDRLSEESVNNDISSWTKGRSGEALSLLKKRFSHRPVQEKFVCLNCGFETHADEQAALNIARSWLFLRSQEYKKYQTNKTTGNTDKRAFVETWQSFYRKKLKEVWKPAV

SEQ ID NO: 30758 - protein, 979 aa, synthetic construct
  REGION 1..979: note = engineered CasX variant
QEIKRINKIRRRLVKDSNTKKAGKTGPMKTLLVRVMTPDLRERLENLRKKPENIPQPISNTSRANLNKLLTDYTEMKKAILHVYWEEFQKDPVGLMSRVAQPASKKIDQNKLKPEMDEKGNLTTAGFACSQCGQPLFVYKLEQVSEKGKAYTNYFGRCNVAEHEKLILLAQLKPEKDSDEAVTYSLGKFGQRALDFYSIHVTKESTHPVKPLAQIAGNRYASSAPVGKALSDACMGTIASFLSKYQDIIIEHQKVVKGNQKRLESLRELAGKENLEYPSVTLPPQPHTKEGVDAYNEVIARVRMWVNLNLWQKLKLSRDDAKPLLRLKKFPSFPLVERQANEVDWWDMVCNVKKLINEKKEDGKVFWQNLAGYKRQEALRPYLSSEEDRKKGKKFARYQLGDLLLHLEKKHGEDWGKVYDEAWERIDKKVEGLSKHIKLEEERRSEDAQSKAALTDWLRAKASFVIEGLKEADKDEFCRCELKLQKWYGDLRGKPFAIEAENSILDISGFSKQYNCAFIWQKDGVKKLNLYLIINYFKGGKLRFKKIKPEAFEANRFYTVINKKSGEIVPMEVNFNFDDPNLIILPLAFGKRQGREFIWNDLLSLETGSLKLANGRVIEKTLYNRRTRQDEPALFVALTFERREVLDSSNIKPMNLIGVDRGENIPAVIALTDPEGCPLSRFKDSLGNPTHILRIGESYKEKQRTIQAKKEVEQRRAGGYSRKYASKAKNLADDMVRNTARDLLYYAVTQDAMLIFENLSRGFGRQGKRTFMAERQYTRMEDWLTAKLAYEGLPSKTYLSKTLAQYTSKTCSNCGFTITSADYDRVLEKLKKTATGWMTTINGKELKVEGQITYYNRYKRQNVVKDLSVELDRLSEESVNNDISSWTKGRSGEALSLLKKRFSHRPVQEKFVCLNCGFETHADEQAALNIARSWLFLRSQEYKKYQTNKTTGNTDKRAFVETWQSFYRKKLKEVWKPAV

SEQ ID NO: 30759 - protein, 979 aa, synthetic construct
  REGION 1..979: note = engineered CasX variant
QEIKRINKIRRRLVKDSNTKKAGKTGPMKTLLVRVMTPDLRERLENLRKKPENIPQPISNTSRANLNKLLTDYTEMKKAILHVYWEEFQKDPVGLMSRVAQPASKKIDQNKLKPEMDEKGNLTTAGFACSQCGQPLFVYKLEQVSEKGKAYTNYFGRCNVAEHEKLILLAQLKPEKDSDEAVTYSLGKFGQRALDFYSIHVTKESTHPVKPLAQIAGNRYASSVPVGKALSDACMGTIASFLSKYQDIIIEHQKVVKGNQKRLESLRELAGKENLEYPSVTLPPQPHTKEGVDAYNEVIARVRMWVNLNLWQKLKLSRDDAKPLLRLKKFPSFPLVERQANEVDWWDMVCNVKKLINEKKEDGKVFWQNLAGYKRQEALRPYLSSEEDRKKGKKFARYQLGDLLLHLEKKHGEDWGKVYDEAWERIDKKVEGLSKHIKLEEERRSEDAQSKAALTDWLRAKASFVIEGLKEADKDEFCRCELKLQKWYGDLRGKPFAIEAENSILDISGFSKQYNCAFIWQKDGVKKLNLYLIINYFKGGKLRFKKIKPEAFEANRFYTVINKKSGEIVPMEVNFNFDDPNLIILPLAFGKRQGREFIWNDLLSLETGSLKLANGRVIEKTLYNRRTRQDEPALFVALTFERREVLDSSNIKPMNLIGVDRGENIPAVIALTDPEGCPLSRFKDSLGNPTHILRIGESYKEKQRTIQAKKEVEQRRAGGYSRKYASKAKNLADDMVRNTARDLLYYAVTQDAMLIFENLSRGFGRQGKRTFMAERQYTRMEDWLTAKLAYEGLPSKTYLSKTLAQYTSKTCSNCGFTITSADYDRVLEKLKKTATGWMTTINGKELKVEGQITYYNRYKRQNVVKDLSVELDRLSEESVNNDISSWTKGRSGEALSLLKKRFSHRPVQEKFVCLNCGFETHADEQAALNIARSWLFLRSQEYKKYQTNKTTGNTDKRAFVETWQSFYRKKLKEVWKPAV

SEQ ID NO: 30760 - protein, 978 aa, synthetic construct
  REGION 1..978: note = engineered CasX variant
QEIKRINKIRRRLVKDSNTKKAGKTGPMKTLLVRVMTPDLRERLENLRKKPENIPQPISNTSRANLNKLLTDYTEMKKAILHVYWEEFQKDPVGLMSRVAQPASKKIDQNKLKPEMDEKGNLTTAGFACSQCGQPLFVYKLEQVSEKGKAYTNYFGRCNVAEHEKLIKLAQLKPEKDSDEAVTYSLGKFGQRALDFYSIHVTKESTHPVKPLAQIAGNRYASSPVGKALSDACMGTIASFLSKYQDIIIEHQKVVKGNQKRLESLRELAGKENLEYPSVTLPPQPHTKEGVDAYNEVIARVRMWVNLNLWQKLKLSRDDAKPLLRLKKFPSFPLVERQANEVDWWDMVCNVKKLINEKKEDGKVFWQNLAGYKRQEALRPYLSSEEDRKKGKKFARYQLGDLLLHLEKKHGEDWGKVYDEAWERIDKKVEGLSKHIKLEEERRSEDAQSKAALTDWLRAKASFVIEGLKEADKDEFCRCELKLQKWYGDLRGKPFAIEAENSILDISGFSKQYNCAFIWQKDGVKKLNLYLIINYFKGGKLRFKKIKPEAFEANRFYTVINKKSGEIVPMEVNFNFDDPNLIILPLAFGKRQGREFIWNDLLSLETGSLKLANGRVIEKTLYNRRTRQDEPALFVALTFERREVLDSSNIKPMNLIGVDRGENIPAVIALTDPEGCPLSRFKDSLGNPTHILRIGESYKEKQRTIQAKKEVEQRRAGGYSRKYASKAKNLADDMVRNTARDLLYYAVTQDAMLIFENLSRGFGRQGKRTFMAERQYTRMEDWLTAKLAYEGLPSKTYLSKTLAQYTSKTCSNCGFTITSADYDRVLEKLKKTATGWMTTINGKELKVEGQITYYNRYKRQNVVKDLSVELDRLSEESVNNDISSWTKGRSGEALSLLKKRFSHRPVQEKFVCLNCGFETHADEQAALNIARSWLFLRSQEYKKYQTNKTTGNTDKRAFVETWQSFYRKKLKEVWKPAV

SEQ ID NO: 30761 - protein, 979 aa, synthetic construct
  REGION 1..979: note = engineered CasX variant
QEIKRINKIRRRLVKDSNTKKAGKTGPMKTLLVRVMTPDLRERLENLRKKPENIPQPISNTSRANLNKLLTDYTEMKKAILHVYWEEFQKDPVGLMSRVAQPASKKIDQNKLKPEMDEKGNLTTAGFACSQCGQPLFVYKLEQVSEKGKAYTNYFGRCNVAEHEKLILLAQLKPEKDSDEAVTYSLGKFGQRALDFYSIHVTKESTHPVKPLAQIAGNRYASSYPVGKALSDACMGTIASFLSKYQDIIIEHQKVVKGNQKRLESLRELAGKENLEYPSVTLPPQPHTKEGVDAYNEVIARVRMWVNLNLWQKLKLSRDDAKPLLRLKGFPSFPLVERQANEVDWWDMVCNVKKLINEKKEDGKVFWQNLAGYKRQEALRPYLSSEEDRKKGKKFARYQLGDLLLHLEKKHGEDWGKVYDEAWERIDKKVEGLSKHIKLEEERRSEDAQSKAALTDWLRAKASFVIEGLKEADKDEFCRCELKLQKWYGDLRGKPFAIEAENSILDISGFSKQYNCAFIWQKDGVKKLNLYLIINYFKGGKLRFKKIKPEAFEANRFYTVINKKSGEIVPMEVNFNFDDPNLIILPLAFGKRQGREFIWNDLLSLETGSLKLANGRVIEKTLYNRRTRQDEPALFVALTFERREVLDSSNIKPMNLIGVDRGENIPAVIALTDPEGCPLSRFKDSLGNPTHILRIGERYKEKQRTIQAKKEVEQRRAGGYSRKYASKAKNLADDMVRNTARDLLYYAVTQDAMLIFENLSRGFGRQGKRTFMAERQYTRMEDWLTAKLAYEGLPSKTYLSKTLAQYTSKTCSNCGFTITSADYDRVLEKLKKTATGWMTTINGKELKVEGQITYYNRYKRQNVVKDLSVELDRLSEESVNNDISSWTKGRSGEALSLLKKRFSHRPVQEKFVCLNCGFETHADEQAALNIARSWLFLRSQEYKKYQTNKTTGNTDKRAFVETWQSFYRKKLKEVWKPAV

SEQ ID NO: 30762 - protein, 979 aa, synthetic construct
  REGION 1..979: note = engineered CasX variant
QEIKRINKIRRRLVKDSNTKKAGKTGPMKTLLVRVMTPDLRERLENLRKKPENIPQPISNTSRANLNKLLTDYTEMKKAILHVYWEEFQKDPVGLMSRVAQPASKKIDQNKLKPEMDEKGNLTTAGFACSQCGQPLFVYKLEQVSEKGKAYTNYFGRCNVAEHEKLILLAQLKPEKDSDEAVTYSLGKFGQRALDFYSIHVTKESTHPVKPLAQIAGNRYASSHPVGKALSDACMGTIASFLSKYQDIIIEHQKVVKGNQKRLESLRELAGKENLEYPSVTLPPQPHTKEGVDAYNEVIARVRMWVNLNLWQKLKLSRDDAKPLLRLKGFPSFPLVERQANEVDWWDMVCNVKKLINEKKEDGKVFWQNLAGYKRQEALRPYLSSEEDRKKGKKFARYQLGDLLLHLEKKHGEDWGKVYDEAWERIDKKVEGLSKHIKLEEERRSEDAQSKAALTDWLRAKASFVIEGLKEADKDEFCRCELKLQKWYGDLRGKPFAIEAENSILDISGFSKQYNCAFIWQKDGVKKLNLYLIINYFKGGKLRFKKIKPEAFEANRFYTVINKKSGEIVPMEVNFNFDDPNLIILPLAFGKRQGREFIWNDLLSLETGSLKLANGRVIEKTLYNRRTRQDEPALFVALTFERREVLDSSNIKPMNLIGVDRGENIPAVIALTDPEGCPLSRFKDSLGNPTHILRIGERYKEKQRTIQAKKEVEQRRAGGYSRKYASKAKNLADDMVRNTARDLLYYAVTQDAMLIFENLSRGFGRQGKRTFMAERQYTRMEDWLTAKLAYEGLPSKTYLSKTLAQYTSKTCSNCGFTITSADYDRVLEKLKKTATGWMTTINGKELKVEGQITYYNRYKRQNVVKDLSVELDRLSEESVNNDISSWTKGRSGEALSLLKKRFSHRPVQEKFVCLNCGFETHADEQAALNIARSWLFLRSQEYKKYQTNKTTGNTDKRAFVETWQSFYRKKLKEVWKPAV

SEQ ID NO: 30763 - protein, 979 aa, synthetic construct
  REGION 1..979: note = engineered CasX variant
QEIKRINKIRRRLVKDSNTKKAGKTGPMKTLLVRVMTPDLRERLENLRKKPENIPQPISNTSRANLNKLLTDYTEMKKAILHVYWEEFQKDPVGLMSRVAQPASKKIDQNKLKPEMDEKGNLTTAGFACSQCGQPLFVYKLEQVSEKGKAYTNYFGRCNVAEHEKLILLAQLKPEKDSDEAVTYSLGKFGQRALDFYSIHVTKESTHPVKPLAQIAGNRYASSSPVGKALSDACMGTIASFLSKYQDIIIEHQKVVKGNQKRLESLRELAGKENLEYPSVTLPPQPHTKEGVDAYNEVIARVRMWVNLNLWQKLKLSRDDAKPLLRLKGFPSFPLVERQANEVDWWDMVCNVKKLINEKKEDGKVFWQNLAGYKRQEALRPYLSSEEDRKKGKKFARYQLGDLLLHLEKKHGEDWGKVYDEAWERIDKKVEGLSKHIKLEEERRSEDAQSKAALTDWLRAKASFVIEGLKEADKDEFCRCELKLQKWYGDLRGKPFAIEAENSILDISGFSKQYNCAFIWQKDGVKKLNLYLIINYFKGGKLRFKKIKPEAFEANRFYTVINKKSGEIVPMEVNFNFDDPNLIILPLAFGKRQGREFIWNDLLSLETGSLKLANGRVIEKTLYNRRTRQDEPALFVALTFERREVLDSSNIKPMNLIGVDRGENIPAVIALTDPEGCPLSRFKDSLGNPTHILRIGERYKEKQRTIQAKKEVEQRRAGGYSRKYASKAKNLADDMVRNTARDLLYYAVTQDAMLIFENLSRGFGRQGKRTFMAERQYTRMEDWLTAKLAYEGLPSKTYLSKTLAQYTSKTCSNCGFTITSADYDRVLEKLKKTATGWMTTINGKELKVEGQITYYNRYKRQNVVKDLSVELDRLSEESVNNDISSWTKGRSGEALSLLKKRFSHRPVQEKFVCLNCGFETHADEQAALNIARSWLFLRSQEYKKYQTNKTTGNTDKRAFVETWQSFYRKKLKEVWKPAV

SEQ ID NO: 30764 - protein, 979 aa, synthetic construct
  REGION 1..979: note = engineered CasX variant
QEIKRINKIRRRLVKDSNTKKAGKTGPMKTLLVRVMTPDLRERLENLRKKPENIPQPISNTSRANLNKLLTDYTEMKKAILHVYWEEFQKDPVGLMSRVAQPASKKIDQNKLKPEMDEKGNLTTAGFACSQCGQPLFVYKLEQVSEKGKAYTNYFGRCNVAEHEKLILLAQLKPEKDSDEAVTYSLGKFGQRALDFYSIHVTKESTHPVKPLAQIAGNRYASSTPVGKALSDACMGTIASFLSKYQDIIIEHQKVVKGNQKRLESLRELAGKENLEYPSVTLPPQPHTKEGVDAYNEVIARVRMWVNLNLWQKLKLSRDDAKPLLRLKGFPSFPLVERQANEVDWWDMVCNVKKLINEKKEDGKVFWQNLAGYKRQEALRPYLSSEEDRKKGKKFARYQLGDLLLHLEKKHGEDWGKVYDEAWERIDKKVEGLSKHIKLEEERRSEDAQSKAALTDWLRAKASFVIEGLKEADKDEFCRCELKLQKWYGDLRGKPFAIEAENSILDISGFSKQYNCAFIWQKDGVKKLNLYLIINYFKGGKLRFKKIKPEAFEANRFYTVINKKSGEIVPMEVNFNFDDPNLIILPLAFGKRQGREFIWNDLLSLETGSLKLANGRVIEKTLYNRRTRQDEPALFVALTFERREVLDSSNIKPMNLIGVDRGENIPAVIALTDPEGCPLSRFKDSLGNPTHILRIGERYKEKQRTIQAKKEVEQRRAGGYSRKYASKAKNLADDMVRNTARDLLYYAVTQDAMLIFENLSRGFGRQGKRTFMAERQYTRMEDWLTAKLAYEGLPSKTYLSKTLAQYTSKTCSNCGFTITSADYDRVLEKLKKTATGWMTTINGKELKVEGQITYYNRYKRQNVVKDLSVELDRLSEESVNNDISSWTKGRSGEALSLLKKRFSHRPVQEKFVCLNCGFETHADEQAALNIARSWLFLRSQEYKKYQTNKTTGNTDKRAFVETWQSFYRKKLKEVWKPAV

SEQ ID NO: 30765 - protein, 979 aa, synthetic construct
  REGION 1..979: note = engineered CasX variant
QEIKRINKIRRRLVKDSNTKKAGKTGPMKTLLVRVMTPDLRERLENLRKKPENIPQPISNTSRANLNKLLTDYTEMKKAILHVYWEEFQKDPVGLMSRVAQPASKKIDQNKLKPEMDEKGNLTTAGFACSQCGQPLFVYKLEQVSEKGKAYTNYFGRCNVAEHEKLILLAQLKPEKDSDEAVTYSLGKFGQRALDFYSIHVTKESTHPVKPLAQIAGNRYASSAPVGKALSDACMGTIASFLSKYQDIIIEHQKVVKGNQKRLESLRELAGKENLEYPSVTLPPQPHTKEGVDAYNEVIARVRMWVNLNLWQKLKLSRDDAKPLLRLKGFPSFPLVERQANEVDWWDMVCNVKKLINEKKEDGKVFWQNLAGYKRQEALRPYLSSEEDRKKGKKFARYQLGDLLLHLEKKHGEDWGKVYDEAWERIDKKVEGLSKHIKLEEERRSEDAQSKAALTDWLRAKASFVIEGLKEADKDEFCRCELKLQKWYGDLRGKPFAIEAENSILDISGFSKQYNCAFIWQKDGVKKLNLYLIINYFKGGKLRFKKIKPEAFEANRFYTVINKKSGEIVPMEVNFNFDDPNLIILPLAFGKRQGREFIWNDLLSLETGSLKLANGRVIEKTLYNRRTRQDEPALFVALTFERREVLDSSNIKPMNLIGVDRGENIPAVIALTDPEGCPLSRFKDSLGNPTHILRIGERYKEKQRTIQAKKEVEQRRAGGYSRKYASKAKNLADDMVRNTARDLLYYAVTQDAMLIFENLSRGFGRQGKRTFMAERQYTRMEDWLTAKLAYEGLPSKTYLSKTLAQYTSKTCSNCGFTITSADYDRVLEKLKKTATGWMTTINGKELKVEGQITYYNRYKRQNVVKDLSVELDRLSEESVNNDISSWTKGRSGEALSLLKKRFSHRPVQEKFVCLNCGFETHADEQAALNIARSWLFLRSQEYKKYQTNKTTGNTDKRAFVETWQSFYRKKLKEVWKPAV

SEQ ID NO: 30766 - protein, 979 aa, synthetic construct
  REGION 1..979: note = engineered CasX variant
QEIKRINKIRRRLVKDSNTKKAGKTGPMKTLLVRVMTPDLRERLENLRKKPENIPQPISNTSRANLNKLLTDYTEMKKAILHVYWEEFQKDPVGLMSRVAQPASKKIDQNKLKPEMDEKGNLTTAGFACSQCGQPLFVYKLEQVSEKGKAYTNYFGRCNVAEHEKLILLAQLKPEKDSDEAVTYSLGKFGQRALDFYSIHVTKESTHPVKPLAQIAGNRYASSVPVGKALSDACMGTIASFLSKYQDIIIEHQKVVKGNQKRLESLRELAGKENLEYPSVTLPPQPHTKEGVDAYNEVIARVRMWVNLNLWQKLKLSRDDAKPLLRLKGFPSFPLVERQANEVDWWDMVCNVKKLINEKKEDGKVFWQNLAGYKRQEALRPYLSSEEDRKKGKKFARYQLGDLLLHLEKKHGEDWGKVYDEAWERIDKKVEGLSKHIKLEEERRSEDAQSKAALTDWLRAKASFVIEGLKEADKDEFCRCELKLQKWYGDLRGKPFAIEAENSILDISGFSKQYNCAFIWQKDGVKKLNLYLIINYFKGGKLRFKKIKPEAFEANRFYTVINKKSGEIVPMEVNFNFDDPNLIILPLAFGKRQGREFIWNDLLSLETGSLKLANGRVIEKTLYNRRTRQDEPALFVALTFERREVLDSSNIKPMNLIGVDRGENIPAVIALTDPEGCPLSRFKDSLGNPTHILRIGERYKEKQRTIQAKKEVEQRRAGGYSRKYASKAKNLADDMVRNTARDLLYYAVTQDAMLIFENLSRGFGRQGKRTFMAERQYTRMEDWLTAKLAYEGLPSKTYLSKTLAQYTSKTCSNCGFTITSADYDRVLEKLKKTATGWMTTINGKELKVEGQITYYNRYKRQNVVKDLSVELDRLSEESVNNDISSWTKGRSGEALSLLKKRFSHRPVQEKFVCLNCGFETHADEQAALNIARSWLFLRSQEYKKYQTNKTTGNTDKRAFVETWQSFYRKKLKEVWKPAV

SEQ ID NO: 30767 - protein, 978 aa, synthetic construct
  REGION 1..978: note = engineered CasX variant
QEIKRINKIRRRLVKDSNTKKAGKTGPMKTLLVRVMTPDLRERLENLRKKPENIPQPISNTSRANLNKLLTDYTEMKKAILHVYWEEFQKDPVGLMSRVAQPASKKIDQNKLKPEMDEKGNLTTAGFACSQCGQPLFVYKLEQVSEKGKAYTNYFGRCNVAEHEKLIKLAQLKPEKDSDEAVTYSLGKFGQRALDFYSIHVTKESTHPVKPLAQIAGNRYASSPVGKALSDACMGTIASFLSKYQDIIIEHQKVVKGNQKRLESLRELAGKENLEYPSVTLPPQPHTKEGVDAYNEVIARVRMWVNLNLWQKLKLSRDDAKPLLRLKGFPSFPLVERQANEVDWWDMVCNVKKLINEKKEDGKVFWQNLAGYKRQEALRPYLSSEEDRKKGKKFARYQLGDLLLHLEKKHGEDWGKVYDEAWERIDKKVEGLSKHIKLEEERRSEDAQSKAALTDWLRAKASFVIEGLKEADKDEFCRCELKLQKWYGDLRGKPFAIEAENSILDISGFSKQYNCAFIWQKDGVKKLNLYLIINYFKGGKLRFKKIKPEAFEANRFYTVINKKSGEIVPMEVNFNFDDPNLIILPLAFGKRQGREFIWNDLLSLETGSLKLANGRVIEKTLYNRRTRQDEPALFVALTFERREVLDSSNIKPMNLIGVDRGENIPAVIALTDPEGCPLSRFKDSLGNPTHILRIGERYKEKQRTIQAKKEVEQRRAGGYSRKYASKAKNLADDMVRNTARDLLYYAVTQDAMLIFENLSRGFGRQGKRTFMAERQYTRMEDWLTAKLAYEGLPSKTYLSKTLAQYTSKTCSNCGFTITSADYDRVLEKLKKTATGWMTTINGKELKVEGQITYYNRYKRQNVVKDLSVELDRLSEESVNNDISSWTKGRSGEALSLLKKRFSHRPVQEKFVCLNCGFETHADEQAALNIARSWLFLRSQEYKKYQTNKTTGNTDKRAFVETWQSFYRKKLKEVWKPAV

SEQ ID NO: 30768 - protein, 979 aa, synthetic construct
  REGION 1..979: note = engineered CasX variant
QEIKRINKIRRRLVKDSNTKKAGKTGPMKTLLVRVMTPDLRERLENLRKKPENIPQPISNTSRANLNKLLTDYTEMKKAILHVYWEEFQKDPVGLMSRVAQPASKKIDQNKLKPEMDEKGNLTTAGFACSQCGQPLFVYKLEQVSEKGKAYTNYFGRCNVAEHEKLILLAQLKPEKDSDEAVTYSLGKFGQRALDFYSIHVTKESTHPVKPLAQIAGNRYASSYPVGKALSDACMGTIASFLSKYQDIIIEHQKVVKGNQKRLESLRELAGKENLEYPSVTLPPQPHTKEGVDAYNEVIARVRMWVNLNLWQKLKLSRDDAKPLLRLKGFPSFPLVERQANEVDWWDMVCNVKKLINEKKEDGKVFWQNLAGYKRQEALRPYLSSEEDRKKGKKFARYQLGDLLLHLEKKHGEDWGKVYDEAWERIDKKVEGLSKHIKLEEERRSEDAQSKAALTDWLRAKASFVIEGLKEADKDEFCRCELKLQKWYGDLRGKPFAIEAENSILDISGFSKQYNCAFIWQKDGVKKLNLYLIINYFKGGKLRFKKIKPEAFEANRFYTVINKKSGEIVPMEVNFNFDDPNLIILPLAFGKRQGREFIWNDLLSLETGSLQLANGRVIEKTLYNRRTRQDEPALFVALTFERREVLDSSNIKPMNLIGVDRGENIPAVIALTDPEGCPLSRFKDSLGNPTHILRIGESYKEKQRTIQAKKEVEQRRAGGYSRKYASKAKNLADDMVRNTARDLLYYAVTQDAMLIFENLSRGFGRQGKRTFMAERQYTRMEDWLTAKLAYEGLPSKTYLSKTLAQYTSKTCSNCGFTITSADYDRVLEKLKKTATGWMTTINGKELKVEGQITYYNRYKRQNVVKDLSVELDRLSEESVNNDISSWTKGRSGEALSLLKKRFSHRPVQEKFVCLNCGFETHADEQAALNIARSWLFLRSQEYKKYQTNKTTGNTDKRAFVETWQSFYRKKLKEVWKPAV

SEQ ID NO: 30769 - protein, 979 aa, synthetic construct
  REGION 1..979: note = engineered CasX variant
QEIKRINKIRRRLVKDSNTKKAGKTGPMKTLLVRVMTPDLRERLENLRKKPENIPQPISNTSRANLNKLLTDYTEMKKAILHVYWEEFQKDPVGLMSRVAQPASKKIDQNKLKPEMDEKGNLTTAGFACSQCGQPLFVYKLEQVSEKGKAYTNYFGRCNVAEHEKLILLAQLKPEKDSDEAVTYSLGKFGQRALDFYSIHVTKESTHPVKPLAQIAGNRYASSHPVGKALSDACMGTIASFLSKYQDIIIEHQKVVKGNQKRLESLRELAGKENLEYPSVTLPPQPHTKEGVDAYNEVIARVRMWVNLNLWQKLKLSRDDAKPLLRLKGFPSFPLVERQANEVDWWDMVCNVKKLINEKKEDGKVFWQNLAGYKRQEALRPYLSSEEDRKKGKKFARYQLGDLLLHLEKKHGEDWGKVYDEAWERIDKKVEGLSKHIKLEEERRSEDAQSKAALTDWLRAKASFVIEGLKEADKDEFCRCELKLQKWYGDLRGKPFAIEAENSILDISGFSKQYNCAFIWQKDGVKKLNLYLIINYFKGGKLRFKKIKPEAFEANRFYTVINKKSGEIVPMEVNFNFDDPNLIILPLAFGKRQGREFIWNDLLSLETGSLQLANGRVIEKTLYNRRTRQDEPALFVALTFERREVLDSSNIKPMNLIGVDRGENIPAVIALTDPEGCPLSRFKDSLGNPTHILRIGESYKEKQRTIQAKKEVEQRRAGGYSRKYASKAKNLADDMVRNTARDLLYYAVTQDAMLIFENLSRGFGRQGKRTFMAERQYTRMEDWLTAKLAYEGLPSKTYLSKTLAQYTSKTCSNCGFTITSADYDRVLEKLKKTATGWMTTINGKELKVEGQITYYNRYKRQNVVKDLSVELDRLSEESVNNDISSWTKGRSGEALSLLKKRFSHRPVQEKFVCLNCGFETHADEQAALNIARSWLFLRSQEYKKYQTNKTTGNTDKRAFVETWQSFYRKKLKEVWKPAV

SEQ ID NO: 30770 - protein, 979 aa, synthetic construct
  REGION 1..979: note = engineered CasX variant
QEIKRINKIRRRLVKDSNTKKAGKTGPMKTLLVRVMTPDLRERLENLRKKPENIPQPISNTSRANLNKLLTDYTEMKKAILHVYWEEFQKDPVGLMSRVAQPASKKIDQNKLKPEMDEKGNLTTAGFACSQCGQPLFVYKLEQVSEKGKAYTNYFGRCNVAEHEKLILLAQLKPEKDSDEAVTYSLGKFGQRALDFYSIHVTKESTHPVKPLAQIAGNRYASSSPVGKALSDACMGTIASFLSKYQDIIIEHQKVVKGNQKRLESLRELAGKENLEYPSVTLPPQPHTKEGVDAYNEVIARVRMWVNLNLWQKLKLSRDDAKPLLRLKGFPSFPLVERQANEVDWWDMVCNVKKLINEKKEDGKVFWQNLAGYKRQEALRPYLSSEEDRKKGKKFARYQLGDLLLHLEKKHGEDWGKVYDEAWERIDKKVEGLSKHIKLEEERRSEDAQSKAALTDWLRAKASFVIEGLKEADKDEFCRCELKLQKWYGDLRGKPFAIEAENSILDISGFSKQYNCAFIWQKDGVKKLNLYLIINYFKGGKLRFKKIKPEAFEANRFYTVINKKSGEIVPMEVNFNFDDPNLIILPLAFGKRQGREFIWNDLLSLETGSLQLANGRVIEKTLYNRRTRQDEPALFVALTFERREVLDSSNIKPMNLIGVDRGENIPAVIALTDPEGCPLSRFKDSLGNPTHILRIGESYKEKQRTIQAKKEVEQRRAGGYSRKYASKAKNLADDMVRNTARDLLYYAVTQDAMLIFENLSRGFGRQGKRTFMAERQYTRMEDWLTAKLAYEGLPSKTYLSKTLAQYTSKTCSNCGFTITSADYDRVLEKLKKTATGWMTTINGKELKVEGQITYYNRYKRQNVVKDLSVELDRLSEESVNNDISSWTKGRSGEALSLLKKRFSHRPVQEKFVCLNCGFETHADEQAALNIARSWLFLRSQEYKKYQTNKTTGNTDKRAFVETWQSFYRKKLKEVWKPAV

SEQ ID NO: 30771 - protein, 979 aa, synthetic construct
  REGION 1..979: note = engineered CasX variant
QEIKRINKIRRRLVKDSNTKKAGKTGPMKTLLVRVMTPDLRERLENLRKKPENIPQPISNTSRANLNKLLTDYTEMKKAILHVYWEEFQKDPVGLMSRVAQPASKKIDQNKLKPEMDEKGNLTTAGFACSQCGQPLFVYKLEQVSEKGKAYTNYFGRCNVAEHEKLILLAQLKPEKDSDEAVTYSLGKFGQRALDFYSIHVTKESTHPVKPLAQIAGNRYASSTPVGKALSDACMGTIASFLSKYQDIIIEHQKVVKGNQKRLESLRELAGKENLEYPSVTLPPQPHTKEGVDAYNEVIARVRMWVNLNLWQKLKLSRDDAKPLLRLKGFPSFPLVERQANEVDWWDMVCNVKKLINEKKEDGKVFWQNLAGYKRQEALRPYLSSEEDRKKGKKFARYQLGDLLLHLEKKHGEDWGKVYDEAWERIDKKVEGLSKHIKLEEERRSEDAQSKAALTDWLRAKASFVIEGLKEADKDEFCRCELKLQKWYGDLRGKPFAIEAENSILDISGFSKQYNCAFIWQKDGVKKLNLYLIINYFKGGKLRFKKIKPEAFEANRFYTVINKKSGEIVPMEVNFNFDDPNLIILPLAFGKRQGREFIWNDLLSLETGSLQLANGRVIEKTLYNRRTRQDEPALFVALTFERREVLDSSNIKPMNLIGVDRGENIPAVIALTDPEGCPLSRFKDSLGNPTHILRIGESYKEKQRTIQAKKEVEQRRAGGYSRKYASKAKNLADDMVRNTARDLLYYAVTQDAMLIFENLSRGFGRQGKRTFMAERQYTRMEDWLTAKLAYEGLPSKTYLSKTLAQYTSKTCSNCGFTITSADYDRVLEKLKKTATGWMTTINGKELKVEGQITYYNRYKRQNVVKDLSVELDRLSEESVNNDISSWTKGRSGEALSLLKKRFSHRPVQEKFVCLNCGFETHADEQAALNIARSWLFLRSQEYKKYQTNKTTGNTDKRAFVETWQSFYRKKLKEVWKPAV

SEQ ID NO: 30772 - protein, 979 aa, synthetic construct
  REGION 1..979: note = engineered CasX variant
QEIKRINKIRRRLVKDSNTKKAGKTGPMKTLLVRVMTPDLRERLENLRKKPENIPQPISNTSRANLNKLLTDYTEMKKAILHVYWEEFQKDPVGLMSRVAQPASKKIDQNKLKPEMDEKGNLTTAGFACSQCGQPLFVYKLEQVSEKGKAYTNYFGRCNVAEHEKLILLAQLKPEKDSDEAVTYSLGKFGQRALDFYSIHVTKESTHPVKPLAQIAGNRYASSAPVGKALSDACMGTIASFLSKYQDIIIEHQKVVKGNQKRLESLRELAGKENLEYPSVTLPPQPHTKEGVDAYNEVIARVRMWVNLNLWQKLKLSRDDAKPLLRLKGFPSFPLVERQANEVDWWDMVCNVKKLINEKKEDGKVFWQNLAGYKRQEALRPYLSSEEDRKKGKKFARYQLGDLLLHLEKKHGEDWGKVYDEAWERIDKKVEGLSKHIKLEEERRSEDAQSKAALTDWLRAKASFVIEGLKEADKDEFCRCELKLQKWYGDLRGKPFAIEAENSILDISGFSKQYNCAFIWQKDGVKKLNLYLIINYFKGGKLRFKKIKPEAFEANRFYTVINKKSGEIVPMEVNFNFDDPNLIILPLAFGKRQGREFIWNDLLSLETGSLQLANGRVIEKTLYNRRTRQDEPALFVALTFERREVLDSSNIKPMNLIGVDRGENIPAVIALTDPEGCPLSRFKDSLGNPTHILRIGESYKEKQRTIQAKKEVEQRRAGGYSRKYASKAKNLADDMVRNTARDLLYYAVTQDAMLIFENLSRGFGRQGKRTFMAERQYTRMEDWLTAKLAYEGLPSKTYLSKTLAQYTSKTCSNCGFTITSADYDRVLEKLKKTATGWMTTINGKELKVEGQITYYNRYKRQNVVKDLSVELDRLSEESVNNDISSWTKGRSGEALSLLKKRFSHRPVQEKFVCLNCGFETHADEQAALNIARSWLFLRSQEYKKYQTNKTTGNTDKRAFVETWQSFYRKKLKEVWKPAV

SEQ ID NO: 30773 - protein, 979 aa, synthetic construct
  REGION 1..979: note = engineered CasX variant
QEIKRINKIRRRLVKDSNTKKAGKTGPMKTLLVRVMTPDLRERLENLRKKPENIPQPISNTSRANLNKLLTDYTEMKKAILHVYWEEFQKDPVGLMSRVAQPASKKIDQNKLKPEMDEKGNLTTAGFACSQCGQPLFVYKLEQVSEKGKAYTNYFGRCNVAEHEKLILLAQLKPEKDSDEAVTYSLGKFGQRALDFYSIHVTKESTHPVKPLAQIAGNRYASSVPVGKALSDACMGTIASFLSKYQDIIIEHQKVVKGNQKRLESLRELAGKENLEYPSVTLPPQPHTKEGVDAYNEVIARVRMWVNLNLWQKLKLSRDDAKPLLRLKGFPSFPLVERQANEVDWWDMVCNVKKLINEKKEDGKVFWQNLAGYKRQEALRPYLSSEEDRKKGKKFARYQLGDLLLHLEKKHGEDWGKVYDEAWERIDKKVEGLSKHIKLEEERRSEDAQSKAALTDWLRAKASFVIEGLKEADKDEFCRCELKLQKWYGDLRGKPFAIEAENSILDISGFSKQYNCAFIWQKDGVKKLNLYLIINYFKGGKLRFKKIKPEAFEANRFYTVINKKSGEIVPMEVNFNFDDPNLIILPLAFGKRQGREFIWNDLLSLETGSLQLANGRVIEKTLYNRRTRQDEPALFVALTFERREVLDSSNIKPMNLIGVDRGENIPAVIALTDPEGCPLSRFKDSLGNPTHILRIGESYKEKQRTIQAKKEVEQRRAGGYSRKYASKAKNLADDMVRNTARDLLYYAVTQDAMLIFENLSRGFGRQGKRTFMAERQYTRMEDWLTAKLAYEGLPSKTYLSKTLAQYTSKTCSNCGFTITSADYDRVLEKLKKTATGWMTTINGKELKVEGQITYYNRYKRQNVVKDLSVELDRLSEESVNNDISSWTKGRSGEALSLLKKRFSHRPVQEKFVCLNCGFETHADEQAALNIARSWLFLRSQEYKKYQTNKTTGNTDKRAFVETWQSFYRKKLKEVWKPAV

SEQ ID NO: 30774 - protein, 978 aa, synthetic construct
  REGION 1..978: note = engineered CasX variant
QEIKRINKIRRRLVKDSNTKKAGKTGPMKTLLVRVMTPDLRERLENLRKKPENIPQPISNTSRANLNKLLTDYTEMKKAILHVYWEEFQKDPVGLMSRVAQPASKKIDQNKLKPEMDEKGNLTTAGFACSQCGQPLFVYKLEQVSEKGKAYTNYFGRCNVAEHEKLIKLAQLKPEKDSDEAVTYSLGKFGQRALDFYSIHVTKESTHPVKPLAQIAGNRYASSPVGKALSDACMGTIASFLSKYQDIIIEHQKVVKGNQKRLESLRELAGKENLEYPSVTLPPQPHTKEGVDAYNEVIARVRMWVNLNLWQKLKLSRDDAKPLLRLKGFPSFPLVERQANEVDWWDMVCNVKKLINEKKEDGKVFWQNLAGYKRQEALRPYLSSEEDRKKGKKFARYQLGDLLLHLEKKHGEDWGKVYDEAWERIDKKVEGLSKHIKLEEERRSEDAQSKAALTDWLRAKASFVIEGLKEADKDEFCRCELKLQKWYGDLRGKPFAIEAENSILDISGFSKQYNCAFIWQKDGVKKLNLYLIINYFKGGKLRFKKIKPEAFEANRFYTVINKKSGEIVPMEVNFNFDDPNLIILPLAFGKRQGREFIWNDLLSLETGSLQLANGRVIEKTLYNRRTRQDEPALFVALTFERREVLDSSNIKPMNLIGVDRGENIPAVIALTDPEGCPLSRFKDSLGNPTHILRIGESYKEKQRTIQAKKEVEQRRAGGYSRKYASKAKNLADDMVRNTARDLLYYAVTQDAMLIFENLSRGFGRQGKRTFMAERQYTRMEDWLTAKLAYEGLPSKTYLSKTLAQYTSKTCSNCGFTITSADYDRVLEKLKKTATGWMTTINGKELKVEGQITYYNRYKRQNVVKDLSVELDRLSEESVNNDISSWTKGRSGEALSLLKKRFSHRPVQEKFVCLNCGFETHADEQAALNIARSWLFLRSQEYKKYQTNKTTGNTDKRAFVETWQSFYRKKLKEVWKPAV

SEQ ID NO: 30775 - protein, 978 aa, synthetic construct
  REGION 1..978: note = engineered CasX variant
QEGKRINKIRRRLVKDSNTKKAGKTGPMKTLLVRVMTPDLRERLENLRKKPENIPQPISNTSRANLNKLLTDYTEMKKAILHVYWEEFQKDPVGLMSRVAQPASKKIDQNKLKPEMDEKGNLTTAGFACSQCGQPLFVYKLEQVSEKGKAYTNYFGRCNVAEHEKLILLDQLKPEKDSDEAVTYSLGKFGQRALDFYSIHVTKESTHPVKPLAQIAGNRYASYPVGKALSDACMGTIASFLSKYQDIIIEHQKVVKGNQKRLESLRELAGKENLEYPSVTLPPQPHTKEGVDAYNEVIARVRMWVNLNLWQKLKLSRDDAKPLLRLKGFPSFPLVERQANEVDWWDMVCNVKKLINEKKEDGKVFWQNLAGYKRQEALRPYLSSEEDRKKGKKFARYQLGDLLLHLEKKHGEDWGKVYDEAWERIDKKVEGLSKHIKLEEERRSEDAQSKAALTDWLRAKASFVIEGLKEADKDEFCRCELKLQKWYGDLRGKPFAIEAENSILDISGFSKQYNCAFIWQKDGVKKLNLYLIINYFKGGKLRFKKIKPEAFEANRFYTVINKKSGEIVPMEVNFNFDDPNLIILPLAFGKRQGREFIWNDLLSLETGSLKLANGRVIEKTLYNRRTRQDEPALFVALTFERREVLDSSNIKPMNLIGVDRGENIPAVIALTDPEGCPLSRFKDSLGNPTHILRIGESYKEKQRTIQAKKEVEQRRAGGYSRKYASKAKNLADDMVRNTARDLLYYAVTQDAMLIFENLSRGFGRQGKRTFMAERQYTRMEDWLTAKLAYEGLPSKTYLSKTLAQYTSKTCSNCGFTITSADYDRVLEKLKKTATGWMTTINGKELKVEGQITYYNRYKRQNVVKDLSVELDRLSEESVNNDISSWTKGRSGEALSLLKKRFSHRPVQEKFVCLNCGFETHADEQAALNIARSWLFLRSQEYKKYQTNKTTGNTDKRAFVETWQSFYRKKLKEVWKPAV

SEQ ID NO: 30776 - protein, 978 aa, synthetic construct
  REGION 1..978: note = engineered CasX variant
QEGKRINKIRRRLVKDSNTKKAGKTGPMKTLLVRVMTPDLRERLENLRKKPENIPQPISNTSRANLNKLLTDYTEMKKAILHVYWEEFQKDPVGLMSRVAQPASKKIDQNKLKPEMDEKGNLTTAGFACSQCGQPLFVYKLEQVSEKGKAYTNYFGRCNVAEHEKLILLDQLKPEKDSDEAVTYSLGKFGQRALDFYSIHVTKESTHPVKPLAQIAGNRYASHPVGKALSDACMGTIASFLSKYQDIIIEHQKVVKGNQKRLESLRELAGKENLEYPSVTLPPQPHTKEGVDAYNEVIARVRMWVNLNLWQKLKLSRDDAKPLLRLKGFPSFPLVERQANEVDWWDMVCNVKKLINEKKEDGKVFWQNLAGYKRQEALRPYLSSEEDRKKGKKFARYQLGDLLLHLEKKHGEDWGKVYDEAWERIDKKVEGLSKHIKLEEERRSEDAQSKAALTDWLRAKASFVIEGLKEADKDEFCRCELKLQKWYGDLRGKPFAIEAENSILDISGFSKQYNCAFIWQKDGVKKLNLYLIINYFKGGKLRFKKIKPEAFEANRFYTVINKKSGEIVPMEVNFNFDDPNLIILPLAFGKRQGREFIWNDLLSLETGSLKLANGRVIEKTLYNRRTRQDEPALFVALTFERREVLDSSNIKPMNLIGVDRGENIPAVIALTDPEGCPLSRFKDSLGNPTHILRIGESYKEKQRTIQAKKEVEQRRAGGYSRKYASKAKNLADDMVRNTARDLLYYAVTQDAMLIFENLSRGFGRQGKRTFMAERQYTRMEDWLTAKLAYEGLPSKTYLSKTLAQYTSKTCSNCGFTITSADYDRVLEKLKKTATGWMTTINGKELKVEGQITYYNRYKRQNVVKDLSVELDRLSEESVNNDISSWTKGRSGEALSLLKKRFSHRPVQEKFVCLNCGFETHADEQAALNIARSWLFLRSQEYKKYQTNKTTGNTDKRAFVETWQSFYRKKLKEVWKPAV

SEQ ID NO: 30777 - protein, 978 aa, synthetic construct
  REGION 1..978: note = engineered CasX variant
QEGKRINKIRRRLVKDSNTKKAGKTGPMKTLLVRVMTPDLRERLENLRKKPENIPQPISNTSRANLNKLLTDYTEMKKAILHVYWEEFQKDPVGLMSRVAQPASKKIDQNKLKPEMDEKGNLTTAGFACSQCGQPLFVYKLEQVSEKGKAYTNYFGRCNVAEHEKLILLDQLKPEKDSDEAVTYSLGKFGQRALDFYSIHVTKESTHPVKPLAQIAGNRYASSPVGKALSDACMGTIASFLSKYQDIIIEHQKVVKGNQKRLESLRELAGKENLEYPSVTLPPQPHTKEGVDAYNEVIARVRMWVNLNLWQKLKLSRDDAKPLLRLKGFPSFPLVERQANEVDWWDMVCNVKKLINEKKEDGKVFWQNLAGYKRQEALRPYLSSEEDRKKGKKFARYQLGDLLLHLEKKHGEDWGKVYDEAWERIDKKVEGLSKHIKLEEERRSEDAQSKAALTDWLRAKASFVIEGLKEADKDEFCRCELKLQKWYGDLRGKPFAIEAENSILDISGFSKQYNCAFIWQKDGVKKLNLYLIINYFKGGKLRFKKIKPEAFEANRFYTVINKKSGEIVPMEVNFNFDDPNLIILPLAFGKRQGREFIWNDLLSLETGSLKLANGRVIEKTLYNRRTRQDEPALFVALTFERREVLDSSNIKPMNLIGVDRGENIPAVIALTDPEGCPLSRFKDSLGNPTHILRIGESYKEKQRTIQAKKEVEQRRAGGYSRKYASKAKNLADDMVRNTARDLLYYAVTQDAMLIFENLSRGFGRQGKRTFMAERQYTRMEDWLTAKLAYEGLPSKTYLSKTLAQYTSKTCSNCGFTITSADYDRVLEKLKKTATGWMTTINGKELKVEGQITYYNRYKRQNVVKDLSVELDRLSEESVNNDISSWTKGRSGEALSLLKKRFSHRPVQEKFVCLNCGFETHADEQAALNIARSWLFLRSQEYKKYQTNKTTGNTDKRAFVETWQSFYRKKLKEVWKPAV

SEQ ID NO: 30778 - protein, 978 aa, synthetic construct
  REGION 1..978: note = engineered CasX variant
QEGKRINKIRRRLVKDSNTKKAGKTGPMKTLLVRVMTPDLRERLENLRKKPENIPQPISNTSRANLNKLLTDYTEMKKAILHVYWEEFQKDPVGLMSRVAQPASKKIDQNKLKPEMDEKGNLTTAGFACSQCGQPLFVYKLEQVSEKGKAYTNYFGRCNVAEHEKLILLDQLKPEKDSDEAVTYSLGKFGQRALDFYSIHVTKESTHPVKPLAQIAGNRYASTPVGKALSDACMGTIASFLSKYQDIIIEHQKVVKGNQKRLESLRELAGKENLEYPSVTLPPQPHTKEGVDAYNEVIARVRMWVNLNLWQKLKLSRDDAKPLLRLKGFPSFPLVERQANEVDWWDMVCNVKKLINEKKEDGKVFWQNLAGYKRQEALRPYLSSEEDRKKGKKFARYQLGDLLLHLEKKHGEDWGKVYDEAWERIDKKVEGLSKHIKLEEERRSEDAQSKAALTDWLRAKASFVIEGLKEADKDEFCRCELKLQKWYGDLRGKPFAIEAENSILDISGFSKQYNCAFIWQKDGVKKLNLYLIINYFKGGKLRFKKIKPEAFEANRFYTVINKKSGEIVPMEVNFNFDDPNLIILPLAFGKRQGREFIWNDLLSLETGSLKLANGRVIEKTLYNRRTRQDEPALFVALTFERREVLDSSNIKPMNLIGVDRGENIPAVIALTDPEGCPLSRFKDSLGNPTHILRIGESYKEKQRTIQAKKEVEQRRAGGYSRKYASKAKNLADDMVRNTARDLLYYAVTQDAMLIFENLSRGFGRQGKRTFMAERQYTRMEDWLTAKLAYEGLPSKTYLSKTLAQYTSKTCSNCGFTITSADYDRVLEKLKKTATGWMTTINGKELKVEGQITYYNRYKRQNVVKDLSVELDRLSEESVNNDISSWTKGRSGEALSLLKKRFSHRPVQEKFVCLNCGFETHADEQAALNIARSWLFLRSQEYKKYQTNKTTGNTDKRAFVETWQSFYRKKLKEVWKPAV

SEQ ID NO: 30779 - protein, 978 aa, synthetic construct
  REGION 1..978: note = engineered CasX variant
QEGKRINKIRRRLVKDSNTKKAGKTGPMKTLLVRVMTPDLRERLENLRKKPENIPQPISNTSRANLNKLLTDYTEMKKAILHVYWEEFQKDPVGLMSRVAQPASKKIDQNKLKPEMDEKGNLTTAGFACSQCGQPLFVYKLEQVSEKGKAYTNYFGRCNVAEHEKLILLDQLKPEKDSDEAVTYSLGKFGQRALDFYSIHVTKESTHPVKPLAQIAGNRYASAPVGKALSDACMGTIASFLSKYQDIIIEHQKVVKGNQKRLESLRELAGKENLEYPSVTLPPQPHTKEGVDAYNEVIARVRMWVNLNLWQKLKLSRDDAKPLLRLKGFPSFPLVERQANEVDWWDMVCNVKKLINEKKEDGKVFWQNLAGYKRQEALRPYLSSEEDRKKGKKFARYQLGDLLLHLEKKHGEDWGKVYDEAWERIDKKVEGLSKHIKLEEERRSEDAQSKAALTDWLRAKASFVIEGLKEADKDEFCRCELKLQKWYGDLRGKPFAIEAENSILDISGFSKQYNCAFIWQKDGVKKLNLYLIINYFKGGKLRFKKIKPEAFEANRFYTVINKKSGEIVPMEVNFNFDDPNLIILPLAFGKRQGREFIWNDLLSLETGSLKLANGRVIEKTLYNRRTRQDEPALFVALTFERREVLDSSNIKPMNLIGVDRGENIPAVIALTDPEGCPLSRFKDSLGNPTHILRIGESYKEKQRTIQAKKEVEQRRAGGYSRKYASKAKNLADDMVRNTARDLLYYAVTQDAMLIFENLSRGFGRQGKRTFMAERQYTRMEDWLTAKLAYEGLPSKTYLSKTLAQYTSKTCSNCGFTITSADYDRVLEKLKKTATGWMTTINGKELKVEGQITYYNRYKRQNVVKDLSVELDRLSEESVNNDISSWTKGRSGEALSLLKKRFSHRPVQEKFVCLNCGFETHADEQAALNIARSWLFLRSQEYKKYQTNKTTGNTDKRAFVETWQSFYRKKLKEVWKPAV

SEQ ID NO: 30780 - protein, 978 aa, synthetic construct
  REGION 1..978: note = engineered CasX variant
QEGKRINKIRRRLVKDSNTKKAGKTGPMKTLLVRVMTPDLRERLENLRKKPENIPQPISNTSRANLNKLLTDYTEMKKAILHVYWEEFQKDPVGLMSRVAQPASKKIDQNKLKPEMDEKGNLTTAGFACSQCGQPLFVYKLEQVSEKGKAYTNYFGRCNVAEHEKLILLDQLKPEKDSDEAVTYSLGKFGQRALDFYSIHVTKESTHPVKPLAQIAGNRYASVPVGKALSDACMGTIASFLSKYQDIIIEHQKVVKGNQKRLESLRELAGKENLEYPSVTLPPQPHTKEGVDAYNEVIARVRMWVNLNLWQKLKLSRDDAKPLLRLKGFPSFPLVERQANEVDWWDMVCNVKKLINEKKEDGKVFWQNLAGYKRQEALRPYLSSEEDRKKGKKFARYQLGDLLLHLEKKHGEDWGKVYDEAWERIDKKVEGLSKHIKLEEERRSEDAQSKAALTDWLRAKASFVIEGLKEADKDEFCRCELKLQKWYGDLRGKPFAIEAENSILDISGFSKQYNCAFIWQKDGVKKLNLYLIINYFKGGKLRFKKIKPEAFEANRFYTVINKKSGEIVPMEVNFNFDDPNLIILPLAFGKRQGREFIWNDLLSLETGSLKLANGRVIEKTLYNRRTRQDEPALFVALTFERREVLDSSNIKPMNLIGVDRGENIPAVIALTDPEGCPLSRFKDSLGNPTHILRIGESYKEKQRTIQAKKEVEQRRAGGYSRKYASKAKNLADDMVRNTARDLLYYAVTQDAMLIFENLSRGFGRQGKRTFMAERQYTRMEDWLTAKLAYEGLPSKTYLSKTLAQYTSKTCSNCGFTITSADYDRVLEKLKKTATGWMTTINGKELKVEGQITYYNRYKRQNVVKDLSVELDRLSEESVNNDISSWTKGRSGEALSLLKKRFSHRPVQEKFVCLNCGFETHADEQAALNIARSWLFLRSQEYKKYQTNKTTGNTDKRAFVETWQSFYRKKLKEVWKPAV

SEQ ID NO: 30781 - protein, 978 aa, synthetic construct
  REGION 1..978: note = engineered CasX variant
QEGKRINKIRRRLVKDSNTKKAGKTGPMKTLLVRVMTPDLRERLENLRKKPENIPQPISNTSRANLNKLLTDYTEMKKAILHVYWEEFQKDPVGLMSRVAQPASKKIDQNKLKPEMDEKGNLTTAGFACSQCGQPLFVYKLEQVSEKGKAYTNYFGRCNVAEHEKLIKLDQLKPEKDSDEAVTYSLGKFGQRALDFYSIHVTKESTHPVKPLAQIAGNRYASGPVGKALSDACMGTIASFLSKYQDIIIEHQKVVKGNQKRLESLRELAGKENLEYPSVTLPPQPHTKEGVDAYNEVIARVRMWVNLNLWQKLKLSRDDAKPLLRLKGFPSFPLVERQANEVDWWDMVCNVKKLINEKKEDGKVFWQNLAGYKRQEALRPYLSSEEDRKKGKKFARYQLGDLLLHLEKKHGEDWGKVYDEAWERIDKKVEGLSKHIKLEEERRSEDAQSKAALTDWLRAKASFVIEGLKEADKDEFCRCELKLQKWYGDLRGKPFAIEAENSILDISGFSKQYNCAFIWQKDGVKKLNLYLIINYFKGGKLRFKKIKPEAFEANRFYTVINKKSGEIVPMEVNFNFDDPNLIILPLAFGKRQGREFIWNDLLSLETGSLKLANGRVIEKTLYNRRTRQDEPALFVALTFERREVLDSSNIKPMNLIGVDRGENIPAVIALTDPEGCPLSRFKDSLGNPTHILRIGESYKEKQRTIQAKKEVEQRRAGGYSRKYASKAKNLADDMVRNTARDLLYYAVTQDAMLIFENLSRGFGRQGKRTFMAERQYTRMEDWLTAKLAYEGLPSKTYLSKTLAQYTSKTCSNCGFTITSADYDRVLEKLKKTATGWMTTINGKELKVEGQITYYNRYKRQNVVKDLSVELDRLSEESVNNDISSWTKGRSGEALSLLKKRFSHRPVQEKFVCLNCGFETHADEQAALNIARSWLFLRSQEYKKYQTNKTTGNTDKRAFVETWQSFYRKKLKEVWKPAV

SEQ ID NO: 30782 - protein, 977 aa, synthetic construct
  REGION 1..977: note = engineered CasX variant
QEGKRINKIRRRLVKDSNTKKAGKTGPMKTLLVRVMTPDLRERLENLRKKPENIPQPISNTSRANLNKLLTDYTEMKKAILHVYWEEFQKDPVGLMSRVAQPASKKIDQNKLKPEMDEKGNLTTAGFACSQCGQPLFVYKLEQVSEKGKAYTNYFGRCNVAEHEKLILLDQLKPEKDSDEAVTYSLGKFGQRALDFYSIHVTKESTHPVKPLAQIAGNRYASPVGKALSDACMGTIASFLSKYQDIIIEHQKVVKGNQKRLESLRELAGKENLEYPSVTLPPQPHTKEGVDAYNEVIARVRMWVNLNLWQKLKLSRDDAKPLLRLKGFPSFPLVERQANEVDWWDMVCNVKKLINEKKEDGKVFWQNLAGYKRQEALRPYLSSEEDRKKGKKFARYQLGDLLLHLEKKHGEDWGKVYDEAWERIDKKVEGLSKHIKLEEERRSEDAQSKAALTDWLRAKASFVIEGLKEADKDEFCRCELKLQKWYGDLRGKPFAIEAENSILDISGFSKQYNCAFIWQKDGVKKLNLYLIINYFKGGKLRFKKIKPEAFEANRFYTVINKKSGEIVPMEVNFNFDDPNLIILPLAFGKRQGREFIWNDLLSLETGSLKLANGRVIEKTLYNRRTRQDEPALFVALTFERREVLDSSNIKPMNLIGVDRGENIPAVIALTDPEGCPLSRFKDSLGNPTHILRIGESYKEKQRTIQAKKEVEQRRAGGYSRKYASKAKNLADDMVRNTARDLLYYAVTQDAMLIFENLSRGFGRQGKRTFMAERQYTRMEDWLTAKLAYEGLPSKTYLSKTLAQYTSKTCSNCGFTITSADYDRVLEKLKKTATGWMTTINGKELKVEGQITYYNRYKRQNVVKDLSVELDRLSEESVNNDISSWTKGRSGEALSLLKKRFSHRPVQEKFVCLNCGFETHADEQAALNIARSWLFLRSQEYKKYQTNKTTGNTDKRAFVETWQSFYRKKLKEVWKPAV

SEQ ID NO: 30783 - protein, 979 aa, synthetic construct
  REGION 1..979: note = engineered CasX variant
QEIGKRINKIRRRLVKDSNTKKAGKTGPMKTLLVRVMTPDLRERLENLRKKPENIPQPISNTSRANLNKLLTDYTEMKKAILHVYWEEFQKDPVGLMSRVAQPASKKIDQNKLKPEMDEKGNLTTAGFACSQCGQPLFVYKLEQVSEKGKAYTNYFGRCNVAEHEKLILLDQLKPEKDSDEAVTYSLGKFGQRALDFYSIHVTKESTHPVKPLAQIAGNRYASYPVGKALSDACMGTIASFLSKYQDIIIEHQKVVKGNQKRLESLRELAGKENLEYPSVTLPPQPHTKEGVDAYNEVIARVRMWVNLNLWQKLKLSRDDAKPLLRLKGFPSFPLVERQANEVDWWDMVCNVKKLINEKKEDGKVFWQNLAGYKRQEALRPYLSSEEDRKKGKKFARYQLGDLLLHLEKKHGEDWGKVYDEAWERIDKKVEGLSKHIKLEEERRSEDAQSKAALTDWLRAKASFVIEGLKEADKDEFCRCELKLQKWYGDLRGKPFAIEAENSILDISGFSKQYNCAFIWQKDGVKKLNLYLIINYFKGGKLRFKKIKPEAFEANRFYTVINKKSGEIVPMEVNFNFDDPNLIILPLAFGKRQGREFIWNDLLSLETGSLKLANGRVIEKTLYNRRTRQDEPALFVALTFERREVLDSSNIKPMNLIGVDRGENIPAVIALTDPEGCPLSRFKDSLGNPTHILRIGESYKEKQRTIQAKKEVEQRRAGGYSRKYASKAKNLADDMVRNTARDLLYYAVTQDAMLIFENLSRGFGRQGKRTFMAERQYTRMEDWLTAKLAYEGLPSKTYLSKTLAQYTSKTCSNCGFTITSADYDRVLEKLKKTATGWMTTINGKELKVEGQITYYNRYKRQNVVKDLSVELDRLSEESVNNDISSWTKGRSGEALSLLKKRFSHRPVQEKFVCLNCGFETHADEQAALNIARSWLFLRSQEYKKYQTNKTTGNTDKRAFVETWQSFYRKKLKEVWKPAV

SEQ ID NO: 30784 - protein, 979 aa, synthetic construct
  REGION 1..979: note = engineered CasX variant
QEIGKRINKIRRRLVKDSNTKKAGKTGPMKTLLVRVMTPDLRERLENLRKKPENIPQPISNTSRANLNKLLTDYTEMKKAILHVYWEEFQKDPVGLMSRVAQPASKKIDQNKLKPEMDEKGNLTTAGFACSQCGQPLFVYKLEQVSEKGKAYTNYFGRCNVAEHEKLILLDQLKPEKDSDEAVTYSLGKFGQRALDFYSIHVTKESTHPVKPLAQIAGNRYASHPVGKALSDACMGTIASFLSKYQDIIIEHQKVVKGNQKRLESLRELAGKENLEYPSVTLPPQPHTKEGVDAYNEVIARVRMWVNLNLWQKLKLSRDDAKPLLRLKGFPSFPLVERQANEVDWWDMVCNVKKLINEKKEDGKVFWQNLAGYKRQEALRPYLSSEEDRKKGKKFARYQLGDLLLHLEKKHGEDWGKVYDEAWERIDKKVEGLSKHIKLEEERRSEDAQSKAALTDWLRAKASFVIEGLKEADKDEFCRCELKLQKWYGDLRGKPFAIEAENSILDISGFSKQYNCAFIWQKDGVKKLNLYLIINYFKGGKLRFKKIKPEAFEANRFYTVINKKSGEIVPMEVNFNFDDPNLIILPLAFGKRQGREFIWNDLLSLETGSLKLANGRVIEKTLYNRRTRQDEPALFVALTFERREVLDSSNIKPMNLIGVDRGENIPAVIALTDPEGCPLSRFKDSLGNPTHILRIGESYKEKQRTIQAKKEVEQRRAGGYSRKYASKAKNLADDMVRNTARDLLYYAVTQDAMLIFENLSRGFGRQGKRTFMAERQYTRMEDWLTAKLAYEGLPSKTYLSKTLAQYTSKTCSNCGFTITSADYDRVLEKLKKTATGWMTTINGKELKVEGQITYYNRYKRQNVVKDLSVELDRLSEESVNNDISSWTKGRSGEALSLLKKRFSHRPVQEKFVCLNCGFETHADEQAALNIARSWLFLRSQEYKKYQTNKTTGNTDKRAFVETWQSFYRKKLKEVWKPAV

SEQ ID NO: 30785 - protein, 979 aa, synthetic construct
  REGION 1..979: note = engineered CasX variant
QEIGKRINKIRRRLVKDSNTKKAGKTGPMKTLLVRVMTPDLRERLENLRKKPENIPQPISNTSRANLNKLLTDYTEMKKAILHVYWEEFQKDPVGLMSRVAQPASKKIDQNKLKPEMDEKGNLTTAGFACSQCGQPLFVYKLEQVSEKGKAYTNYFGRCNVAEHEKLILLDQLKPEKDSDEAVTYSLGKFGQRALDFYSIHVTKESTHPVKPLAQIAGNRYASSPVGKALSDACMGTIASFLSKYQDIIIEHQKVVKGNQKRLESLRELAGKENLEYPSVTLPPQPHTKEGVDAYNEVIARVRMWVNLNLWQKLKLSRDDAKPLLRLKGFPSFPLVERQANEVDWWDMVCNVKKLINEKKEDGKVFWQNLAGYKRQEALRPYLSSEEDRKKGKKFARYQLGDLLLHLEKKHGEDWGKVYDEAWERIDKKVEGLSKHIKLEEERRSEDAQSKAALTDWLRAKASFVIEGLKEADKDEFCRCELKLQKWYGDLRGKPFAIEAENSILDISGFSKQYNCAFIWQKDGVKKLNLYLIINYFKGGKLRFKKIKPEAFEANRFYTVINKKSGEIVPMEVNFNFDDPNLIILPLAFGKRQGREFIWNDLLSLETGSLKLANGRVIEKTLYNRRTRQDEPALFVALTFERREVLDSSNIKPMNLIGVDRGENIPAVIALTDPEGCPLSRFKDSLGNPTHILRIGESYKEKQRTIQAKKEVEQRRAGGYSRKYASKAKNLADDMVRNTARDLLYYAVTQDAMLIFENLSRGFGRQGKRTFMAERQYTRMEDWLTAKLAYEGLPSKTYLSKTLAQYTSKTCSNCGFTITSADYDRVLEKLKKTATGWMTTINGKELKVEGQITYYNRYKRQNVVKDLSVELDRLSEESVNNDISSWTKGRSGEALSLLKKRFSHRPVQEKFVCLNCGFETHADEQAALNIARSWLFLRSQEYKKYQTNKTTGNTDKRAFVETWQSFYRKKLKEVWKPAV

SEQ ID NO: 30786 - protein, 979 aa, synthetic construct
  REGION 1..979: note = engineered CasX variant
QEIGKRINKIRRRLVKDSNTKKAGKTGPMKTLLVRVMTPDLRERLENLRKKPENIPQPISNTSRANLNKLLTDYTEMKKAILHVYWEEFQKDPVGLMSRVAQPASKKIDQNKLKPEMDEKGNLTTAGFACSQCGQPLFVYKLEQVSEKGKAYTNYFGRCNVAEHEKLILLDQLKPEKDSDEAVTYSLGKFGQRALDFYSIHVTKESTHPVKPLAQIAGNRYASTPVGKALSDACMGTIASFLSKYQDIIIEHQKVVKGNQKRLESLRELAGKENLEYPSVTLPPQPHTKEGVDAYNEVIARVRMWVNLNLWQKLKLSRDDAKPLLRLKGFPSFPLVERQANEVDWWDMVCNVKKLINEKKEDGKVFWQNLAGYKRQEALRPYLSSEEDRKKGKKFARYQLGDLLLHLEKKHGEDWGKVYDEAWERIDKKVEGLSKHIKLEEERRSEDAQSKAALTDWLRAKASFVIEGLKEADKDEFCRCELKLQKWYGDLRGKPFAIEAENSILDISGFSKQYNCAFIWQKDGVKKLNLYLIINYFKGGKLRFKKIKPEAFEANRFYTVINKKSGEIVPMEVNFNFDDPNLIILPLAFGKRQGREFIWNDLLSLETGSLKLANGRVIEKTLYNRRTRQDEPALFVALTFERREVLDSSNIKPMNLIGVDRGENIPAVIALTDPEGCPLSRFKDSLGNPTHILRIGESYKEKQRTIQAKKEVEQRRAGGYSRKYASKAKNLADDMVRNTARDLLYYAVTQDAMLIFENLSRGFGRQGKRTFMAERQYTRMEDWLTAKLAYEGLPSKTYLSKTLAQYTSKTCSNCGFTITSADYDRVLEKLKKTATGWMTTINGKELKVEGQITYYNRYKRQNVVKDLSVELDRLSEESVNNDISSWTKGRSGEALSLLKKRFSHRPVQEKFVCLNCGFETHADEQAALNIARSWLFLRSQEYKKYQTNKTTGNTDKRAFVETWQSFYRKKLKEVWKPAV

SEQ ID NO: 30787 - protein, 979 aa, synthetic construct
  REGION 1..979: note = engineered CasX variant
QEIGKRINKIRRRLVKDSNTKKAGKTGPMKTLLVRVMTPDLRERLENLRKKPENIPQPISNTSRANLNKLLTDYTEMKKAILHVYWEEFQKDPVGLMSRVAQPASKKIDQNKLKPEMDEKGNLTTAGFACSQCGQPLFVYKLEQVSEKGKAYTNYFGRCNVAEHEKLILLDQLKPEKDSDEAVTYSLGKFGQRALDFYSIHVTKESTHPVKPLAQIAGNRYASAPVGKALSDACMGTIASFLSKYQDIIIEHQKVVKGNQKRLESLRELAGKENLEYPSVTLPPQPHTKEGVDAYNEVIARVRMWVNLNLWQKLKLSRDDAKPLLRLKGFPSFPLVERQANEVDWWDMVCNVKKLINEKKEDGKVFWQNLAGYKRQEALRPYLSSEEDRKKGKKFARYQLGDLLLHLEKKHGEDWGKVYDEAWERIDKKVEGLSKHIKLEEERRSEDAQSKAALTDWLRAKASFVIEGLKEADKDEFCRCELKLQKWYGDLRGKPFAIEAENSILDISGFSKQYNCAFIWQKDGVKKLNLYLIINYFKGGKLRFKKIKPEAFEANRFYTVINKKSGEIVPMEVNFNFDDPNLIILPLAFGKRQGREFIWNDLLSLETGSLKLANGRVIEKTLYNRRTRQDEPALFVALTFERREVLDSSNIKPMNLIGVDRGENIPAVIALTDPEGCPLSRFKDSLGNPTHILRIGESYKEKQRTIQAKKEVEQRRAGGYSRKYASKAKNLADDMVRNTARDLLYYAVTQDAMLIFENLSRGFGRQGKRTFMAERQYTRMEDWLTAKLAYEGLPSKTYLSKTLAQYTSKTCSNCGFTITSADYDRVLEKLKKTATGWMTTINGKELKVEGQITYYNRYKRQNVVKDLSVELDRLSEESVNNDISSWTKGRSGEALSLLKKRFSHRPVQEKFVCLNCGFETHADEQAALNIARSWLFLRSQEYKKYQTNKTTGNTDKRAFVETWQSFYRKKLKEVWKPAV

SEQ ID NO: 30788 - protein, 979 aa, synthetic construct
  REGION 1..979: note = engineered CasX variant
QEIGKRINKIRRRLVKDSNTKKAGKTGPMKTLLVRVMTPDLRERLENLRKKPENIPQPISNTSRANLNKLLTDYTEMKKAILHVYWEEFQKDPVGLMSRVAQPASKKIDQNKLKPEMDEKGNLTTAGFACSQCGQPLFVYKLEQVSEKGKAYTNYFGRCNVAEHEKLILLDQLKPEKDSDEAVTYSLGKFGQRALDFYSIHVTKESTHPVKPLAQIAGNRYASVPVGKALSDACMGTIASFLSKYQDIIIEHQKVVKGNQKRLESLRELAGKENLEYPSVTLPPQPHTKEGVDAYNEVIARVRMWVNLNLWQKLKLSRDDAKPLLRLKGFPSFPLVERQANEVDWWDMVCNVKKLINEKKEDGKVFWQNLAGYKRQEALRPYLSSEEDRKKGKKFARYQLGDLLLHLEKKHGEDWGKVYDEAWERIDKKVEGLSKHIKLEEERRSEDAQSKAALTDWLRAKASFVIEGLKEADKDEFCRCELKLQKWYGDLRGKPFAIEAENSILDISGFSKQYNCAFIWQKDGVKKLNLYLIINYFKGGKLRFKKIKPEAFEANRFYTVINKKSGEIVPMEVNFNFDDPNLIILPLAFGKRQGREFIWNDLLSLETGSLKLANGRVIEKTLYNRRTRQDEPALFVALTFERREVLDSSNIKPMNLIGVDRGENIPAVIALTDPEGCPLSRFKDSLGNPTHILRIGESYKEKQRTIQAKKEVEQRRAGGYSRKYASKAKNLADDMVRNTARDLLYYAVTQDAMLIFENLSRGFGRQGKRTFMAERQYTRMEDWLTAKLAYEGLPSKTYLSKTLAQYTSKTCSNCGFTITSADYDRVLEKLKKTATGWMTTINGKELKVEGQITYYNRYKRQNVVKDLSVELDRLSEESVNNDISSWTKGRSGEALSLLKKRFSHRPVQEKFVCLNCGFETHADEQAALNIARSWLFLRSQEYKKYQTNKTTGNTDKRAFVETWQSFYRKKLKEVWKPAV

SEQ ID NO: 30789 - protein, 979 aa, synthetic construct
  REGION 1..979: note = engineered CasX variant
QEIGKRINKIRRRLVKDSNTKKAGKTGPMKTLLVRVMTPDLRERLENLRKKPENIPQPISNTSRANLNKLLTDYTEMKKAILHVYWEEFQKDPVGLMSRVAQPASKKIDQNKLKPEMDEKGNLTTAGFACSQCGQPLFVYKLEQVSEKGKAYTNYFGRCNVAEHEKLIKLDQLKPEKDSDEAVTYSLGKFGQRALDFYSIHVTKESTHPVKPLAQIAGNRYASGPVGKALSDACMGTIASFLSKYQDIIIEHQKVVKGNQKRLESLRELAGKENLEYPSVTLPPQPHTKEGVDAYNEVIARVRMWVNLNLWQKLKLSRDDAKPLLRLKGFPSFPLVERQANEVDWWDMVCNVKKLINEKKEDGKVFWQNLAGYKRQEALRPYLSSEEDRKKGKKFARYQLGDLLLHLEKKHGEDWGKVYDEAWERIDKKVEGLSKHIKLEEERRSEDAQSKAALTDWLRAKASFVIEGLKEADKDEFCRCELKLQKWYGDLRGKPFAIEAENSILDISGFSKQYNCAFIWQKDGVKKLNLYLIINYFKGGKLRFKKIKPEAFEANRFYTVINKKSGEIVPMEVNFNFDDPNLIILPLAFGKRQGREFIWNDLLSLETGSLKLANGRVIEKTLYNRRTRQDEPALFVALTFERREVLDSSNIKPMNLIGVDRGENIPAVIALTDPEGCPLSRFKDSLGNPTHILRIGESYKEKQRTIQAKKEVEQRRAGGYSRKYASKAKNLADDMVRNTARDLLYYAVTQDAMLIFENLSRGFGRQGKRTFMAERQYTRMEDWLTAKLAYEGLPSKTYLSKTLAQYTSKTCSNCGFTITSADYDRVLEKLKKTATGWMTTINGKELKVEGQITYYNRYKRQNVVKDLSVELDRLSEESVNNDISSWTKGRSGEALSLLKKRFSHRPVQEKFVCLNCGFETHADEQAALNIARSWLFLRSQEYKKYQTNKTTGNTDKRAFVETWQSFYRKKLKEVWKPAV

SEQ ID NO: 30790 - protein, 978 aa, synthetic construct
  REGION 1..978: note = engineered CasX variant
QEIGKRINKIRRRLVKDSNTKKAGKTGPMKTLLVRVMTPDLRERLENLRKKPENIPQPISNTSRANLNKLLTDYTEMKKAILHVYWEEFQKDPVGLMSRVAQPASKKIDQNKLKPEMDEKGNLTTAGFACSQCGQPLFVYKLEQVSEKGKAYTNYFGRCNVAEHEKLILLDQLKPEKDSDEAVTYSLGKFGQRALDFYSIHVTKESTHPVKPLAQIAGNRYASPVGKALSDACMGTIASFLSKYQDIIIEHQKVVKGNQKRLESLRELAGKENLEYPSVTLPPQPHTKEGVDAYNEVIARVRMWVNLNLWQKLKLSRDDAKPLLRLKGFPSFPLVERQANEVDWWDMVCNVKKLINEKKEDGKVFWQNLAGYKRQEALRPYLSSEEDRKKGKKFARYQLGDLLLHLEKKHGEDWGKVYDEAWERIDKKVEGLSKHIKLEEERRSEDAQSKAALTDWLRAKASFVIEGLKEADKDEFCRCELKLQKWYGDLRGKPFAIEAENSILDISGFSKQYNCAFIWQKDGVKKLNLYLIINYFKGGKLRFKKIKPEAFEANRFYTVINKKSGEIVPMEVNFNFDDPNLIILPLAFGKRQGREFIWNDLLSLETGSLKLANGRVIEKTLYNRRTRQDEPALFVALTFERREVLDSSNIKPMNLIGVDRGENIPAVIALTDPEGCPLSRFKDSLGNPTHILRIGESYKEKQRTIQAKKEVEQRRAGGYSRKYASKAKNLADDMVRNTARDLLYYAVTQDAMLIFENLSRGFGRQGKRTFMAERQYTRMEDWLTAKLAYEGLPSKTYLSKTLAQYTSKTCSNCGFTITSADYDRVLEKLKKTATGWMTTINGKELKVEGQITYYNRYKRQNVVKDLSVELDRLSEESVNNDISSWTKGRSGEALSLLKKRFSHRPVQEKFVCLNCGFETHADEQAALNIARSWLFLRSQEYKKYQTNKTTGNTDKRAFVETWQSFYRKKLKEVWKPAV

SEQ ID NO: 30791 - protein, 978 aa, synthetic construct
  REGION 1..978: note = engineered CasX variant
QEIGRINKIRRRLVKDSNTKKAGKTGPMKTLLVRVMTPDLRERLENLRKKPENIPQPISNTSRANLNKLLTDYTEMKKAILHVYWEEFQKDPVGLMSRVAQPASKKIDQNKLKPEMDEKGNLTTAGFACSQCGQPLFVYKLEQVSEKGKAYTNYFGRCNVAEHEKLILLDQLKPEKDSDEAVTYSLGKFGQRALDFYSIHVTKESTHPVKPLAQIAGNRYASYPVGKALSDACMGTIASFLSKYQDIIIEHQKVVKGNQKRLESLRELAGKENLEYPSVTLPPQPHTKEGVDAYNEVIARVRMWVNLNLWQKLKLSRDDAKPLLRLKGFPSFPLVERQANEVDWWDMVCNVKKLINEKKEDGKVFWQNLAGYKRQEALRPYLSSEEDRKKGKKFARYQLGDLLLHLEKKHGEDWGKVYDEAWERIDKKVEGLSKHIKLEEERRSEDAQSKAALTDWLRAKASFVIEGLKEADKDEFCRCELKLQKWYGDLRGKPFAIEAENSILDISGFSKQYNCAFIWQKDGVKKLNLYLIINYFKGGKLRFKKIKPEAFEANRFYTVINKKSGEIVPMEVNFNFDDPNLIILPLAFGKRQGREFIWNDLLSLETGSLKLANGRVIEKTLYNRRTRQDEPALFVALTFERREVLDSSNIKPMNLIGVDRGENIPAVIALTDPEGCPLSRFKDSLGNPTHILRIGESYKEKQRTIQAKKEVEQRRAGGYSRKYASKAKNLADDMVRNTARDLLYYAVTQDAMLIFENLSRGFGRQGKRTFMAERQYTRMEDWLTAKLAYEGLPSKTYLSKTLAQYTSKTCSNCGFTITSADYDRVLEKLKKTATGWMTTINGKELKVEGQITYYNRYKRQNVVKDLSVELDRLSEESVNNDISSWTKGRSGEALSLLKKRFSHRPVQEKFVCLNCGFETHADEQAALNIARSWLFLRSQEYKKYQTNKTTGNTDKRAFVETWQSFYRKKLKEVWKPAV

SEQ ID NO: 30792 - protein, 978 aa, synthetic construct
  REGION 1..978: note = engineered CasX variant
QEIGRINKIRRRLVKDSNTKKAGKTGPMKTLLVRVMTPDLRERLENLRKKPENIPQPISNTSRANLNKLLTDYTEMKKAILHVYWEEFQKDPVGLMSRVAQPASKKIDQNKLKPEMDEKGNLTTAGFACSQCGQPLFVYKLEQVSEKGKAYTNYFGRCNVAEHEKLILLDQLKPEKDSDEAVTYSLGKFGQRALDFYSIHVTKESTHPVKPLAQIAGNRYASHPVGKALSDACMGTIASFLSKYQDIIIEHQKVVKGNQKRLESLRELAGKENLEYPSVTLPPQPHTKEGVDAYNEVIARVRMWVNLNLWQKLKLSRDDAKPLLRLKGFPSFPLVERQANEVDWWDMVCNVKKLINEKKEDGKVFWQNLAGYKRQEALRPYLSSEEDRKKGKKFARYQLGDLLLHLEKKHGEDWGKVYDEAWERIDKKVEGLSKHIKLEEERRSEDAQSKAALTDWLRAKASFVIEGLKEADKDEFCRCELKLQKWYGDLRGKPFAIEAENSILDISGFSKQYNCAFIWQKDGVKKLNLYLIINYFKGGKLRFKKIKPEAFEANRFYTVINKKSGEIVPMEVNFNFDDPNLIILPLAFGKRQGREFIWNDLLSLETGSLKLANGRVIEKTLYNRRTRQDEPALFVALTFERREVLDSSNIKPMNLIGVDRGENIPAVIALTDPEGCPLSRFKDSLGNPTHILRIGESYKEKQRTIQAKKEVEQRRAGGYSRKYASKAKNLADDMVRNTARDLLYYAVTQDAMLIFENLSRGFGRQGKRTFMAERQYTRMEDWLTAKLAYEGLPSKTYLSKTLAQYTSKTCSNCGFTITSADYDRVLEKLKKTATGWMTTINGKELKVEGQITYYNRYKRQNVVKDLSVELDRLSEESVNNDISSWTKGRSGEALSLLKKRFSHRPVQEKFVCLNCGFETHADEQAALNIARSWLFLRSQEYKKYQTNKTTGNTDKRAFVETWQSFYRKKLKEVWKPAV

SEQ ID NO: 30793 - protein, 978 aa, synthetic construct
  REGION 1..978: note = engineered CasX variant
QEIGRINKIRRRLVKDSNTKKAGKTGPMKTLLVRVMTPDLRERLENLRKKPENIPQPISNTSRANLNKLLTDYTEMKKAILHVYWEEFQKDPVGLMSRVAQPASKKIDQNKLKPEMDEKGNLTTAGFACSQCGQPLFVYKLEQVSEKGKAYTNYFGRCNVAEHEKLILLDQLKPEKDSDEAVTYSLGKFGQRALDFYSIHVTKESTHPVKPLAQIAGNRYASSPVGKALSDACMGTIASFLSKYQDIIIEHQKVVKGNQKRLESLRELAGKENLEYPSVTLPPQPHTKEGVDAYNEVIARVRMWVNLNLWQKLKLSRDDAKPLLRLKGFPSFPLVERQANEVDWWDMVCNVKKLINEKKEDGKVFWQNLAGYKRQEALRPYLSSEEDRKKGKKFARYQLGDLLLHLEKKHGEDWGKVYDEAWERIDKKVEGLSKHIKLEEERRSEDAQSKAALTDWLRAKASFVIEGLKEADKDEFCRCELKLQKWYGDLRGKPFAIEAENSILDISGFSKQYNCAFIWQKDGVKKLNLYLIINYFKGGKLRFKKIKPEAFEANRFYTVINKKSGEIVPMEVNFNFDDPNLIILPLAFGKRQGREFIWNDLLSLETGSLKLANGRVIEKTLYNRRTRQDEPALFVALTFERREVLDSSNIKPMNLIGVDRGENIPAVIALTDPEGCPLSRFKDSLGNPTHILRIGESYKEKQRTIQAKKEVEQRRAGGYSRKYASKAKNLADDMVRNTARDLLYYAVTQDAMLIFENLSRGFGRQGKRTFMAERQYTRMEDWLTAKLAYEGLPSKTYLSKTLAQYTSKTCSNCGFTITSADYDRVLEKLKKTATGWMTTINGKELKVEGQITYYNRYKRQNVVKDLSVELDRLSEESVNNDISSWTKGRSGEALSLLKKRFSHRPVQEKFVCLNCGFETHADEQAALNIARSWLFLRSQEYKKYQTNKTTGNTDKRAFVETWQSFYRKKLKEVWKPAV

SEQ ID NO: 30794 - protein, 978 aa, synthetic construct
  REGION 1..978: note = engineered CasX variant
QEIGRINKIRRRLVKDSNTKKAGKTGPMKTLLVRVMTPDLRERLENLRKKPENIPQPISNTSRANLNKLLTDYTEMKKAILHVYWEEFQKDPVGLMSRVAQPASKKIDQNKLKPEMDEKGNLTTAGFACSQCGQPLFVYKLEQVSEKGKAYTNYFGRCNVAEHEKLILLDQLKPEKDSDEAVTYSLGKFGQRALDFYSIHVTKESTHPVKPLAQIAGNRYASTPVGKALSDACMGTIASFLSKYQDIIIEHQKVVKGNQKRLESLRELAGKENLEYPSVTLPPQPHTKEGVDAYNEVIARVRMWVNLNLWQKLKLSRDDAKPLLRLKGFPSFPLVERQANEVDWWDMVCNVKKLINEKKEDGKVFWQNLAGYKRQEALRPYLSSEEDRKKGKKFARYQLGDLLLHLEKKHGEDWGKVYDEAWERIDKKVEGLSKHIKLEEERRSEDAQSKAALTDWLRAKASFVIEGLKEADKDEFCRCELKLQKWYGDLRGKPFAIEAENSILDISGFSKQYNCAFIWQKDGVKKLNLYLIINYFKGGKLRFKKIKPEAFEANRFYTVINKKSGEIVPMEVNFNFDDPNLIILPLAFGKRQGREFIWNDLLSLETGSLKLANGRVIEKTLYNRRTRQDEPALFVALTFERREVLDSSNIKPMNLIGVDRGENIPAVIALTDPEGCPLSRFKDSLGNPTHILRIGESYKEKQRTIQAKKEVEQRRAGGYSRKYASKAKNLADDMVRNTARDLLYYAVTQDAMLIFENLSRGFGRQGKRTFMAERQYTRMEDWLTAKLAYEGLPSKTYLSKTLAQYTSKTCSNCGFTITSADYDRVLEKLKKTATGWMTTINGKELKVEGQITYYNRYKRQNVVKDLSVELDRLSEESVNNDISSWTKGRSGEALSLLKKRFSHRPVQEKFVCLNCGFETHADEQAALNIARSWLFLRSQEYKKYQTNKTTGNTDKRAFVETWQSFYRKKLKEVWKPAV

SEQ ID NO: 30795 - protein, 978 aa, synthetic construct
  REGION 1..978: note = engineered CasX variant
QEIGRINKIRRRLVKDSNTKKAGKTGPMKTLLVRVMTPDLRERLENLRKKPENIPQPISNTSRANLNKLLTDYTEMKKAILHVYWEEFQKDPVGLMSRVAQPASKKIDQNKLKPEMDEKGNLTTAGFACSQCGQPLFVYKLEQVSEKGKAYTNYFGRCNVAEHEKLILLDQLKPEKDSDEAVTYSLGKFGQRALDFYSIHVTKESTHPVKPLAQIAGNRYASAPVGKALSDACMGTIASFLSKYQDIIIEHQKVVKGNQKRLESLRELAGKENLEYPSVTLPPQPHTKEGVDAYNEVIARVRMWVNLNLWQKLKLSRDDAKPLLRLKGFPSFPLVERQANEVDWWDMVCNVKKLINEKKEDGKVFWQNLAGYKRQEALRPYLSSEEDRKKGKKFARYQLGDLLLHLEKKHGEDWGKVYDEAWERIDKKVEGLSKHIKLEEERRSEDAQSKAALTDWLRAKASFVIEGLKEADKDEFCRCELKLQKWYGDLRGKPFAIEAENSILDISGFSKQYNCAFIWQKDGVKKLNLYLIINYFKGGKLRFKKIKPEAFEANRFYTVINKKSGEIVPMEVNFNFDDPNLIILPLAFGKRQGREFIWNDLLSLETGSLKLANGRVIEKTLYNRRTRQDEPALFVALTFERREVLDSSNIKPMNLIGVDRGENIPAVIALTDPEGCPLSRFKDSLGNPTHILRIGESYKEKQRTIQAKKEVEQRRAGGYSRKYASKAKNLADDMVRNTARDLLYYAVTQDAMLIFENLSRGFGRQGKRTFMAERQYTRMEDWLTAKLAYEGLPSKTYLSKTLAQYTSKTCSNCGFTITSADYDRVLEKLKKTATGWMTTINGKELKVEGQITYYNRYKRQNVVKDLSVELDRLSEESVNNDISSWTKGRSGEALSLLKKRFSHRPVQEKFVCLNCGFETHADEQAALNIARSWLFLRSQEYKKYQTNKTTGNTDKRAFVETWQSFYRKKLKEVWKPAV

SEQ ID NO: 30796 - protein, 978 aa, synthetic construct
  REGION 1..978: note = engineered CasX variant
QEIGRINKIRRRLVKDSNTKKAGKTGPMKTLLVRVMTPDLRERLENLRKKPENIPQPISNTSRANLNKLLTDYTEMKKAILHVYWEEFQKDPVGLMSRVAQPASKKIDQNKLKPEMDEKGNLTTAGFACSQCGQPLFVYKLEQVSEKGKAYTNYFGRCNVAEHEKLILLDQLKPEKDSDEAVTYSLGKFGQRALDFYSIHVTKESTHPVKPLAQIAGNRYASVPVGKALSDACMGTIASFLSKYQDIIIEHQKVVKGNQKRLESLRELAGKENLEYPSVTLPPQPHTKEGVDAYNEVIARVRMWVNLNLWQKLKLSRDDAKPLLRLKGFPSFPLVERQANEVDWWDMVCNVKKLINEKKEDGKVFWQNLAGYKRQEALRPYLSSEEDRKKGKKFARYQLGDLLLHLEKKHGEDWGKVYDEAWERIDKKVEGLSKHIKLEEERRSEDAQSKAALTDWLRAKASFVIEGLKEADKDEFCRCELKLQKWYGDLRGKPFAIEAENSILDISGFSKQYNCAFIWQKDGVKKLNLYLIINYFKGGKLRFKKIKPEAFEANRFYTVINKKSGEIVPMEVNFNFDDPNLIILPLAFGKRQGREFIWNDLLSLETGSLKLANGRVIEKTLYNRRTRQDEPALFVALTFERREVLDSSNIKPMNLIGVDRGENIPAVIALTDPEGCPLSRFKDSLGNPTHILRIGESYKEKQRTIQAKKEVEQRRAGGYSRKYASKAKNLADDMVRNTARDLLYYAVTQDAMLIFENLSRGFGRQGKRTFMAERQYTRMEDWLTAKLAYEGLPSKTYLSKTLAQYTSKTCSNCGFTITSADYDRVLEKLKKTATGWMTTINGKELKVEGQITYYNRYKRQNVVKDLSVELDRLSEESVNNDISSWTKGRSGEALSLLKKRFSHRPVQEKFVCLNCGFETHADEQAALNIARSWLFLRSQEYKKYQTNKTTGNTDKRAFVETWQSFYRKKLKEVWKPAV

SEQ ID NO: 30797 - protein, 978 aa, synthetic construct
  REGION 1..978: note = engineered CasX variant
QEIGRINKIRRRLVKDSNTKKAGKTGPMKTLLVRVMTPDLRERLENLRKKPENIPQPISNTSRANLNKLLTDYTEMKKAILHVYWEEFQKDPVGLMSRVAQPASKKIDQNKLKPEMDEKGNLTTAGFACSQCGQPLFVYKLEQVSEKGKAYTNYFGRCNVAEHEKLIKLDQLKPEKDSDEAVTYSLGKFGQRALDFYSIHVTKESTHPVKPLAQIAGNRYASGPVGKALSDACMGTIASFLSKYQDIIIEHQKVVKGNQKRLESLRELAGKENLEYPSVTLPPQPHTKEGVDAYNEVIARVRMWVNLNLWQKLKLSRDDAKPLLRLKGFPSFPLVERQANEVDWWDMVCNVKKLINEKKEDGKVFWQNLAGYKRQEALRPYLSSEEDRKKGKKFARYQLGDLLLHLEKKHGEDWGKVYDEAWERIDKKVEGLSKHIKLEEERRSEDAQSKAALTDWLRAKASFVIEGLKEADKDEFCRCELKLQKWYGDLRGKPFAIEAENSILDISGFSKQYNCAFIWQKDGVKKLNLYLIINYFKGGKLRFKKIKPEAFEANRFYTVINKKSGEIVPMEVNFNFDDPNLIILPLAFGKRQGREFIWNDLLSLETGSLKLANGRVIEKTLYNRRTRQDEPALFVALTFERREVLDSSNIKPMNLIGVDRGENIPAVIALTDPEGCPLSRFKDSLGNPTHILRIGESYKEKQRTIQAKKEVEQRRAGGYSRKYASKAKNLADDMVRNTARDLLYYAVTQDAMLIFENLSRGFGRQGKRTFMAERQYTRMEDWLTAKLAYEGLPSKTYLSKTLAQYTSKTCSNCGFTITSADYDRVLEKLKKTATGWMTTINGKELKVEGQITYYNRYKRQNVVKDLSVELDRLSEESVNNDISSWTKGRSGEALSLLKKRFSHRPVQEKFVCLNCGFETHADEQAALNIARSWLFLRSQEYKKYQTNKTTGNTDKRAFVETWQSFYRKKLKEVWKPAV

SEQ ID NO: 30798 - protein, 977 aa, synthetic construct
  REGION 1..977: note = engineered CasX variant
QEIGRINKIRRRLVKDSNTKKAGKTGPMKTLLVRVMTPDLRERLENLRKKPENIPQPISNTSRANLNKLLTDYTEMKKAILHVYWEEFQKDPVGLMSRVAQPASKKIDQNKLKPEMDEKGNLTTAGFACSQCGQPLFVYKLEQVSEKGKAYTNYFGRCNVAEHEKLILLDQLKPEKDSDEAVTYSLGKFGQRALDFYSIHVTKESTHPVKPLAQIAGNRYASPVGKALSDACMGTIASFLSKYQDIIIEHQKVVKGNQKRLESLRELAGKENLEYPSVTLPPQPHTKEGVDAYNEVIARVRMWVNLNLWQKLKLSRDDAKPLLRLKGFPSFPLVERQANEVDWWDMVCNVKKLINEKKEDGKVFWQNLAGYKRQEALRPYLSSEEDRKKGKKFARYQLGDLLLHLEKKHGEDWGKVYDEAWERIDKKVEGLSKHIKLEEERRSEDAQSKAALTDWLRAKASFVIEGLKEADKDEFCRCELKLQKWYGDLRGKPFAIEAENSILDISGFSKQYNCAFIWQKDGVKKLNLYLIINYFKGGKLRFKKIKPEAFEANRFYTVINKKSGEIVPMEVNFNFDDPNLIILPLAFGKRQGREFIWNDLLSLETGSLKLANGRVIEKTLYNRRTRQDEPALFVALTFERREVLDSSNIKPMNLIGVDRGENIPAVIALTDPEGCPLSRFKDSLGNPTHILRIGESYKEKQRTIQAKKEVEQRRAGGYSRKYASKAKNLADDMVRNTARDLLYYAVTQDAMLIFENLSRGFGRQGKRTFMAERQYTRMEDWLTAKLAYEGLPSKTYLSKTLAQYTSKTCSNCGFTITSADYDRVLEKLKKTATGWMTTINGKELKVEGQITYYNRYKRQNVVKDLSVELDRLSEESVNNDISSWTKGRSGEALSLLKKRFSHRPVQEKFVCLNCGFETHADEQAALNIARSWLFLRSQEYKKYQTNKTTGNTDKRAFVETWQSFYRKKLKEVWKPAV

SEQ ID NO: 30799 - protein, 979 aa, synthetic construct
  REGION 1..979: note = engineered CasX variant
QEIKGRINKIRRRLVKDSNTKKAGKTGPMKTLLVRVMTPDLRERLENLRKKPENIPQPISNTSRANLNKLLTDYTEMKKAILHVYWEEFQKDPVGLMSRVAQPASKKIDQNKLKPEMDEKGNLTTAGFACSQCGQPLFVYKLEQVSEKGKAYTNYFGRCNVAEHEKLILLDQLKPEKDSDEAVTYSLGKFGQRALDFYSIHVTKESTHPVKPLAQIAGNRYASYPVGKALSDACMGTIASFLSKYQDIIIEHQKVVKGNQKRLESLRELAGKENLEYPSVTLPPQPHTKEGVDAYNEVIARVRMWVNLNLWQKLKLSRDDAKPLLRLKGFPSFPLVERQANEVDWWDMVCNVKKLINEKKEDGKVFWQNLAGYKRQEALRPYLSSEEDRKKGKKFARYQLGDLLLHLEKKHGEDWGKVYDEAWERIDKKVEGLSKHIKLEEERRSEDAQSKAALTDWLRAKASFVIEGLKEADKDEFCRCELKLQKWYGDLRGKPFAIEAENSILDISGFSKQYNCAFIWQKDGVKKLNLYLIINYFKGGKLRFKKIKPEAFEANRFYTVINKKSGEIVPMEVNFNFDDPNLIILPLAFGKRQGREFIWNDLLSLETGSLKLANGRVIEKTLYNRRTRQDEPALFVALTFERREVLDSSNIKPMNLIGVDRGENIPAVIALTDPEGCPLSRFKDSLGNPTHILRIGESYKEKQRTIQAKKEVEQRRAGGYSRKYASKAKNLADDMVRNTARDLLYYAVTQDAMLIFENLSRGFGRQGKRTFMAERQYTRMEDWLTAKLAYEGLPSKTYLSKTLAQYTSKTCSNCGFTITSADYDRVLEKLKKTATGWMTTINGKELKVEGQITYYNRYKRQNVVKDLSVELDRLSEESVNNDISSWTKGRSGEALSLLKKRFSHRPVQEKFVCLNCGFETHADEQAALNIARSWLFLRSQEYKKYQTNKTTGNTDKRAFVETWQSFYRKKLKEVWKPAV

SEQ ID NO: 30800 - protein, 979 aa, synthetic construct
  REGION 1..979: note = engineered CasX variant
QEIKGRINKIRRRLVKDSNTKKAGKTGPMKTLLVRVMTPDLRERLENLRKKPENIPQPISNTSRANLNKLLTDYTEMKKAILHVYWEEFQKDPVGLMSRVAQPASKKIDQNKLKPEMDEKGNLTTAGFACSQCGQPLFVYKLEQVSEKGKAYTNYFGRCNVAEHEKLILLDQLKPEKDSDEAVTYSLGKFGQRALDFYSIHVTKESTHPVKPLAQIAGNRYASHPVGKALSDACMGTIASFLSKYQDIIIEHQKVVKGNQKRLESLRELAGKENLEYPSVTLPPQPHTKEGVDAYNEVIARVRMWVNLNLWQKLKLSRDDAKPLLRLKGFPSFPLVERQANEVDWWDMVCNVKKLINEKKEDGKVFWQNLAGYKRQEALRPYLSSEEDRKKGKKFARYQLGDLLLHLEKKHGEDWGKVYDEAWERIDKKVEGLSKHIKLEEERRSEDAQSKAALTDWLRAKASFVIEGLKEADKDEFCRCELKLQKWYGDLRGKPFAIEAENSILDISGFSKQYNCAFIWQKDGVKKLNLYLIINYFKGGKLRFKKIKPEAFEANRFYTVINKKSGEIVPMEVNFNFDDPNLIILPLAFGKRQGREFIWNDLLSLETGSLKLANGRVIEKTLYNRRTRQDEPALFVALTFERREVLDSSNIKPMNLIGVDRGENIPAVIALTDPEGCPLSRFKDSLGNPTHILRIGESYKEKQRTIQAKKEVEQRRAGGYSRKYASKAKNLADDMVRNTARDLLYYAVTQDAMLIFENLSRGFGRQGKRTFMAERQYTRMEDWLTAKLAYEGLPSKTYLSKTLAQYTSKTCSNCGFTITSADYDRVLEKLKKTATGWMTTINGKELKVEGQITYYNRYKRQNVVKDLSVELDRLSEESVNNDISSWTKGRSGEALSLLKKRFSHRPVQEKFVCLNCGFETHADEQAALNIARSWLFLRSQEYKKYQTNKTTGNTDKRAFVETWQSFYRKKLKEVWKPAV

SEQ ID NO: 30801 - protein, 979 aa, synthetic construct
  REGION 1..979: note = engineered CasX variant
QEIKGRINKIRRRLVKDSNTKKAGKTGPMKTLLVRVMTPDLRERLENLRKKPENIPQPISNTSRANLNKLLTDYTEMKKAILHVYWEEFQKDPVGLMSRVAQPASKKIDQNKLKPEMDEKGNLTTAGFACSQCGQPLFVYKLEQVSEKGKAYTNYFGRCNVAEHEKLILLDQLKPEKDSDEAVTYSLGKFGQRALDFYSIHVTKESTHPVKPLAQIAGNRYASSPVGKALSDACMGTIASFLSKYQDIIIEHQKVVKGNQKRLESLRELAGKENLEYPSVTLPPQPHTKEGVDAYNEVIARVRMWVNLNLWQKLKLSRDDAKPLLRLKGFPSFPLVERQANEVDWWDMVCNVKKLINEKKEDGKVFWQNLAGYKRQEALRPYLSSEEDRKKGKKFARYQLGDLLLHLEKKHGEDWGKVYDEAWERIDKKVEGLSKHIKLEEERRSEDAQSKAALTDWLRAKASFVIEGLKEADKDEFCRCELKLQKWYGDLRGKPFAIEAENSILDISGFSKQYNCAFIWQKDGVKKLNLYLIINYFKGGKLRFKKIKPEAFEANRFYTVINKKSGEIVPMEVNFNFDDPNLIILPLAFGKRQGREFIWNDLLSLETGSLKLANGRVIEKTLYNRRTRQDEPALFVALTFERREVLDSSNIKPMNLIGVDRGENIPAVIALTDPEGCPLSRFKDSLGNPTHILRIGESYKEKQRTIQAKKEVEQRRAGGYSRKYASKAKNLADDMVRNTARDLLYYAVTQDAMLIFENLSRGFGRQGKRTFMAERQYTRMEDWLTAKLAYEGLPSKTYLSKTLAQYTSKTCSNCGFTITSADYDRVLEKLKKTATGWMTTINGKELKVEGQITYYNRYKRQNVVKDLSVELDRLSEESVNNDISSWTKGRSGEALSLLKKRFSHRPVQEKFVCLNCGFETHADEQAALNIARSWLFLRSQEYKKYQTNKTTGNTDKRAFVETWQSFYRKKLKEVWKPAV

SEQ ID NO: 30802 - protein, 979 aa, synthetic construct
  REGION 1..979: note = engineered CasX variant
QEIKGRINKIRRRLVKDSNTKKAGKTGPMKTLLVRVMTPDLRERLENLRKKPENIPQPISNTSRANLNKLLTDYTEMKKAILHVYWEEFQKDPVGLMSRVAQPASKKIDQNKLKPEMDEKGNLTTAGFACSQCGQPLFVYKLEQVSEKGKAYTNYFGRCNVAEHEKLILLDQLKPEKDSDEAVTYSLGKFGQRALDFYSIHVTKESTHPVKPLAQIAGNRYASTPVGKALSDACMGTIASFLSKYQDIIIEHQKVVKGNQKRLESLRELAGKENLEYPSVTLPPQPHTKEGVDAYNEVIARVRMWVNLNLWQKLKLSRDDAKPLLRLKGFPSFPLVERQANEVDWWDMVCNVKKLINEKKEDGKVFWQNLAGYKRQEALRPYLSSEEDRKKGKKFARYQLGDLLLHLEKKHGEDWGKVYDEAWERIDKKVEGLSKHIKLEEERRSEDAQSKAALTDWLRAKASFVIEGLKEADKDEFCRCELKLQKWYGDLRGKPFAIEAENSILDISGFSKQYNCAFIWQKDGVKKLNLYLIINYFKGGKLRFKKIKPEAFEANRFYTVINKKSGEIVPMEVNFNFDDPNLIILPLAFGKRQGREFIWNDLLSLETGSLKLANGRVIEKTLYNRRTRQDEPALFVALTFERREVLDSSNIKPMNLIGVDRGENIPAVIALTDPEGCPLSRFKDSLGNPTHILRIGESYKEKQRTIQAKKEVEQRRAGGYSRKYASKAKNLADDMVRNTARDLLYYAVTQDAMLIFENLSRGFGRQGKRTFMAERQYTRMEDWLTAKLAYEGLPSKTYLSKTLAQYTSKTCSNCGFTITSADYDRVLEKLKKTATGWMTTINGKELKVEGQITYYNRYKRQNVVKDLSVELDRLSEESVNNDISSWTKGRSGEALSLLKKRFSHRPVQEKFVCLNCGFETHADEQAALNIARSWLFLRSQEYKKYQTNKTTGNTDKRAFVETWQSFYRKKLKEVWKPAV

SEQ ID NO: 30803 - protein, 979 aa, synthetic construct
  REGION 1..979: note = engineered CasX variant
QEIKGRINKIRRRLVKDSNTKKAGKTGPMKTLLVRVMTPDLRERLENLRKKPENIPQPISNTSRANLNKLLTDYTEMKKAILHVYWEEFQKDPVGLMSRVAQPASKKIDQNKLKPEMDEKGNLTTAGFACSQCGQPLFVYKLEQVSEKGKAYTNYFGRCNVAEHEKLILLDQLKPEKDSDEAVTYSLGKFGQRALDFYSIHVTKESTHPVKPLAQIAGNRYASAPVGKALSDACMGTIASFLSKYQDIIIEHQKVVKGNQKRLESLRELAGKENLEYPSVTLPPQPHTKEGVDAYNEVIARVRMWVNLNLWQKLKLSRDDAKPLLRLKGFPSFPLVERQANEVDWWDMVCNVKKLINEKKEDGKVFWQNLAGYKRQEALRPYLSSEEDRKKGKKFARYQLGDLLLHLEKKHGEDWGKVYDEAWERIDKKVEGLSKHIKLEEERRSEDAQSKAALTDWLRAKASFVIEGLKEADKDEFCRCELKLQKWYGDLRGKPFAIEAENSILDISGFSKQYNCAFIWQKDGVKKLNLYLIINYFKGGKLRFKKIKPEAFEANRFYTVINKKSGEIVPMEVNFNFDDPNLIILPLAFGKRQGREFIWNDLLSLETGSLKLANGRVIEKTLYNRRTRQDEPALFVALTFERREVLDSSNIKPMNLIGVDRGENIPAVIALTDPEGCPLSRFKDSLGNPTHILRIGESYKEKQRTIQAKKEVEQRRAGGYSRKYASKAKNLADDMVRNTARDLLYYAVTQDAMLIFENLSRGFGRQGKRTFMAERQYTRMEDWLTAKLAYEGLPSKTYLSKTLAQYTSKTCSNCGFTITSADYDRVLEKLKKTATGWMTTINGKELKVEGQITYYNRYKRQNVVKDLSVELDRLSEESVNNDISSWTKGRSGEALSLLKKRFSHRPVQEKFVCLNCGFETHADEQAALNIARSWLFLRSQEYKKYQTNKTTGNTDKRAFVETWQSFYRKKLKEVWKPAV

SEQ ID NO: 30804 - protein, 979 aa, synthetic construct
  REGION 1..979: note = engineered CasX variant
QEIKGRINKIRRRLVKDSNTKKAGKTGPMKTLLVRVMTPDLRERLENLRKKPENIPQPISNTSRANLNKLLTDYTEMKKAILHVYWEEFQKDPVGLMSRVAQPASKKIDQNKLKPEMDEKGNLTTAGFACSQCGQPLFVYKLEQVSEKGKAYTNYFGRCNVAEHEKLILLDQLKPEKDSDEAVTYSLGKFGQRALDFYSIHVTKESTHPVKPLAQIAGNRYASVPVGKALSDACMGTIASFLSKYQDIIIEHQKVVKGNQKRLESLRELAGKENLEYPSVTLPPQPHTKEGVDAYNEVIARVRMWVNLNLWQKLKLSRDDAKPLLRLKGFPSFPLVERQANEVDWWDMVCNVKKLINEKKEDGKVFWQNLAGYKRQEALRPYLSSEEDRKKGKKFARYQLGDLLLHLEKKHGEDWGKVYDEAWERIDKKVEGLSKHIKLEEERRSEDAQSKAALTDWLRAKASFVIEGLKEADKDEFCRCELKLQKWYGDLRGKPFAIEAENSILDISGFSKQYNCAFIWQKDGVKKLNLYLIINYFKGGKLRFKKIKPEAFEANRFYTVINKKSGEIVPMEVNFNFDDPNLIILPLAFGKRQGREFIWNDLLSLETGSLKLANGRVIEKTLYNRRTRQDEPALFVALTFERREVLDSSNIKPMNLIGVDRGENIPAVIALTDPEGCPLSRFKDSLGNPTHILRIGESYKEKQRTIQAKKEVEQRRAGGYSRKYASKAKNLADDMVRNTARDLLYYAVTQDAMLIFENLSRGFGRQGKRTFMAERQYTRMEDWLTAKLAYEGLPSKTYLSKTLAQYTSKTCSNCGFTITSADYDRVLEKLKKTATGWMTTINGKELKVEGQITYYNRYKRQNVVKDLSVELDRLSEESVNNDISSWTKGRSGEALSLLKKRFSHRPVQEKFVCLNCGFETHADEQAALNIARSWLFLRSQEYKKYQTNKTTGNTDKRAFVETWQSFYRKKLKEVWKPAV

SEQ ID NO: 30805 - protein, 979 aa, synthetic construct
  REGION 1..979: note = engineered CasX variant
QEIKGRINKIRRRLVKDSNTKKAGKTGPMKTLLVRVMTPDLRERLENLRKKPENIPQPISNTSRANLNKLLTDYTEMKKAILHVYWEEFQKDPVGLMSRVAQPASKKIDQNKLKPEMDEKGNLTTAGFACSQCGQPLFVYKLEQVSEKGKAYTNYFGRCNVAEHEKLIKLDQLKPEKDSDEAVTYSLGKFGQRALDFYSIHVTKESTHPVKPLAQIAGNRYASGPVGKALSDACMGTIASFLSKYQDIIIEHQKVVKGNQKRLESLRELAGKENLEYPSVTLPPQPHTKEGVDAYNEVIARVRMWVNLNLWQKLKLSRDDAKPLLRLKGFPSFPLVERQANEVDWWDMVCNVKKLINEKKEDGKVFWQNLAGYKRQEALRPYLSSEEDRKKGKKFARYQLGDLLLHLEKKHGEDWGKVYDEAWERIDKKVEGLSKHIKLEEERRSEDAQSKAALTDWLRAKASFVIEGLKEADKDEFCRCELKLQKWYGDLRGKPFAIEAENSILDISGFSKQYNCAFIWQKDGVKKLNLYLIINYFKGGKLRFKKIKPEAFEANRFYTVINKKSGEIVPMEVNFNFDDPNLIILPLAFGKRQGREFIWNDLLSLETGSLKLANGRVIEKTLYNRRTRQDEPALFVALTFERREVLDSSNIKPMNLIGVDRGENIPAVIALTDPEGCPLSRFKDSLGNPTHILRIGESYKEKQRTIQAKKEVEQRRAGGYSRKYASKAKNLADDMVRNTARDLLYYAVTQDAMLIFENLSRGFGRQGKRTFMAERQYTRMEDWLTAKLAYEGLPSKTYLSKTLAQYTSKTCSNCGFTITSADYDRVLEKLKKTATGWMTTINGKELKVEGQITYYNRYKRQNVVKDLSVELDRLSEESVNNDISSWTKGRSGEALSLLKKRFSHRPVQEKFVCLNCGFETHADEQAALNIARSWLFLRSQEYKKYQTNKTTGNTDKRAFVETWQSFYRKKLKEVWKPAV

SEQ ID NO: 30806 - protein, 978 aa, synthetic construct
  REGION 1..978: note = engineered CasX variant
QEIKGRINKIRRRLVKDSNTKKAGKTGPMKTLLVRVMTPDLRERLENLRKKPENIPQPISNTSRANLNKLLTDYTEMKKAILHVYWEEFQKDPVGLMSRVAQPASKKIDQNKLKPEMDEKGNLTTAGFACSQCGQPLFVYKLEQVSEKGKAYTNYFGRCNVAEHEKLILLDQLKPEKDSDEAVTYSLGKFGQRALDFYSIHVTKESTHPVKPLAQIAGNRYASPVGKALSDACMGTIASFLSKYQDIIIEHQKVVKGNQKRLESLRELAGKENLEYPSVTLPPQPHTKEGVDAYNEVIARVRMWVNLNLWQKLKLSRDDAKPLLRLKGFPSFPLVERQANEVDWWDMVCNVKKLINEKKEDGKVFWQNLAGYKRQEALRPYLSSEEDRKKGKKFARYQLGDLLLHLEKKHGEDWGKVYDEAWERIDKKVEGLSKHIKLEEERRSEDAQSKAALTDWLRAKASFVIEGLKEADKDEFCRCELKLQKWYGDLRGKPFAIEAENSILDISGFSKQYNCAFIWQKDGVKKLNLYLIINYFKGGKLRFKKIKPEAFEANRFYTVINKKSGEIVPMEVNFNFDDPNLIILPLAFGKRQGREFIWNDLLSLETGSLKLANGRVIEKTLYNRRTRQDEPALFVALTFERREVLDSSNIKPMNLIGVDRGENIPAVIALTDPEGCPLSRFKDSLGNPTHILRIGESYKEKQRTIQAKKEVEQRRAGGYSRKYASKAKNLADDMVRNTARDLLYYAVTQDAMLIFENLSRGFGRQGKRTFMAERQYTRMEDWLTAKLAYEGLPSKTYLSKTLAQYTSKTCSNCGFTITSADYDRVLEKLKKTATGWMTTINGKELKVEGQITYYNRYKRQNVVKDLSVELDRLSEESVNNDISSWTKGRSGEALSLLKKRFSHRPVQEKFVCLNCGFETHADEQAALNIARSWLFLRSQEYKKYQTNKTTGNTDKRAFVETWQSFYRKKLKEVWKPAV

SEQ ID NO: 30807 - protein, 978 aa, synthetic construct
  REGION 1..978: note = engineered CasX variant
QEIKRANKIRRRLVKDSNTKKAGKTGPMKTLLVRVMTPDLRERLENLRKKPENIPQPISNTSRANLNKLLTDYTEMKKAILHVYWEEFQKDPVGLMSRVAQPASKKIDQNKLKPEMDEKGNLTTAGFACSQCGQPLFVYKLEQVSEKGKAYTNYFGRCNVAEHEKLILLDQLKPEKDSDEAVTYSLGKFGQRALDFYSIHVTKESTHPVKPLAQIAGNRYASYPVGKALSDACMGTIASFLSKYQDIIIEHQKVVKGNQKRLESLRELAGKENLEYPSVTLPPQPHTKEGVDAYNEVIARVRMWVNLNLWQKLKLSRDDAKPLLRLKGFPSFPLVERQANEVDWWDMVCNVKKLINEKKEDGKVFWQNLAGYKRQEALRPYLSSEEDRKKGKKFARYQLGDLLLHLEKKHGEDWGKVYDEAWERIDKKVEGLSKHIKLEEERRSEDAQSKAALTDWLRAKASFVIEGLKEADKDEFCRCELKLQKWYGDLRGKPFAIEAENSILDISGFSKQYNCAFIWQKDGVKKLNLYLIINYFKGGKLRFKKIKPEAFEANRFYTVINKKSGEIVPMEVNFNFDDPNLIILPLAFGKRQGREFIWNDLLSLETGSLKLANGRVIEKTLYNRRTRQDEPALFVALTFERREVLDSSNIKPMNLIGVDRGENIPAVIALTDPEGCPLSRFKDSLGNPTHILRIGESYKEKQRTIQAKKEVEQRRAGGYSRKYASKAKNLADDMVRNTARDLLYYAVTQDAMLIFENLSRGFGRQGKRTFMAERQYTRMEDWLTAKLAYEGLPSKTYLSKTLAQYTSKTCSNCGFTITSADYDRVLEKLKKTATGWMTTINGKELKVEGQITYYNRYKRQNVVKDLSVELDRLSEESVNNDISSWTKGRSGEALSLLKKRFSHRPVQEKFVCLNCGFETHADEQAALNIARSWLFLRSQEYKKYQTNKTTGNTDKRAFVETWQSFYRKKLKEVWKPAV

SEQ ID NO: 30808 - protein, 978 aa, synthetic construct
  REGION 1..978: note = engineered CasX variant
QEIKRANKIRRRLVKDSNTKKAGKTGPMKTLLVRVMTPDLRERLENLRKKPENIPQPISNTSRANLNKLLTDYTEMKKAILHVYWEEFQKDPVGLMSRVAQPASKKIDQNKLKPEMDEKGNLTTAGFACSQCGQPLFVYKLEQVSEKGKAYTNYFGRCNVAEHEKLILLDQLKPEKDSDEAVTYSLGKFGQRALDFYSIHVTKESTHPVKPLAQIAGNRYASHPVGKALSDACMGTIASFLSKYQDIIIEHQKVVKGNQKRLESLRELAGKENLEYPSVTLPPQPHTKEGVDAYNEVIARVRMWVNLNLWQKLKLSRDDAKPLLRLKGFPSFPLVERQANEVDWWDMVCNVKKLINEKKEDGKVFWQNLAGYKRQEALRPYLSSEEDRKKGKKFARYQLGDLLLHLEKKHGEDWGKVYDEAWERIDKKVEGLSKHIKLEEERRSEDAQSKAALTDWLRAKASFVIEGLKEADKDEFCRCELKLQKWYGDLRGKPFAIEAENSILDISGFSKQYNCAFIWQKDGVKKLNLYLIINYFKGGKLRFKKIKPEAFEANRFYTVINKKSGEIVPMEVNFNFDDPNLIILPLAFGKRQGREFIWNDLLSLETGSLKLANGRVIEKTLYNRRTRQDEPALFVALTFERREVLDSSNIKPMNLIGVDRGENIPAVIALTDPEGCPLSRFKDSLGNPTHILRIGESYKEKQRTIQAKKEVEQRRAGGYSRKYASKAKNLADDMVRNTARDLLYYAVTQDAMLIFENLSRGFGRQGKRTFMAERQYTRMEDWLTAKLAYEGLPSKTYLSKTLAQYTSKTCSNCGFTITSADYDRVLEKLKKTATGWMTTINGKELKVEGQITYYNRYKRQNVVKDLSVELDRLSEESVNNDISSWTKGRSGEALSLLKKRFSHRPVQEKFVCLNCGFETHADEQAALNIARSWLFLRSQEYKKYQTNKTTGNTDKRAFVETWQSFYRKKLKEVWKPAV

SEQ ID NO: 30809 - protein, 978 aa, synthetic construct
  REGION 1..978: note = engineered CasX variant
QEIKRANKIRRRLVKDSNTKKAGKTGPMKTLLVRVMTPDLRERLENLRKKPENIPQPISNTSRANLNKLLTDYTEMKKAILHVYWEEFQKDPVGLMSRVAQPASKKIDQNKLKPEMDEKGNLTTAGFACSQCGQPLFVYKLEQVSEKGKAYTNYFGRCNVAEHEKLILLDQLKPEKDSDEAVTYSLGKFGQRALDFYSIHVTKESTHPVKPLAQIAGNRYASSPVGKALSDACMGTIASFLSKYQDIIIEHQKVVKGNQKRLESLRELAGKENLEYPSVTLPPQPHTKEGVDAYNEVIARVRMWVNLNLWQKLKLSRDDAKPLLRLKGFPSFPLVERQANEVDWWDMVCNVKKLINEKKEDGKVFWQNLAGYKRQEALRPYLSSEEDRKKGKKFARYQLGDLLLHLEKKHGEDWGKVYDEAWERIDKKVEGLSKHIKLEEERRSEDAQSKAALTDWLRAKASFVIEGLKEADKDEFCRCELKLQKWYGDLRGKPFAIEAENSILDISGFSKQYNCAFIWQKDGVKKLNLYLIINYFKGGKLRFKKIKPEAFEANRFYTVINKKSGEIVPMEVNFNFDDPNLIILPLAFGKRQGREFIWNDLLSLETGSLKLANGRVIEKTLYNRRTRQDEPALFVALTFERREVLDSSNIKPMNLIGVDRGENIPAVIALTDPEGCPLSRFKDSLGNPTHILRIGESYKEKQRTIQAKKEVEQRRAGGYSRKYASKAKNLADDMVRNTARDLLYYAVTQDAMLIFENLSRGFGRQGKRTFMAERQYTRMEDWLTAKLAYEGLPSKTYLSKTLAQYTSKTCSNCGFTITSADYDRVLEKLKKTATGWMTTINGKELKVEGQITYYNRYKRQNVVKDLSVELDRLSEESVNNDISSWTKGRSGEALSLLKKRFSHRPVQEKFVCLNCGFETHADEQAALNIARSWLFLRSQEYKKYQTNKTTGNTDKRAFVETWQSFYRKKLKEVWKPAV

SEQ ID NO: 30810 - protein, 978 aa, synthetic construct
  REGION 1..978: note = engineered CasX variant
QEIKRANKIRRRLVKDSNTKKAGKTGPMKTLLVRVMTPDLRERLENLRKKPENIPQPISNTSRANLNKLLTDYTEMKKAILHVYWEEFQKDPVGLMSRVAQPASKKIDQNKLKPEMDEKGNLTTAGFACSQCGQPLFVYKLEQVSEKGKAYTNYFGRCNVAEHEKLILLDQLKPEKDSDEAVTYSLGKFGQRALDFYSIHVTKESTHPVKPLAQIAGNRYASTPVGKALSDACMGTIASFLSKYQDIIIEHQKVVKGNQKRLESLRELAGKENLEYPSVTLPPQPHTKEGVDAYNEVIARVRMWVNLNLWQKLKLSRDDAKPLLRLKGFPSFPLVERQANEVDWWDMVCNVKKLINEKKEDGKVFWQNLAGYKRQEALRPYLSSEEDRKKGKKFARYQLGDLLLHLEKKHGEDWGKVYDEAWERIDKKVEGLSKHIKLEEERRSEDAQSKAALTDWLRAKASFVIEGLKEADKDEFCRCELKLQKWYGDLRGKPFAIEAENSILDISGFSKQYNCAFIWQKDGVKKLNLYLIINYFKGGKLRFKKIKPEAFEANRFYTVINKKSGEIVPMEVNFNFDDPNLIILPLAFGKRQGREFIWNDLLSLETGSLKLANGRVIEKTLYNRRTRQDEPALFVALTFERREVLDSSNIKPMNLIGVDRGENIPAVIALTDPEGCPLSRFKDSLGNPTHILRIGESYKEKQRTIQAKKEVEQRRAGGYSRKYASKAKNLADDMVRNTARDLLYYAVTQDAMLIFENLSRGFGRQGKRTFMAERQYTRMEDWLTAKLAYEGLPSKTYLSKTLAQYTSKTCSNCGFTITSADYDRVLEKLKKTATGWMTTINGKELKVEGQITYYNRYKRQNVVKDLSVELDRLSEESVNNDISSWTKGRSGEALSLLKKRFSHRPVQEKFVCLNCGFETHADEQAALNIARSWLFLRSQEYKKYQTNKTTGNTDKRAFVETWQSFYRKKLKEVWKPAV

SEQ ID NO: 30811 - protein, 978 aa, synthetic construct
  REGION 1..978: note = engineered CasX variant
QEIKRANKIRRRLVKDSNTKKAGKTGPMKTLLVRVMTPDLRERLENLRKKPENIPQPISNTSRANLNKLLTDYTEMKKAILHVYWEEFQKDPVGLMSRVAQPASKKIDQNKLKPEMDEKGNLTTAGFACSQCGQPLFVYKLEQVSEKGKAYTNYFGRCNVAEHEKLILLDQLKPEKDSDEAVTYSLGKFGQRALDFYSIHVTKESTHPVKPLAQIAGNRYASAPVGKALSDACMGTIASFLSKYQDIIIEHQKVVKGNQKRLESLRELAGKENLEYPSVTLPPQPHTKEGVDAYNEVIARVRMWVNLNLWQKLKLSRDDAKPLLRLKGFPSFPLVERQANEVDWWDMVCNVKKLINEKKEDGKVFWQNLAGYKRQEALRPYLSSEEDRKKGKKFARYQLGDLLLHLEKKHGEDWGKVYDEAWERIDKKVEGLSKHIKLEEERRSEDAQSKAALTDWLRAKASFVIEGLKEADKDEFCRCELKLQKWYGDLRGKPFAIEAENSILDISGFSKQYNCAFIWQKDGVKKLNLYLIINYFKGGKLRFKKIKPEAFEANRFYTVINKKSGEIVPMEVNFNFDDPNLIILPLAFGKRQGREFIWNDLLSLETGSLKLANGRVIEKTLYNRRTRQDEPALFVALTFERREVLDSSNIKPMNLIGVDRGENIPAVIALTDPEGCPLSRFKDSLGNPTHILRIGESYKEKQRTIQAKKEVEQRRAGGYSRKYASKAKNLADDMVRNTARDLLYYAVTQDAMLIFENLSRGFGRQGKRTFMAERQYTRMEDWLTAKLAYEGLPSKTYLSKTLAQYTSKTCSNCGFTITSADYDRVLEKLKKTATGWMTTINGKELKVEGQITYYNRYKRQNVVKDLSVELDRLSEESVNNDISSWTKGRSGEALSLLKKRFSHRPVQEKFVCLNCGFETHADEQAALNIARSWLFLRSQEYKKYQTNKTTGNTDKRAFVETWQSFYRKKLKEVWKPAV

SEQ ID NO: 30812 - protein, 978 aa, synthetic construct
  REGION 1..978: note = engineered CasX variant
QEIKRANKIRRRLVKDSNTKKAGKTGPMKTLLVRVMTPDLRERLENLRKKPENIPQPISNTSRANLNKLLTDYTEMKKAILHVYWEEFQKDPVGLMSRVAQPASKKIDQNKLKPEMDEKGNLTTAGFACSQCGQPLFVYKLEQVSEKGKAYTNYFGRCNVAEHEKLILLDQLKPEKDSDEAVTYSLGKFGQRALDFYSIHVTKESTHPVKPLAQIAGNRYASVPVGKALSDACMGTIASFLSKYQDIIIEHQKVVKGNQKRLESLRELAGKENLEYPSVTLPPQPHTKEGVDAYNEVIARVRMWVNLNLWQKLKLSRDDAKPLLRLKGFPSFPLVERQANEVDWWDMVCNVKKLINEKKEDGKVFWQNLAGYKRQEALRPYLSSEEDRKKGKKFARYQLGDLLLHLEKKHGEDWGKVYDEAWERIDKKVEGLSKHIKLEEERRSEDAQSKAALTDWLRAKASFVIEGLKEADKDEFCRCELKLQKWYGDLRGKPFAIEAENSILDISGFSKQYNCAFIWQKDGVKKLNLYLIINYFKGGKLRFKKIKPEAFEANRFYTVINKKSGEIVPMEVNFNFDDPNLIILPLAFGKRQGREFIWNDLLSLETGSLKLANGRVIEKTLYNRRTRQDEPALFVALTFERREVLDSSNIKPMNLIGVDRGENIPAVIALTDPEGCPLSRFKDSLGNPTHILRIGESYKEKQRTIQAKKEVEQRRAGGYSRKYASKAKNLADDMVRNTARDLLYYAVTQDAMLIFENLSRGFGRQGKRTFMAERQYTRMEDWLTAKLAYEGLPSKTYLSKTLAQYTSKTCSNCGFTITSADYDRVLEKLKKTATGWMTTINGKELKVEGQITYYNRYKRQNVVKDLSVELDRLSEESVNNDISSWTKGRSGEALSLLKKRFSHRPVQEKFVCLNCGFETHADEQAALNIARSWLFLRSQEYKKYQTNKTTGNTDKRAFVETWQSFYRKKLKEVWKPAV

SEQ ID NO: 30813 - protein, 978 aa, synthetic construct
  REGION 1..978: note = engineered CasX variant
QEIKRANKIRRRLVKDSNTKKAGKTGPMKTLLVRVMTPDLRERLENLRKKPENIPQPISNTSRANLNKLLTDYTEMKKAILHVYWEEFQKDPVGLMSRVAQPASKKIDQNKLKPEMDEKGNLTTAGFACSQCGQPLFVYKLEQVSEKGKAYTNYFGRCNVAEHEKLIKLDQLKPEKDSDEAVTYSLGKFGQRALDFYSIHVTKESTHPVKPLAQIAGNRYASGPVGKALSDACMGTIASFLSKYQDIIIEHQKVVKGNQKRLESLRELAGKENLEYPSVTLPPQPHTKEGVDAYNEVIARVRMWVNLNLWQKLKLSRDDAKPLLRLKGFPSFPLVERQANEVDWWDMVCNVKKLINEKKEDGKVFWQNLAGYKRQEALRPYLSSEEDRKKGKKFARYQLGDLLLHLEKKHGEDWGKVYDEAWERIDKKVEGLSKHIKLEEERRSEDAQSKAALTDWLRAKASFVIEGLKEADKDEFCRCELKLQKWYGDLRGKPFAIEAENSILDISGFSKQYNCAFIWQKDGVKKLNLYLIINYFKGGKLRFKKIKPEAFEANRFYTVINKKSGEIVPMEVNFNFDDPNLIILPLAFGKRQGREFIWNDLLSLETGSLKLANGRVIEKTLYNRRTRQDEPALFVALTFERREVLDSSNIKPMNLIGVDRGENIPAVIALTDPEGCPLSRFKDSLGNPTHILRIGESYKEKQRTIQAKKEVEQRRAGGYSRKYASKAKNLADDMVRNTARDLLYYAVTQDAMLIFENLSRGFGRQGKRTFMAERQYTRMEDWLTAKLAYEGLPSKTYLSKTLAQYTSKTCSNCGFTITSADYDRVLEKLKKTATGWMTTINGKELKVEGQITYYNRYKRQNVVKDLSVELDRLSEESVNNDISSWTKGRSGEALSLLKKRFSHRPVQEKFVCLNCGFETHADEQAALNIARSWLFLRSQEYKKYQTNKTTGNTDKRAFVETWQSFYRKKLKEVWKPAV

SEQ ID NO: 30814 - protein, 977 aa, synthetic construct
  REGION 1..977: note = engineered CasX variant
QEIKRANKIRRRLVKDSNTKKAGKTGPMKTLLVRVMTPDLRERLENLRKKPENIPQPISNTSRANLNKLLTDYTEMKKAILHVYWEEFQKDPVGLMSRVAQPASKKIDQNKLKPEMDEKGNLTTAGFACSQCGQPLFVYKLEQVSEKGKAYTNYFGRCNVAEHEKLILLDQLKPEKDSDEAVTYSLGKFGQRALDFYSIHVTKESTHPVKPLAQIAGNRYASPVGKALSDACMGTIASFLSKYQDIIIEHQKVVKGNQKRLESLRELAGKENLEYPSVTLPPQPHTKEGVDAYNEVIARVRMWVNLNLWQKLKLSRDDAKPLLRLKGFPSFPLVERQANEVDWWDMVCNVKKLINEKKEDGKVFWQNLAGYKRQEALRPYLSSEEDRKKGKKFARYQLGDLLLHLEKKHGEDWGKVYDEAWERIDKKVEGLSKHIKLEEERRSEDAQSKAALTDWLRAKASFVIEGLKEADKDEFCRCELKLQKWYGDLRGKPFAIEAENSILDISGFSKQYNCAFIWQKDGVKKLNLYLIINYFKGGKLRFKKIKPEAFEANRFYTVINKKSGEIVPMEVNFNFDDPNLIILPLAFGKRQGREFIWNDLLSLETGSLKLANGRVIEKTLYNRRTRQDEPALFVALTFERREVLDSSNIKPMNLIGVDRGENIPAVIALTDPEGCPLSRFKDSLGNPTHILRIGESYKEKQRTIQAKKEVEQRRAGGYSRKYASKAKNLADDMVRNTARDLLYYAVTQDAMLIFENLSRGFGRQGKRTFMAERQYTRMEDWLTAKLAYEGLPSKTYLSKTLAQYTSKTCSNCGFTITSADYDRVLEKLKKTATGWMTTINGKELKVEGQITYYNRYKRQNVVKDLSVELDRLSEESVNNDISSWTKGRSGEALSLLKKRFSHRPVQEKFVCLNCGFETHADEQAALNIARSWLFLRSQEYKKYQTNKTTGNTDKRAFVETWQSFYRKKLKEVWKPAV

SEQ ID NO: 30815 - protein, 978 aa, synthetic construct
  REGION 1..978: note = engineered CasX variant
QEIKRISKIRRRLVKDSNTKKAGKTGPMKTLLVRVMTPDLRERLENLRKKPENIPQPISNTSRANLNKLLTDYTEMKKAILHVYWEEFQKDPVGLMSRVAQPASKKIDQNKLKPEMDEKGNLTTAGFACSQCGQPLFVYKLEQVSEKGKAYTNYFGRCNVAEHEKLILLDQLKPEKDSDEAVTYSLGKFGQRALDFYSIHVTKESTHPVKPLAQIAGNRYASYPVGKALSDACMGTIASFLSKYQDIIIEHQKVVKGNQKRLESLRELAGKENLEYPSVTLPPQPHTKEGVDAYNEVIARVRMWVNLNLWQKLKLSRDDAKPLLRLKGFPSFPLVERQANEVDWWDMVCNVKKLINEKKEDGKVFWQNLAGYKRQEALRPYLSSEEDRKKGKKFARYQLGDLLLHLEKKHGEDWGKVYDEAWERIDKKVEGLSKHIKLEEERRSEDAQSKAALTDWLRAKASFVIEGLKEADKDEFCRCELKLQKWYGDLRGKPFAIEAENSILDISGFSKQYNCAFIWQKDGVKKLNLYLIINYFKGGKLRFKKIKPEAFEANRFYTVINKKSGEIVPMEVNFNFDDPNLIILPLAFGKRQGREFIWNDLLSLETGSLKLANGRVIEKTLYNRRTRQDEPALFVALTFERREVLDSSNIKPMNLIGVDRGENIPAVIALTDPEGCPLSRFKDSLGNPTHILRIGESYKEKQRTIQAKKEVEQRRAGGYSRKYASKAKNLADDMVRNTARDLLYYAVTQDAMLIFENLSRGFGRQGKRTFMAERQYTRMEDWLTAKLAYEGLPSKTYLSKTLAQYTSKTCSNCGFTITSADYDRVLEKLKKTATGWMTTINGKELKVEGQITYYNRYKRQNVVKDLSVELDRLSEESVNNDISSWTKGRSGEALSLLKKRFSHRPVQEKFVCLNCGFETHADEQAALNIARSWLFLRSQEYKKYQTNKTTGNTDKRAFVETWQSFYRKKLKEVWKPAV

SEQ ID NO: 30816 - protein, 978 aa, synthetic construct
  REGION 1..978: note = engineered CasX variant
QEIKRISKIRRRLVKDSNTKKAGKTGPMKTLLVRVMTPDLRERLENLRKKPENIPQPISNTSRANLNKLLTDYTEMKKAILHVYWEEFQKDPVGLMSRVAQPASKKIDQNKLKPEMDEKGNLTTAGFACSQCGQPLFVYKLEQVSEKGKAYTNYFGRCNVAEHEKLILLDQLKPEKDSDEAVTYSLGKFGQRALDFYSIHVTKESTHPVKPLAQIAGNRYASHPVGKALSDACMGTIASFLSKYQDIIIEHQKVVKGNQKRLESLRELAGKENLEYPSVTLPPQPHTKEGVDAYNEVIARVRMWVNLNLWQKLKLSRDDAKPLLRLKGFPSFPLVERQANEVDWWDMVCNVKKLINEKKEDGKVFWQNLAGYKRQEALRPYLSSEEDRKKGKKFARYQLGDLLLHLEKKHGEDWGKVYDEAWERIDKKVEGLSKHIKLEEERRSEDAQSKAALTDWLRAKASFVIEGLKEADKDEFCRCELKLQKWYGDLRGKPFAIEAENSILDISGFSKQYNCAFIWQKDGVKKLNLYLIINYFKGGKLRFKKIKPEAFEANRFYTVINKKSGEIVPMEVNFNFDDPNLIILPLAFGKRQGREFIWNDLLSLETGSLKLANGRVIEKTLYNRRTRQDEPALFVALTFERREVLDSSNIKPMNLIGVDRGENIPAVIALTDPEGCPLSRFKDSLGNPTHILRIGESYKEKQRTIQAKKEVEQRRAGGYSRKYASKAKNLADDMVRNTARDLLYYAVTQDAMLIFENLSRGFGRQGKRTFMAERQYTRMEDWLTAKLAYEGLPSKTYLSKTLAQYTSKTCSNCGFTITSADYDRVLEKLKKTATGWMTTINGKELKVEGQITYYNRYKRQNVVKDLSVELDRLSEESVNNDISSWTKGRSGEALSLLKKRFSHRPVQEKFVCLNCGFETHADEQAALNIARSWLFLRSQEYKKYQTNKTTGNTDKRAFVETWQSFYRKKLKEVWKPAV

SEQ ID NO: 30817 - protein, 978 aa, synthetic construct
  REGION 1..978: note = engineered CasX variant
QEIKRISKIRRRLVKDSNTKKAGKTGPMKTLLVRVMTPDLRERLENLRKKPENIPQPISNTSRANLNKLLTDYTEMKKAILHVYWEEFQKDPVGLMSRVAQPASKKIDQNKLKPEMDEKGNLTTAGFACSQCGQPLFVYKLEQVSEKGKAYTNYFGRCNVAEHEKLILLDQLKPEKDSDEAVTYSLGKFGQRALDFYSIHVTKESTHPVKPLAQIAGNRYASSPVGKALSDACMGTIASFLSKYQDIIIEHQKVVKGNQKRLESLRELAGKENLEYPSVTLPPQPHTKEGVDAYNEVIARVRMWVNLNLWQKLKLSRDDAKPLLRLKGFPSFPLVERQANEVDWWDMVCNVKKLINEKKEDGKVFWQNLAGYKRQEALRPYLSSEEDRKKGKKFARYQLGDLLLHLEKKHGEDWGKVYDEAWERIDKKVEGLSKHIKLEEERRSEDAQSKAALTDWLRAKASFVIEGLKEADKDEFCRCELKLQKWYGDLRGKPFAIEAENSILDISGFSKQYNCAFIWQKDGVKKLNLYLIINYFKGGKLRFKKIKPEAFEANRFYTVINKKSGEIVPMEVNFNFDDPNLIILPLAFGKRQGREFIWNDLLSLETGSLKLANGRVIEKTLYNRRTRQDEPALFVALTFERREVLDSSNIKPMNLIGVDRGENIPAVIALTDPEGCPLSRFKDSLGNPTHILRIGESYKEKQRTIQAKKEVEQRRAGGYSRKYASKAKNLADDMVRNTARDLLYYAVTQDAMLIFENLSRGFGRQGKRTFMAERQYTRMEDWLTAKLAYEGLPSKTYLSKTLAQYTSKTCSNCGFTITSADYDRVLEKLKKTATGWMTTINGKELKVEGQITYYNRYKRQNVVKDLSVELDRLSEESVNNDISSWTKGRSGEALSLLKKRFSHRPVQEKFVCLNCGFETHADEQAALNIARSWLFLRSQEYKKYQTNKTTGNTDKRAFVETWQSFYRKKLKEVWKPAV

SEQ ID NO: 30818 - protein, 978 aa, synthetic construct
  REGION 1..978: note = engineered CasX variant
QEIKRISKIRRRLVKDSNTKKAGKTGPMKTLLVRVMTPDLRERLENLRKKPENIPQPISNTSRANLNKLLTDYTEMKKAILHVYWEEFQKDPVGLMSRVAQPASKKIDQNKLKPEMDEKGNLTTAGFACSQCGQPLFVYKLEQVSEKGKAYTNYFGRCNVAEHEKLILLDQLKPEKDSDEAVTYSLGKFGQRALDFYSIHVTKESTHPVKPLAQIAGNRYASTPVGKALSDACMGTIASFLSKYQDIIIEHQKVVKGNQKRLESLRELAGKENLEYPSVTLPPQPHTKEGVDAYNEVIARVRMWVNLNLWQKLKLSRDDAKPLLRLKGFPSFPLVERQANEVDWWDMVCNVKKLINEKKEDGKVFWQNLAGYKRQEALRPYLSSEEDRKKGKKFARYQLGDLLLHLEKKHGEDWGKVYDEAWERIDKKVEGLSKHIKLEEERRSEDAQSKAALTDWLRAKASFVIEGLKEADKDEFCRCELKLQKWYGDLRGKPFAIEAENSILDISGFSKQYNCAFIWQKDGVKKLNLYLIINYFKGGKLRFKKIKPEAFEANRFYTVINKKSGEIVPMEVNFNFDDPNLIILPLAFGKRQGREFIWNDLLSLETGSLKLANGRVIEKTLYNRRTRQDEPALFVALTFERREVLDSSNIKPMNLIGVDRGENIPAVIALTDPEGCPLSRFKDSLGNPTHILRIGESYKEKQRTIQAKKEVEQRRAGGYSRKYASKAKNLADDMVRNTARDLLYYAVTQDAMLIFENLSRGFGRQGKRTFMAERQYTRMEDWLTAKLAYEGLPSKTYLSKTLAQYTSKTCSNCGFTITSADYDRVLEKLKKTATGWMTTINGKELKVEGQITYYNRYKRQNVVKDLSVELDRLSEESVNNDISSWTKGRSGEALSLLKKRFSHRPVQEKFVCLNCGFETHADEQAALNIARSWLFLRSQEYKKYQTNKTTGNTDKRAFVETWQSFYRKKLKEVWKPAV

SEQ ID NO: 30819 - protein, 978 aa, synthetic construct
  REGION 1..978: note = engineered CasX variant
QEIKRISKIRRRLVKDSNTKKAGKTGPMKTLLVRVMTPDLRERLENLRKKPENIPQPISNTSRANLNKLLTDYTEMKKAILHVYWEEFQKDPVGLMSRVAQPASKKIDQNKLKPEMDEKGNLTTAGFACSQCGQPLFVYKLEQVSEKGKAYTNYFGRCNVAEHEKLILLDQLKPEKDSDEAVTYSLGKFGQRALDFYSIHVTKESTHPVKPLAQIAGNRYASAPVGKALSDACMGTIASFLSKYQDIIIEHQKVVKGNQKRLESLRELAGKENLEYPSVTLPPQPHTKEGVDAYNEVIARVRMWVNLNLWQKLKLSRDDAKPLLRLKGFPSFPLVERQANEVDWWDMVCNVKKLINEKKEDGKVFWQNLAGYKRQEALRPYLSSEEDRKKGKKFARYQLGDLLLHLEKKHGEDWGKVYDEAWERIDKKVEGLSKHIKLEEERRSEDAQSKAALTDWLRAKASFVIEGLKEADKDEFCRCELKLQKWYGDLRGKPFAIEAENSILDISGFSKQYNCAFIWQKDGVKKLNLYLIINYFKGGKLRFKKIKPEAFEANRFYTVINKKSGEIVPMEVNFNFDDPNLIILPLAFGKRQGREFIWNDLLSLETGSLKLANGRVIEKTLYNRRTRQDEPALFVALTFERREVLDSSNIKPMNLIGVDRGENIPAVIALTDPEGCPLSRFKDSLGNPTHILRIGESYKEKQRTIQAKKEVEQRRAGGYSRKYASKAKNLADDMVRNTARDLLYYAVTQDAMLIFENLSRGFGRQGKRTFMAERQYTRMEDWLTAKLAYEGLPSKTYLSKTLAQYTSKTCSNCGFTITSADYDRVLEKLKKTATGWMTTINGKELKVEGQITYYNRYKRQNVVKDLSVELDRLSEESVNNDISSWTKGRSGEALSLLKKRFSHRPVQEKFVCLNCGFETHADEQAALNIARSWLFLRSQEYKKYQTNKTTGNTDKRAFVETWQSFYRKKLKEVWKPAV

SEQ ID NO: 30820 - protein, 978 aa, synthetic construct
  REGION 1..978: note = engineered CasX variant
QEIKRISKIRRRLVKDSNTKKAGKTGPMKTLLVRVMTPDLRERLENLRKKPENIPQPISNTSRANLNKLLTDYTEMKKAILHVYWEEFQKDPVGLMSRVAQPASKKIDQNKLKPEMDEKGNLTTAGFACSQCGQPLFVYKLEQVSEKGKAYTNYFGRCNVAEHEKLILLDQLKPEKDSDEAVTYSLGKFGQRALDFYSIHVTKESTHPVKPLAQIAGNRYASVPVGKALSDACMGTIASFLSKYQDIIIEHQKVVKGNQKRLESLRELAGKENLEYPSVTLPPQPHTKEGVDAYNEVIARVRMWVNLNLWQKLKLSRDDAKPLLRLKGFPSFPLVERQANEVDWWDMVCNVKKLINEKKEDGKVFWQNLAGYKRQEALRPYLSSEEDRKKGKKFARYQLGDLLLHLEKKHGEDWGKVYDEAWERIDKKVEGLSKHIKLEEERRSEDAQSKAALTDWLRAKASFVIEGLKEADKDEFCRCELKLQKWYGDLRGKPFAIEAENSILDISGFSKQYNCAFIWQKDGVKKLNLYLIINYFKGGKLRFKKIKPEAFEANRFYTVINKKSGEIVPMEVNFNFDDPNLIILPLAFGKRQGREFIWNDLLSLETGSLKLANGRVIEKTLYNRRTRQDEPALFVALTFERREVLDSSNIKPMNLIGVDRGENIPAVIALTDPEGCPLSRFKDSLGNPTHILRIGESYKEKQRTIQAKKEVEQRRAGGYSRKYASKAKNLADDMVRNTARDLLYYAVTQDAMLIFENLSRGFGRQGKRTFMAERQYTRMEDWLTAKLAYEGLPSKTYLSKTLAQYTSKTCSNCGFTITSADYDRVLEKLKKTATGWMTTINGKELKVEGQITYYNRYKRQNVVKDLSVELDRLSEESVNNDISSWTKGRSGEALSLLKKRFSHRPVQEKFVCLNCGFETHADEQAALNIARSWLFLRSQEYKKYQTNKTTGNTDKRAFVETWQSFYRKKLKEVWKPAV

SEQ ID NO: 30821 - protein, 978 aa, synthetic construct
  REGION 1..978: note = engineered CasX variant
QEIKRISKIRRRLVKDSNTKKAGKTGPMKTLLVRVMTPDLRERLENLRKKPENIPQPISNTSRANLNKLLTDYTEMKKAILHVYWEEFQKDPVGLMSRVAQPASKKIDQNKLKPEMDEKGNLTTAGFACSQCGQPLFVYKLEQVSEKGKAYTNYFGRCNVAEHEKLIKLDQLKPEKDSDEAVTYSLGKFGQRALDFYSIHVTKESTHPVKPLAQIAGNRYASGPVGKALSDACMGTIASFLSKYQDIIIEHQKVVKGNQKRLESLRELAGKENLEYPSVTLPPQPHTKEGVDAYNEVIARVRMWVNLNLWQKLKLSRDDAKPLLRLKGFPSFPLVERQANEVDWWDMVCNVKKLINEKKEDGKVFWQNLAGYKRQEALRPYLSSEEDRKKGKKFARYQLGDLLLHLEKKHGEDWGKVYDEAWERIDKKVEGLSKHIKLEEERRSEDAQSKAALTDWLRAKASFVIEGLKEADKDEFCRCELKLQKWYGDLRGKPFAIEAENSILDISGFSKQYNCAFIWQKDGVKKLNLYLIINYFKGGKLRFKKIKPEAFEANRFYTVINKKSGEIVPMEVNFNFDDPNLIILPLAFGKRQGREFIWNDLLSLETGSLKLANGRVIEKTLYNRRTRQDEPALFVALTFERREVLDSSNIKPMNLIGVDRGENIPAVIALTDPEGCPLSRFKDSLGNPTHILRIGESYKEKQRTIQAKKEVEQRRAGGYSRKYASKAKNLADDMVRNTARDLLYYAVTQDAMLIFENLSRGFGRQGKRTFMAERQYTRMEDWLTAKLAYEGLPSKTYLSKTLAQYTSKTCSNCGFTITSADYDRVLEKLKKTATGWMTTINGKELKVEGQITYYNRYKRQNVVKDLSVELDRLSEESVNNDISSWTKGRSGEALSLLKKRFSHRPVQEKFVCLNCGFETHADEQAALNIARSWLFLRSQEYKKYQTNKTTGNTDKRAFVETWQSFYRKKLKEVWKPAV

SEQ ID NO: 30822 - protein, 977 aa, synthetic construct
  REGION 1..977: note = engineered CasX variant
QEIKRISKIRRRLVKDSNTKKAGKTGPMKTLLVRVMTPDLRERLENLRKKPENIPQPISNTSRANLNKLLTDYTEMKKAILHVYWEEFQKDPVGLMSRVAQPASKKIDQNKLKPEMDEKGNLTTAGFACSQCGQPLFVYKLEQVSEKGKAYTNYFGRCNVAEHEKLILLDQLKPEKDSDEAVTYSLGKFGQRALDFYSIHVTKESTHPVKPLAQIAGNRYASPVGKALSDACMGTIASFLSKYQDIIIEHQKVVKGNQKRLESLRELAGKENLEYPSVTLPPQPHTKEGVDAYNEVIARVRMWVNLNLWQKLKLSRDDAKPLLRLKGFPSFPLVERQANEVDWWDMVCNVKKLINEKKEDGKVFWQNLAGYKRQEALRPYLSSEEDRKKGKKFARYQLGDLLLHLEKKHGEDWGKVYDEAWERIDKKVEGLSKHIKLEEERRSEDAQSKAALTDWLRAKASFVIEGLKEADKDEFCRCELKLQKWYGDLRGKPFAIEAENSILDISGFSKQYNCAFIWQKDGVKKLNLYLIINYFKGGKLRFKKIKPEAFEANRFYTVINKKSGEIVPMEVNFNFDDPNLIILPLAFGKRQGREFIWNDLLSLETGSLKLANGRVIEKTLYNRRTRQDEPALFVALTFERREVLDSSNIKPMNLIGVDRGENIPAVIALTDPEGCPLSRFKDSLGNPTHILRIGESYKEKQRTIQAKKEVEQRRAGGYSRKYASKAKNLADDMVRNTARDLLYYAVTQDAMLIFENLSRGFGRQGKRTFMAERQYTRMEDWLTAKLAYEGLPSKTYLSKTLAQYTSKTCSNCGFTITSADYDRVLEKLKKTATGWMTTINGKELKVEGQITYYNRYKRQNVVKDLSVELDRLSEESVNNDISSWTKGRSGEALSLLKKRFSHRPVQEKFVCLNCGFETHADEQAALNIARSWLFLRSQEYKKYQTNKTTGNTDKRAFVETWQSFYRKKLKEVWKPAV

SEQ ID NO: 30823 - protein, 978 aa, synthetic construct
  REGION 1..978: note = engineered CasX variant
QEIKRINGIRRRLVKDSNTKKAGKTGPMKTLLVRVMTPDLRERLENLRKKPENIPQPISNTSRANLNKLLTDYTEMKKAILHVYWEEFQKDPVGLMSRVAQPASKKIDQNKLKPEMDEKGNLTTAGFACSQCGQPLFVYKLEQVSEKGKAYTNYFGRCNVAEHEKLILLDQLKPEKDSDEAVTYSLGKFGQRALDFYSIHVTKESTHPVKPLAQIAGNRYASYPVGKALSDACMGTIASFLSKYQDIIIEHQKVVKGNQKRLESLRELAGKENLEYPSVTLPPQPHTKEGVDAYNEVIARVRMWVNLNLWQKLKLSRDDAKPLLRLKGFPSFPLVERQANEVDWWDMVCNVKKLINEKKEDGKVFWQNLAGYKRQEALRPYLSSEEDRKKGKKFARYQLGDLLLHLEKKHGEDWGKVYDEAWERIDKKVEGLSKHIKLEEERRSEDAQSKAALTDWLRAKASFVIEGLKEADKDEFCRCELKLQKWYGDLRGKPFAIEAENSILDISGFSKQYNCAFIWQKDGVKKLNLYLIINYFKGGKLRFKKIKPEAFEANRFYTVINKKSGEIVPMEVNFNFDDPNLIILPLAFGKRQGREFIWNDLLSLETGSLKLANGRVIEKTLYNRRTRQDEPALFVALTFERREVLDSSNIKPMNLIGVDRGENIPAVIALTDPEGCPLSRFKDSLGNPTHILRIGESYKEKQRTIQAKKEVEQRRAGGYSRKYASKAKNLADDMVRNTARDLLYYAVTQDAMLIFENLSRGFGRQGKRTFMAERQYTRMEDWLTAKLAYEGLPSKTYLSKTLAQYTSKTCSNCGFTITSADYDRVLEKLKKTATGWMTTINGKELKVEGQITYYNRYKRQNVVKDLSVELDRLSEESVNNDISSWTKGRSGEALSLLKKRFSHRPVQEKFVCLNCGFETHADEQAALNIARSWLFLRSQEYKKYQTNKTTGNTDKRAFVETWQSFYRKKLKEVWKPAV

SEQ ID NO: 30824 - protein, 978 aa, synthetic construct
  REGION 1..978: note = engineered CasX variant
QEIKRINGIRRRLVKDSNTKKAGKTGPMKTLLVRVMTPDLRERLENLRKKPENIPQPISNTSRANLNKLLTDYTEMKKAILHVYWEEFQKDPVGLMSRVAQPASKKIDQNKLKPEMDEKGNLTTAGFACSQCGQPLFVYKLEQVSEKGKAYTNYFGRCNVAEHEKLILLDQLKPEKDSDEAVTYSLGKFGQRALDFYSIHVTKESTHPVKPLAQIAGNRYASHPVGKALSDACMGTIASFLSKYQDIIIEHQKVVKGNQKRLESLRELAGKENLEYPSVTLPPQPHTKEGVDAYNEVIARVRMWVNLNLWQKLKLSRDDAKPLLRLKGFPSFPLVERQANEVDWWDMVCNVKKLINEKKEDGKVFWQNLAGYKRQEALRPYLSSEEDRKKGKKFARYQLGDLLLHLEKKHGEDWGKVYDEAWERIDKKVEGLSKHIKLEEERRSEDAQSKAALTDWLRAKASFVIEGLKEADKDEFCRCELKLQKWYGDLRGKPFAIEAENSILDISGFSKQYNCAFIWQKDGVKKLNLYLIINYFKGGKLRFKKIKPEAFEANRFYTVINKKSGEIVPMEVNFNFDDPNLIILPLAFGKRQGREFIWNDLLSLETGSLKLANGRVIEKTLYNRRTRQDEPALFVALTFERREVLDSSNIKPMNLIGVDRGENIPAVIALTDPEGCPLSRFKDSLGNPTHILRIGESYKEKQRTIQAKKEVEQRRAGGYSRKYASKAKNLADDMVRNTARDLLYYAVTQDAMLIFENLSRGFGRQGKRTFMAERQYTRMEDWLTAKLAYEGLPSKTYLSKTLAQYTSKTCSNCGFTITSADYDRVLEKLKKTATGWMTTINGKELKVEGQITYYNRYKRQNVVKDLSVELDRLSEESVNNDISSWTKGRSGEALSLLKKRFSHRPVQEKFVCLNCGFETHADEQAALNIARSWLFLRSQEYKKYQTNKTTGNTDKRAFVETWQSFYRKKLKEVWKPAV

SEQ ID NO: 30825 - protein, 978 aa, synthetic construct
  REGION 1..978: note = engineered CasX variant
QEIKRINGIRRRLVKDSNTKKAGKTGPMKTLLVRVMTPDLRERLENLRKKPENIPQPISNTSRANLNKLLTDYTEMKKAILHVYWEEFQKDPVGLMSRVAQPASKKIDQNKLKPEMDEKGNLTTAGFACSQCGQPLFVYKLEQVSEKGKAYTNYFGRCNVAEHEKLILLDQLKPEKDSDEAVTYSLGKFGQRALDFYSIHVTKESTHPVKPLAQIAGNRYASSPVGKALSDACMGTIASFLSKYQDIIIEHQKVVKGNQKRLESLRELAGKENLEYPSVTLPPQPHTKEGVDAYNEVIARVRMWVNLNLWQKLKLSRDDAKPLLRLKGFPSFPLVERQANEVDWWDMVCNVKKLINEKKEDGKVFWQNLAGYKRQEALRPYLSSEEDRKKGKKFARYQLGDLLLHLEKKHGEDWGKVYDEAWERIDKKVEGLSKHIKLEEERRSEDAQSKAALTDWLRAKASFVIEGLKEADKDEFCRCELKLQKWYGDLRGKPFAIEAENSILDISGFSKQYNCAFIWQKDGVKKLNLYLIINYFKGGKLRFKKIKPEAFEANRFYTVINKKSGEIVPMEVNFNFDDPNLIILPLAFGKRQGREFIWNDLLSLETGSLKLANGRVIEKTLYNRRTRQDEPALFVALTFERREVLDSSNIKPMNLIGVDRGENIPAVIALTDPEGCPLSRFKDSLGNPTHILRIGESYKEKQRTIQAKKEVEQRRAGGYSRKYASKAKNLADDMVRNTARDLLYYAVTQDAMLIFENLSRGFGRQGKRTFMAERQYTRMEDWLTAKLAYEGLPSKTYLSKTLAQYTSKTCSNCGFTITSADYDRVLEKLKKTATGWMTTINGKELKVEGQITYYNRYKRQNVVKDLSVELDRLSEESVNNDISSWTKGRSGEALSLLKKRFSHRPVQEKFVCLNCGFETHADEQAALNIARSWLFLRSQEYKKYQTNKTTGNTDKRAFVETWQSFYRKKLKEVWKPAV

SEQ ID NO: 30826 - protein, 978 aa, synthetic construct
  REGION 1..978: note = engineered CasX variant
QEIKRINGIRRRLVKDSNTKKAGKTGPMKTLLVRVMTPDLRERLENLRKKPENIPQPISNTSRANLNKLLTDYTEMKKAILHVYWEEFQKDPVGLMSRVAQPASKKIDQNKLKPEMDEKGNLTTAGFACSQCGQPLFVYKLEQVSEKGKAYTNYFGRCNVAEHEKLILLDQLKPEKDSDEAVTYSLGKFGQRALDFYSIHVTKESTHPVKPLAQIAGNRYASTPVGKALSDACMGTIASFLSKYQDIIIEHQKVVKGNQKRLESLRELAGKENLEYPSVTLPPQPHTKEGVDAYNEVIARVRMWVNLNLWQKLKLSRDDAKPLLRLKGFPSFPLVERQANEVDWWDMVCNVKKLINEKKEDGKVFWQNLAGYKRQEALRPYLSSEEDRKKGKKFARYQLGDLLLHLEKKHGEDWGKVYDEAWERIDKKVEGLSKHIKLEEERRSEDAQSKAALTDWLRAKASFVIEGLKEADKDEFCRCELKLQKWYGDLRGKPFAIEAENSILDISGFSKQYNCAFIWQKDGVKKLNLYLIINYFKGGKLRFKKIKPEAFEANRFYTVINKKSGEIVPMEVNFNFDDPNLIILPLAFGKRQGREFIWNDLLSLETGSLKLANGRVIEKTLYNRRTRQDEPALFVALTFERREVLDSSNIKPMNLIGVDRGENIPAVIALTDPEGCPLSRFKDSLGNPTHILRIGESYKEKQRTIQAKKEVEQRRAGGYSRKYASKAKNLADDMVRNTARDLLYYAVTQDAMLIFENLSRGFGRQGKRTFMAERQYTRMEDWLTAKLAYEGLPSKTYLSKTLAQYTSKTCSNCGFTITSADYDRVLEKLKKTATGWMTTINGKELKVEGQITYYNRYKRQNVVKDLSVELDRLSEESVNNDISSWTKGRSGEALSLLKKRFSHRPVQEKFVCLNCGFETHADEQAALNIARSWLFLRSQEYKKYQTNKTTGNTDKRAFVETWQSFYRKKLKEVWKPAV

SEQ ID NO: 30827 - protein, 978 aa, synthetic construct
  REGION 1..978: note = engineered CasX variant
QEIKRINGIRRRLVKDSNTKKAGKTGPMKTLLVRVMTPDLRERLENLRKKPENIPQPISNTSRANLNKLLTDYTEMKKAILHVYWEEFQKDPVGLMSRVAQPASKKIDQNKLKPEMDEKGNLTTAGFACSQCGQPLFVYKLEQVSEKGKAYTNYFGRCNVAEHEKLILLDQLKPEKDSDEAVTYSLGKFGQRALDFYSIHVTKESTHPVKPLAQIAGNRYASAPVGKALSDACMGTIASFLSKYQDIIIEHQKVVKGNQKRLESLRELAGKENLEYPSVTLPPQPHTKEGVDAYNEVIARVRMWVNLNLWQKLKLSRDDAKPLLRLKGFPSFPLVERQANEVDWWDMVCNVKKLINEKKEDGKVFWQNLAGYKRQEALRPYLSSEEDRKKGKKFARYQLGDLLLHLEKKHGEDWGKVYDEAWERIDKKVEGLSKHIKLEEERRSEDAQSKAALTDWLRAKASFVIEGLKEADKDEFCRCELKLQKWYGDLRGKPFAIEAENSILDISGFSKQYNCAFIWQKDGVKKLNLYLIINYFKGGKLRFKKIKPEAFEANRFYTVINKKSGEIVPMEVNFNFDDPNLIILPLAFGKRQGREFIWNDLLSLETGSLKLANGRVIEKTLYNRRTRQDEPALFVALTFERREVLDSSNIKPMNLIGVDRGENIPAVIALTDPEGCPLSRFKDSLGNPTHILRIGESYKEKQRTIQAKKEVEQRRAGGYSRKYASKAKNLADDMVRNTARDLLYYAVTQDAMLIFENLSRGFGRQGKRTFMAERQYTRMEDWLTAKLAYEGLPSKTYLSKTLAQYTSKTCSNCGFTITSADYDRVLEKLKKTATGWMTTINGKELKVEGQITYYNRYKRQNVVKDLSVELDRLSEESVNNDISSWTKGRSGEALSLLKKRFSHRPVQEKFVCLNCGFETHADEQAALNIARSWLFLRSQEYKKYQTNKTTGNTDKRAFVETWQSFYRKKLKEVWKPAV

SEQ ID NO: 30828 - protein, 978 aa, synthetic construct
  REGION 1..978: note = engineered CasX variant
QEIKRINGIRRRLVKDSNTKKAGKTGPMKTLLVRVMTPDLRERLENLRKKPENIPQPISNTSRANLNKLLTDYTEMKKAILHVYWEEFQKDPVGLMSRVAQPASKKIDQNKLKPEMDEKGNLTTAGFACSQCGQPLFVYKLEQVSEKGKAYTNYFGRCNVAEHEKLILLDQLKPEKDSDEAVTYSLGKFGQRALDFYSIHVTKESTHPVKPLAQIAGNRYASVPVGKALSDACMGTIASFLSKYQDIIIEHQKVVKGNQKRLESLRELAGKENLEYPSVTLPPQPHTKEGVDAYNEVIARVRMWVNLNLWQKLKLSRDDAKPLLRLKGFPSFPLVERQANEVDWWDMVCNVKKLINEKKEDGKVFWQNLAGYKRQEALRPYLSSEEDRKKGKKFARYQLGDLLLHLEKKHGEDWGKVYDEAWERIDKKVEGLSKHIKLEEERRSEDAQSKAALTDWLRAKASFVIEGLKEADKDEFCRCELKLQKWYGDLRGKPFAIEAENSILDISGFSKQYNCAFIWQKDGVKKLNLYLIINYFKGGKLRFKKIKPEAFEANRFYTVINKKSGEIVPMEVNFNFDDPNLIILPLAFGKRQGREFIWNDLLSLETGSLKLANGRVIEKTLYNRRTRQDEPALFVALTFERREVLDSSNIKPMNLIGVDRGENIPAVIALTDPEGCPLSRFKDSLGNPTHILRIGESYKEKQRTIQAKKEVEQRRAGGYSRKYASKAKNLADDMVRNTARDLLYYAVTQDAMLIFENLSRGFGRQGKRTFMAERQYTRMEDWLTAKLAYEGLPSKTYLSKTLAQYTSKTCSNCGFTITSADYDRVLEKLKKTATGWMTTINGKELKVEGQITYYNRYKRQNVVKDLSVELDRLSEESVNNDISSWTKGRSGEALSLLKKRFSHRPVQEKFVCLNCGFETHADEQAALNIARSWLFLRSQEYKKYQTNKTTGNTDKRAFVETWQSFYRKKLKEVWKPAV

SEQ ID NO: 30829 - protein, 978 aa, synthetic construct
  REGION 1..978: note = engineered CasX variant
QEIKRINGIRRRLVKDSNTKKAGKTGPMKTLLVRVMTPDLRERLENLRKKPENIPQPISNTSRANLNKLLTDYTEMKKAILHVYWEEFQKDPVGLMSRVAQPASKKIDQNKLKPEMDEKGNLTTAGFACSQCGQPLFVYKLEQVSEKGKAYTNYFGRCNVAEHEKLIKLDQLKPEKDSDEAVTYSLGKFGQRALDFYSIHVTKESTHPVKPLAQIAGNRYASGPVGKALSDACMGTIASFLSKYQDIIIEHQKVVKGNQKRLESLRELAGKENLEYPSVTLPPQPHTKEGVDAYNEVIARVRMWVNLNLWQKLKLSRDDAKPLLRLKGFPSFPLVERQANEVDWWDMVCNVKKLINEKKEDGKVFWQNLAGYKRQEALRPYLSSEEDRKKGKKFARYQLGDLLLHLEKKHGEDWGKVYDEAWERIDKKVEGLSKHIKLEEERRSEDAQSKAALTDWLRAKASFVIEGLKEADKDEFCRCELKLQKWYGDLRGKPFAIEAENSILDISGFSKQYNCAFIWQKDGVKKLNLYLIINYFKGGKLRFKKIKPEAFEANRFYTVINKKSGEIVPMEVNFNFDDPNLIILPLAFGKRQGREFIWNDLLSLETGSLKLANGRVIEKTLYNRRTRQDEPALFVALTFERREVLDSSNIKPMNLIGVDRGENIPAVIALTDPEGCPLSRFKDSLGNPTHILRIGESYKEKQRTIQAKKEVEQRRAGGYSRKYASKAKNLADDMVRNTARDLLYYAVTQDAMLIFENLSRGFGRQGKRTFMAERQYTRMEDWLTAKLAYEGLPSKTYLSKTLAQYTSKTCSNCGFTITSADYDRVLEKLKKTATGWMTTINGKELKVEGQITYYNRYKRQNVVKDLSVELDRLSEESVNNDISSWTKGRSGEALSLLKKRFSHRPVQEKFVCLNCGFETHADEQAALNIARSWLFLRSQEYKKYQTNKTTGNTDKRAFVETWQSFYRKKLKEVWKPAV

SEQ ID NO: 30830 - protein, 977 aa, synthetic construct
  REGION 1..977: note = engineered CasX variant
QEIKRINGIRRRLVKDSNTKKAGKTGPMKTLLVRVMTPDLRERLENLRKKPENIPQPISNTSRANLNKLLTDYTEMKKAILHVYWEEFQKDPVGLMSRVAQPASKKIDQNKLKPEMDEKGNLTTAGFACSQCGQPLFVYKLEQVSEKGKAYTNYFGRCNVAEHEKLILLDQLKPEKDSDEAVTYSLGKFGQRALDFYSIHVTKESTHPVKPLAQIAGNRYASPVGKALSDACMGTIASFLSKYQDIIIEHQKVVKGNQKRLESLRELAGKENLEYPSVTLPPQPHTKEGVDAYNEVIARVRMWVNLNLWQKLKLSRDDAKPLLRLKGFPSFPLVERQANEVDWWDMVCNVKKLINEKKEDGKVFWQNLAGYKRQEALRPYLSSEEDRKKGKKFARYQLGDLLLHLEKKHGEDWGKVYDEAWERIDKKVEGLSKHIKLEEERRSEDAQSKAALTDWLRAKASFVIEGLKEADKDEFCRCELKLQKWYGDLRGKPFAIEAENSILDISGFSKQYNCAFIWQKDGVKKLNLYLIINYFKGGKLRFKKIKPEAFEANRFYTVINKKSGEIVPMEVNFNFDDPNLIILPLAFGKRQGREFIWNDLLSLETGSLKLANGRVIEKTLYNRRTRQDEPALFVALTFERREVLDSSNIKPMNLIGVDRGENIPAVIALTDPEGCPLSRFKDSLGNPTHILRIGESYKEKQRTIQAKKEVEQRRAGGYSRKYASKAKNLADDMVRNTARDLLYYAVTQDAMLIFENLSRGFGRQGKRTFMAERQYTRMEDWLTAKLAYEGLPSKTYLSKTLAQYTSKTCSNCGFTITSADYDRVLEKLKKTATGWMTTINGKELKVEGQITYYNRYKRQNVVKDLSVELDRLSEESVNNDISSWTKGRSGEALSLLKKRFSHRPVQEKFVCLNCGFETHADEQAALNIARSWLFLRSQEYKKYQTNKTTGNTDKRAFVETWQSFYRKKLKEVWKPAV

SEQ ID NO: 30831 - protein, 978 aa, synthetic construct
  REGION 1..978: note = engineered CasX variant
QEIKRINKIRRRLVKDSNTKKAGKTGPMKTLLVPVMTPDLRERLENLRKKPENIPQPISNTSRANLNKLLTDYTEMKKAILHVYWEEFQKDPVGLMSRVAQPASKKIDQNKLKPEMDEKGNLTTAGFACSQCGQPLFVYKLEQVSEKGKAYTNYFGRCNVAEHEKLILLDQLKPEKDSDEAVTYSLGKFGQRALDFYSIHVTKESTHPVKPLAQIAGNRYASYPVGKALSDACMGTIASFLSKYQDIIIEHQKVVKGNQKRLESLRELAGKENLEYPSVTLPPQPHTKEGVDAYNEVIARVRMWVNLNLWQKLKLSRDDAKPLLRLKGFPSFPLVERQANEVDWWDMVCNVKKLINEKKEDGKVFWQNLAGYKRQEALRPYLSSEEDRKKGKKFARYQLGDLLLHLEKKHGEDWGKVYDEAWERIDKKVEGLSKHIKLEEERRSEDAQSKAALTDWLRAKASFVIEGLKEADKDEFCRCELKLQKWYGDLRGKPFAIEAENSILDISGFSKQYNCAFIWQKDGVKKLNLYLIINYFKGGKLRFKKIKPEAFEANRFYTVINKKSGEIVPMEVNFNFDDPNLIILPLAFGKRQGREFIWNDLLSLETGSLKLANGRVIEKTLYNRRTRQDEPALFVALTFERREVLDSSNIKPMNLIGVDRGENIPAVIALTDPEGCPLSRFKDSLGNPTHILRIGESYKEKQRTIQAKKEVEQRRAGGYSRKYASKAKNLADDMVRNTARDLLYYAVTQDAMLIFENLSRGFGRQGKRTFMAERQYTRMEDWLTAKLAYEGLPSKTYLSKTLAQYTSKTCSNCGFTITSADYDRVLEKLKKTATGWMTTINGKELKVEGQITYYNRYKRQNVVKDLSVELDRLSEESVNNDISSWTKGRSGEALSLLKKRFSHRPVQEKFVCLNCGFETHADEQAALNIARSWLFLRSQEYKKYQTNKTTGNTDKRAFVETWQSFYRKKLKEVWKPAV

SEQ ID NO: 30832 - protein, 978 aa, synthetic construct
  REGION 1..978: note = engineered CasX variant
QEIKRINKIRRRLVKDSNTKKAGKTGPMKTLLVPVMTPDLRERLENLRKKPENIPQPISNTSRANLNKLLTDYTEMKKAILHVYWEEFQKDPVGLMSRVAQPASKKIDQNKLKPEMDEKGNLTTAGFACSQCGQPLFVYKLEQVSEKGKAYTNYFGRCNVAEHEKLILLDQLKPEKDSDEAVTYSLGKFGQRALDFYSIHVTKESTHPVKPLAQIAGNRYASHPVGKALSDACMGTIASFLSKYQDIIIEHQKVVKGNQKRLESLRELAGKENLEYPSVTLPPQPHTKEGVDAYNEVIARVRMWVNLNLWQKLKLSRDDAKPLLRLKGFPSFPLVERQANEVDWWDMVCNVKKLINEKKEDGKVFWQNLAGYKRQEALRPYLSSEEDRKKGKKFARYQLGDLLLHLEKKHGEDWGKVYDEAWERIDKKVEGLSKHIKLEEERRSEDAQSKAALTDWLRAKASFVIEGLKEADKDEFCRCELKLQKWYGDLRGKPFAIEAENSILDISGFSKQYNCAFIWQKDGVKKLNLYLIINYFKGGKLRFKKIKPEAFEANRFYTVINKKSGEIVPMEVNFNFDDPNLIILPLAFGKRQGREFIWNDLLSLETGSLKLANGRVIEKTLYNRRTRQDEPALFVALTFERREVLDSSNIKPMNLIGVDRGENIPAVIALTDPEGCPLSRFKDSLGNPTHILRIGESYKEKQRTIQAKKEVEQRRAGGYSRKYASKAKNLADDMVRNTARDLLYYAVTQDAMLIFENLSRGFGRQGKRTFMAERQYTRMEDWLTAKLAYEGLPSKTYLSKTLAQYTSKTCSNCGFTITSADYDRVLEKLKKTATGWMTTINGKELKVEGQITYYNRYKRQNVVKDLSVELDRLSEESVNNDISSWTKGRSGEALSLLKKRFSHRPVQEKFVCLNCGFETHADEQAALNIARSWLFLRSQEYKKYQTNKTTGNTDKRAFVETWQSFYRKKLKEVWKPAV

SEQ ID NO: 30833 - protein, 978 aa, synthetic construct
  REGION 1..978: note = engineered CasX variant
QEIKRINKIRRRLVKDSNTKKAGKTGPMKTLLVPVMTPDLRERLENLRKKPENIPQPISNTSRANLNKLLTDYTEMKKAILHVYWEEFQKDPVGLMSRVAQPASKKIDQNKLKPEMDEKGNLTTAGFACSQCGQPLFVYKLEQVSEKGKAYTNYFGRCNVAEHEKLILLDQLKPEKDSDEAVTYSLGKFGQRALDFYSIHVTKESTHPVKPLAQIAGNRYASSPVGKALSDACMGTIASFLSKYQDIIIEHQKVVKGNQKRLESLRELAGKENLEYPSVTLPPQPHTKEGVDAYNEVIARVRMWVNLNLWQKLKLSRDDAKPLLRLKGFPSFPLVERQANEVDWWDMVCNVKKLINEKKEDGKVFWQNLAGYKRQEALRPYLSSEEDRKKGKKFARYQLGDLLLHLEKKHGEDWGKVYDEAWERIDKKVEGLSKHIKLEEERRSEDAQSKAALTDWLRAKASFVIEGLKEADKDEFCRCELKLQKWYGDLRGKPFAIEAENSILDISGFSKQYNCAFIWQKDGVKKLNLYLIINYFKGGKLRFKKIKPEAFEANRFYTVINKKSGEIVPMEVNFNFDDPNLIILPLAFGKRQGREFIWNDLLSLETGSLKLANGRVIEKTLYNRRTRQDEPALFVALTFERREVLDSSNIKPMNLIGVDRGENIPAVIALTDPEGCPLSRFKDSLGNPTHILRIGESYKEKQRTIQAKKEVEQRRAGGYSRKYASKAKNLADDMVRNTARDLLYYAVTQDAMLIFENLSRGFGRQGKRTFMAERQYTRMEDWLTAKLAYEGLPSKTYLSKTLAQYTSKTCSNCGFTITSADYDRVLEKLKKTATGWMTTINGKELKVEGQITYYNRYKRQNVVKDLSVELDRLSEESVNNDISSWTKGRSGEALSLLKKRFSHRPVQEKFVCLNCGFETHADEQAALNIARSWLFLRSQEYKKYQTNKTTGNTDKRAFVETWQSFYRKKLKEVWKPAV

SEQ ID NO: 30834 - protein, 978 aa, synthetic construct
  REGION 1..978: note = engineered CasX variant
QEIKRINKIRRRLVKDSNTKKAGKTGPMKTLLVPVMTPDLRERLENLRKKPENIPQPISNTSRANLNKLLTDYTEMKKAILHVYWEEFQKDPVGLMSRVAQPASKKIDQNKLKPEMDEKGNLTTAGFACSQCGQPLFVYKLEQVSEKGKAYTNYFGRCNVAEHEKLILLDQLKPEKDSDEAVTYSLGKFGQRALDFYSIHVTKESTHPVKPLAQIAGNRYASTPVGKALSDACMGTIASFLSKYQDIIIEHQKVVKGNQKRLESLRELAGKENLEYPSVTLPPQPHTKEGVDAYNEVIARVRMWVNLNLWQKLKLSRDDAKPLLRLKGFPSFPLVERQANEVDWWDMVCNVKKLINEKKEDGKVFWQNLAGYKRQEALRPYLSSEEDRKKGKKFARYQLGDLLLHLEKKHGEDWGKVYDEAWERIDKKVEGLSKHIKLEEERRSEDAQSKAALTDWLRAKASFVIEGLKEADKDEFCRCELKLQKWYGDLRGKPFAIEAENSILDISGFSKQYNCAFIWQKDGVKKLNLYLIINYFKGGKLRFKKIKPEAFEANRFYTVINKKSGEIVPMEVNFNFDDPNLIILPLAFGKRQGREFIWNDLLSLETGSLKLANGRVIEKTLYNRRTRQDEPALFVALTFERREVLDSSNIKPMNLIGVDRGENIPAVIALTDPEGCPLSRFKDSLGNPTHILRIGESYKEKQRTIQAKKEVEQRRAGGYSRKYASKAKNLADDMVRNTARDLLYYAVTQDAMLIFENLSRGFGRQGKRTFMAERQYTRMEDWLTAKLAYEGLPSKTYLSKTLAQYTSKTCSNCGFTITSADYDRVLEKLKKTATGWMTTINGKELKVEGQITYYNRYKRQNVVKDLSVELDRLSEESVNNDISSWTKGRSGEALSLLKKRFSHRPVQEKFVCLNCGFETHADEQAALNIARSWLFLRSQEYKKYQTNKTTGNTDKRAFVETWQSFYRKKLKEVWKPAV

SEQ ID NO: 30835 - protein, 978 aa, synthetic construct
  REGION 1..978: note = engineered CasX variant
QEIKRINKIRRRLVKDSNTKKAGKTGPMKTLLVPVMTPDLRERLENLRKKPENIPQPISNTSRANLNKLLTDYTEMKKAILHVYWEEFQKDPVGLMSRVAQPASKKIDQNKLKPEMDEKGNLTTAGFACSQCGQPLFVYKLEQVSEKGKAYTNYFGRCNVAEHEKLILLDQLKPEKDSDEAVTYSLGKFGQRALDFYSIHVTKESTHPVKPLAQIAGNRYASAPVGKALSDACMGTIASFLSKYQDIIIEHQKVVKGNQKRLESLRELAGKENLEYPSVTLPPQPHTKEGVDAYNEVIARVRMWVNLNLWQKLKLSRDDAKPLLRLKGFPSFPLVERQANEVDWWDMVCNVKKLINEKKEDGKVFWQNLAGYKRQEALRPYLSSEEDRKKGKKFARYQLGDLLLHLEKKHGEDWGKVYDEAWERIDKKVEGLSKHIKLEEERRSEDAQSKAALTDWLRAKASFVIEGLKEADKDEFCRCELKLQKWYGDLRGKPFAIEAENSILDISGFSKQYNCAFIWQKDGVKKLNLYLIINYFKGGKLRFKKIKPEAFEANRFYTVINKKSGEIVPMEVNFNFDDPNLIILPLAFGKRQGREFIWNDLLSLETGSLKLANGRVIEKTLYNRRTRQDEPALFVALTFERREVLDSSNIKPMNLIGVDRGENIPAVIALTDPEGCPLSRFKDSLGNPTHILRIGESYKEKQRTIQAKKEVEQRRAGGYSRKYASKAKNLADDMVRNTARDLLYYAVTQDAMLIFENLSRGFGRQGKRTFMAERQYTRMEDWLTAKLAYEGLPSKTYLSKTLAQYTSKTCSNCGFTITSADYDRVLEKLKKTATGWMTTINGKELKVEGQITYYNRYKRQNVVKDLSVELDRLSEESVNNDISSWTKGRSGEALSLLKKRFSHRPVQEKFVCLNCGFETHADEQAALNIARSWLFLRSQEYKKYQTNKTTGNTDKRAFVETWQSFYRKKLKEVWKPAV

SEQ ID NO: 30836 - protein, 978 aa, synthetic construct
  REGION 1..978: note = engineered CasX variant
QEIKRINKIRRRLVKDSNTKKAGKTGPMKTLLVPVMTPDLRERLENLRKKPENIPQPISNTSRANLNKLLTDYTEMKKAILHVYWEEFQKDPVGLMSRVAQPASKKIDQNKLKPEMDEKGNLTTAGFACSQCGQPLFVYKLEQVSEKGKAYTNYFGRCNVAEHEKLILLDQLKPEKDSDEAVTYSLGKFGQRALDFYSIHVTKESTHPVKPLAQIAGNRYASVPVGKALSDACMGTIASFLSKYQDIIIEHQKVVKGNQKRLESLRELAGKENLEYPSVTLPPQPHTKEGVDAYNEVIARVRMWVNLNLWQKLKLSRDDAKPLLRLKGFPSFPLVERQANEVDWWDMVCNVKKLINEKKEDGKVFWQNLAGYKRQEALRPYLSSEEDRKKGKKFARYQLGDLLLHLEKKHGEDWGKVYDEAWERIDKKVEGLSKHIKLEEERRSEDAQSKAALTDWLRAKASFVIEGLKEADKDEFCRCELKLQKWYGDLRGKPFAIEAENSILDISGFSKQYNCAFIWQKDGVKKLNLYLIINYFKGGKLRFKKIKPEAFEANRFYTVINKKSGEIVPMEVNFNFDDPNLIILPLAFGKRQGREFIWNDLLSLETGSLKLANGRVIEKTLYNRRTRQDEPALFVALTFERREVLDSSNIKPMNLIGVDRGENIPAVIALTDPEGCPLSRFKDSLGNPTHILRIGESYKEKQRTIQAKKEVEQRRAGGYSRKYASKAKNLADDMVRNTARDLLYYAVTQDAMLIFENLSRGFGRQGKRTFMAERQYTRMEDWLTAKLAYEGLPSKTYLSKTLAQYTSKTCSNCGFTITSADYDRVLEKLKKTATGWMTTINGKELKVEGQITYYNRYKRQNVVKDLSVELDRLSEESVNNDISSWTKGRSGEALSLLKKRFSHRPVQEKFVCLNCGFETHADEQAALNIARSWLFLRSQEYKKYQTNKTTGNTDKRAFVETWQSFYRKKLKEVWKPAV

SEQ ID NO: 30837 - protein, 978 aa, synthetic construct
  REGION 1..978: note = engineered CasX variant
QEIKRINKIRRRLVKDSNTKKAGKTGPMKTLLVPVMTPDLRERLENLRKKPENIPQPISNTSRANLNKLLTDYTEMKKAILHVYWEEFQKDPVGLMSRVAQPASKKIDQNKLKPEMDEKGNLTTAGFACSQCGQPLFVYKLEQVSEKGKAYTNYFGRCNVAEHEKLIKLDQLKPEKDSDEAVTYSLGKFGQRALDFYSIHVTKESTHPVKPLAQIAGNRYASGPVGKALSDACMGTIASFLSKYQDIIIEHQKVVKGNQKRLESLRELAGKENLEYPSVTLPPQPHTKEGVDAYNEVIARVRMWVNLNLWQKLKLSRDDAKPLLRLKGFPSFPLVERQANEVDWWDMVCNVKKLINEKKEDGKVFWQNLAGYKRQEALRPYLSSEEDRKKGKKFARYQLGDLLLHLEKKHGEDWGKVYDEAWERIDKKVEGLSKHIKLEEERRSEDAQSKAALTDWLRAKASFVIEGLKEADKDEFCRCELKLQKWYGDLRGKPFAIEAENSILDISGFSKQYNCAFIWQKDGVKKLNLYLIINYFKGGKLRFKKIKPEAFEANRFYTVINKKSGEIVPMEVNFNFDDPNLIILPLAFGKRQGREFIWNDLLSLETGSLKLANGRVIEKTLYNRRTRQDEPALFVALTFERREVLDSSNIKPMNLIGVDRGENIPAVIALTDPEGCPLSRFKDSLGNPTHILRIGESYKEKQRTIQAKKEVEQRRAGGYSRKYASKAKNLADDMVRNTARDLLYYAVTQDAMLIFENLSRGFGRQGKRTFMAERQYTRMEDWLTAKLAYEGLPSKTYLSKTLAQYTSKTCSNCGFTITSADYDRVLEKLKKTATGWMTTINGKELKVEGQITYYNRYKRQNVVKDLSVELDRLSEESVNNDISSWTKGRSGEALSLLKKRFSHRPVQEKFVCLNCGFETHADEQAALNIARSWLFLRSQEYKKYQTNKTTGNTDKRAFVETWQSFYRKKLKEVWKPAV

SEQ ID NO: 30838 - protein, 977 aa, synthetic construct
  REGION 1..977: note = engineered CasX variant
QEIKRINKIRRRLVKDSNTKKAGKTGPMKTLLVPVMTPDLRERLENLRKKPENIPQPISNTSRANLNKLLTDYTEMKKAILHVYWEEFQKDPVGLMSRVAQPASKKIDQNKLKPEMDEKGNLTTAGFACSQCGQPLFVYKLEQVSEKGKAYTNYFGRCNVAEHEKLILLDQLKPEKDSDEAVTYSLGKFGQRALDFYSIHVTKESTHPVKPLAQIAGNRYASPVGKALSDACMGTIASFLSKYQDIIIEHQKVVKGNQKRLESLRELAGKENLEYPSVTLPPQPHTKEGVDAYNEVIARVRMWVNLNLWQKLKLSRDDAKPLLRLKGFPSFPLVERQANEVDWWDMVCNVKKLINEKKEDGKVFWQNLAGYKRQEALRPYLSSEEDRKKGKKFARYQLGDLLLHLEKKHGEDWGKVYDEAWERIDKKVEGLSKHIKLEEERRSEDAQSKAALTDWLRAKASFVIEGLKEADKDEFCRCELKLQKWYGDLRGKPFAIEAENSILDISGFSKQYNCAFIWQKDGVKKLNLYLIINYFKGGKLRFKKIKPEAFEANRFYTVINKKSGEIVPMEVNFNFDDPNLIILPLAFGKRQGREFIWNDLLSLETGSLKLANGRVIEKTLYNRRTRQDEPALFVALTFERREVLDSSNIKPMNLIGVDRGENIPAVIALTDPEGCPLSRFKDSLGNPTHILRIGESYKEKQRTIQAKKEVEQRRAGGYSRKYASKAKNLADDMVRNTARDLLYYAVTQDAMLIFENLSRGFGRQGKRTFMAERQYTRMEDWLTAKLAYEGLPSKTYLSKTLAQYTSKTCSNCGFTITSADYDRVLEKLKKTATGWMTTINGKELKVEGQITYYNRYKRQNVVKDLSVELDRLSEESVNNDISSWTKGRSGEALSLLKKRFSHRPVQEKFVCLNCGFETHADEQAALNIARSWLFLRSQEYKKYQTNKTTGNTDKRAFVETWQSFYRKKLKEVWKPAV

SEQ ID NO: 30839 - protein, 978 aa, synthetic construct
  REGION 1..978: note = engineered CasX variant
QEIKRINKIRRRLVKDSNTKKAGKTGPMKTLLVRVMTPDLRERLENLRKKPPNIPQPISNTSRANLNKLLTDYTEMKKAILHVYWEEFQKDPVGLMSRVAQPASKKIDQNKLKPEMDEKGNLTTAGFACSQCGQPLFVYKLEQVSEKGKAYTNYFGRCNVAEHEKLILLDQLKPEKDSDEAVTYSLGKFGQRALDFYSIHVTKESTHPVKPLAQIAGNRYASYPVGKALSDACMGTIASFLSKYQDIIIEHQKVVKGNQKRLESLRELAGKENLEYPSVTLPPQPHTKEGVDAYNEVIARVRMWVNLNLWQKLKLSRDDAKPLLRLKGFPSFPLVERQANEVDWWDMVCNVKKLINEKKEDGKVFWQNLAGYKRQEALRPYLSSEEDRKKGKKFARYQLGDLLLHLEKKHGEDWGKVYDEAWERIDKKVEGLSKHIKLEEERRSEDAQSKAALTDWLRAKASFVIEGLKEADKDEFCRCELKLQKWYGDLRGKPFAIEAENSILDISGFSKQYNCAFIWQKDGVKKLNLYLIINYFKGGKLRFKKIKPEAFEANRFYTVINKKSGEIVPMEVNFNFDDPNLIILPLAFGKRQGREFIWNDLLSLETGSLKLANGRVIEKTLYNRRTRQDEPALFVALTFERREVLDSSNIKPMNLIGVDRGENIPAVIALTDPEGCPLSRFKDSLGNPTHILRIGESYKEKQRTIQAKKEVEQRRAGGYSRKYASKAKNLADDMVRNTARDLLYYAVTQDAMLIFENLSRGFGRQGKRTFMAERQYTRMEDWLTAKLAYEGLPSKTYLSKTLAQYTSKTCSNCGFTITSADYDRVLEKLKKTATGWMTTINGKELKVEGQITYYNRYKRQNVVKDLSVELDRLSEESVNNDISSWTKGRSGEALSLLKKRFSHRPVQEKFVCLNCGFETHADEQAALNIARSWLFLRSQEYKKYQTNKTTGNTDKRAFVETWQSFYRKKLKEVWKPAV

SEQ ID NO: 30840 - protein, 978 aa, synthetic construct
  REGION 1..978: note = engineered CasX variant
QEIKRINKIRRRLVKDSNTKKAGKTGPMKTLLVRVMTPDLRERLENLRKKPPNIPQPISNTSRANLNKLLTDYTEMKKAILHVYWEEFQKDPVGLMSRVAQPASKKIDQNKLKPEMDEKGNLTTAGFACSQCGQPLFVYKLEQVSEKGKAYTNYFGRCNVAEHEKLILLDQLKPEKDSDEAVTYSLGKFGQRALDFYSIHVTKESTHPVKPLAQIAGNRYASHPVGKALSDACMGTIASFLSKYQDIIIEHQKVVKGNQKRLESLRELAGKENLEYPSVTLPPQPHTKEGVDAYNEVIARVRMWVNLNLWQKLKLSRDDAKPLLRLKGFPSFPLVERQANEVDWWDMVCNVKKLINEKKEDGKVFWQNLAGYKRQEALRPYLSSEEDRKKGKKFARYQLGDLLLHLEKKHGEDWGKVYDEAWERIDKKVEGLSKHIKLEEERRSEDAQSKAALTDWLRAKASFVIEGLKEADKDEFCRCELKLQKWYGDLRGKPFAIEAENSILDISGFSKQYNCAFIWQKDGVKKLNLYLIINYFKGGKLRFKKIKPEAFEANRFYTVINKKSGEIVPMEVNFNFDDPNLIILPLAFGKRQGREFIWNDLLSLETGSLKLANGRVIEKTLYNRRTRQDEPALFVALTFERREVLDSSNIKPMNLIGVDRGENIPAVIALTDPEGCPLSRFKDSLGNPTHILRIGESYKEKQRTIQAKKEVEQRRAGGYSRKYASKAKNLADDMVRNTARDLLYYAVTQDAMLIFENLSRGFGRQGKRTFMAERQYTRMEDWLTAKLAYEGLPSKTYLSKTLAQYTSKTCSNCGFTITSADYDRVLEKLKKTATGWMTTINGKELKVEGQITYYNRYKRQNVVKDLSVELDRLSEESVNNDISSWTKGRSGEALSLLKKRFSHRPVQEKFVCLNCGFETHADEQAALNIARSWLFLRSQEYKKYQTNKTTGNTDKRAFVETWQSFYRKKLKEVWKPAV

SEQ ID NO: 30841 - protein, 978 aa, synthetic construct
  REGION 1..978: note = engineered CasX variant
QEIKRINKIRRRLVKDSNTKKAGKTGPMKTLLVRVMTPDLRERLENLRKKPPNIPQPISNTSRANLNKLLTDYTEMKKAILHVYWEEFQKDPVGLMSRVAQPASKKIDQNKLKPEMDEKGNLTTAGFACSQCGQPLFVYKLEQVSEKGKAYTNYFGRCNVAEHEKLILLDQLKPEKDSDEAVTYSLGKFGQRALDFYSIHVTKESTHPVKPLAQIAGNRYASSPVGKALSDACMGTIASFLSKYQDIIIEHQKVVKGNQKRLESLRELAGKENLEYPSVTLPPQPHTKEGVDAYNEVIARVRMWVNLNLWQKLKLSRDDAKPLLRLKGFPSFPLVERQANEVDWWDMVCNVKKLINEKKEDGKVFWQNLAGYKRQEALRPYLSSEEDRKKGKKFARYQLGDLLLHLEKKHGEDWGKVYDEAWERIDKKVEGLSKHIKLEEERRSEDAQSKAALTDWLRAKASFVIEGLKEADKDEFCRCELKLQKWYGDLRGKPFAIEAENSILDISGFSKQYNCAFIWQKDGVKKLNLYLIINYFKGGKLRFKKIKPEAFEANRFYTVINKKSGEIVPMEVNFNFDDPNLIILPLAFGKRQGREFIWNDLLSLETGSLKLANGRVIEKTLYNRRTRQDEPALFVALTFERREVLDSSNIKPMNLIGVDRGENIPAVIALTDPEGCPLSRFKDSLGNPTHILRIGESYKEKQRTIQAKKEVEQRRAGGYSRKYASKAKNLADDMVRNTARDLLYYAVTQDAMLIFENLSRGFGRQGKRTFMAERQYTRMEDWLTAKLAYEGLPSKTYLSKTLAQYTSKTCSNCGFTITSADYDRVLEKLKKTATGWMTTINGKELKVEGQITYYNRYKRQNVVKDLSVELDRLSEESVNNDISSWTKGRSGEALSLLKKRFSHRPVQEKFVCLNCGFETHADEQAALNIARSWLFLRSQEYKKYQTNKTTGNTDKRAFVETWQSFYRKKLKEVWKPAV

SEQ ID NO: 30842 - protein, 978 aa, synthetic construct
  REGION 1..978: note = engineered CasX variant
QEIKRINKIRRRLVKDSNTKKAGKTGPMKTLLVRVMTPDLRERLENLRKKPPNIPQPISNTSRANLNKLLTDYTEMKKAILHVYWEEFQKDPVGLMSRVAQPASKKIDQNKLKPEMDEKGNLTTAGFACSQCGQPLFVYKLEQVSEKGKAYTNYFGRCNVAEHEKLILLDQLKPEKDSDEAVTYSLGKFGQRALDFYSIHVTKESTHPVKPLAQIAGNRYASTPVGKALSDACMGTIASFLSKYQDIIIEHQKVVKGNQKRLESLRELAGKENLEYPSVTLPPQPHTKEGVDAYNEVIARVRMWVNLNLWQKLKLSRDDAKPLLRLKGFPSFPLVERQANEVDWWDMVCNVKKLINEKKEDGKVFWQNLAGYKRQEALRPYLSSEEDRKKGKKFARYQLGDLLLHLEKKHGEDWGKVYDEAWERIDKKVEGLSKHIKLEEERRSEDAQSKAALTDWLRAKASFVIEGLKEADKDEFCRCELKLQKWYGDLRGKPFAIEAENSILDISGFSKQYNCAFIWQKDGVKKLNLYLIINYFKGGKLRFKKIKPEAFEANRFYTVINKKSGEIVPMEVNFNFDDPNLIILPLAFGKRQGREFIWNDLLSLETGSLKLANGRVIEKTLYNRRTRQDEPALFVALTFERREVLDSSNIKPMNLIGVDRGENIPAVIALTDPEGCPLSRFKDSLGNPTHILRIGESYKEKQRTIQAKKEVEQRRAGGYSRKYASKAKNLADDMVRNTARDLLYYAVTQDAMLIFENLSRGFGRQGKRTFMAERQYTRMEDWLTAKLAYEGLPSKTYLSKTLAQYTSKTCSNCGFTITSADYDRVLEKLKKTATGWMTTINGKELKVEGQITYYNRYKRQNVVKDLSVELDRLSEESVNNDISSWTKGRSGEALSLLKKRFSHRPVQEKFVCLNCGFETHADEQAALNIARSWLFLRSQEYKKYQTNKTTGNTDKRAFVETWQSFYRKKLKEVWKPAV

SEQ ID NO: 30843 - protein, 978 aa, synthetic construct
  REGION 1..978: note = engineered CasX variant
QEIKRINKIRRRLVKDSNTKKAGKTGPMKTLLVRVMTPDLRERLENLRKKPPNIPQPISNTSRANLNKLLTDYTEMKKAILHVYWEEFQKDPVGLMSRVAQPASKKIDQNKLKPEMDEKGNLTTAGFACSQCGQPLFVYKLEQVSEKGKAYTNYFGRCNVAEHEKLILLDQLKPEKDSDEAVTYSLGKFGQRALDFYSIHVTKESTHPVKPLAQIAGNRYASAPVGKALSDACMGTIASFLSKYQDIIIEHQKVVKGNQKRLESLRELAGKENLEYPSVTLPPQPHTKEGVDAYNEVIARVRMWVNLNLWQKLKLSRDDAKPLLRLKGFPSFPLVERQANEVDWWDMVCNVKKLINEKKEDGKVFWQNLAGYKRQEALRPYLSSEEDRKKGKKFARYQLGDLLLHLEKKHGEDWGKVYDEAWERIDKKVEGLSKHIKLEEERRSEDAQSKAALTDWLRAKASFVIEGLKEADKDEFCRCELKLQKWYGDLRGKPFAIEAENSILDISGFSKQYNCAFIWQKDGVKKLNLYLIINYFKGGKLRFKKIKPEAFEANRFYTVINKKSGEIVPMEVNFNFDDPNLIILPLAFGKRQGREFIWNDLLSLETGSLKLANGRVIEKTLYNRRTRQDEPALFVALTFERREVLDSSNIKPMNLIGVDRGENIPAVIALTDPEGCPLSRFKDSLGNPTHILRIGESYKEKQRTIQAKKEVEQRRAGGYSRKYASKAKNLADDMVRNTARDLLYYAVTQDAMLIFENLSRGFGRQGKRTFMAERQYTRMEDWLTAKLAYEGLPSKTYLSKTLAQYTSKTCSNCGFTITSADYDRVLEKLKKTATGWMTTINGKELKVEGQITYYNRYKRQNVVKDLSVELDRLSEESVNNDISSWTKGRSGEALSLLKKRFSHRPVQEKFVCLNCGFETHADEQAALNIARSWLFLRSQEYKKYQTNKTTGNTDKRAFVETWQSFYRKKLKEVWKPAV

SEQ ID NO: 30844 - protein, 978 aa, synthetic construct
  REGION 1..978: note = engineered CasX variant
QEIKRINKIRRRLVKDSNTKKAGKTGPMKTLLVRVMTPDLRERLENLRKKPPNIPQPISNTSRANLNKLLTDYTEMKKAILHVYWEEFQKDPVGLMSRVAQPASKKIDQNKLKPEMDEKGNLTTAGFACSQCGQPLFVYKLEQVSEKGKAYTNYFGRCNVAEHEKLILLDQLKPEKDSDEAVTYSLGKFGQRALDFYSIHVTKESTHPVKPLAQIAGNRYASVPVGKALSDACMGTIASFLSKYQDIIIEHQKVVKGNQKRLESLRELAGKENLEYPSVTLPPQPHTKEGVDAYNEVIARVRMWVNLNLWQKLKLSRDDAKPLLRLKGFPSFPLVERQANEVDWWDMVCNVKKLINEKKEDGKVFWQNLAGYKRQEALRPYLSSEEDRKKGKKFARYQLGDLLLHLEKKHGEDWGKVYDEAWERIDKKVEGLSKHIKLEEERRSEDAQSKAALTDWLRAKASFVIEGLKEADKDEFCRCELKLQKWYGDLRGKPFAIEAENSILDISGFSKQYNCAFIWQKDGVKKLNLYLIINYFKGGKLRFKKIKPEAFEANRFYTVINKKSGEIVPMEVNFNFDDPNLIILPLAFGKRQGREFIWNDLLSLETGSLKLANGRVIEKTLYNRRTRQDEPALFVALTFERREVLDSSNIKPMNLIGVDRGENIPAVIALTDPEGCPLSRFKDSLGNPTHILRIGESYKEKQRTIQAKKEVEQRRAGGYSRKYASKAKNLADDMVRNTARDLLYYAVTQDAMLIFENLSRGFGRQGKRTFMAERQYTRMEDWLTAKLAYEGLPSKTYLSKTLAQYTSKTCSNCGFTITSADYDRVLEKLKKTATGWMTTINGKELKVEGQITYYNRYKRQNVVKDLSVELDRLSEESVNNDISSWTKGRSGEALSLLKKRFSHRPVQEKFVCLNCGFETHADEQAALNIARSWLFLRSQEYKKYQTNKTTGNTDKRAFVETWQSFYRKKLKEVWKPAV

SEQ ID NO: 30845 - protein, 978 aa, synthetic construct
  REGION 1..978: note = engineered CasX variant
QEIKRINKIRRRLVKDSNTKKAGKTGPMKTLLVRVMTPDLRERLENLRKKPPNIPQPISNTSRANLNKLLTDYTEMKKAILHVYWEEFQKDPVGLMSRVAQPASKKIDQNKLKPEMDEKGNLTTAGFACSQCGQPLFVYKLEQVSEKGKAYTNYFGRCNVAEHEKLIKLDQLKPEKDSDEAVTYSLGKFGQRALDFYSIHVTKESTHPVKPLAQIAGNRYASGPVGKALSDACMGTIASFLSKYQDIIIEHQKVVKGNQKRLESLRELAGKENLEYPSVTLPPQPHTKEGVDAYNEVIARVRMWVNLNLWQKLKLSRDDAKPLLRLKGFPSFPLVERQANEVDWWDMVCNVKKLINEKKEDGKVFWQNLAGYKRQEALRPYLSSEEDRKKGKKFARYQLGDLLLHLEKKHGEDWGKVYDEAWERIDKKVEGLSKHIKLEEERRSEDAQSKAALTDWLRAKASFVIEGLKEADKDEFCRCELKLQKWYGDLRGKPFAIEAENSILDISGFSKQYNCAFIWQKDGVKKLNLYLIINYFKGGKLRFKKIKPEAFEANRFYTVINKKSGEIVPMEVNFNFDDPNLIILPLAFGKRQGREFIWNDLLSLETGSLKLANGRVIEKTLYNRRTRQDEPALFVALTFERREVLDSSNIKPMNLIGVDRGENIPAVIALTDPEGCPLSRFKDSLGNPTHILRIGESYKEKQRTIQAKKEVEQRRAGGYSRKYASKAKNLADDMVRNTARDLLYYAVTQDAMLIFENLSRGFGRQGKRTFMAERQYTRMEDWLTAKLAYEGLPSKTYLSKTLAQYTSKTCSNCGFTITSADYDRVLEKLKKTATGWMTTINGKELKVEGQITYYNRYKRQNVVKDLSVELDRLSEESVNNDISSWTKGRSGEALSLLKKRFSHRPVQEKFVCLNCGFETHADEQAALNIARSWLFLRSQEYKKYQTNKTTGNTDKRAFVETWQSFYRKKLKEVWKPAV

SEQ ID NO: 30846 - protein, 977 aa, synthetic construct
  REGION 1..977: note = engineered CasX variant
QEIKRINKIRRRLVKDSNTKKAGKTGPMKTLLVRVMTPDLRERLENLRKKPPNIPQPISNTSRANLNKLLTDYTEMKKAILHVYWEEFQKDPVGLMSRVAQPASKKIDQNKLKPEMDEKGNLTTAGFACSQCGQPLFVYKLEQVSEKGKAYTNYFGRCNVAEHEKLILLDQLKPEKDSDEAVTYSLGKFGQRALDFYSIHVTKESTHPVKPLAQIAGNRYASPVGKALSDACMGTIASFLSKYQDIIIEHQKVVKGNQKRLESLRELAGKENLEYPSVTLPPQPHTKEGVDAYNEVIARVRMWVNLNLWQKLKLSRDDAKPLLRLKGFPSFPLVERQANEVDWWDMVCNVKKLINEKKEDGKVFWQNLAGYKRQEALRPYLSSEEDRKKGKKFARYQLGDLLLHLEKKHGEDWGKVYDEAWERIDKKVEGLSKHIKLEEERRSEDAQSKAALTDWLRAKASFVIEGLKEADKDEFCRCELKLQKWYGDLRGKPFAIEAENSILDISGFSKQYNCAFIWQKDGVKKLNLYLIINYFKGGKLRFKKIKPEAFEANRFYTVINKKSGEIVPMEVNFNFDDPNLIILPLAFGKRQGREFIWNDLLSLETGSLKLANGRVIEKTLYNRRTRQDEPALFVALTFERREVLDSSNIKPMNLIGVDRGENIPAVIALTDPEGCPLSRFKDSLGNPTHILRIGESYKEKQRTIQAKKEVEQRRAGGYSRKYASKAKNLADDMVRNTARDLLYYAVTQDAMLIFENLSRGFGRQGKRTFMAERQYTRMEDWLTAKLAYEGLPSKTYLSKTLAQYTSKTCSNCGFTITSADYDRVLEKLKKTATGWMTTINGKELKVEGQITYYNRYKRQNVVKDLSVELDRLSEESVNNDISSWTKGRSGEALSLLKKRFSHRPVQEKFVCLNCGFETHADEQAALNIARSWLFLRSQEYKKYQTNKTTGNTDKRAFVETWQSFYRKKLKEVWKPAV

SEQ ID NO: 30847 - protein, 978 aa, synthetic construct
  REGION 1..978: note = engineered CasX variant
QEIKRINKIRRRLVKDSNTKKAGKTGPMKTLLVRVMTPDLRERLENLRKKPENIPQPISNTSQANLNKLLTDYTEMKKAILHVYWEEFQKDPVGLMSRVAQPASKKIDQNKLKPEMDEKGNLTTAGFACSQCGQPLFVYKLEQVSEKGKAYTNYFGRCNVAEHEKLILLDQLKPEKDSDEAVTYSLGKFGQRALDFYSIHVTKESTHPVKPLAQIAGNRYASYPVGKALSDACMGTIASFLSKYQDIIIEHQKVVKGNQKRLESLRELAGKENLEYPSVTLPPQPHTKEGVDAYNEVIARVRMWVNLNLWQKLKLSRDDAKPLLRLKGFPSFPLVERQANEVDWWDMVCNVKKLINEKKEDGKVFWQNLAGYKRQEALRPYLSSEEDRKKGKKFARYQLGDLLLHLEKKHGEDWGKVYDEAWERIDKKVEGLSKHIKLEEERRSEDAQSKAALTDWLRAKASFVIEGLKEADKDEFCRCELKLQKWYGDLRGKPFAIEAENSILDISGFSKQYNCAFIWQKDGVKKLNLYLIINYFKGGKLRFKKIKPEAFEANRFYTVINKKSGEIVPMEVNFNFDDPNLIILPLAFGKRQGREFIWNDLLSLETGSLKLANGRVIEKTLYNRRTRQDEPALFVALTFERREVLDSSNIKPMNLIGVDRGENIPAVIALTDPEGCPLSRFKDSLGNPTHILRIGESYKEKQRTIQAKKEVEQRRAGGYSRKYASKAKNLADDMVRNTARDLLYYAVTQDAMLIFENLSRGFGRQGKRTFMAERQYTRMEDWLTAKLAYEGLPSKTYLSKTLAQYTSKTCSNCGFTITSADYDRVLEKLKKTATGWMTTINGKELKVEGQITYYNRYKRQNVVKDLSVELDRLSEESVNNDISSWTKGRSGEALSLLKKRFSHRPVQEKFVCLNCGFETHADEQAALNIARSWLFLRSQEYKKYQTNKTTGNTDKRAFVETWQSFYRKKLKEVWKPAV

SEQ ID NO: 30848 - protein, 978 aa, synthetic construct
  REGION 1..978: note = engineered CasX variant
QEIKRINKIRRRLVKDSNTKKAGKTGPMKTLLVRVMTPDLRERLENLRKKPENIPQPISNTSQANLNKLLTDYTEMKKAILHVYWEEFQKDPVGLMSRVAQPASKKIDQNKLKPEMDEKGNLTTAGFACSQCGQPLFVYKLEQVSEKGKAYTNYFGRCNVAEHEKLILLDQLKPEKDSDEAVTYSLGKFGQRALDFYSIHVTKESTHPVKPLAQIAGNRYASHPVGKALSDACMGTIASFLSKYQDIIIEHQKVVKGNQKRLESLRELAGKENLEYPSVTLPPQPHTKEGVDAYNEVIARVRMWVNLNLWQKLKLSRDDAKPLLRLKGFPSFPLVERQANEVDWWDMVCNVKKLINEKKEDGKVFWQNLAGYKRQEALRPYLSSEEDRKKGKKFARYQLGDLLLHLEKKHGEDWGKVYDEAWERIDKKVEGLSKHIKLEEERRSEDAQSKAALTDWLRAKASFVIEGLKEADKDEFCRCELKLQKWYGDLRGKPFAIEAENSILDISGFSKQYNCAFIWQKDGVKKLNLYLIINYFKGGKLRFKKIKPEAFEANRFYTVINKKSGEIVPMEVNFNFDDPNLIILPLAFGKRQGREFIWNDLLSLETGSLKLANGRVIEKTLYNRRTRQDEPALFVALTFERREVLDSSNIKPMNLIGVDRGENIPAVIALTDPEGCPLSRFKDSLGNPTHILRIGESYKEKQRTIQAKKEVEQRRAGGYSRKYASKAKNLADDMVRNTARDLLYYAVTQDAMLIFENLSRGFGRQGKRTFMAERQYTRMEDWLTAKLAYEGLPSKTYLSKTLAQYTSKTCSNCGFTITSADYDRVLEKLKKTATGWMTTINGKELKVEGQITYYNRYKRQNVVKDLSVELDRLSEESVNNDISSWTKGRSGEALSLLKKRFSHRPVQEKFVCLNCGFETHADEQAALNIARSWLFLRSQEYKKYQTNKTTGNTDKRAFVETWQSFYRKKLKEVWKPAV

SEQ ID NO: 30849 - protein, 978 aa, synthetic construct
  REGION 1..978: note = engineered CasX variant
QEIKRINKIRRRLVKDSNTKKAGKTGPMKTLLVRVMTPDLRERLENLRKKPENIPQPISNTSQANLNKLLTDYTEMKKAILHVYWEEFQKDPVGLMSRVAQPASKKIDQNKLKPEMDEKGNLTTAGFACSQCGQPLFVYKLEQVSEKGKAYTNYFGRCNVAEHEKLILLDQLKPEKDSDEAVTYSLGKFGQRALDFYSIHVTKESTHPVKPLAQIAGNRYASSPVGKALSDACMGTIASFLSKYQDIIIEHQKVVKGNQKRLESLRELAGKENLEYPSVTLPPQPHTKEGVDAYNEVIARVRMWVNLNLWQKLKLSRDDAKPLLRLKGFPSFPLVERQANEVDWWDMVCNVKKLINEKKEDGKVFWQNLAGYKRQEALRPYLSSEEDRKKGKKFARYQLGDLLLHLEKKHGEDWGKVYDEAWERIDKKVEGLSKHIKLEEERRSEDAQSKAALTDWLRAKASFVIEGLKEADKDEFCRCELKLQKWYGDLRGKPFAIEAENSILDISGFSKQYNCAFIWQKDGVKKLNLYLIINYFKGGKLRFKKIKPEAFEANRFYTVINKKSGEIVPMEVNFNFDDPNLIILPLAFGKRQGREFIWNDLLSLETGSLKLANGRVIEKTLYNRRTRQDEPALFVALTFERREVLDSSNIKPMNLIGVDRGENIPAVIALTDPEGCPLSRFKDSLGNPTHILRIGESYKEKQRTIQAKKEVEQRRAGGYSRKYASKAKNLADDMVRNTARDLLYYAVTQDAMLIFENLSRGFGRQGKRTFMAERQYTRMEDWLTAKLAYEGLPSKTYLSKTLAQYTSKTCSNCGFTITSADYDRVLEKLKKTATGWMTTINGKELKVEGQITYYNRYKRQNVVKDLSVELDRLSEESVNNDISSWTKGRSGEALSLLKKRFSHRPVQEKFVCLNCGFETHADEQAALNIARSWLFLRSQEYKKYQTNKTTGNTDKRAFVETWQSFYRKKLKEVWKPAV

SEQ ID NO: 30850 - protein, 978 aa, synthetic construct
  REGION 1..978: note = engineered CasX variant
QEIKRINKIRRRLVKDSNTKKAGKTGPMKTLLVRVMTPDLRERLENLRKKPENIPQPISNTSQANLNKLLTDYTEMKKAILHVYWEEFQKDPVGLMSRVAQPASKKIDQNKLKPEMDEKGNLTTAGFACSQCGQPLFVYKLEQVSEKGKAYTNYFGRCNVAEHEKLILLDQLKPEKDSDEAVTYSLGKFGQRALDFYSIHVTKESTHPVKPLAQIAGNRYASTPVGKALSDACMGTIASFLSKYQDIIIEHQKVVKGNQKRLESLRELAGKENLEYPSVTLPPQPHTKEGVDAYNEVIARVRMWVNLNLWQKLKLSRDDAKPLLRLKGFPSFPLVERQANEVDWWDMVCNVKKLINEKKEDGKVFWQNLAGYKRQEALRPYLSSEEDRKKGKKFARYQLGDLLLHLEKKHGEDWGKVYDEAWERIDKKVEGLSKHIKLEEERRSEDAQSKAALTDWLRAKASFVIEGLKEADKDEFCRCELKLQKWYGDLRGKPFAIEAENSILDISGFSKQYNCAFIWQKDGVKKLNLYLIINYFKGGKLRFKKIKPEAFEANRFYTVINKKSGEIVPMEVNFNFDDPNLIILPLAFGKRQGREFIWNDLLSLETGSLKLANGRVIEKTLYNRRTRQDEPALFVALTFERREVLDSSNIKPMNLIGVDRGENIPAVIALTDPEGCPLSRFKDSLGNPTHILRIGESYKEKQRTIQAKKEVEQRRAGGYSRKYASKAKNLADDMVRNTARDLLYYAVTQDAMLIFENLSRGFGRQGKRTFMAERQYTRMEDWLTAKLAYEGLPSKTYLSKTLAQYTSKTCSNCGFTITSADYDRVLEKLKKTATGWMTTINGKELKVEGQITYYNRYKRQNVVKDLSVELDRLSEESVNNDISSWTKGRSGEALSLLKKRFSHRPVQEKFVCLNCGFETHADEQAALNIARSWLFLRSQEYKKYQTNKTTGNTDKRAFVETWQSFYRKKLKEVWKPAV

SEQ ID NO: 30851 - protein, 978 aa, synthetic construct
  REGION 1..978: note = engineered CasX variant
QEIKRINKIRRRLVKDSNTKKAGKTGPMKTLLVRVMTPDLRERLENLRKKPENIPQPISNTSQANLNKLLTDYTEMKKAILHVYWEEFQKDPVGLMSRVAQPASKKIDQNKLKPEMDEKGNLTTAGFACSQCGQPLFVYKLEQVSEKGKAYTNYFGRCNVAEHEKLILLDQLKPEKDSDEAVTYSLGKFGQRALDFYSIHVTKESTHPVKPLAQIAGNRYASAPVGKALSDACMGTIASFLSKYQDIIIEHQKVVKGNQKRLESLRELAGKENLEYPSVTLPPQPHTKEGVDAYNEVIARVRMWVNLNLWQKLKLSRDDAKPLLRLKGFPSFPLVERQANEVDWWDMVCNVKKLINEKKEDGKVFWQNLAGYKRQEALRPYLSSEEDRKKGKKFARYQLGDLLLHLEKKHGEDWGKVYDEAWERIDKKVEGLSKHIKLEEERRSEDAQSKAALTDWLRAKASFVIEGLKEADKDEFCRCELKLQKWYGDLRGKPFAIEAENSILDISGFSKQYNCAFIWQKDGVKKLNLYLIINYFKGGKLRFKKIKPEAFEANRFYTVINKKSGEIVPMEVNFNFDDPNLIILPLAFGKRQGREFIWNDLLSLETGSLKLANGRVIEKTLYNRRTRQDEPALFVALTFERREVLDSSNIKPMNLIGVDRGENIPAVIALTDPEGCPLSRFKDSLGNPTHILRIGESYKEKQRTIQAKKEVEQRRAGGYSRKYASKAKNLADDMVRNTARDLLYYAVTQDAMLIFENLSRGFGRQGKRTFMAERQYTRMEDWLTAKLAYEGLPSKTYLSKTLAQYTSKTCSNCGFTITSADYDRVLEKLKKTATGWMTTINGKELKVEGQITYYNRYKRQNVVKDLSVELDRLSEESVNNDISSWTKGRSGEALSLLKKRFSHRPVQEKFVCLNCGFETHADEQAALNIARSWLFLRSQEYKKYQTNKTTGNTDKRAFVETWQSFYRKKLKEVWKPAV

SEQ ID NO: 30852 - protein, 978 aa, synthetic construct
  REGION 1..978: note = engineered CasX variant
QEIKRINKIRRRLVKDSNTKKAGKTGPMKTLLVRVMTPDLRERLENLRKKPENIPQPISNTSQANLNKLLTDYTEMKKAILHVYWEEFQKDPVGLMSRVAQPASKKIDQNKLKPEMDEKGNLTTAGFACSQCGQPLFVYKLEQVSEKGKAYTNYFGRCNVAEHEKLILLDQLKPEKDSDEAVTYSLGKFGQRALDFYSIHVTKESTHPVKPLAQIAGNRYASVPVGKALSDACMGTIASFLSKYQDIIIEHQKVVKGNQKRLESLRELAGKENLEYPSVTLPPQPHTKEGVDAYNEVIARVRMWVNLNLWQKLKLSRDDAKPLLRLKGFPSFPLVERQANEVDWWDMVCNVKKLINEKKEDGKVFWQNLAGYKRQEALRPYLSSEEDRKKGKKFARYQLGDLLLHLEKKHGEDWGKVYDEAWERIDKKVEGLSKHIKLEEERRSEDAQSKAALTDWLRAKASFVIEGLKEADKDEFCRCELKLQKWYGDLRGKPFAIEAENSILDISGFSKQYNCAFIWQKDGVKKLNLYLIINYFKGGKLRFKKIKPEAFEANRFYTVINKKSGEIVPMEVNFNFDDPNLIILPLAFGKRQGREFIWNDLLSLETGSLKLANGRVIEKTLYNRRTRQDEPALFVALTFERREVLDSSNIKPMNLIGVDRGENIPAVIALTDPEGCPLSRFKDSLGNPTHILRIGESYKEKQRTIQAKKEVEQRRAGGYSRKYASKAKNLADDMVRNTARDLLYYAVTQDAMLIFENLSRGFGRQGKRTFMAERQYTRMEDWLTAKLAYEGLPSKTYLSKTLAQYTSKTCSNCGFTITSADYDRVLEKLKKTATGWMTTINGKELKVEGQITYYNRYKRQNVVKDLSVELDRLSEESVNNDISSWTKGRSGEALSLLKKRFSHRPVQEKFVCLNCGFETHADEQAALNIARSWLFLRSQEYKKYQTNKTTGNTDKRAFVETWQSFYRKKLKEVWKPAV

SEQ ID NO: 30853 - protein, 978 aa, synthetic construct
  REGION 1..978: note = engineered CasX variant
QEIKRINKIRRRLVKDSNTKKAGKTGPMKTLLVRVMTPDLRERLENLRKKPENIPQPISNTSQANLNKLLTDYTEMKKAILHVYWEEFQKDPVGLMSRVAQPASKKIDQNKLKPEMDEKGNLTTAGFACSQCGQPLFVYKLEQVSEKGKAYTNYFGRCNVAEHEKLIKLDQLKPEKDSDEAVTYSLGKFGQRALDFYSIHVTKESTHPVKPLAQIAGNRYASGPVGKALSDACMGTIASFLSKYQDIIIEHQKVVKGNQKRLESLRELAGKENLEYPSVTLPPQPHTKEGVDAYNEVIARVRMWVNLNLWQKLKLSRDDAKPLLRLKGFPSFPLVERQANEVDWWDMVCNVKKLINEKKEDGKVFWQNLAGYKRQEALRPYLSSEEDRKKGKKFARYQLGDLLLHLEKKHGEDWGKVYDEAWERIDKKVEGLSKHIKLEEERRSEDAQSKAALTDWLRAKASFVIEGLKEADKDEFCRCELKLQKWYGDLRGKPFAIEAENSILDISGFSKQYNCAFIWQKDGVKKLNLYLIINYFKGGKLRFKKIKPEAFEANRFYTVINKKSGEIVPMEVNFNFDDPNLIILPLAFGKRQGREFIWNDLLSLETGSLKLANGRVIEKTLYNRRTRQDEPALFVALTFERREVLDSSNIKPMNLIGVDRGENIPAVIALTDPEGCPLSRFKDSLGNPTHILRIGESYKEKQRTIQAKKEVEQRRAGGYSRKYASKAKNLADDMVRNTARDLLYYAVTQDAMLIFENLSRGFGRQGKRTFMAERQYTRMEDWLTAKLAYEGLPSKTYLSKTLAQYTSKTCSNCGFTITSADYDRVLEKLKKTATGWMTTINGKELKVEGQITYYNRYKRQNVVKDLSVELDRLSEESVNNDISSWTKGRSGEALSLLKKRFSHRPVQEKFVCLNCGFETHADEQAALNIARSWLFLRSQEYKKYQTNKTTGNTDKRAFVETWQSFYRKKLKEVWKPAV

SEQ ID NO: 30854 - protein, 977 aa, synthetic construct
  REGION 1..977: note = engineered CasX variant
QEIKRINKIRRRLVKDSNTKKAGKTGPMKTLLVRVMTPDLRERLENLRKKPENIPQPISNTSQANLNKLLTDYTEMKKAILHVYWEEFQKDPVGLMSRVAQPASKKIDQNKLKPEMDEKGNLTTAGFACSQCGQPLFVYKLEQVSEKGKAYTNYFGRCNVAEHEKLILLDQLKPEKDSDEAVTYSLGKFGQRALDFYSIHVTKESTHPVKPLAQIAGNRYASPVGKALSDACMGTIASFLSKYQDIIIEHQKVVKGNQKRLESLRELAGKENLEYPSVTLPPQPHTKEGVDAYNEVIARVRMWVNLNLWQKLKLSRDDAKPLLRLKGFPSFPLVERQANEVDWWDMVCNVKKLINEKKEDGKVFWQNLAGYKRQEALRPYLSSEEDRKKGKKFARYQLGDLLLHLEKKHGEDWGKVYDEAWERIDKKVEGLSKHIKLEEERRSEDAQSKAALTDWLRAKASFVIEGLKEADKDEFCRCELKLQKWYGDLRGKPFAIEAENSILDISGFSKQYNCAFIWQKDGVKKLNLYLIINYFKGGKLRFKKIKPEAFEANRFYTVINKKSGEIVPMEVNFNFDDPNLIILPLAFGKRQGREFIWNDLLSLETGSLKLANGRVIEKTLYNRRTRQDEPALFVALTFERREVLDSSNIKPMNLIGVDRGENIPAVIALTDPEGCPLSRFKDSLGNPTHILRIGESYKEKQRTIQAKKEVEQRRAGGYSRKYASKAKNLADDMVRNTARDLLYYAVTQDAMLIFENLSRGFGRQGKRTFMAERQYTRMEDWLTAKLAYEGLPSKTYLSKTLAQYTSKTCSNCGFTITSADYDRVLEKLKKTATGWMTTINGKELKVEGQITYYNRYKRQNVVKDLSVELDRLSEESVNNDISSWTKGRSGEALSLLKKRFSHRPVQEKFVCLNCGFETHADEQAALNIARSWLFLRSQEYKKYQTNKTTGNTDKRAFVETWQSFYRKKLKEVWKPAV

SEQ ID NO: 30855 - protein, 978 aa, synthetic construct
  REGION 1..978: note = engineered CasX variant
QEIKRINKIRRRLVKDSNTKKAGKTGPMKTLLVRVMTPDLRERLENLRKKPENIPQPISNTSRANLNKLLTDYTEMKKAILHVYDEEFQKDPVGLMSRVAQPASKKIDQNKLKPEMDEKGNLTTAGFACSQCGQPLFVYKLEQVSEKGKAYTNYFGRCNVAEHEKLILLDQLKPEKDSDEAVTYSLGKFGQRALDFYSIHVTKESTHPVKPLAQIAGNRYASYPVGKALSDACMGTIASFLSKYQDIIIEHQKVVKGNQKRLESLRELAGKENLEYPSVTLPPQPHTKEGVDAYNEVIARVRMWVNLNLWQKLKLSRDDAKPLLRLKGFPSFPLVERQANEVDWWDMVCNVKKLINEKKEDGKVFWQNLAGYKRQEALRPYLSSEEDRKKGKKFARYQLGDLLLHLEKKHGEDWGKVYDEAWERIDKKVEGLSKHIKLEEERRSEDAQSKAALTDWLRAKASFVIEGLKEADKDEFCRCELKLQKWYGDLRGKPFAIEAENSILDISGFSKQYNCAFIWQKDGVKKLNLYLIINYFKGGKLRFKKIKPEAFEANRFYTVINKKSGEIVPMEVNFNFDDPNLIILPLAFGKRQGREFIWNDLLSLETGSLKLANGRVIEKTLYNRRTRQDEPALFVALTFERREVLDSSNIKPMNLIGVDRGENIPAVIALTDPEGCPLSRFKDSLGNPTHILRIGESYKEKQRTIQAKKEVEQRRAGGYSRKYASKAKNLADDMVRNTARDLLYYAVTQDAMLIFENLSRGFGRQGKRTFMAERQYTRMEDWLTAKLAYEGLPSKTYLSKTLAQYTSKTCSNCGFTITSADYDRVLEKLKKTATGWMTTINGKELKVEGQITYYNRYKRQNVVKDLSVELDRLSEESVNNDISSWTKGRSGEALSLLKKRFSHRPVQEKFVCLNCGFETHADEQAALNIARSWLFLRSQEYKKYQTNKTTGNTDKRAFVETWQSFYRKKLKEVWKPAV

SEQ ID NO: 30856 - protein, 978 aa, synthetic construct
  REGION 1..978: note = engineered CasX variant
QEIKRINKIRRRLVKDSNTKKAGKTGPMKTLLVRVMTPDLRERLENLRKKPENIPQPISNTSRANLNKLLTDYTEMKKAILHVYDEEFQKDPVGLMSRVAQPASKKIDQNKLKPEMDEKGNLTTAGFACSQCGQPLFVYKLEQVSEKGKAYTNYFGRCNVAEHEKLILLDQLKPEKDSDEAVTYSLGKFGQRALDFYSIHVTKESTHPVKPLAQIAGNRYASHPVGKALSDACMGTIASFLSKYQDIIIEHQKVVKGNQKRLESLRELAGKENLEYPSVTLPPQPHTKEGVDAYNEVIARVRMWVNLNLWQKLKLSRDDAKPLLRLKGFPSFPLVERQANEVDWWDMVCNVKKLINEKKEDGKVFWQNLAGYKRQEALRPYLSSEEDRKKGKKFARYQLGDLLLHLEKKHGEDWGKVYDEAWERIDKKVEGLSKHIKLEEERRSEDAQSKAALTDWLRAKASFVIEGLKEADKDEFCRCELKLQKWYGDLRGKPFAIEAENSILDISGFSKQYNCAFIWQKDGVKKLNLYLIINYFKGGKLRFKKIKPEAFEANRFYTVINKKSGEIVPMEVNFNFDDPNLIILPLAFGKRQGREFIWNDLLSLETGSLKLANGRVIEKTLYNRRTRQDEPALFVALTFERREVLDSSNIKPMNLIGVDRGENIPAVIALTDPEGCPLSRFKDSLGNPTHILRIGESYKEKQRTIQAKKEVEQRRAGGYSRKYASKAKNLADDMVRNTARDLLYYAVTQDAMLIFENLSRGFGRQGKRTFMAERQYTRMEDWLTAKLAYEGLPSKTYLSKTLAQYTSKTCSNCGFTITSADYDRVLEKLKKTATGWMTTINGKELKVEGQITYYNRYKRQNVVKDLSVELDRLSEESVNNDISSWTKGRSGEALSLLKKRFSHRPVQEKFVCLNCGFETHADEQAALNIARSWLFLRSQEYKKYQTNKTTGNTDKRAFVETWQSFYRKKLKEVWKPAV

SEQ ID NO: 30857 - protein, 978 aa, synthetic construct
  REGION 1..978: note = engineered CasX variant
QEIKRINKIRRRLVKDSNTKKAGKTGPMKTLLVRVMTPDLRERLENLRKKPENIPQPISNTSRANLNKLLTDYTEMKKAILHVYDEEFQKDPVGLMSRVAQPASKKIDQNKLKPEMDEKGNLTTAGFACSQCGQPLFVYKLEQVSEKGKAYTNYFGRCNVAEHEKLILLDQLKPEKDSDEAVTYSLGKFGQRALDFYSIHVTKESTHPVKPLAQIAGNRYASSPVGKALSDACMGTIASFLSKYQDIIIEHQKVVKGNQKRLESLRELAGKENLEYPSVTLPPQPHTKEGVDAYNEVIARVRMWVNLNLWQKLKLSRDDAKPLLRLKGFPSFPLVERQANEVDWWDMVCNVKKLINEKKEDGKVFWQNLAGYKRQEALRPYLSSEEDRKKGKKFARYQLGDLLLHLEKKHGEDWGKVYDEAWERIDKKVEGLSKHIKLEEERRSEDAQSKAALTDWLRAKASFVIEGLKEADKDEFCRCELKLQKWYGDLRGKPFAIEAENSILDISGFSKQYNCAFIWQKDGVKKLNLYLIINYFKGGKLRFKKIKPEAFEANRFYTVINKKSGEIVPMEVNFNFDDPNLIILPLAFGKRQGREFIWNDLLSLETGSLKLANGRVIEKTLYNRRTRQDEPALFVALTFERREVLDSSNIKPMNLIGVDRGENIPAVIALTDPEGCPLSRFKDSLGNPTHILRIGESYKEKQRTIQAKKEVEQRRAGGYSRKYASKAKNLADDMVRNTARDLLYYAVTQDAMLIFENLSRGFGRQGKRTFMAERQYTRMEDWLTAKLAYEGLPSKTYLSKTLAQYTSKTCSNCGFTITSADYDRVLEKLKKTATGWMTTINGKELKVEGQITYYNRYKRQNVVKDLSVELDRLSEESVNNDISSWTKGRSGEALSLLKKRFSHRPVQEKFVCLNCGFETHADEQAALNIARSWLFLRSQEYKKYQTNKTTGNTDKRAFVETWQSFYRKKLKEVWKPAV

SEQ ID NO: 30858 - protein, 978 aa, synthetic construct
  REGION 1..978: note = engineered CasX variant
QEIKRINKIRRRLVKDSNTKKAGKTGPMKTLLVRVMTPDLRERLENLRKKPENIPQPISNTSRANLNKLLTDYTEMKKAILHVYDEEFQKDPVGLMSRVAQPASKKIDQNKLKPEMDEKGNLTTAGFACSQCGQPLFVYKLEQVSEKGKAYTNYFGRCNVAEHEKLILLDQLKPEKDSDEAVTYSLGKFGQRALDFYSIHVTKESTHPVKPLAQIAGNRYASTPVGKALSDACMGTIASFLSKYQDIIIEHQKVVKGNQKRLESLRELAGKENLEYPSVTLPPQPHTKEGVDAYNEVIARVRMWVNLNLWQKLKLSRDDAKPLLRLKGFPSFPLVERQANEVDWWDMVCNVKKLINEKKEDGKVFWQNLAGYKRQEALRPYLSSEEDRKKGKKFARYQLGDLLLHLEKKHGEDWGKVYDEAWERIDKKVEGLSKHIKLEEERRSEDAQSKAALTDWLRAKASFVIEGLKEADKDEFCRCELKLQKWYGDLRGKPFAIEAENSILDISGFSKQYNCAFIWQKDGVKKLNLYLIINYFKGGKLRFKKIKPEAFEANRFYTVINKKSGEIVPMEVNFNFDDPNLIILPLAFGKRQGREFIWNDLLSLETGSLKLANGRVIEKTLYNRRTRQDEPALFVALTFERREVLDSSNIKPMNLIGVDRGENIPAVIALTDPEGCPLSRFKDSLGNPTHILRIGESYKEKQRTIQAKKEVEQRRAGGYSRKYASKAKNLADDMVRNTARDLLYYAVTQDAMLIFENLSRGFGRQGKRTFMAERQYTRMEDWLTAKLAYEGLPSKTYLSKTLAQYTSKTCSNCGFTITSADYDRVLEKLKKTATGWMTTINGKELKVEGQITYYNRYKRQNVVKDLSVELDRLSEESVNNDISSWTKGRSGEALSLLKKRFSHRPVQEKFVCLNCGFETHADEQAALNIARSWLFLRSQEYKKYQTNKTTGNTDKRAFVETWQSFYRKKLKEVWKPAV

SEQ ID NO: 30859 - protein, 978 aa, synthetic construct
  REGION 1..978: note = engineered CasX variant
QEIKRINKIRRRLVKDSNTKKAGKTGPMKTLLVRVMTPDLRERLENLRKKPENIPQPISNTSRANLNKLLTDYTEMKKAILHVYDEEFQKDPVGLMSRVAQPASKKIDQNKLKPEMDEKGNLTTAGFACSQCGQPLFVYKLEQVSEKGKAYTNYFGRCNVAEHEKLILLDQLKPEKDSDEAVTYSLGKFGQRALDFYSIHVTKESTHPVKPLAQIAGNRYASAPVGKALSDACMGTIASFLSKYQDIIIEHQKVVKGNQKRLESLRELAGKENLEYPSVTLPPQPHTKEGVDAYNEVIARVRMWVNLNLWQKLKLSRDDAKPLLRLKGFPSFPLVERQANEVDWWDMVCNVKKLINEKKEDGKVFWQNLAGYKRQEALRPYLSSEEDRKKGKKFARYQLGDLLLHLEKKHGEDWGKVYDEAWERIDKKVEGLSKHIKLEEERRSEDAQSKAALTDWLRAKASFVIEGLKEADKDEFCRCELKLQKWYGDLRGKPFAIEAENSILDISGFSKQYNCAFIWQKDGVKKLNLYLIINYFKGGKLRFKKIKPEAFEANRFYTVINKKSGEIVPMEVNFNFDDPNLIILPLAFGKRQGREFIWNDLLSLETGSLKLANGRVIEKTLYNRRTRQDEPALFVALTFERREVLDSSNIKPMNLIGVDRGENIPAVIALTDPEGCPLSRFKDSLGNPTHILRIGESYKEKQRTIQAKKEVEQRRAGGYSRKYASKAKNLADDMVRNTARDLLYYAVTQDAMLIFENLSRGFGRQGKRTFMAERQYTRMEDWLTAKLAYEGLPSKTYLSKTLAQYTSKTCSNCGFTITSADYDRVLEKLKKTATGWMTTINGKELKVEGQITYYNRYKRQNVVKDLSVELDRLSEESVNNDISSWTKGRSGEALSLLKKRFSHRPVQEKFVCLNCGFETHADEQAALNIARSWLFLRSQEYKKYQTNKTTGNTDKRAFVETWQSFYRKKLKEVWKPAV

SEQ ID NO: 30860 - protein, 978 aa, synthetic construct
  REGION 1..978: note = engineered CasX variant
QEIKRINKIRRRLVKDSNTKKAGKTGPMKTLLVRVMTPDLRERLENLRKKPENIPQPISNTSRANLNKLLTDYTEMKKAILHVYDEEFQKDPVGLMSRVAQPASKKIDQNKLKPEMDEKGNLTTAGFACSQCGQPLFVYKLEQVSEKGKAYTNYFGRCNVAEHEKLILLDQLKPEKDSDEAVTYSLGKFGQRALDFYSIHVTKESTHPVKPLAQIAGNRYASVPVGKALSDACMGTIASFLSKYQDIIIEHQKVVKGNQKRLESLRELAGKENLEYPSVTLPPQPHTKEGVDAYNEVIARVRMWVNLNLWQKLKLSRDDAKPLLRLKGFPSFPLVERQANEVDWWDMVCNVKKLINEKKEDGKVFWQNLAGYKRQEALRPYLSSEEDRKKGKKFARYQLGDLLLHLEKKHGEDWGKVYDEAWERIDKKVEGLSKHIKLEEERRSEDAQSKAALTDWLRAKASFVIEGLKEADKDEFCRCELKLQKWYGDLRGKPFAIEAENSILDISGFSKQYNCAFIWQKDGVKKLNLYLIINYFKGGKLRFKKIKPEAFEANRFYTVINKKSGEIVPMEVNFNFDDPNLIILPLAFGKRQGREFIWNDLLSLETGSLKLANGRVIEKTLYNRRTRQDEPALFVALTFERREVLDSSNIKPMNLIGVDRGENIPAVIALTDPEGCPLSRFKDSLGNPTHILRIGESYKEKQRTIQAKKEVEQRRAGGYSRKYASKAKNLADDMVRNTARDLLYYAVTQDAMLIFENLSRGFGRQGKRTFMAERQYTRMEDWLTAKLAYEGLPSKTYLSKTLAQYTSKTCSNCGFTITSADYDRVLEKLKKTATGWMTTINGKELKVEGQITYYNRYKRQNVVKDLSVELDRLSEESVNNDISSWTKGRSGEALSLLKKRFSHRPVQEKFVCLNCGFETHADEQAALNIARSWLFLRSQEYKKYQTNKTTGNTDKRAFVETWQSFYRKKLKEVWKPAV

SEQ ID NO: 30861 - protein, 978 aa, synthetic construct
  REGION 1..978: note = engineered CasX variant
QEIKRINKIRRRLVKDSNTKKAGKTGPMKTLLVRVMTPDLRERLENLRKKPENIPQPISNTSRANLNKLLTDYTEMKKAILHVYDEEFQKDPVGLMSRVAQPASKKIDQNKLKPEMDEKGNLTTAGFACSQCGQPLFVYKLEQVSEKGKAYTNYFGRCNVAEHEKLIKLDQLKPEKDSDEAVTYSLGKFGQRALDFYSIHVTKESTHPVKPLAQIAGNRYASGPVGKALSDACMGTIASFLSKYQDIIIEHQKVVKGNQKRLESLRELAGKENLEYPSVTLPPQPHTKEGVDAYNEVIARVRMWVNLNLWQKLKLSRDDAKPLLRLKGFPSFPLVERQANEVDWWDMVCNVKKLINEKKEDGKVFWQNLAGYKRQEALRPYLSSEEDRKKGKKFARYQLGDLLLHLEKKHGEDWGKVYDEAWERIDKKVEGLSKHIKLEEERRSEDAQSKAALTDWLRAKASFVIEGLKEADKDEFCRCELKLQKWYGDLRGKPFAIEAENSILDISGFSKQYNCAFIWQKDGVKKLNLYLIINYFKGGKLRFKKIKPEAFEANRFYTVINKKSGEIVPMEVNFNFDDPNLIILPLAFGKRQGREFIWNDLLSLETGSLKLANGRVIEKTLYNRRTRQDEPALFVALTFERREVLDSSNIKPMNLIGVDRGENIPAVIALTDPEGCPLSRFKDSLGNPTHILRIGESYKEKQRTIQAKKEVEQRRAGGYSRKYASKAKNLADDMVRNTARDLLYYAVTQDAMLIFENLSRGFGRQGKRTFMAERQYTRMEDWLTAKLAYEGLPSKTYLSKTLAQYTSKTCSNCGFTITSADYDRVLEKLKKTATGWMTTINGKELKVEGQITYYNRYKRQNVVKDLSVELDRLSEESVNNDISSWTKGRSGEALSLLKKRFSHRPVQEKFVCLNCGFETHADEQAALNIARSWLFLRSQEYKKYQTNKTTGNTDKRAFVETWQSFYRKKLKEVWKPAV

SEQ ID NO: 30862 - protein, 977 aa, synthetic construct
  REGION 1..977: note = engineered CasX variant
QEIKRINKIRRRLVKDSNTKKAGKTGPMKTLLVRVMTPDLRERLENLRKKPENIPQPISNTSRANLNKLLTDYTEMKKAILHVYDEEFQKDPVGLMSRVAQPASKKIDQNKLKPEMDEKGNLTTAGFACSQCGQPLFVYKLEQVSEKGKAYTNYFGRCNVAEHEKLILLDQLKPEKDSDEAVTYSLGKFGQRALDFYSIHVTKESTHPVKPLAQIAGNRYASPVGKALSDACMGTIASFLSKYQDIIIEHQKVVKGNQKRLESLRELAGKENLEYPSVTLPPQPHTKEGVDAYNEVIARVRMWVNLNLWQKLKLSRDDAKPLLRLKGFPSFPLVERQANEVDWWDMVCNVKKLINEKKEDGKVFWQNLAGYKRQEALRPYLSSEEDRKKGKKFARYQLGDLLLHLEKKHGEDWGKVYDEAWERIDKKVEGLSKHIKLEEERRSEDAQSKAALTDWLRAKASFVIEGLKEADKDEFCRCELKLQKWYGDLRGKPFAIEAENSILDISGFSKQYNCAFIWQKDGVKKLNLYLIINYFKGGKLRFKKIKPEAFEANRFYTVINKKSGEIVPMEVNFNFDDPNLIILPLAFGKRQGREFIWNDLLSLETGSLKLANGRVIEKTLYNRRTRQDEPALFVALTFERREVLDSSNIKPMNLIGVDRGENIPAVIALTDPEGCPLSRFKDSLGNPTHILRIGESYKEKQRTIQAKKEVEQRRAGGYSRKYASKAKNLADDMVRNTARDLLYYAVTQDAMLIFENLSRGFGRQGKRTFMAERQYTRMEDWLTAKLAYEGLPSKTYLSKTLAQYTSKTCSNCGFTITSADYDRVLEKLKKTATGWMTTINGKELKVEGQITYYNRYKRQNVVKDLSVELDRLSEESVNNDISSWTKGRSGEALSLLKKRFSHRPVQEKFVCLNCGFETHADEQAALNIARSWLFLRSQEYKKYQTNKTTGNTDKRAFVETWQSFYRKKLKEVWKPAV

SEQ ID NO: 30863 - protein, 978 aa, synthetic construct
  REGION 1..978: note = engineered CasX variant
QEIKRINKIRRRLVKDSNTKKAGKTGPMKTLLVRVMTPDLRERLENLRKKPENIPQPISNTSRANLNKLLTDYTEMKKAILHVYWEEFQKDPVGLMSRVAQPASKKIDQNKLKPEMDEKGNLTTAGFACSQCGQPLFVYKLEQVSEKGKAYTNYFGRCNVAEHEKLIKLDQLKPEKDSDEAVTYSLGKFGQRALDFYSIHVTKESTHPVKPLAQIAGNRYASYPVGKALSDACMGTIASFLSKYQDIIIEHQKVVKGNQKRLESLRELAGKENLEYPSVTLPPQPHTKEGVDAYNEVIARVRMWVNLNLWQKLKLSRDDAKPLLRLKGFPSFPLVERQANEVDWWDMVCNVKKLINEKKEDGKVFWQNLAGYKRQEALRPYLSSEEDRKKGKKFARYQLGDLLLHLEKKHGEDWGKVYDEAWERIDKKVEGLSKHIKLEEERRSEDAQSKAALTDWLRAKASFVIEGLKEADKDEFCRCELKLQKWYGDLRGKPFAIEAENSILDISGFSKQYNCAFIWQKDGVKKLNLYLIINYFKGGKLRFKKIKPEAFEANRFYTVINKKSGEIVPMEVNFNFDDPNLIILPLAFGKRQGREFIWNDLLSLETGSLKLANGRVIEKTLYNRRTRQDEPALFVALTFERREVLDSSNIKPMNLIGVDRGENIPAVIALTDPEGCPLSRFKDSLGNPTHILRIGESYKEKQRTIQAKKEVEQRRAGGYSRKYASKAKNLADDMVRNTARDLLYYAVTQDAMLIFENLSRGFGRQGKRTFMAERQYTRMEDWLTAKLAYEGLPSKTYLSKTLAQYTSKTCSNCGFTITSADYDRVLEKLKKTATGWMTTINGKELKVEGQITYYNRYKRQNVVKDLSVELDRLSEESVNNDISSWTKGRSGEALSLLKKRFSHRPVQEKFVCLNCGFETHADEQAALNIARSWLFLRSQEYKKYQTNKTTGNTDKRAFVETWQSFYRKKLKEVWKPAV

SEQ ID NO: 30864 - protein, 978 aa, synthetic construct
  REGION 1..978: note = engineered CasX variant
QEIKRINKIRRRLVKDSNTKKAGKTGPMKTLLVRVMTPDLRERLENLRKKPENIPQPISNTSRANLNKLLTDYTEMKKAILHVYWEEFQKDPVGLMSRVAQPASKKIDQNKLKPEMDEKGNLTTAGFACSQCGQPLFVYKLEQVSEKGKAYTNYFGRCNVAEHEKLIKLDQLKPEKDSDEAVTYSLGKFGQRALDFYSIHVTKESTHPVKPLAQIAGNRYASHPVGKALSDACMGTIASFLSKYQDIIIEHQKVVKGNQKRLESLRELAGKENLEYPSVTLPPQPHTKEGVDAYNEVIARVRMWVNLNLWQKLKLSRDDAKPLLRLKGFPSFPLVERQANEVDWWDMVCNVKKLINEKKEDGKVFWQNLAGYKRQEALRPYLSSEEDRKKGKKFARYQLGDLLLHLEKKHGEDWGKVYDEAWERIDKKVEGLSKHIKLEEERRSEDAQSKAALTDWLRAKASFVIEGLKEADKDEFCRCELKLQKWYGDLRGKPFAIEAENSILDISGFSKQYNCAFIWQKDGVKKLNLYLIINYFKGGKLRFKKIKPEAFEANRFYTVINKKSGEIVPMEVNFNFDDPNLIILPLAFGKRQGREFIWNDLLSLETGSLKLANGRVIEKTLYNRRTRQDEPALFVALTFERREVLDSSNIKPMNLIGVDRGENIPAVIALTDPEGCPLSRFKDSLGNPTHILRIGESYKEKQRTIQAKKEVEQRRAGGYSRKYASKAKNLADDMVRNTARDLLYYAVTQDAMLIFENLSRGFGRQGKRTFMAERQYTRMEDWLTAKLAYEGLPSKTYLSKTLAQYTSKTCSNCGFTITSADYDRVLEKLKKTATGWMTTINGKELKVEGQITYYNRYKRQNVVKDLSVELDRLSEESVNNDISSWTKGRSGEALSLLKKRFSHRPVQEKFVCLNCGFETHADEQAALNIARSWLFLRSQEYKKYQTNKTTGNTDKRAFVETWQSFYRKKLKEVWKPAV

SEQ ID NO: 30865 - protein, 978 aa, synthetic construct
  REGION 1..978: note = engineered CasX variant
QEIKRINKIRRRLVKDSNTKKAGKTGPMKTLLVRVMTPDLRERLENLRKKPENIPQPISNTSRANLNKLLTDYTEMKKAILHVYWEEFQKDPVGLMSRVAQPASKKIDQNKLKPEMDEKGNLTTAGFACSQCGQPLFVYKLEQVSEKGKAYTNYFGRCNVAEHEKLIKLDQLKPEKDSDEAVTYSLGKFGQRALDFYSIHVTKESTHPVKPLAQIAGNRYASTPVGKALSDACMGTIASFLSKYQDIIIEHQKVVKGNQKRLESLRELAGKENLEYPSVTLPPQPHTKEGVDAYNEVIARVRMWVNLNLWQKLKLSRDDAKPLLRLKGFPSFPLVERQANEVDWWDMVCNVKKLINEKKEDGKVFWQNLAGYKRQEALRPYLSSEEDRKKGKKFARYQLGDLLLHLEKKHGEDWGKVYDEAWERIDKKVEGLSKHIKLEEERRSEDAQSKAALTDWLRAKASFVIEGLKEADKDEFCRCELKLQKWYGDLRGKPFAIEAENSILDISGFSKQYNCAFIWQKDGVKKLNLYLIINYFKGGKLRFKKIKPEAFEANRFYTVINKKSGEIVPMEVNFNFDDPNLIILPLAFGKRQGREFIWNDLLSLETGSLKLANGRVIEKTLYNRRTRQDEPALFVALTFERREVLDSSNIKPMNLIGVDRGENIPAVIALTDPEGCPLSRFKDSLGNPTHILRIGESYKEKQRTIQAKKEVEQRRAGGYSRKYASKAKNLADDMVRNTARDLLYYAVTQDAMLIFENLSRGFGRQGKRTFMAERQYTRMEDWLTAKLAYEGLPSKTYLSKTLAQYTSKTCSNCGFTITSADYDRVLEKLKKTATGWMTTINGKELKVEGQITYYNRYKRQNVVKDLSVELDRLSEESVNNDISSWTKGRSGEALSLLKKRFSHRPVQEKFVCLNCGFETHADEQAALNIARSWLFLRSQEYKKYQTNKTTGNTDKRAFVETWQSFYRKKLKEVWKPAV

SEQ ID NO: 30866 - protein, 978 aa, synthetic construct
  REGION 1..978: note = engineered CasX variant
QEIKRINKIRRRLVKDSNTKKAGKTGPMKTLLVRVMTPDLRERLENLRKKPENIPQPISNTSRANLNKLLTDYTEMKKAILHVYWEEFQKDPVGLMSRVAQPASKKIDQNKLKPEMDEKGNLTTAGFACSQCGQPLFVYKLEQVSEKGKAYTNYFGRCNVAEHEKLIKLDQLKPEKDSDEAVTYSLGKFGQRALDFYSIHVTKESTHPVKPLAQIAGNRYASAPVGKALSDACMGTIASFLSKYQDIIIEHQKVVKGNQKRLESLRELAGKENLEYPSVTLPPQPHTKEGVDAYNEVIARVRMWVNLNLWQKLKLSRDDAKPLLRLKGFPSFPLVERQANEVDWWDMVCNVKKLINEKKEDGKVFWQNLAGYKRQEALRPYLSSEEDRKKGKKFARYQLGDLLLHLEKKHGEDWGKVYDEAWERIDKKVEGLSKHIKLEEERRSEDAQSKAALTDWLRAKASFVIEGLKEADKDEFCRCELKLQKWYGDLRGKPFAIEAENSILDISGFSKQYNCAFIWQKDGVKKLNLYLIINYFKGGKLRFKKIKPEAFEANRFYTVINKKSGEIVPMEVNFNFDDPNLIILPLAFGKRQGREFIWNDLLSLETGSLKLANGRVIEKTLYNRRTRQDEPALFVALTFERREVLDSSNIKPMNLIGVDRGENIPAVIALTDPEGCPLSRFKDSLGNPTHILRIGESYKEKQRTIQAKKEVEQRRAGGYSRKYASKAKNLADDMVRNTARDLLYYAVTQDAMLIFENLSRGFGRQGKRTFMAERQYTRMEDWLTAKLAYEGLPSKTYLSKTLAQYTSKTCSNCGFTITSADYDRVLEKLKKTATGWMTTINGKELKVEGQITYYNRYKRQNVVKDLSVELDRLSEESVNNDISSWTKGRSGEALSLLKKRFSHRPVQEKFVCLNCGFETHADEQAALNIARSWLFLRSQEYKKYQTNKTTGNTDKRAFVETWQSFYRKKLKEVWKPAV

SEQ ID NO: 30867 - protein, 978 aa, synthetic construct
  REGION 1..978: note = engineered CasX variant
QEIKRINKIRRRLVKDSNTKKAGKTGPMKTLLVRVMTPDLRERLENLRKKPENIPQPISNTSRANLNKLLTDYTEMKKAILHVYWEEFQKDPVGLMSRVAQPASKKIDQNKLKPEMDEKGNLTTAGFACSQCGQPLFVYKLEQVSEKGKAYTNYFGRCNVAEHEKLIKLDQLKPEKDSDEAVTYSLGKFGQRALDFYSIHVTKESTHPVKPLAQIAGNRYASVPVGKALSDACMGTIASFLSKYQDIIIEHQKVVKGNQKRLESLRELAGKENLEYPSVTLPPQPHTKEGVDAYNEVIARVRMWVNLNLWQKLKLSRDDAKPLLRLKGFPSFPLVERQANEVDWWDMVCNVKKLINEKKEDGKVFWQNLAGYKRQEALRPYLSSEEDRKKGKKFARYQLGDLLLHLEKKHGEDWGKVYDEAWERIDKKVEGLSKHIKLEEERRSEDAQSKAALTDWLRAKASFVIEGLKEADKDEFCRCELKLQKWYGDLRGKPFAIEAENSILDISGFSKQYNCAFIWQKDGVKKLNLYLIINYFKGGKLRFKKIKPEAFEANRFYTVINKKSGEIVPMEVNFNFDDPNLIILPLAFGKRQGREFIWNDLLSLETGSLKLANGRVIEKTLYNRRTRQDEPALFVALTFERREVLDSSNIKPMNLIGVDRGENIPAVIALTDPEGCPLSRFKDSLGNPTHILRIGESYKEKQRTIQAKKEVEQRRAGGYSRKYASKAKNLADDMVRNTARDLLYYAVTQDAMLIFENLSRGFGRQGKRTFMAERQYTRMEDWLTAKLAYEGLPSKTYLSKTLAQYTSKTCSNCGFTITSADYDRVLEKLKKTATGWMTTINGKELKVEGQITYYNRYKRQNVVKDLSVELDRLSEESVNNDISSWTKGRSGEALSLLKKRFSHRPVQEKFVCLNCGFETHADEQAALNIARSWLFLRSQEYKKYQTNKTTGNTDKRAFVETWQSFYRKKLKEVWKPAV

SEQ ID NO: 30868 - protein, 979 aa, synthetic construct
  REGION 1..979: note = engineered CasX variant
QEIKRINKIRRRLVKDSNTKKAGKTGPMKTLLVRVMTPDLRERLENLRKKPENIPQPISNTSRANLNKLLTDYTEMKKAILHVYWEEFQKDPVGLMSRVAQPASKKIDQNKLKPEMDEKGNLTTAGFACSQCGQPLFVYKLEQVSEKGKAYTNYFGRCNVAEHEKLIKKLDQLKPEKDSDEAVTYSLGKFGQRALDFYSIHVTKESTHPVKPLAQIAGNRYASGPVGKALSDACMGTIASFLSKYQDIIIEHQKVVKGNQKRLESLRELAGKENLEYPSVTLPPQPHTKEGVDAYNEVIARVRMWVNLNLWQKLKLSRDDAKPLLRLKGFPSFPLVERQANEVDWWDMVCNVKKLINEKKEDGKVFWQNLAGYKRQEALRPYLSSEEDRKKGKKFARYQLGDLLLHLEKKHGEDWGKVYDEAWERIDKKVEGLSKHIKLEEERRSEDAQSKAALTDWLRAKASFVIEGLKEADKDEFCRCELKLQKWYGDLRGKPFAIEAENSILDISGFSKQYNCAFIWQKDGVKKLNLYLIINYFKGGKLRFKKIKPEAFEANRFYTVINKKSGEIVPMEVNFNFDDPNLIILPLAFGKRQGREFIWNDLLSLETGSLKLANGRVIEKTLYNRRTRQDEPALFVALTFERREVLDSSNIKPMNLIGVDRGENIPAVIALTDPEGCPLSRFKDSLGNPTHILRIGESYKEKQRTIQAKKEVEQRRAGGYSRKYASKAKNLADDMVRNTARDLLYYAVTQDAMLIFENLSRGFGRQGKRTFMAERQYTRMEDWLTAKLAYEGLPSKTYLSKTLAQYTSKTCSNCGFTITSADYDRVLEKLKKTATGWMTTINGKELKVEGQITYYNRYKRQNVVKDLSVELDRLSEESVNNDISSWTKGRSGEALSLLKKRFSHRPVQEKFVCLNCGFETHADEQAALNIARSWLFLRSQEYKKYQTNKTTGNTDKRAFVETWQSFYRKKLKEVWKPAV

SEQ ID NO: 30869 - protein, 977 aa, synthetic construct
  REGION 1..977: note = engineered CasX variant
QEIKRINKIRRRLVKDSNTKKAGKTGPMKTLLVRVMTPDLRERLENLRKKPENIPQPISNTSRANLNKLLTDYTEMKKAILHVYWEEFQKDPVGLMSRVAQPASKKIDQNKLKPEMDEKGNLTTAGFACSQCGQPLFVYKLEQVSEKGKAYTNYFGRCNVAEHEKLIKLDQLKPEKDSDEAVTYSLGKFGQRALDFYSIHVTKESTHPVKPLAQIAGNRYASPVGKALSDACMGTIASFLSKYQDIIIEHQKVVKGNQKRLESLRELAGKENLEYPSVTLPPQPHTKEGVDAYNEVIARVRMWVNLNLWQKLKLSRDDAKPLLRLKGFPSFPLVERQANEVDWWDMVCNVKKLINEKKEDGKVFWQNLAGYKRQEALRPYLSSEEDRKKGKKFARYQLGDLLLHLEKKHGEDWGKVYDEAWERIDKKVEGLSKHIKLEEERRSEDAQSKAALTDWLRAKASFVIEGLKEADKDEFCRCELKLQKWYGDLRGKPFAIEAENSILDISGFSKQYNCAFIWQKDGVKKLNLYLIINYFKGGKLRFKKIKPEAFEANRFYTVINKKSGEIVPMEVNFNFDDPNLIILPLAFGKRQGREFIWNDLLSLETGSLKLANGRVIEKTLYNRRTRQDEPALFVALTFERREVLDSSNIKPMNLIGVDRGENIPAVIALTDPEGCPLSRFKDSLGNPTHILRIGESYKEKQRTIQAKKEVEQRRAGGYSRKYASKAKNLADDMVRNTARDLLYYAVTQDAMLIFENLSRGFGRQGKRTFMAERQYTRMEDWLTAKLAYEGLPSKTYLSKTLAQYTSKTCSNCGFTITSADYDRVLEKLKKTATGWMTTINGKELKVEGQITYYNRYKRQNVVKDLSVELDRLSEESVNNDISSWTKGRSGEALSLLKKRFSHRPVQEKFVCLNCGFETHADEQAALNIARSWLFLRSQEYKKYQTNKTTGNTDKRAFVETWQSFYRKKLKEVWKPAV

SEQ ID NO: 30870 - protein, 979 aa, synthetic construct
  REGION 1..979: note = engineered CasX variant
QEIKRINKIRRRLVKDSNTKKAGKTGPMKTLLVRVMTPDLRERLENLRKKPENIPQPISNTSRANLNKLLTDYTEMKKAILHVYWEEFQKDPVGLMSRVAQPASKKIDQNKLKPEMDEKGNLTTAGFACSQCGQPLFVYKLEQVSEKGKAYTNYFGRCNVAEHEKLILLDYQLKPEKDSDEAVTYSLGKFGQRALDFYSIHVTKESTHPVKPLAQIAGNRYASYPVGKALSDACMGTIASFLSKYQDIIIEHQKVVKGNQKRLESLRELAGKENLEYPSVTLPPQPHTKEGVDAYNEVIARVRMWVNLNLWQKLKLSRDDAKPLLRLKGFPSFPLVERQANEVDWWDMVCNVKKLINEKKEDGKVFWQNLAGYKRQEALRPYLSSEEDRKKGKKFARYQLGDLLLHLEKKHGEDWGKVYDEAWERIDKKVEGLSKHIKLEEERRSEDAQSKAALTDWLRAKASFVIEGLKEADKDEFCRCELKLQKWYGDLRGKPFAIEAENSILDISGFSKQYNCAFIWQKDGVKKLNLYLIINYFKGGKLRFKKIKPEAFEANRFYTVINKKSGEIVPMEVNFNFDDPNLIILPLAFGKRQGREFIWNDLLSLETGSLKLANGRVIEKTLYNRRTRQDEPALFVALTFERREVLDSSNIKPMNLIGVDRGENIPAVIALTDPEGCPLSRFKDSLGNPTHILRIGESYKEKQRTIQAKKEVEQRRAGGYSRKYASKAKNLADDMVRNTARDLLYYAVTQDAMLIFENLSRGFGRQGKRTFMAERQYTRMEDWLTAKLAYEGLPSKTYLSKTLAQYTSKTCSNCGFTITSADYDRVLEKLKKTATGWMTTINGKELKVEGQITYYNRYKRQNVVKDLSVELDRLSEESVNNDISSWTKGRSGEALSLLKKRFSHRPVQEKFVCLNCGFETHADEQAALNIARSWLFLRSQEYKKYQTNKTTGNTDKRAFVETWQSFYRKKLKEVWKPAV

SEQ ID NO: 30871 - protein, 979 aa, synthetic construct
  REGION 1..979: note = engineered CasX variant
QEIKRINKIRRRLVKDSNTKKAGKTGPMKTLLVRVMTPDLRERLENLRKKPENIPQPISNTSRANLNKLLTDYTEMKKAILHVYWEEFQKDPVGLMSRVAQPASKKIDQNKLKPEMDEKGNLTTAGFACSQCGQPLFVYKLEQVSEKGKAYTNYFGRCNVAEHEKLILLDYQLKPEKDSDEAVTYSLGKFGQRALDFYSIHVTKESTHPVKPLAQIAGNRYASHPVGKALSDACMGTIASFLSKYQDIIIEHQKVVKGNQKRLESLRELAGKENLEYPSVTLPPQPHTKEGVDAYNEVIARVRMWVNLNLWQKLKLSRDDAKPLLRLKGFPSFPLVERQANEVDWWDMVCNVKKLINEKKEDGKVFWQNLAGYKRQEALRPYLSSEEDRKKGKKFARYQLGDLLLHLEKKHGEDWGKVYDEAWERIDKKVEGLSKHIKLEEERRSEDAQSKAALTDWLRAKASFVIEGLKEADKDEFCRCELKLQKWYGDLRGKPFAIEAENSILDISGFSKQYNCAFIWQKDGVKKLNLYLIINYFKGGKLRFKKIKPEAFEANRFYTVINKKSGEIVPMEVNFNFDDPNLIILPLAFGKRQGREFIWNDLLSLETGSLKLANGRVIEKTLYNRRTRQDEPALFVALTFERREVLDSSNIKPMNLIGVDRGENIPAVIALTDPEGCPLSRFKDSLGNPTHILRIGESYKEKQRTIQAKKEVEQRRAGGYSRKYASKAKNLADDMVRNTARDLLYYAVTQDAMLIFENLSRGFGRQGKRTFMAERQYTRMEDWLTAKLAYEGLPSKTYLSKTLAQYTSKTCSNCGFTITSADYDRVLEKLKKTATGWMTTINGKELKVEGQITYYNRYKRQNVVKDLSVELDRLSEESVNNDISSWTKGRSGEALSLLKKRFSHRPVQEKFVCLNCGFETHADEQAALNIARSWLFLRSQEYKKYQTNKTTGNTDKRAFVETWQSFYRKKLKEVWKPAV

SEQ ID NO: 30872 - protein, 979 aa, synthetic construct
  REGION 1..979: note = engineered CasX variant
QEIKRINKIRRRLVKDSNTKKAGKTGPMKTLLVRVMTPDLRERLENLRKKPENIPQPISNTSRANLNKLLTDYTEMKKAILHVYWEEFQKDPVGLMSRVAQPASKKIDQNKLKPEMDEKGNLTTAGFACSQCGQPLFVYKLEQVSEKGKAYTNYFGRCNVAEHEKLILLDYQLKPEKDSDEAVTYSLGKFGQRALDFYSIHVTKESTHPVKPLAQIAGNRYASSPVGKALSDACMGTIASFLSKYQDIIIEHQKVVKGNQKRLESLRELAGKENLEYPSVTLPPQPHTKEGVDAYNEVIARVRMWVNLNLWQKLKLSRDDAKPLLRLKGFPSFPLVERQANEVDWWDMVCNVKKLINEKKEDGKVFWQNLAGYKRQEALRPYLSSEEDRKKGKKFARYQLGDLLLHLEKKHGEDWGKVYDEAWERIDKKVEGLSKHIKLEEERRSEDAQSKAALTDWLRAKASFVIEGLKEADKDEFCRCELKLQKWYGDLRGKPFAIEAENSILDISGFSKQYNCAFIWQKDGVKKLNLYLIINYFKGGKLRFKKIKPEAFEANRFYTVINKKSGEIVPMEVNFNFDDPNLIILPLAFGKRQGREFIWNDLLSLETGSLKLANGRVIEKTLYNRRTRQDEPALFVALTFERREVLDSSNIKPMNLIGVDRGENIPAVIALTDPEGCPLSRFKDSLGNPTHILRIGESYKEKQRTIQAKKEVEQRRAGGYSRKYASKAKNLADDMVRNTARDLLYYAVTQDAMLIFENLSRGFGRQGKRTFMAERQYTRMEDWLTAKLAYEGLPSKTYLSKTLAQYTSKTCSNCGFTITSADYDRVLEKLKKTATGWMTTINGKELKVEGQITYYNRYKRQNVVKDLSVELDRLSEESVNNDISSWTKGRSGEALSLLKKRFSHRPVQEKFVCLNCGFETHADEQAALNIARSWLFLRSQEYKKYQTNKTTGNTDKRAFVETWQSFYRKKLKEVWKPAV

SEQ ID NO: 30873 - protein, 979 aa, synthetic construct
  REGION 1..979: note = engineered CasX variant
QEIKRINKIRRRLVKDSNTKKAGKTGPMKTLLVRVMTPDLRERLENLRKKPENIPQPISNTSRANLNKLLTDYTEMKKAILHVYWEEFQKDPVGLMSRVAQPASKKIDQNKLKPEMDEKGNLTTAGFACSQCGQPLFVYKLEQVSEKGKAYTNYFGRCNVAEHEKLILLDYQLKPEKDSDEAVTYSLGKFGQRALDFYSIHVTKESTHPVKPLAQIAGNRYASTPVGKALSDACMGTIASFLSKYQDIIIEHQKVVKGNQKRLESLRELAGKENLEYPSVTLPPQPHTKEGVDAYNEVIARVRMWVNLNLWQKLKLSRDDAKPLLRLKGFPSFPLVERQANEVDWWDMVCNVKKLINEKKEDGKVFWQNLAGYKRQEALRPYLSSEEDRKKGKKFARYQLGDLLLHLEKKHGEDWGKVYDEAWERIDKKVEGLSKHIKLEEERRSEDAQSKAALTDWLRAKASFVIEGLKEADKDEFCRCELKLQKWYGDLRGKPFAIEAENSILDISGFSKQYNCAFIWQKDGVKKLNLYLIINYFKGGKLRFKKIKPEAFEANRFYTVINKKSGEIVPMEVNFNFDDPNLIILPLAFGKRQGREFIWNDLLSLETGSLKLANGRVIEKTLYNRRTRQDEPALFVALTFERREVLDSSNIKPMNLIGVDRGENIPAVIALTDPEGCPLSRFKDSLGNPTHILRIGESYKEKQRTIQAKKEVEQRRAGGYSRKYASKAKNLADDMVRNTARDLLYYAVTQDAMLIFENLSRGFGRQGKRTFMAERQYTRMEDWLTAKLAYEGLPSKTYLSKTLAQYTSKTCSNCGFTITSADYDRVLEKLKKTATGWMTTINGKELKVEGQITYYNRYKRQNVVKDLSVELDRLSEESVNNDISSWTKGRSGEALSLLKKRFSHRPVQEKFVCLNCGFETHADEQAALNIARSWLFLRSQEYKKYQTNKTTGNTDKRAFVETWQSFYRKKLKEVWKPAV

SEQ ID NO: 30874 - protein, 979 aa, synthetic construct
  REGION 1..979: note = engineered CasX variant
QEIKRINKIRRRLVKDSNTKKAGKTGPMKTLLVRVMTPDLRERLENLRKKPENIPQPISNTSRANLNKLLTDYTEMKKAILHVYWEEFQKDPVGLMSRVAQPASKKIDQNKLKPEMDEKGNLTTAGFACSQCGQPLFVYKLEQVSEKGKAYTNYFGRCNVAEHEKLILLDYQLKPEKDSDEAVTYSLGKFGQRALDFYSIHVTKESTHPVKPLAQIAGNRYASAPVGKALSDACMGTIASFLSKYQDIIIEHQKVVKGNQKRLESLRELAGKENLEYPSVTLPPQPHTKEGVDAYNEVIARVRMWVNLNLWQKLKLSRDDAKPLLRLKGFPSFPLVERQANEVDWWDMVCNVKKLINEKKEDGKVFWQNLAGYKRQEALRPYLSSEEDRKKGKKFARYQLGDLLLHLEKKHGEDWGKVYDEAWERIDKKVEGLSKHIKLEEERRSEDAQSKAALTDWLRAKASFVIEGLKEADKDEFCRCELKLQKWYGDLRGKPFAIEAENSILDISGFSKQYNCAFIWQKDGVKKLNLYLIINYFKGGKLRFKKIKPEAFEANRFYTVINKKSGEIVPMEVNFNFDDPNLIILPLAFGKRQGREFIWNDLLSLETGSLKLANGRVIEKTLYNRRTRQDEPALFVALTFERREVLDSSNIKPMNLIGVDRGENIPAVIALTDPEGCPLSRFKDSLGNPTHILRIGESYKEKQRTIQAKKEVEQRRAGGYSRKYASKAKNLADDMVRNTARDLLYYAVTQDAMLIFENLSRGFGRQGKRTFMAERQYTRMEDWLTAKLAYEGLPSKTYLSKTLAQYTSKTCSNCGFTITSADYDRVLEKLKKTATGWMTTINGKELKVEGQITYYNRYKRQNVVKDLSVELDRLSEESVNNDISSWTKGRSGEALSLLKKRFSHRPVQEKFVCLNCGFETHADEQAALNIARSWLFLRSQEYKKYQTNKTTGNTDKRAFVETWQSFYRKKLKEVWKPAV

SEQ ID NO: 30875 - protein, 979 aa, synthetic construct
  REGION 1..979: note = engineered CasX variant
QEIKRINKIRRRLVKDSNTKKAGKTGPMKTLLVRVMTPDLRERLENLRKKPENIPQPISNTSRANLNKLLTDYTEMKKAILHVYWEEFQKDPVGLMSRVAQPASKKIDQNKLKPEMDEKGNLTTAGFACSQCGQPLFVYKLEQVSEKGKAYTNYFGRCNVAEHEKLILLDYQLKPEKDSDEAVTYSLGKFGQRALDFYSIHVTKESTHPVKPLAQIAGNRYASVPVGKALSDACMGTIASFLSKYQDIIIEHQKVVKGNQKRLESLRELAGKENLEYPSVTLPPQPHTKEGVDAYNEVIARVRMWVNLNLWQKLKLSRDDAKPLLRLKGFPSFPLVERQANEVDWWDMVCNVKKLINEKKEDGKVFWQNLAGYKRQEALRPYLSSEEDRKKGKKFARYQLGDLLLHLEKKHGEDWGKVYDEAWERIDKKVEGLSKHIKLEEERRSEDAQSKAALTDWLRAKASFVIEGLKEADKDEFCRCELKLQKWYGDLRGKPFAIEAENSILDISGFSKQYNCAFIWQKDGVKKLNLYLIINYFKGGKLRFKKIKPEAFEANRFYTVINKKSGEIVPMEVNFNFDDPNLIILPLAFGKRQGREFIWNDLLSLETGSLKLANGRVIEKTLYNRRTRQDEPALFVALTFERREVLDSSNIKPMNLIGVDRGENIPAVIALTDPEGCPLSRFKDSLGNPTHILRIGESYKEKQRTIQAKKEVEQRRAGGYSRKYASKAKNLADDMVRNTARDLLYYAVTQDAMLIFENLSRGFGRQGKRTFMAERQYTRMEDWLTAKLAYEGLPSKTYLSKTLAQYTSKTCSNCGFTITSADYDRVLEKLKKTATGWMTTINGKELKVEGQITYYNRYKRQNVVKDLSVELDRLSEESVNNDISSWTKGRSGEALSLLKKRFSHRPVQEKFVCLNCGFETHADEQAALNIARSWLFLRSQEYKKYQTNKTTGNTDKRAFVETWQSFYRKKLKEVWKPAV

SEQ ID NO: 30876 - protein, 979 aa, synthetic construct
  REGION 1..979: note = engineered CasX variant
QEIKRINKIRRRLVKDSNTKKAGKTGPMKTLLVRVMTPDLRERLENLRKKPENIPQPISNTSRANLNKLLTDYTEMKKAILHVYWEEFQKDPVGLMSRVAQPASKKIDQNKLKPEMDEKGNLTTAGFACSQCGQPLFVYKLEQVSEKGKAYTNYFGRCNVAEHEKLIKLDYQLKPEKDSDEAVTYSLGKFGQRALDFYSIHVTKESTHPVKPLAQIAGNRYASGPVGKALSDACMGTIASFLSKYQDIIIEHQKVVKGNQKRLESLRELAGKENLEYPSVTLPPQPHTKEGVDAYNEVIARVRMWVNLNLWQKLKLSRDDAKPLLRLKGFPSFPLVERQANEVDWWDMVCNVKKLINEKKEDGKVFWQNLAGYKRQEALRPYLSSEEDRKKGKKFARYQLGDLLLHLEKKHGEDWGKVYDEAWERIDKKVEGLSKHIKLEEERRSEDAQSKAALTDWLRAKASFVIEGLKEADKDEFCRCELKLQKWYGDLRGKPFAIEAENSILDISGFSKQYNCAFIWQKDGVKKLNLYLIINYFKGGKLRFKKIKPEAFEANRFYTVINKKSGEIVPMEVNFNFDDPNLIILPLAFGKRQGREFIWNDLLSLETGSLKLANGRVIEKTLYNRRTRQDEPALFVALTFERREVLDSSNIKPMNLIGVDRGENIPAVIALTDPEGCPLSRFKDSLGNPTHILRIGESYKEKQRTIQAKKEVEQRRAGGYSRKYASKAKNLADDMVRNTARDLLYYAVTQDAMLIFENLSRGFGRQGKRTFMAERQYTRMEDWLTAKLAYEGLPSKTYLSKTLAQYTSKTCSNCGFTITSADYDRVLEKLKKTATGWMTTINGKELKVEGQITYYNRYKRQNVVKDLSVELDRLSEESVNNDISSWTKGRSGEALSLLKKRFSHRPVQEKFVCLNCGFETHADEQAALNIARSWLFLRSQEYKKYQTNKTTGNTDKRAFVETWQSFYRKKLKEVWKPAV

SEQ ID NO: 30877 - protein, 978 aa, synthetic construct
  REGION 1..978: note = engineered CasX variant
QEIKRINKIRRRLVKDSNTKKAGKTGPMKTLLVRVMTPDLRERLENLRKKPENIPQPISNTSRANLNKLLTDYTEMKKAILHVYWEEFQKDPVGLMSRVAQPASKKIDQNKLKPEMDEKGNLTTAGFACSQCGQPLFVYKLEQVSEKGKAYTNYFGRCNVAEHEKLILLDYQLKPEKDSDEAVTYSLGKFGQRALDFYSIHVTKESTHPVKPLAQIAGNRYASPVGKALSDACMGTIASFLSKYQDIIIEHQKVVKGNQKRLESLRELAGKENLEYPSVTLPPQPHTKEGVDAYNEVIARVRMWVNLNLWQKLKLSRDDAKPLLRLKGFPSFPLVERQANEVDWWDMVCNVKKLINEKKEDGKVFWQNLAGYKRQEALRPYLSSEEDRKKGKKFARYQLGDLLLHLEKKHGEDWGKVYDEAWERIDKKVEGLSKHIKLEEERRSEDAQSKAALTDWLRAKASFVIEGLKEADKDEFCRCELKLQKWYGDLRGKPFAIEAENSILDISGFSKQYNCAFIWQKDGVKKLNLYLIINYFKGGKLRFKKIKPEAFEANRFYTVINKKSGEIVPMEVNFNFDDPNLIILPLAFGKRQGREFIWNDLLSLETGSLKLANGRVIEKTLYNRRTRQDEPALFVALTFERREVLDSSNIKPMNLIGVDRGENIPAVIALTDPEGCPLSRFKDSLGNPTHILRIGESYKEKQRTIQAKKEVEQRRAGGYSRKYASKAKNLADDMVRNTARDLLYYAVTQDAMLIFENLSRGFGRQGKRTFMAERQYTRMEDWLTAKLAYEGLPSKTYLSKTLAQYTSKTCSNCGFTITSADYDRVLEKLKKTATGWMTTINGKELKVEGQITYYNRYKRQNVVKDLSVELDRLSEESVNNDISSWTKGRSGEALSLLKKRFSHRPVQEKFVCLNCGFETHADEQAALNIARSWLFLRSQEYKKYQTNKTTGNTDKRAFVETWQSFYRKKLKEVWKPAV

SEQ ID NO: 30878 - protein, 979 aa, synthetic construct
  REGION 1..979: note = engineered CasX variant
QEIKRINKIRRRLVKDSNTKKAGKTGPMKTLLVRVMTPDLRERLENLRKKPENIPQPISNTSRANLNKLLTDYTEMKKAILHVYWEEFQKDPVGLMSRVAQPASKKIDQNKLKPEMDEKGNLTTAGFACSQCGQPLFVYKLEQVSEKGKAYTNYFGRCNVAEHEKLILLDSQLKPEKDSDEAVTYSLGKFGQRALDFYSIHVTKESTHPVKPLAQIAGNRYASYPVGKALSDACMGTIASFLSKYQDIIIEHQKVVKGNQKRLESLRELAGKENLEYPSVTLPPQPHTKEGVDAYNEVIARVRMWVNLNLWQKLKLSRDDAKPLLRLKGFPSFPLVERQANEVDWWDMVCNVKKLINEKKEDGKVFWQNLAGYKRQEALRPYLSSEEDRKKGKKFARYQLGDLLLHLEKKHGEDWGKVYDEAWERIDKKVEGLSKHIKLEEERRSEDAQSKAALTDWLRAKASFVIEGLKEADKDEFCRCELKLQKWYGDLRGKPFAIEAENSILDISGFSKQYNCAFIWQKDGVKKLNLYLIINYFKGGKLRFKKIKPEAFEANRFYTVINKKSGEIVPMEVNFNFDDPNLIILPLAFGKRQGREFIWNDLLSLETGSLKLANGRVIEKTLYNRRTRQDEPALFVALTFERREVLDSSNIKPMNLIGVDRGENIPAVIALTDPEGCPLSRFKDSLGNPTHILRIGESYKEKQRTIQAKKEVEQRRAGGYSRKYASKAKNLADDMVRNTARDLLYYAVTQDAMLIFENLSRGFGRQGKRTFMAERQYTRMEDWLTAKLAYEGLPSKTYLSKTLAQYTSKTCSNCGFTITSADYDRVLEKLKKTATGWMTTINGKELKVEGQITYYNRYKRQNVVKDLSVELDRLSEESVNNDISSWTKGRSGEALSLLKKRFSHRPVQEKFVCLNCGFETHADEQAALNIARSWLFLRSQEYKKYQTNKTTGNTDKRAFVETWQSFYRKKLKEVWKPAV

SEQ ID NO: 30879 - protein, 979 aa, synthetic construct
  REGION 1..979: note = engineered CasX variant
QEIKRINKIRRRLVKDSNTKKAGKTGPMKTLLVRVMTPDLRERLENLRKKPENIPQPISNTSRANLNKLLTDYTEMKKAILHVYWEEFQKDPVGLMSRVAQPASKKIDQNKLKPEMDEKGNLTTAGFACSQCGQPLFVYKLEQVSEKGKAYTNYFGRCNVAEHEKLILLDSQLKPEKDSDEAVTYSLGKFGQRALDFYSIHVTKESTHPVKPLAQIAGNRYASHPVGKALSDACMGTIASFLSKYQDIIIEHQKVVKGNQKRLESLRELAGKENLEYPSVTLPPQPHTKEGVDAYNEVIARVRMWVNLNLWQKLKLSRDDAKPLLRLKGFPSFPLVERQANEVDWWDMVCNVKKLINEKKEDGKVFWQNLAGYKRQEALRPYLSSEEDRKKGKKFARYQLGDLLLHLEKKHGEDWGKVYDEAWERIDKKVEGLSKHIKLEEERRSEDAQSKAALTDWLRAKASFVIEGLKEADKDEFCRCELKLQKWYGDLRGKPFAIEAENSILDISGFSKQYNCAFIWQKDGVKKLNLYLIINYFKGGKLRFKKIKPEAFEANRFYTVINKKSGEIVPMEVNFNFDDPNLIILPLAFGKRQGREFIWNDLLSLETGSLKLANGRVIEKTLYNRRTRQDEPALFVALTFERREVLDSSNIKPMNLIGVDRGENIPAVIALTDPEGCPLSRFKDSLGNPTHILRIGESYKEKQRTIQAKKEVEQRRAGGYSRKYASKAKNLADDMVRNTARDLLYYAVTQDAMLIFENLSRGFGRQGKRTFMAERQYTRMEDWLTAKLAYEGLPSKTYLSKTLAQYTSKTCSNCGFTITSADYDRVLEKLKKTATGWMTTINGKELKVEGQITYYNRYKRQNVVKDLSVELDRLSEESVNNDISSWTKGRSGEALSLLKKRFSHRPVQEKFVCLNCGFETHADEQAALNIARSWLFLRSQEYKKYQTNKTTGNTDKRAFVETWQSFYRKKLKEVWKPAV

SEQ ID NO: 30880 - protein, 979 aa, synthetic construct
  REGION 1..979: note = engineered CasX variant
QEIKRINKIRRRLVKDSNTKKAGKTGPMKTLLVRVMTPDLRERLENLRKKPENIPQPISNTSRANLNKLLTDYTEMKKAILHVYWEEFQKDPVGLMSRVAQPASKKIDQNKLKPEMDEKGNLTTAGFACSQCGQPLFVYKLEQVSEKGKAYTNYFGRCNVAEHEKLILLDSQLKPEKDSDEAVTYSLGKFGQRALDFYSIHVTKESTHPVKPLAQIAGNRYASSPVGKALSDACMGTIASFLSKYQDIIIEHQKVVKGNQKRLESLRELAGKENLEYPSVTLPPQPHTKEGVDAYNEVIARVRMWVNLNLWQKLKLSRDDAKPLLRLKGFPSFPLVERQANEVDWWDMVCNVKKLINEKKEDGKVFWQNLAGYKRQEALRPYLSSEEDRKKGKKFARYQLGDLLLHLEKKHGEDWGKVYDEAWERIDKKVEGLSKHIKLEEERRSEDAQSKAALTDWLRAKASFVIEGLKEADKDEFCRCELKLQKWYGDLRGKPFAIEAENSILDISGFSKQYNCAFIWQKDGVKKLNLYLIINYFKGGKLRFKKIKPEAFEANRFYTVINKKSGEIVPMEVNFNFDDPNLIILPLAFGKRQGREFIWNDLLSLETGSLKLANGRVIEKTLYNRRTRQDEPALFVALTFERREVLDSSNIKPMNLIGVDRGENIPAVIALTDPEGCPLSRFKDSLGNPTHILRIGESYKEKQRTIQAKKEVEQRRAGGYSRKYASKAKNLADDMVRNTARDLLYYAVTQDAMLIFENLSRGFGRQGKRTFMAERQYTRMEDWLTAKLAYEGLPSKTYLSKTLAQYTSKTCSNCGFTITSADYDRVLEKLKKTATGWMTTINGKELKVEGQITYYNRYKRQNVVKDLSVELDRLSEESVNNDISSWTKGRSGEALSLLKKRFSHRPVQEKFVCLNCGFETHADEQAALNIARSWLFLRSQEYKKYQTNKTTGNTDKRAFVETWQSFYRKKLKEVWKPAV

SEQ ID NO: 30881 - protein, 979 aa, synthetic construct
  REGION 1..979: note = engineered CasX variant
QEIKRINKIRRRLVKDSNTKKAGKTGPMKTLLVRVMTPDLRERLENLRKKPENIPQPISNTSRANLNKLLTDYTEMKKAILHVYWEEFQKDPVGLMSRVAQPASKKIDQNKLKPEMDEKGNLTTAGFACSQCGQPLFVYKLEQVSEKGKAYTNYFGRCNVAEHEKLILLDSQLKPEKDSDEAVTYSLGKFGQRALDFYSIHVTKESTHPVKPLAQIAGNRYASTPVGKALSDACMGTIASFLSKYQDIIIEHQKVVKGNQKRLESLRELAGKENLEYPSVTLPPQPHTKEGVDAYNEVIARVRMWVNLNLWQKLKLSRDDAKPLLRLKGFPSFPLVERQANEVDWWDMVCNVKKLINEKKEDGKVFWQNLAGYKRQEALRPYLSSEEDRKKGKKFARYQLGDLLLHLEKKHGEDWGKVYDEAWERIDKKVEGLSKHIKLEEERRSEDAQSKAALTDWLRAKASFVIEGLKEADKDEFCRCELKLQKWYGDLRGKPFAIEAENSILDISGFSKQYNCAFIWQKDGVKKLNLYLIINYFKGGKLRFKKIKPEAFEANRFYTVINKKSGEIVPMEVNFNFDDPNLIILPLAFGKRQGREFIWNDLLSLETGSLKLANGRVIEKTLYNRRTRQDEPALFVALTFERREVLDSSNIKPMNLIGVDRGENIPAVIALTDPEGCPLSRFKDSLGNPTHILRIGESYKEKQRTIQAKKEVEQRRAGGYSRKYASKAKNLADDMVRNTARDLLYYAVTQDAMLIFENLSRGFGRQGKRTFMAERQYTRMEDWLTAKLAYEGLPSKTYLSKTLAQYTSKTCSNCGFTITSADYDRVLEKLKKTATGWMTTINGKELKVEGQITYYNRYKRQNVVKDLSVELDRLSEESVNNDISSWTKGRSGEALSLLKKRFSHRPVQEKFVCLNCGFETHADEQAALNIARSWLFLRSQEYKKYQTNKTTGNTDKRAFVETWQSFYRKKLKEVWKPAV

SEQ ID NO: 30882 - protein, 979 aa, synthetic construct
  REGION 1..979: note = engineered CasX variant
QEIKRINKIRRRLVKDSNTKKAGKTGPMKTLLVRVMTPDLRERLENLRKKPENIPQPISNTSRANLNKLLTDYTEMKKAILHVYWEEFQKDPVGLMSRVAQPASKKIDQNKLKPEMDEKGNLTTAGFACSQCGQPLFVYKLEQVSEKGKAYTNYFGRCNVAEHEKLILLDSQLKPEKDSDEAVTYSLGKFGQRALDFYSIHVTKESTHPVKPLAQIAGNRYASAPVGKALSDACMGTIASFLSKYQDIIIEHQKVVKGNQKRLESLRELAGKENLEYPSVTLPPQPHTKEGVDAYNEVIARVRMWVNLNLWQKLKLSRDDAKPLLRLKGFPSFPLVERQANEVDWWDMVCNVKKLINEKKEDGKVFWQNLAGYKRQEALRPYLSSEEDRKKGKKFARYQLGDLLLHLEKKHGEDWGKVYDEAWERIDKKVEGLSKHIKLEEERRSEDAQSKAALTDWLRAKASFVIEGLKEADKDEFCRCELKLQKWYGDLRGKPFAIEAENSILDISGFSKQYNCAFIWQKDGVKKLNLYLIINYFKGGKLRFKKIKPEAFEANRFYTVINKKSGEIVPMEVNFNFDDPNLIILPLAFGKRQGREFIWNDLLSLETGSLKLANGRVIEKTLYNRRTRQDEPALFVALTFERREVLDSSNIKPMNLIGVDRGENIPAVIALTDPEGCPLSRFKDSLGNPTHILRIGESYKEKQRTIQAKKEVEQRRAGGYSRKYASKAKNLADDMVRNTARDLLYYAVTQDAMLIFENLSRGFGRQGKRTFMAERQYTRMEDWLTAKLAYEGLPSKTYLSKTLAQYTSKTCSNCGFTITSADYDRVLEKLKKTATGWMTTINGKELKVEGQITYYNRYKRQNVVKDLSVELDRLSEESVNNDISSWTKGRSGEALSLLKKRFSHRPVQEKFVCLNCGFETHADEQAALNIARSWLFLRSQEYKKYQTNKTTGNTDKRAFVETWQSFYRKKLKEVWKPAV

SEQ ID NO: 30883 - protein, 979 aa, synthetic construct
  REGION 1..979: note = engineered CasX variant
QEIKRINKIRRRLVKDSNTKKAGKTGPMKTLLVRVMTPDLRERLENLRKKPENIPQPISNTSRANLNKLLTDYTEMKKAILHVYWEEFQKDPVGLMSRVAQPASKKIDQNKLKPEMDEKGNLTTAGFACSQCGQPLFVYKLEQVSEKGKAYTNYFGRCNVAEHEKLILLDSQLKPEKDSDEAVTYSLGKFGQRALDFYSIHVTKESTHPVKPLAQIAGNRYASVPVGKALSDACMGTIASFLSKYQDIIIEHQKVVKGNQKRLESLRELAGKENLEYPSVTLPPQPHTKEGVDAYNEVIARVRMWVNLNLWQKLKLSRDDAKPLLRLKGFPSFPLVERQANEVDWWDMVCNVKKLINEKKEDGKVFWQNLAGYKRQEALRPYLSSEEDRKKGKKFARYQLGDLLLHLEKKHGEDWGKVYDEAWERIDKKVEGLSKHIKLEEERRSEDAQSKAALTDWLRAKASFVIEGLKEADKDEFCRCELKLQKWYGDLRGKPFAIEAENSILDISGFSKQYNCAFIWQKDGVKKLNLYLIINYFKGGKLRFKKIKPEAFEANRFYTVINKKSGEIVPMEVNFNFDDPNLIILPLAFGKRQGREFIWNDLLSLETGSLKLANGRVIEKTLYNRRTRQDEPALFVALTFERREVLDSSNIKPMNLIGVDRGENIPAVIALTDPEGCPLSRFKDSLGNPTHILRIGESYKEKQRTIQAKKEVEQRRAGGYSRKYASKAKNLADDMVRNTARDLLYYAVTQDAMLIFENLSRGFGRQGKRTFMAERQYTRMEDWLTAKLAYEGLPSKTYLSKTLAQYTSKTCSNCGFTITSADYDRVLEKLKKTATGWMTTINGKELKVEGQITYYNRYKRQNVVKDLSVELDRLSEESVNNDISSWTKGRSGEALSLLKKRFSHRPVQEKFVCLNCGFETHADEQAALNIARSWLFLRSQEYKKYQTNKTTGNTDKRAFVETWQSFYRKKLKEVWKPAV

SEQ ID NO: 30884 - protein, 979 aa, synthetic construct
  REGION 1..979: note = engineered CasX variant
QEIKRINKIRRRLVKDSNTKKAGKTGPMKTLLVRVMTPDLRERLENLRKKPENIPQPISNTSRANLNKLLTDYTEMKKAILHVYWEEFQKDPVGLMSRVAQPASKKIDQNKLKPEMDEKGNLTTAGFACSQCGQPLFVYKLEQVSEKGKAYTNYFGRCNVAEHEKLIKLDSQLKPEKDSDEAVTYSLGKFGQRALDFYSIHVTKESTHPVKPLAQIAGNRYASGPVGKALSDACMGTIASFLSKYQDIIIEHQKVVKGNQKRLESLRELAGKENLEYPSVTLPPQPHTKEGVDAYNEVIARVRMWVNLNLWQKLKLSRDDAKPLLRLKGFPSFPLVERQANEVDWWDMVCNVKKLINEKKEDGKVFWQNLAGYKRQEALRPYLSSEEDRKKGKKFARYQLGDLLLHLEKKHGEDWGKVYDEAWERIDKKVEGLSKHIKLEEERRSEDAQSKAALTDWLRAKASFVIEGLKEADKDEFCRCELKLQKWYGDLRGKPFAIEAENSILDISGFSKQYNCAFIWQKDGVKKLNLYLIINYFKGGKLRFKKIKPEAFEANRFYTVINKKSGEIVPMEVNFNFDDPNLIILPLAFGKRQGREFIWNDLLSLETGSLKLANGRVIEKTLYNRRTRQDEPALFVALTFERREVLDSSNIKPMNLIGVDRGENIPAVIALTDPEGCPLSRFKDSLGNPTHILRIGESYKEKQRTIQAKKEVEQRRAGGYSRKYASKAKNLADDMVRNTARDLLYYAVTQDAMLIFENLSRGFGRQGKRTFMAERQYTRMEDWLTAKLAYEGLPSKTYLSKTLAQYTSKTCSNCGFTITSADYDRVLEKLKKTATGWMTTINGKELKVEGQITYYNRYKRQNVVKDLSVELDRLSEESVNNDISSWTKGRSGEALSLLKKRFSHRPVQEKFVCLNCGFETHADEQAALNIARSWLFLRSQEYKKYQTNKTTGNTDKRAFVETWQSFYRKKLKEVWKPAV

SEQ ID NO: 30885 - protein, 978 aa, synthetic construct
  REGION 1..978: note = engineered CasX variant
QEIKRINKIRRRLVKDSNTKKAGKTGPMKTLLVRVMTPDLRERLENLRKKPENIPQPISNTSRANLNKLLTDYTEMKKAILHVYWEEFQKDPVGLMSRVAQPASKKIDQNKLKPEMDEKGNLTTAGFACSQCGQPLFVYKLEQVSEKGKAYTNYFGRCNVAEHEKLILLDSQLKPEKDSDEAVTYSLGKFGQRALDFYSIHVTKESTHPVKPLAQIAGNRYASPVGKALSDACMGTIASFLSKYQDIIIEHQKVVKGNQKRLESLRELAGKENLEYPSVTLPPQPHTKEGVDAYNEVIARVRMWVNLNLWQKLKLSRDDAKPLLRLKGFPSFPLVERQANEVDWWDMVCNVKKLINEKKEDGKVFWQNLAGYKRQEALRPYLSSEEDRKKGKKFARYQLGDLLLHLEKKHGEDWGKVYDEAWERIDKKVEGLSKHIKLEEERRSEDAQSKAALTDWLRAKASFVIEGLKEADKDEFCRCELKLQKWYGDLRGKPFAIEAENSILDISGFSKQYNCAFIWQKDGVKKLNLYLIINYFKGGKLRFKKIKPEAFEANRFYTVINKKSGEIVPMEVNFNFDDPNLIILPLAFGKRQGREFIWNDLLSLETGSLKLANGRVIEKTLYNRRTRQDEPALFVALTFERREVLDSSNIKPMNLIGVDRGENIPAVIALTDPEGCPLSRFKDSLGNPTHILRIGESYKEKQRTIQAKKEVEQRRAGGYSRKYASKAKNLADDMVRNTARDLLYYAVTQDAMLIFENLSRGFGRQGKRTFMAERQYTRMEDWLTAKLAYEGLPSKTYLSKTLAQYTSKTCSNCGFTITSADYDRVLEKLKKTATGWMTTINGKELKVEGQITYYNRYKRQNVVKDLSVELDRLSEESVNNDISSWTKGRSGEALSLLKKRFSHRPVQEKFVCLNCGFETHADEQAALNIARSWLFLRSQEYKKYQTNKTTGNTDKRAFVETWQSFYRKKLKEVWKPAV

SEQ ID NO: 30886 - protein, 978 aa, synthetic construct
  REGION 1..978: note = engineered CasX variant
QEIKRINKIRRRLVKDSNTKKAGKTGPMKTLLVRVMTPDLRERLENLRKKPENIPQPISNTSRANLNKLLTDYTEMKKAILHVYWEEFQKDPVGLMSRVAQPASKKIDQNKLKPEMDEKGNLTTAGFACSQCGQPLFVYKLEQVSEKGKAYTNYFGRCNVAEHEKLILLDQLKPEKDSDEAVTYSLGKFGQRALDFYSIHVTKESTHPVKPLAQIAGNRYASYPVGKALSDACMGTIASFLSKYQDIIIEHQKVVKGNQKRLESLRELAGKENLEYPSVTLPPQPHTKEGVDAYNEVIARVRMWVNLNLWQKLKLSRDDAKPLLRLKGFPSFPLVERQANEVDWWDMVCNVKKLINEKKEDGKVFWQNLAGYKRQEALRPYLSSEEDRKKGKKFARYQLGDLLLHLEKKHGEDWGKVYDEAWERIDKKVEGLSKHIKLEEERRSEDAQSKAALTDWLRAKASFVIEGLKEADKDEFCRCELKLQKWYGDLRGKPFAIEAENSILDISGFSKQYNCAFIWQKDGVKKLNLYLIINYFKGGKLRFKKIKPEAFEANRFYTVINKKSGEIVPMEVNFNFDDPNLIILPLAFGKRQGREFIWNDLLSLETGSLKLANGRVIEKTLYNRRTRQDEPALFVALTFERREVLDSSNIKPMNLIGVDRGENIPAVIALTDPEGCPLSRFKDSLGNPTHILRIGESYKEKQRTIQAKKEVEQRRAGGYSRKYASKAKNLADDMVRNTARDLLYYAVTQDAMLIFENLSRGFGRQGKRTFMAERQYTRMEDWLTAKLAYEGLPSKTYLSKTLAQYTSKTCSNCGFTITSADYDRVLEKLKKTATGWMTTINGKELKVEGQITYYNRYKRQNVVKDLSVELDRLSEESVNNDISSWTKGRSGEALSLLKKRFSHRPVQEKFVCLNCGFETHADEQAALNIARSWLFLRSQEYKKYQTNKTTGNTDKRAFVETWQSFYRKKLKEVWKPAV

SEQ ID NO: 30887 - protein, 978 aa, synthetic construct
  REGION 1..978: note = engineered CasX variant
QEIKRINKIRRRLVKDSNTKKAGKTGPMKTLLVRVMTPDLRERLENLRKKPENIPQPISNTSRANLNKLLTDYTEMKKAILHVYWEEFQKDPVGLMSRVAQPASKKIDQNKLKPEMDEKGNLTTAGFACSQCGQPLFVYKLEQVSEKGKAYTNYFGRCNVAEHEKLILLDQLKPEKDSDEAVTYSLGKFGQRALDFYSIHVTKESTHPVKPLAQIAGNRYASHPVGKALSDACMGTIASFLSKYQDIIIEHQKVVKGNQKRLESLRELAGKENLEYPSVTLPPQPHTKEGVDAYNEVIARVRMWVNLNLWQKLKLSRDDAKPLLRLKGFPSFPLVERQANEVDWWDMVCNVKKLINEKKEDGKVFWQNLAGYKRQEALRPYLSSEEDRKKGKKFARYQLGDLLLHLEKKHGEDWGKVYDEAWERIDKKVEGLSKHIKLEEERRSEDAQSKAALTDWLRAKASFVIEGLKEADKDEFCRCELKLQKWYGDLRGKPFAIEAENSILDISGFSKQYNCAFIWQKDGVKKLNLYLIINYFKGGKLRFKKIKPEAFEANRFYTVINKKSGEIVPMEVNFNFDDPNLIILPLAFGKRQGREFIWNDLLSLETGSLKLANGRVIEKTLYNRRTRQDEPALFVALTFERREVLDSSNIKPMNLIGVDRGENIPAVIALTDPEGCPLSRFKDSLGNPTHILRIGESYKEKQRTIQAKKEVEQRRAGGYSRKYASKAKNLADDMVRNTARDLLYYAVTQDAMLIFENLSRGFGRQGKRTFMAERQYTRMEDWLTAKLAYEGLPSKTYLSKTLAQYTSKTCSNCGFTITSADYDRVLEKLKKTATGWMTTINGKELKVEGQITYYNRYKRQNVVKDLSVELDRLSEESVNNDISSWTKGRSGEALSLLKKRFSHRPVQEKFVCLNCGFETHADEQAALNIARSWLFLRSQEYKKYQTNKTTGNTDKRAFVETWQSFYRKKLKEVWKPAV

SEQ ID NO: 30888 - protein, 978 aa, synthetic construct
  REGION 1..978: note = engineered CasX variant
QEIKRINKIRRRLVKDSNTKKAGKTGPMKTLLVRVMTPDLRERLENLRKKPENIPQPISNTSRANLNKLLTDYTEMKKAILHVYWEEFQKDPVGLMSRVAQPASKKIDQNKLKPEMDEKGNLTTAGFACSQCGQPLFVYKLEQVSEKGKAYTNYFGRCNVAEHEKLILLDQLKPEKDSDEAVTYSLGKFGQRALDFYSIHVTKESTHPVKPLAQIAGNRYASTPVGKALSDACMGTIASFLSKYQDIIIEHQKVVKGNQKRLESLRELAGKENLEYPSVTLPPQPHTKEGVDAYNEVIARVRMWVNLNLWQKLKLSRDDAKPLLRLKGFPSFPLVERQANEVDWWDMVCNVKKLINEKKEDGKVFWQNLAGYKRQEALRPYLSSEEDRKKGKKFARYQLGDLLLHLEKKHGEDWGKVYDEAWERIDKKVEGLSKHIKLEEERRSEDAQSKAALTDWLRAKASFVIEGLKEADKDEFCRCELKLQKWYGDLRGKPFAIEAENSILDISGFSKQYNCAFIWQKDGVKKLNLYLIINYFKGGKLRFKKIKPEAFEANRFYTVINKKSGEIVPMEVNFNFDDPNLIILPLAFGKRQGREFIWNDLLSLETGSLKLANGRVIEKTLYNRRTRQDEPALFVALTFERREVLDSSNIKPMNLIGVDRGENIPAVIALTDPEGCPLSRFKDSLGNPTHILRIGESYKEKQRTIQAKKEVEQRRAGGYSRKYASKAKNLADDMVRNTARDLLYYAVTQDAMLIFENLSRGFGRQGKRTFMAERQYTRMEDWLTAKLAYEGLPSKTYLSKTLAQYTSKTCSNCGFTITSADYDRVLEKLKKTATGWMTTINGKELKVEGQITYYNRYKRQNVVKDLSVELDRLSEESVNNDISSWTKGRSGEALSLLKKRFSHRPVQEKFVCLNCGFETHADEQAALNIARSWLFLRSQEYKKYQTNKTTGNTDKRAFVETWQSFYRKKLKEVWKPAV

SEQ ID NO: 30889 - protein, 978 aa, synthetic construct
  REGION 1..978: note = engineered CasX variant
QEIKRINKIRRRLVKDSNTKKAGKTGPMKTLLVRVMTPDLRERLENLRKKPENIPQPISNTSRANLNKLLTDYTEMKKAILHVYWEEFQKDPVGLMSRVAQPASKKIDQNKLKPEMDEKGNLTTAGFACSQCGQPLFVYKLEQVSEKGKAYTNYFGRCNVAEHEKLILLDQLKPEKDSDEAVTYSLGKFGQRALDFYSIHVTKESTHPVKPLAQIAGNRYASAPVGKALSDACMGTIASFLSKYQDIIIEHQKVVKGNQKRLESLRELAGKENLEYPSVTLPPQPHTKEGVDAYNEVIARVRMWVNLNLWQKLKLSRDDAKPLLRLKGFPSFPLVERQANEVDWWDMVCNVKKLINEKKEDGKVFWQNLAGYKRQEALRPYLSSEEDRKKGKKFARYQLGDLLLHLEKKHGEDWGKVYDEAWERIDKKVEGLSKHIKLEEERRSEDAQSKAALTDWLRAKASFVIEGLKEADKDEFCRCELKLQKWYGDLRGKPFAIEAENSILDISGFSKQYNCAFIWQKDGVKKLNLYLIINYFKGGKLRFKKIKPEAFEANRFYTVINKKSGEIVPMEVNFNFDDPNLIILPLAFGKRQGREFIWNDLLSLETGSLKLANGRVIEKTLYNRRTRQDEPALFVALTFERREVLDSSNIKPMNLIGVDRGENIPAVIALTDPEGCPLSRFKDSLGNPTHILRIGESYKEKQRTIQAKKEVEQRRAGGYSRKYASKAKNLADDMVRNTARDLLYYAVTQDAMLIFENLSRGFGRQGKRTFMAERQYTRMEDWLTAKLAYEGLPSKTYLSKTLAQYTSKTCSNCGFTITSADYDRVLEKLKKTATGWMTTINGKELKVEGQITYYNRYKRQNVVKDLSVELDRLSEESVNNDISSWTKGRSGEALSLLKKRFSHRPVQEKFVCLNCGFETHADEQAALNIARSWLFLRSQEYKKYQTNKTTGNTDKRAFVETWQSFYRKKLKEVWKPAV

SEQ ID NO: 30890 - protein, 978 aa, synthetic construct
  REGION 1..978: note = engineered CasX variant
QEIKRINKIRRRLVKDSNTKKAGKTGPMKTLLVRVMTPDLRERLENLRKKPENIPQPISNTSRANLNKLLTDYTEMKKAILHVYWEEFQKDPVGLMSRVAQPASKKIDQNKLKPEMDEKGNLTTAGFACSQCGQPLFVYKLEQVSEKGKAYTNYFGRCNVAEHEKLILLDQLKPEKDSDEAVTYSLGKFGQRALDFYSIHVTKESTHPVKPLAQIAGNRYASVPVGKALSDACMGTIASFLSKYQDIIIEHQKVVKGNQKRLESLRELAGKENLEYPSVTLPPQPHTKEGVDAYNEVIARVRMWVNLNLWQKLKLSRDDAKPLLRLKGFPSFPLVERQANEVDWWDMVCNVKKLINEKKEDGKVFWQNLAGYKRQEALRPYLSSEEDRKKGKKFARYQLGDLLLHLEKKHGEDWGKVYDEAWERIDKKVEGLSKHIKLEEERRSEDAQSKAALTDWLRAKASFVIEGLKEADKDEFCRCELKLQKWYGDLRGKPFAIEAENSILDISGFSKQYNCAFIWQKDGVKKLNLYLIINYFKGGKLRFKKIKPEAFEANRFYTVINKKSGEIVPMEVNFNFDDPNLIILPLAFGKRQGREFIWNDLLSLETGSLKLANGRVIEKTLYNRRTRQDEPALFVALTFERREVLDSSNIKPMNLIGVDRGENIPAVIALTDPEGCPLSRFKDSLGNPTHILRIGESYKEKQRTIQAKKEVEQRRAGGYSRKYASKAKNLADDMVRNTARDLLYYAVTQDAMLIFENLSRGFGRQGKRTFMAERQYTRMEDWLTAKLAYEGLPSKTYLSKTLAQYTSKTCSNCGFTITSADYDRVLEKLKKTATGWMTTINGKELKVEGQITYYNRYKRQNVVKDLSVELDRLSEESVNNDISSWTKGRSGEALSLLKKRFSHRPVQEKFVCLNCGFETHADEQAALNIARSWLFLRSQEYKKYQTNKTTGNTDKRAFVETWQSFYRKKLKEVWKPAV

SEQ ID NO: 30891 - protein, 978 aa, synthetic construct
  REGION 1..978: note = engineered CasX variant
QEIKRINKIRRRLVKDSNTKKAGKTGPMKTLLVRVMTPDLRERLENLRKKPENIPQPISNTSRANLNKLLTDYTEMKKAILHVYWEEFQKDPVGLMSRVAQPASKKIDQNKLKPEMDEKGNLTTAGFACSQCGQPLFVYKLEQVSEKGKAYTNYFGRCNVAEHEKLILLDQLKPEKDSDEAVTYSLGKFGQRALDFYSIHVTKESTHPVKPLAQIAGNRYASYPVGKALSDACMGTIASFLSKYQDIIIEHQKVVKGNQKRLESLRELAGKENLEYPSVTLPPQPHTSEGVDAYNEVIARVRMWVNLNLWQKLKLSRDDAKPLLRLKGFPSFPLVERQANEVDWWDMVCNVKKLINEKKEDGKVFWQNLAGYKRQEALRPYLSSEEDRKKGKKFARYQLGDLLLHLEKKHGEDWGKVYDEAWERIDKKVEGLSKHIKLEEERRSEDAQSKAALTDWLRAKASFVIEGLKEADKDEFCRCELKLQKWYGDLRGKPFAIEAENSILDISGFSKQYNCAFIWQKDGVKKLNLYLIINYFKGGKLRFKKIKPEAFEANRFYTVINKKSGEIVPMEVNFNFDDPNLIILPLAFGKRQGREFIWNDLLSLETGSLKLANGRVIEKTLYNRRTRQDEPALFVALTFERREVLDSSNIKPMNLIGVDRGENIPAVIALTDPEGCPLSRFKDSLGNPTHILRIGESYKEKQRTIQAKKEVEQRRAGGYSRKYASKAKNLADDMVRNTARDLLYYAVTQDAMLIFENLSRGFGRQGKRTFMAERQYTRMEDWLTAKLAYEGLPSKTYLSKTLAQYTSKTCSNCGFTITSADYDRVLEKLKKTATGWMTTINGKELKVEGQITYYNRYKRQNVVKDLSVELDRLSEESVNNDISSWTKGRSGEALSLLKKRFSHRPVQEKFVCLNCGFETHADEQAALNIARSWLFLRSQEYKKYQTNKTTGNTDKRAFVETWQSFYRKKLKEVWKPAV

SEQ ID NO: 30892 - protein, 978 aa, synthetic construct
  REGION 1..978: note = engineered CasX variant
QEIKRINKIRRRLVKDSNTKKAGKTGPMKTLLVRVMTPDLRERLENLRKKPENIPQPISNTSRANLNKLLTDYTEMKKAILHVYWEEFQKDPVGLMSRVAQPASKKIDQNKLKPEMDEKGNLTTAGFACSQCGQPLFVYKLEQVSEKGKAYTNYFGRCNVAEHEKLILLDQLKPEKDSDEAVTYSLGKFGQRALDFYSIHVTKESTHPVKPLAQIAGNRYASHPVGKALSDACMGTIASFLSKYQDIIIEHQKVVKGNQKRLESLRELAGKENLEYPSVTLPPQPHTSEGVDAYNEVIARVRMWVNLNLWQKLKLSRDDAKPLLRLKGFPSFPLVERQANEVDWWDMVCNVKKLINEKKEDGKVFWQNLAGYKRQEALRPYLSSEEDRKKGKKFARYQLGDLLLHLEKKHGEDWGKVYDEAWERIDKKVEGLSKHIKLEEERRSEDAQSKAALTDWLRAKASFVIEGLKEADKDEFCRCELKLQKWYGDLRGKPFAIEAENSILDISGFSKQYNCAFIWQKDGVKKLNLYLIINYFKGGKLRFKKIKPEAFEANRFYTVINKKSGEIVPMEVNFNFDDPNLIILPLAFGKRQGREFIWNDLLSLETGSLKLANGRVIEKTLYNRRTRQDEPALFVALTFERREVLDSSNIKPMNLIGVDRGENIPAVIALTDPEGCPLSRFKDSLGNPTHILRIGESYKEKQRTIQAKKEVEQRRAGGYSRKYASKAKNLADDMVRNTARDLLYYAVTQDAMLIFENLSRGFGRQGKRTFMAERQYTRMEDWLTAKLAYEGLPSKTYLSKTLAQYTSKTCSNCGFTITSADYDRVLEKLKKTATGWMTTINGKELKVEGQITYYNRYKRQNVVKDLSVELDRLSEESVNNDISSWTKGRSGEALSLLKKRFSHRPVQEKFVCLNCGFETHADEQAALNIARSWLFLRSQEYKKYQTNKTTGNTDKRAFVETWQSFYRKKLKEVWKPAV

SEQ ID NO: 30893 - protein, 978 aa, synthetic construct
  REGION 1..978: note = engineered CasX variant
QEIKRINKIRRRLVKDSNTKKAGKTGPMKTLLVRVMTPDLRERLENLRKKPENIPQPISNTSRANLNKLLTDYTEMKKAILHVYWEEFQKDPVGLMSRVAQPASKKIDQNKLKPEMDEKGNLTTAGFACSQCGQPLFVYKLEQVSEKGKAYTNYFGRCNVAEHEKLILLDQLKPEKDSDEAVTYSLGKFGQRALDFYSIHVTKESTHPVKPLAQIAGNRYASSPVGKALSDACMGTIASFLSKYQDIIIEHQKVVKGNQKRLESLRELAGKENLEYPSVTLPPQPHTSEGVDAYNEVIARVRMWVNLNLWQKLKLSRDDAKPLLRLKGFPSFPLVERQANEVDWWDMVCNVKKLINEKKEDGKVFWQNLAGYKRQEALRPYLSSEEDRKKGKKFARYQLGDLLLHLEKKHGEDWGKVYDEAWERIDKKVEGLSKHIKLEEERRSEDAQSKAALTDWLRAKASFVIEGLKEADKDEFCRCELKLQKWYGDLRGKPFAIEAENSILDISGFSKQYNCAFIWQKDGVKKLNLYLIINYFKGGKLRFKKIKPEAFEANRFYTVINKKSGEIVPMEVNFNFDDPNLIILPLAFGKRQGREFIWNDLLSLETGSLKLANGRVIEKTLYNRRTRQDEPALFVALTFERREVLDSSNIKPMNLIGVDRGENIPAVIALTDPEGCPLSRFKDSLGNPTHILRIGESYKEKQRTIQAKKEVEQRRAGGYSRKYASKAKNLADDMVRNTARDLLYYAVTQDAMLIFENLSRGFGRQGKRTFMAERQYTRMEDWLTAKLAYEGLPSKTYLSKTLAQYTSKTCSNCGFTITSADYDRVLEKLKKTATGWMTTINGKELKVEGQITYYNRYKRQNVVKDLSVELDRLSEESVNNDISSWTKGRSGEALSLLKKRFSHRPVQEKFVCLNCGFETHADEQAALNIARSWLFLRSQEYKKYQTNKTTGNTDKRAFVETWQSFYRKKLKEVWKPAV

SEQ ID NO: 30894 - protein, 978 aa, synthetic construct
  REGION 1..978: note = engineered CasX variant
QEIKRINKIRRRLVKDSNTKKAGKTGPMKTLLVRVMTPDLRERLENLRKKPENIPQPISNTSRANLNKLLTDYTEMKKAILHVYWEEFQKDPVGLMSRVAQPASKKIDQNKLKPEMDEKGNLTTAGFACSQCGQPLFVYKLEQVSEKGKAYTNYFGRCNVAEHEKLILLDQLKPEKDSDEAVTYSLGKFGQRALDFYSIHVTKESTHPVKPLAQIAGNRYASTPVGKALSDACMGTIASFLSKYQDIIIEHQKVVKGNQKRLESLRELAGKENLEYPSVTLPPQPHTSEGVDAYNEVIARVRMWVNLNLWQKLKLSRDDAKPLLRLKGFPSFPLVERQANEVDWWDMVCNVKKLINEKKEDGKVFWQNLAGYKRQEALRPYLSSEEDRKKGKKFARYQLGDLLLHLEKKHGEDWGKVYDEAWERIDKKVEGLSKHIKLEEERRSEDAQSKAALTDWLRAKASFVIEGLKEADKDEFCRCELKLQKWYGDLRGKPFAIEAENSILDISGFSKQYNCAFIWQKDGVKKLNLYLIINYFKGGKLRFKKIKPEAFEANRFYTVINKKSGEIVPMEVNFNFDDPNLIILPLAFGKRQGREFIWNDLLSLETGSLKLANGRVIEKTLYNRRTRQDEPALFVALTFERREVLDSSNIKPMNLIGVDRGENIPAVIALTDPEGCPLSRFKDSLGNPTHILRIGESYKEKQRTIQAKKEVEQRRAGGYSRKYASKAKNLADDMVRNTARDLLYYAVTQDAMLIFENLSRGFGRQGKRTFMAERQYTRMEDWLTAKLAYEGLPSKTYLSKTLAQYTSKTCSNCGFTITSADYDRVLEKLKKTATGWMTTINGKELKVEGQITYYNRYKRQNVVKDLSVELDRLSEESVNNDISSWTKGRSGEALSLLKKRFSHRPVQEKFVCLNCGFETHADEQAALNIARSWLFLRSQEYKKYQTNKTTGNTDKRAFVETWQSFYRKKLKEVWKPAV

SEQ ID NO: 30895 - protein, 978 aa, synthetic construct
  REGION 1..978: note = engineered CasX variant
QEIKRINKIRRRLVKDSNTKKAGKTGPMKTLLVRVMTPDLRERLENLRKKPENIPQPISNTSRANLNKLLTDYTEMKKAILHVYWEEFQKDPVGLMSRVAQPASKKIDQNKLKPEMDEKGNLTTAGFACSQCGQPLFVYKLEQVSEKGKAYTNYFGRCNVAEHEKLILLDQLKPEKDSDEAVTYSLGKFGQRALDFYSIHVTKESTHPVKPLAQIAGNRYASAPVGKALSDACMGTIASFLSKYQDIIIEHQKVVKGNQKRLESLRELAGKENLEYPSVTLPPQPHTSEGVDAYNEVIARVRMWVNLNLWQKLKLSRDDAKPLLRLKGFPSFPLVERQANEVDWWDMVCNVKKLINEKKEDGKVFWQNLAGYKRQEALRPYLSSEEDRKKGKKFARYQLGDLLLHLEKKHGEDWGKVYDEAWERIDKKVEGLSKHIKLEEERRSEDAQSKAALTDWLRAKASFVIEGLKEADKDEFCRCELKLQKWYGDLRGKPFAIEAENSILDISGFSKQYNCAFIWQKDGVKKLNLYLIINYFKGGKLRFKKIKPEAFEANRFYTVINKKSGEIVPMEVNFNFDDPNLIILPLAFGKRQGREFIWNDLLSLETGSLKLANGRVIEKTLYNRRTRQDEPALFVALTFERREVLDSSNIKPMNLIGVDRGENIPAVIALTDPEGCPLSRFKDSLGNPTHILRIGESYKEKQRTIQAKKEVEQRRAGGYSRKYASKAKNLADDMVRNTARDLLYYAVTQDAMLIFENLSRGFGRQGKRTFMAERQYTRMEDWLTAKLAYEGLPSKTYLSKTLAQYTSKTCSNCGFTITSADYDRVLEKLKKTATGWMTTINGKELKVEGQITYYNRYKRQNVVKDLSVELDRLSEESVNNDISSWTKGRSGEALSLLKKRFSHRPVQEKFVCLNCGFETHADEQAALNIARSWLFLRSQEYKKYQTNKTTGNTDKRAFVETWQSFYRKKLKEVWKPAV

SEQ ID NO: 30896 - protein, 978 aa, synthetic construct
  REGION 1..978: note = engineered CasX variant
QEIKRINKIRRRLVKDSNTKKAGKTGPMKTLLVRVMTPDLRERLENLRKKPENIPQPISNTSRANLNKLLTDYTEMKKAILHVYWEEFQKDPVGLMSRVAQPASKKIDQNKLKPEMDEKGNLTTAGFACSQCGQPLFVYKLEQVSEKGKAYTNYFGRCNVAEHEKLILLDQLKPEKDSDEAVTYSLGKFGQRALDFYSIHVTKESTHPVKPLAQIAGNRYASVPVGKALSDACMGTIASFLSKYQDIIIEHQKVVKGNQKRLESLRELAGKENLEYPSVTLPPQPHTSEGVDAYNEVIARVRMWVNLNLWQKLKLSRDDAKPLLRLKGFPSFPLVERQANEVDWWDMVCNVKKLINEKKEDGKVFWQNLAGYKRQEALRPYLSSEEDRKKGKKFARYQLGDLLLHLEKKHGEDWGKVYDEAWERIDKKVEGLSKHIKLEEERRSEDAQSKAALTDWLRAKASFVIEGLKEADKDEFCRCELKLQKWYGDLRGKPFAIEAENSILDISGFSKQYNCAFIWQKDGVKKLNLYLIINYFKGGKLRFKKIKPEAFEANRFYTVINKKSGEIVPMEVNFNFDDPNLIILPLAFGKRQGREFIWNDLLSLETGSLKLANGRVIEKTLYNRRTRQDEPALFVALTFERREVLDSSNIKPMNLIGVDRGENIPAVIALTDPEGCPLSRFKDSLGNPTHILRIGESYKEKQRTIQAKKEVEQRRAGGYSRKYASKAKNLADDMVRNTARDLLYYAVTQDAMLIFENLSRGFGRQGKRTFMAERQYTRMEDWLTAKLAYEGLPSKTYLSKTLAQYTSKTCSNCGFTITSADYDRVLEKLKKTATGWMTTINGKELKVEGQITYYNRYKRQNVVKDLSVELDRLSEESVNNDISSWTKGRSGEALSLLKKRFSHRPVQEKFVCLNCGFETHADEQAALNIARSWLFLRSQEYKKYQTNKTTGNTDKRAFVETWQSFYRKKLKEVWKPAV

SEQ ID NO: 30897 - protein, 978 aa, synthetic construct
  REGION 1..978: note = engineered CasX variant
QEIKRINKIRRRLVKDSNTKKAGKTGPMKTLLVRVMTPDLRERLENLRKKPENIPQPISNTSRANLNKLLTDYTEMKKAILHVYWEEFQKDPVGLMSRVAQPASKKIDQNKLKPEMDEKGNLTTAGFACSQCGQPLFVYKLEQVSEKGKAYTNYFGRCNVAEHEKLIKLDQLKPEKDSDEAVTYSLGKFGQRALDFYSIHVTKESTHPVKPLAQIAGNRYASGPVGKALSDACMGTIASFLSKYQDIIIEHQKVVKGNQKRLESLRELAGKENLEYPSVTLPPQPHTSEGVDAYNEVIARVRMWVNLNLWQKLKLSRDDAKPLLRLKGFPSFPLVERQANEVDWWDMVCNVKKLINEKKEDGKVFWQNLAGYKRQEALRPYLSSEEDRKKGKKFARYQLGDLLLHLEKKHGEDWGKVYDEAWERIDKKVEGLSKHIKLEEERRSEDAQSKAALTDWLRAKASFVIEGLKEADKDEFCRCELKLQKWYGDLRGKPFAIEAENSILDISGFSKQYNCAFIWQKDGVKKLNLYLIINYFKGGKLRFKKIKPEAFEANRFYTVINKKSGEIVPMEVNFNFDDPNLIILPLAFGKRQGREFIWNDLLSLETGSLKLANGRVIEKTLYNRRTRQDEPALFVALTFERREVLDSSNIKPMNLIGVDRGENIPAVIALTDPEGCPLSRFKDSLGNPTHILRIGESYKEKQRTIQAKKEVEQRRAGGYSRKYASKAKNLADDMVRNTARDLLYYAVTQDAMLIFENLSRGFGRQGKRTFMAERQYTRMEDWLTAKLAYEGLPSKTYLSKTLAQYTSKTCSNCGFTITSADYDRVLEKLKKTATGWMTTINGKELKVEGQITYYNRYKRQNVVKDLSVELDRLSEESVNNDISSWTKGRSGEALSLLKKRFSHRPVQEKFVCLNCGFETHADEQAALNIARSWLFLRSQEYKKYQTNKTTGNTDKRAFVETWQSFYRKKLKEVWKPAV

SEQ ID NO: 30898 - protein, 977 aa, synthetic construct
  REGION 1..977: note = engineered CasX variant
QEIKRINKIRRRLVKDSNTKKAGKTGPMKTLLVRVMTPDLRERLENLRKKPENIPQPISNTSRANLNKLLTDYTEMKKAILHVYWEEFQKDPVGLMSRVAQPASKKIDQNKLKPEMDEKGNLTTAGFACSQCGQPLFVYKLEQVSEKGKAYTNYFGRCNVAEHEKLILLDQLKPEKDSDEAVTYSLGKFGQRALDFYSIHVTKESTHPVKPLAQIAGNRYASPVGKALSDACMGTIASFLSKYQDIIIEHQKVVKGNQKRLESLRELAGKENLEYPSVTLPPQPHTSEGVDAYNEVIARVRMWVNLNLWQKLKLSRDDAKPLLRLKGFPSFPLVERQANEVDWWDMVCNVKKLINEKKEDGKVFWQNLAGYKRQEALRPYLSSEEDRKKGKKFARYQLGDLLLHLEKKHGEDWGKVYDEAWERIDKKVEGLSKHIKLEEERRSEDAQSKAALTDWLRAKASFVIEGLKEADKDEFCRCELKLQKWYGDLRGKPFAIEAENSILDISGFSKQYNCAFIWQKDGVKKLNLYLIINYFKGGKLRFKKIKPEAFEANRFYTVINKKSGEIVPMEVNFNFDDPNLIILPLAFGKRQGREFIWNDLLSLETGSLKLANGRVIEKTLYNRRTRQDEPALFVALTFERREVLDSSNIKPMNLIGVDRGENIPAVIALTDPEGCPLSRFKDSLGNPTHILRIGESYKEKQRTIQAKKEVEQRRAGGYSRKYASKAKNLADDMVRNTARDLLYYAVTQDAMLIFENLSRGFGRQGKRTFMAERQYTRMEDWLTAKLAYEGLPSKTYLSKTLAQYTSKTCSNCGFTITSADYDRVLEKLKKTATGWMTTINGKELKVEGQITYYNRYKRQNVVKDLSVELDRLSEESVNNDISSWTKGRSGEALSLLKKRFSHRPVQEKFVCLNCGFETHADEQAALNIARSWLFLRSQEYKKYQTNKTTGNTDKRAFVETWQSFYRKKLKEVWKPAV

SEQ ID NO: 30899 - protein, 978 aa, synthetic construct
  REGION 1..978: note = engineered CasX variant
QEIKRINKIRRRLVKDSNTKKAGKTGPMKTLLVRVMTPDLRERLENLRKKPENIPQPISNTSRANLNKLLTDYTEMKKAILHVYWEEFQKDPVGLMSRVAQPASKKIDQNKLKPEMDEKGNLTTAGFACSQCGQPLFVYKLEQVSEKGKAYTNYFGRCNVAEHEKLILLDQLKPEKDSDEAVTYSLGKFGQRALDFYSIHVTKESTHPVKPLAQIAGNRYASYPVGKALSDACMGTIASFLSKYQDIIIEHQKVVKGNQKRLESLRELAGKENLEYPSVTLPPQPHTKEGLDAYNEVIARVRMWVNLNLWQKLKLSRDDAKPLLRLKGFPSFPLVERQANEVDWWDMVCNVKKLINEKKEDGKVFWQNLAGYKRQEALRPYLSSEEDRKKGKKFARYQLGDLLLHLEKKHGEDWGKVYDEAWERIDKKVEGLSKHIKLEEERRSEDAQSKAALTDWLRAKASFVIEGLKEADKDEFCRCELKLQKWYGDLRGKPFAIEAENSILDISGFSKQYNCAFIWQKDGVKKLNLYLIINYFKGGKLRFKKIKPEAFEANRFYTVINKKSGEIVPMEVNFNFDDPNLIILPLAFGKRQGREFIWNDLLSLETGSLKLANGRVIEKTLYNRRTRQDEPALFVALTFERREVLDSSNIKPMNLIGVDRGENIPAVIALTDPEGCPLSRFKDSLGNPTHILRIGESYKEKQRTIQAKKEVEQRRAGGYSRKYASKAKNLADDMVRNTARDLLYYAVTQDAMLIFENLSRGFGRQGKRTFMAERQYTRMEDWLTAKLAYEGLPSKTYLSKTLAQYTSKTCSNCGFTITSADYDRVLEKLKKTATGWMTTINGKELKVEGQITYYNRYKRQNVVKDLSVELDRLSEESVNNDISSWTKGRSGEALSLLKKRFSHRPVQEKFVCLNCGFETHADEQAALNIARSWLFLRSQEYKKYQTNKTTGNTDKRAFVETWQSFYRKKLKEVWKPAV

SEQ ID NO: 30900 - protein, 978 aa, synthetic construct
  REGION 1..978: note = engineered CasX variant
QEIKRINKIRRRLVKDSNTKKAGKTGPMKTLLVRVMTPDLRERLENLRKKPENIPQPISNTSRANLNKLLTDYTEMKKAILHVYWEEFQKDPVGLMSRVAQPASKKIDQNKLKPEMDEKGNLTTAGFACSQCGQPLFVYKLEQVSEKGKAYTNYFGRCNVAEHEKLILLDQLKPEKDSDEAVTYSLGKFGQRALDFYSIHVTKESTHPVKPLAQIAGNRYASHPVGKALSDACMGTIASFLSKYQDIIIEHQKVVKGNQKRLESLRELAGKENLEYPSVTLPPQPHTKEGLDAYNEVIARVRMWVNLNLWQKLKLSRDDAKPLLRLKGFPSFPLVERQANEVDWWDMVCNVKKLINEKKEDGKVFWQNLAGYKRQEALRPYLSSEEDRKKGKKFARYQLGDLLLHLEKKHGEDWGKVYDEAWERIDKKVEGLSKHIKLEEERRSEDAQSKAALTDWLRAKASFVIEGLKEADKDEFCRCELKLQKWYGDLRGKPFAIEAENSILDISGFSKQYNCAFIWQKDGVKKLNLYLIINYFKGGKLRFKKIKPEAFEANRFYTVINKKSGEIVPMEVNFNFDDPNLIILPLAFGKRQGREFIWNDLLSLETGSLKLANGRVIEKTLYNRRTRQDEPALFVALTFERREVLDSSNIKPMNLIGVDRGENIPAVIALTDPEGCPLSRFKDSLGNPTHILRIGESYKEKQRTIQAKKEVEQRRAGGYSRKYASKAKNLADDMVRNTARDLLYYAVTQDAMLIFENLSRGFGRQGKRTFMAERQYTRMEDWLTAKLAYEGLPSKTYLSKTLAQYTSKTCSNCGFTITSADYDRVLEKLKKTATGWMTTINGKELKVEGQITYYNRYKRQNVVKDLSVELDRLSEESVNNDISSWTKGRSGEALSLLKKRFSHRPVQEKFVCLNCGFETHADEQAALNIARSWLFLRSQEYKKYQTNKTTGNTDKRAFVETWQSFYRKKLKEVWKPAV
